United States Patent Application Publication US 2015/0376612 A1 - sequence listing, part 55

SEQ ID NO: 129778 - DNA, 1672 bp, Homo sapiens
tattgactcaaattctctgcttttcctaccatactggtggcttaaaggagctgacttgaatgaatcctgaagtgcccagagtcttacagggggctagcaggtctgttctgctgacacatcttttagacaaggaagggtctgtatttagagattaggatgggggtttgctatattgtatgattgagtccctgaggagtggagaagttgggaaggttgagctgtgtttcttctacctccagagatagtcttatcattttcaaattcagcagcatcaccaccggggaaagtgacagtgggatatcatcttcactggggatgacagggaagatgacaggaacatgatgctgaatttgaaaatggtaagactatctctggaggtagaagacagtggaaatgattgggagggagggaagatgggactctcgattgaatctctcacaggaaggagtttggaaatcaaaagcaagatttcagtgattgagtgctggggaggagccttgaagggcgaagagccagtgatgaagcgacccctggaagagatggaggaaaataggagagtgtggggtcaggatggagagttattttccagagaggaggaaaatcagttttgttttttttttttctgtctggagggaaagaatgtactagagaaaaatggtcgtagaaattcatataaagtggctttggacttgataaattagatagccatgtgaattgtttggcttgagagggggaataagggtgagacactgggtaatgctgagaggtgacattttactgagtgcctaccatttgccacatgctactaaccaccttatgtgaatttaattttatcctcagtacagccccttagaggcaatgcgattattgttcgcattttgcagataaattaactcaggttccagggagttcacactgtcttatttgtggagaaactaagcattgaatccaggtctgtctgatgccagggcccttgcgtcagcccttgtggtttgctgccaaggagagaagagaaggactgaaaattcctctatcgcttgcttacatattcaactcttactgaacaaaacatcttattcttactttctaggggacagatgatttctgctgaagattgtgagtttattcagaggtttgaaatgaaacgaagccctgaagagaagcaagagatgcttcaaactgaaggcagccaggtgatgaataaacattatataatgaacacttccccgtgtcatccaaaagtttagaaaaatcttagtgattataagtgacttccagttttcttgctaatttggaaagaacgttatattgagcatgtttaccttcatccttttctgtatttctgaatattttcttagaatatacacctggaagacaaatttctggaaaagaagttactgtttcagagtatgttaagttttaaaagttgcttaacttttctttttttaagagaattttttccacttggtattcttactagtaatgtttgaaatacctaatataattgaaaatgtttgaatttgctaagttaaaagggatatcactttgatgacatgggattacattattttcctgttgatttattaagtatttatatgtcctttgaaatttttttggcggtggcattctttttattttaatatataaggttttgttactttttgataaacag

SEQ ID NO: 129779 - DNA, 1544 bp, Homo sapiens
ctgtccctgaaggaactaaaactctagtagggaagtcagatgtattaatagatcattttaattcactatttttttttttttttgagacagagtctcactctgttgcccaggctggagtacagtggggcagtcttggctcactgcatcctccgcctcccgggttcaagcagttctccttcctcagcctcccgagtagctgggattacaggcacctgacaccttgcccgcctaatttttttgtatttttagtagagacagggtttcaacatgttggccaggctggtctcgaactcctgacctcgtgatctgcccctcttggcctcccaaagtgctgggattacaggcgtgagccaccgtgcccggctctaattcagtatgttaactgtggcaatagaaagatgcacagggtctggcaggtgcacataaaaaagacaagtaattctaccccttggaaattttcctgaaggggctggtccctgaactgagtttttgaggatgatgggtatttagccatgtggcaagtaggagcagccttgggaatagaacagataatgtgagcaaaggcagggaagcaaaaacagcacactgggtgggagtcatacatgttttggaggcaggcaatgcagagagctgaggctagagaggcagccaggggccgatcgtgaagatgctgtgtgtgggtgtgtggttggaaggagtttggacttgatcctatcagtcagtgcttttcaagctgatttttaagctgtgaagcccatgattgatatgaagttagcatgtaaaacagatgaaaatgatagaatggaggtgggagtgtgtgtcccagagccctctttttgagaccattcaccattttccaaggagctgtaggtgttggaaaccaatgaatcttgtagccgggagttagaagaccatatctgcctcttgattgaattgttctactagcagcatgaagggtgagtttgtaggtgataagtctagaggtagagagaagctatagcagtaaccaaggtattggaatagatagaattggttagattgagagagtcttagtgattgatttggtgtgtgggggtgaaagagaagtcttggatgacttctggattcctactttaaggaactgggttattgtggggccactgactgaaggacaggaggaggggagacttgctgatgttttctctgttcatcagtgtttgtgtaattgtttaaattccctgtgaaattaggattctgagctctgtttcctaatttctttagtccagagtgcatttagactagaggacagggagttttatgtttataaagcctggatctgtttatagcctacatagaataatattgttgatcataaagcactggtggactggccagagctccgcctaacgttggcatttggaatgtttgtagttacatggagcttttaaaattgctttatttctgttcttcgttacccatggtctatgacatgttgtgttttcccgttttcctatatatctgtcttttgttctgatgtccatctcacaaatttcttttgtaaaacc

SEQ ID NO: 129780 - DNA, 1028 bp, Homo sapiens
taatttgagtaattttcgaaaggacttagaatttttaatgtgccacttcaaaatgatgcttagtaaatgtttataaaactagccttatccgtactattcatattcttattgtttctctatgagaaaagttaaccacaattgtataaatttacaatttttcccatatttatacctattctatttaatcatgatttctgatttcagtatattaggtgattgctttaaaaatcttactgcagtgttagtgccaataatgaaaaaaatttttctagaaaagcaaaagcctaaagaactcttttatggagcagtggacaatatttgaaatataatgatactttcagacttaggacatttaatatttgagttgaatgcctggggagattaaagtgatcacgatattcataatcataatattaatagttgtaaaaaaaagaaacacctcgtattctgtttttaccttgcatcaaaattgaagatttgttgaaagacattcaagattacgaagtttagatgaccaaaatggatatccgaggtgctgtggatgctgctgtccccaccaatattattgctgccaaggctgcagaagttcgtgcaaacaaagtcaactggcaatcctatcttcagtaagtaccaatttgctgtgaatcatggacagtcatatgcttttgcatcagactttttcatggtcatgcttctatgagagaaatacagggaaaatactgaaaaatgtggaagaaacacttcctcttcagaataattagctgtcttagggagttaagtgtagtggggtggaaacagcttggcgccctagtggggaagcagagcggcttatggtgcttttgaccttctctggctgcctggggaagtacttttggaataagtgggaaacataggaggaatgtccttgggctaacggagggaggaaggggatgaggggcaaaacctgctagactggtctgatatgccctggcaatcagcatgggggcaggtggcctttttagagtggtgcatacaactaataagaagca

SEQ ID NO: 129781 - DNA, 1051 bp, Homo sapiens
ttaatatatagaaatagttagattctactctaaagctgagatgaaaatagtaaacctggaggcggagtagcaggactctcctgacctgggccaggaggacagcactgatgtgtgtgtccccaaggccttggacttatctcagtctcacctgtcatctcactcttattatctcagcctttagttccttactttgatgacagccagcttcagtgacagccggctttgctctctgacctccgtattctgaggactgctctccttaccatttgtgggcagatttaagtcaaagcataagagtgaggggatctagttatgcaacaacctgaaatttatcaaattctcactagagctaagtttttgccaaacacataagttgccttcggccccttgagtgactggttaggcagtgctgttcttttggcaaaatgaaatacttattaacaaaaacaccagaacatcataaccagaccacatagaataaatttggcttaaaggatgaaagagtactaagaagtataaaaaggataaaattatgcaaaatctagtaaagcgaaaaactcacccgagcatgttaaacaaatgtcataaactaaacaaaaggctttatttcttttctttatcttctagtgatctgtgttcaaaatcataaaggcatttatgaaaagtataaatactaacttaggtagataaaacatttgttaaaatctatcaagtctggtctgataattaggaggctacatatagcttatattttcttaattgaaacaggtcccctatgtgccattttacccaatacgttagtatggaggtttttgtcctgggtctctgtgtccaactgccttgttttgtcttactgaaaggttataaatgctatggttccctgcgaagagtccaaagcgcataaccactgaacatttcaagtctgaaatttcttcaattttagatctgtttgttcaacatatctactatttgacacttcacaccaagggggagggagatctaaaattcagtagatattttggtgcaaactgtagaaaactaaaacctcgag

SEQ ID NO: 129782 - DNA, 1035 bp, Homo sapiens
acctttgtaagcatcttactggctgtgtaatatttcatcagatggatatacttttactttatgtcattacttccctgttggatatttgtttttagtgttgtgctgttataaaattatactctttaaacatcctttgtatttttgtgtttttaattgccatcttagaaatagattagatatcaagtttctaggttacagacaatgctgcctaacttttagaaaggttgttggagttatatttgtcagactgagatattctcaatttttacatcttcttaatttgtaagagaatattgacatatgtttaaatttattcatttctgtgcttcttactgatgaaattgtttttgagatccttattcgaaataacttactgatgaatttttaaaatatttattagctatttataaaaaatataaggtgtgactttagaggattttcccacttatctgggatatattaaacaggaaagacaaagaaggacttaggaaaatgaagtttggaagtgcgtgctctgttgacattatttagcttatttgaacttgtttcagacttctattcattttattgtggtaccattatatttattaaatatatatctttatgtataacattatttgggttgggttttttaatagtactgcaaaaagtacatttaatttaattttgctgcaggtacaaacccgtagtgctgatgaaccaatgacaacatttgttgtctgtaatgaatgtggaaatcgatggaaggtatggactctcttggattcatattatatactcacttaaaatagaaagatttcttctggtcttttcataggtctgcctagatatctaaatatatacagatatgctcacactatacagtactcttgtactccctgactacttgtaatggaatataccatcttgttaccctactagaaataaagagtattaacttgactttaccacctttatttgttttggtgcaggaaatggggagtgaatcttaactgttcaattattatatcactgtcctatttatactatattcat

SEQ ID NO: 129783 - DNA, 1057 bp, Homo sapiens
aatttaagttgtgcaaaagggcatggaaagcacacacatataaatgtgaagacttctcagttagggggacctcagagcacacacagtcacctgagctcattatcccagaggaagcgtgttcttgctaagcaccgggaaagggctccaggagaggggtactgtgtgtgagtaggggcagggagcatctaggtggctgtgtaacatgagattgtcctggttgaggaaatggccttattaggaagggagctgttccagggttcagctttggcagtggcctcttctgcagagaagaagagcctgctgaggtagctcctgctgagctgggggaggagaggaaccctcacggccatgctgaatggtctcttctcagagaccctgtgggaactgtgtgaccagagagactttaggatccttagtagaattcggatttgggcaagtaaagcttgaataagttcaagctccttttcaaacatgtgctttctcatgttgagtacttgagttactttttgaaaccctgttgacttgcatactgctggcactaaacatttaggaaataaaacatgactaggccgggcgcggtggctcacgcctataatcccagcactttgagaggccgagacgggtggatcacctgaggtcaggagtttgagaccagcctggccaacatggtgaaaccccgtctctactaaaaatacaaaaattagccgggcatggtggcaggcgcttataatcgcagcagctactcgggaggctgaggtaggagaactgcttgaacccgggaggtggaggttgcagtgagctgaggtccagcctgggtgacagagtgagactccttctacccaccttcaaaacaaacaactactttacagtgtaaaagtaatatcactattattcgccaattacagctcaaggaattagatatagtaccttgtttttaacatactctaaattggaaacagttgtcgtgaattgcttagaaatttcaggtttgtttttttttttaagatggagtgtccctctgtcgcccaggctggagtgtagtgacctgatctcagct

SEQ ID NO: 129784 - DNA, 1061 bp, Homo sapiens
ttatatatgggagcttaatttaatttgaaagtatccagtcttaacatgtaacatttggatttaaagttttatatacaggaatatttgttattttatacgaattcatcctttttcttttctctcattctgcaccatggctagtttgacctgattttctccttactctgccctttctactttgatttcctgactgtctcttttattttttctgcctagtttatttccttctatcctcttgcatatttgtatagcagtcttctgagtgtgtctgtatatgtgattggcagattaactaaatgatttctttgcattgaagcctgagtcacaggagactagacagttctttctgtaactttctctactctgctggagcagccagaatttatggagttacgaaaaatgaattgcctgctagatcagttacttcctgtgcctgagggatcaggaatcatcagtgcaggagcactgtgggtatcaggtgaagcccagaaaagaagtctagcgggcagtgaagtgatcagattctaacgaactaaactgaacggtttctttatgtcaggcaaatggggtttaagaaataggaatgcagtttaattacctggtattagaattttcttttaatctgttacaataatttgacaattctttatgcctatttttagatgactacattgcaattggagctgatgaggaagaattaggatctcaaattgaagaagatatcctttgtgtgtatattcataattgttttttttaataagtaatatttattgaacatatgcaaatgccaggcacggttttacatgcagtagtccttccaatgaattaggtgctctcatcccattttacagagagaaaacagaagcagaagaggattggtcattgttctagatcacacagcctgacactgacagggctgggattccattgtagggaatttggctccaagcccatgaccttgaccaccacgctagactttttccttcatgttgaagctgaatgaactagaaacagcgaagtttaaaaggacctggctctttggaaactgaaacatataaatc

SEQ ID NO: 129785 - DNA, 1328 bp, Homo sapiens
tctcaactttgaagggttgttagaaagattgatgaatgtggatgctctaagcataattctaggcacgtaattatcacaggttaaattttacctgtattttgtgaagtgcattttaatgtctctgattatatgctggttcctggcaaaataaagccttttaaacctggataggtggtagtttttgtttggatatcctcataataatttgcagctggtgctctatgaagtaatccatgtagaggaatgtatagaaacaaagaaatgcatgtattagtcatgattgcttcagcctgacttatatacaacattatatattttatcctcgtttatcttcacttctcccttgtggaaagattgattgcatttttctagttaaccagacttattacagtagtgaattttatgcttctagatcttgatgataagaacattaatgagtctagtgtttgatctgaagatgtatgtatcttaatataatttgctattataaggatccaaaaattgaagttttgaaattctaaaatagaaacaggaatctgggaaagaaaagaatgtaggtgaaatactaatttgtttaaaataaaattggtatacataatttttttgttattgccttgcagtccacaagaatcggaatgtcagttaatgctattcgcaagcagagtacagatgaggaagttacatctttggcaaagtctctcatcaaatcctggaaaaaattattaggtatcattgatcttcccttacatatatttatgatgttgtgatttattcaaatagttaatggttacattttatggttagttaatggttacatttttttcttagtgaatctagatatactgaaagcagtgcctcgtaataaaggcgaggggagttaatttgatctttagggtttttttgccttttaggccagtcaaatttggctttcttaacttttgacacaactggataaactctttcagtaagaagaattttctcttaaaggaaaggttgtggataccttttgaaatggtttttgaaattttttgacttacagaaaacttgcaaggatgattaaaagaatgccgtatcctttatccatatcatcaatttttaatatttgccatatttgttttatcatattctctctttttctttctctatttgcacacacacaaattatttttttcggaaccatttgaaagtaggttgaatatatcatgctcttttaccctttaaatacttgcgtgtatttccttactacaatcttatttttttatggaatcatagtataagaaatataggaaatttaacattggtatagtattttatggtttatgttcagg

SEQ ID NO: 129786 - DNA, 1120 bp, Homo sapiens
agtcccttttcacatgaatagtttgcaaatattttctcctgttcagcagattgtctctttaccctgttgtttcctttgctgtgcagaagcttttttttttttttttttttttttgagacacagtttcactctgtggcccaggatggagtgcagtggtacgacgtgcgacctcagccttctggattcaagcaattctcttgccttagcctccccagtagctgggattacgggcgcctgccgccatgcccagctaatttttgtatttttagtagagacggggtttcaccatgttggccaggctggtctcaaactcctgacctcgggtgatccaccatccttggcctcctgaagtgctgggattacaggcatgagtgtattttaatgttccatcaagaatgaaatataaaaataaaactttgataaaagtcaaagtgttaaaaaggaaacttaatatagccaataacatgaatatcgttattttctggttgatgttttttattatccacaagtgctttctttgatatttctattatattaattcagaatttagggaaaggtggtgggggtgtgtgaacatgattgagaaaaaaagtcacgtttattttcattaatggctaactgaaattgaatatttctttcagttgtgaaaacactaaaccacagttgtattaccagtatttacgactaaaactaaaataattcacaaatgttttaacttcagtttacttacattgtaaaagtattgaaattgctcattattgttgctgttctaccttatgctaggtcttaatgttttaataaggaagggcttggcacagtggctcgtgcctgtaatcccaacaccttgggagatcgaggctagaggattgcttgagcccagcagttcaagaccagcctgggcaacatagcaagactctgtcttgataaaaaagaaaaaaatacacacacacaaattggggagcatgaacattactatcttacatttaaaaatattttgtaattttatattatataattggtttgcttcataatcctatgtattttatttaatccatttttaacggattctgagaagggctccataagcttcaccagactgctagaaggatccatggtgcaa

SEQ ID NO: 129787 - DNA, 1538 bp, Homo sapiens
tttgggcacttcagcaaccagacattaacatttcttttttttgttttgttttttgtttttttgagacggagtctcgctctgtcgcccaggctggagtgcagtggcgcgatctcggctcactgcaacctccacttcctgggttcaagcagctctctgcctcagtctcctgagtagctgggattacaggcacccgccaccacgcccagctaatttttgtatttttagtagagacagggtttcactatcttggttagggtggtcttgaactcctgacctcgtgatccatccacctcggcctcccaaagtgttgggattacaggtgtgagccactgcgcccggccttaacatttctgtagtcagttgtaatagtcacattacgtggcatagagcacaaatagctttacatgtgttgtggttaggtttagctgccaaatgagtttacctatgagaaatctagaaatcttttgcttttcaaaggtttttggtctggaaatttgcagataagggatcgaagacttcatttactcacaacaatgtcatacctgtagaaatgcttgtttaataatacgttttaagtcagtgttagatttcttttccaacaactttaatgttttactgtttctagatgactaaataggaagaatttatagaattttaagattaggagagatctttaaacagcaaataattaaacattacttataataacgtgtcataatttctgttgaacttaaatttttatttatgaggtattgggttgaattgaaatgatgtaactctttgttaccagaataaaagctaatggttttattctggaaggccaagcctaatgtctgtcacctttaaatgaaaaattacatgactagaagcctttacttgattttatatctaagaaataaagtgatactatgagagtctttgctcgctttttcctttggcgtgttgaatgagggacgtgctgtggttctttctgtttttttggggggatagcgtgtatttcattgatttgtagggtgcctgttttcatacttaaacattttagaaagcaggataggtacacatatcattggccagatggccattgtaatgttctttcacaggcagaatgctaaacctagcatcagaacttgtggaatgagtgtcattggcttggaaggaaatctgagagaggatttctttctctttgaatcctgaggaaccaaatgactgtgaagagcattggaggtgaaaagcagctgtgcacactactacaaagccagccctagagctcacggcattagcttttttgtggattcttctatgaaatgctttgtcacttgtgttcttaaacagctctttgtggggtaaaaacagatactgttgaatctgagtcaaaaagttctgaatgtgaagtacttttagtaacagccaattttgttttacttatatgtatgtttttacatatgtaaaaggtgacgtggtaaaaacttcaactctaaaataattctttcaataagcaaaagtagaaagaagttataatgccaggcatggtggctcac

SEQ ID NO: 129788 - DNA, 1015 bp, Homo sapiens
ctgtcatatatgtacaccatattcttaactataaatccctattactccctcctttttacatctccttgaggagagggatgttcgtatcctacatggtcttgagtatactgagcacatagtacaagtatcatggtttataaaatcacttgttttctattaccagataggagcaccaacaatgtaataaaatagtgtgatagctgtagtttatctttcagccagtagtgtgaactaaatttggctctggaaattaaagaagagtctttctttctcttgcatcatctgtaggagatgctacaatctcatagacttggacatgtattcttttcttttctttttttttaaatagaggtgggatctcattctgttatccaggctggtctcgaacccctgggctcaagtgatcctcctgccttaggcctcccagagtgctgggattacaggctgagccattgtgcctggcctaggcttgacatttagagctaggtgatgcttggggaaggctaaaatacagcttcttgtttggtgatactagtcatctgaattcacaaaggagtgctgccactggcgcactgctggggaaagggcagcagtataagggtcaggcgactagttcatgaccttactacccgtcagtatgaccttgggcaagtcacttttcttttctgggtttaagtttcttttttttgtgtgtagttaagggtttgaaatagatgattaaagatttctgtttgttttaaaattccctgatgtcagaaagggtttcagtcttgctcactgctgtatccccagtacagtagagcttggtacatttgacattactggagtagatcttaccttttctagttagtaatcatagaaccttgtgcaagtttcttgacatatttcctcatctgtaaaatggagataatacctgcttctatagggtttatggtgaaggtggaattaaatctatgtgaagtatttaacaatgccaagcacatagcagcactcaaagtttgttgtcaccgaatta

SEQ ID NO: 129789 - DNA, 2657 bp, Homo sapiens
gttgtatgtaattctttatgaaagacacagcatagttaatgctatggatttagcgcataattcagtttgaagaatggtagaagctctgctttgtcactcatacttagttgtcagtaattgttcacttactgagacttctcagtgtaggcaccatcgcttctaaacttccctgccccccagtgtcttatattgttccagtataggaagatgcagaactagatactggatgggagctgtcatttcagtgtacaataatcatgataggaaatgtcctgaaatttctgttggagcctcatttctcttttgtcttatttaattgtagtaaaaatgtgatttcgcctttatgcataccatagatttgattagtggcattttagtgggaatttaatttctgacttacataactacctacctattaaattactttattccaaacaggaaatgatggatgtcaagcaattcattgataaactcctacctccaattgattgacgtcactaagaggccttgtgtagaagtacaccagcatcattgtagtagagtgtaaaccttttcccatgcccagtcttcaaatttctaatgttttgcagtgttaaaatgttttgcaaatacatgccaataacacagatcaaataatatctcctcatgagaaatttatgatcttttaagtttctatacatgtattcttataagacgacccaggatctactatattagaatagatgaagcaggtagcttcttttttctcaaatgtaattcagcaaaataatacagtactgccaccagattttttattacatcatttgaaaattagcagtatgcttaatgaaaatttgttcaggtataaatgagcagttaagatataaacaatttatgcatgctgtgacttagtctatggatttattccaaaattgcttagtcaccatgcagtgtctgtatttttatatatgtgttcatatatacataatgattataatacataataagaatgaggtggtattacattattcctaataatagggataatgctgtttattgtcaagaaaaagtaaaatcgttctcttcaattaatggcccttttattttgggaccaggcttttattttccctgatattatttctatttaatactcttttctctcaagaaaaaaaaaaaagtttgttttttctttattgtccttcatagcaggccaagtattgcctctctgcaatagacagctactgtcaatacatgctgtaatttgacattctgggtcacagatataaggtatttaaaatctatttatgctttatagagaaaccagacattaaaacttcatgcactacttatttcgaattactgtaccttatccaaatttacacctagctattaggatcttcaacccaggtaacaggaataattctgtggtttcatttttctgtaaacaactgaaagaataattagatcatattctagtatgttctgaaatatctttaagactgatcttaaaaactaacttctaagatgatttcatcttctcatagtatagagtttactttgtacacgtttgaaaccaactactgtagaagatgaggaatctattgtaattttttgctttattttcatctgccagtggacttatttgaaattttcactttagtcaaattattttttgtattagtttttgatgcagacataaaaatagcaatcattttaaattgtcaaaatttccagattactggtaaaaattatttgaaaacaaacttatgggtaataaaggctagtcagaaccctataccataaagtgtagttaccatacagattaatatgtagcaaaaatgtatgcttgatatttctcaactgtgttaatttttctgctgtattccagctgaccaaaacaatattaagaatgcatctttataaatgggtgctaattgataatggaaataatttagtaatggactatacaggatgttaataatgaagccatatgtttatgtctggatttaaaaattttaaacaatcatttactatgtcatttttctttaccttgaagaacataaactgttatttcacttctacaaatcagcaagatattatttatggcaagaaatattccattgaaatattgtgctgtaacatgggaaagtgtaaatgtttttcatggtttctatcaatgtgaaataaaatttaattctgacttttctgtgactttgagtattttaatatttggaatgttaacatttggaatgaatgtctataatgcaatggaggaaaataacaatgtacttaaaagaatatatattcagagagagaaattttgatgatggtgtggttgacttagaatggaaccaggcataagaaataatctcatgttattcagttttaattggctaaaaaaaaatttcccaaatttggttttcaatgtttctacctatttaagaagttttatttggtgtttatcttttgtctttttcttaactctttttaaattttattttattttattttatttttgagacagagtcccattctgtcacccaggctggggtgcagtggtgcgatctcggctcactgcaacctctgcctcccaggttcaagtgattctcctgcctcagcctcctaagtagctgggattacaggagcccaccaccatgcccagctaatttttgtatttt

SEQ ID NO: 129790 - DNA, 1050 bp, Homo sapiens
agcaagactctgtctttgggggaaaaaaaaaaaaaaagatagctgaataaaacagcaactcaaaatactaaaacaaccaaccaaacaaacaaaaaaaagctgaaaatataaagatggattaaaatataatctgcttggctgggtgcagtggctcacgcctgtaatcccagcactttcggaggccaaggcaggtggatcacaaggtcaggagattgagaccatcctgggtaacacagtgaaaccctgtctctactaaaaaatacaaaaaaattagctgggcgtggtggcacgtgcctgtaatcccagctacttgggaggctgaggcaggagaattgcttgaacctgggaggcagaggttgcagtgagctgagatcacgccactgcactccagcctgggcaacagagcaagactccgtctcaaaaaaactaaacgaaacaaaaaaatgtatatataatctgcttcaaggaactcattcactgggaagatatatattataatatgaggcaaggtgatcatacatcctatagaagtcaaagggatgtggtgagtatatggatgaaggaattttatttttttggccaaatgtaacttctaatatgttatatatatgcatatttatgtacaattttaaatgcctggcatagtgtcctatacttttacaaaaataaaactatttcttcttttgctttttgcagggtcctatcggtggtgctaatagagatatttctattctccagtgccacggggattgtgaccctttggttcccctgatgtttggttctcttacggtggaaaaactaaaaacattggtgaatccagccaatgtgacctttaaaacctatgaaggtatgatgcacagttcgtgtcaacaggtaggtgtctagaagcagtgatcagcgccatatttgtaacttttttcatgtgatattttcaagaaaagtaacatttgaatgcttggggatttaaatgagttaattcatattgagtcataagttagcagtcattagatgagtgtgtattcaacttaattcaacaaatatttactgatt

SEQ ID NO: 129791 - DNA, 1982 bp, Homo sapiens
agccaagatcgcaccactatactccagcctgggcaacagagctgagactctgtctcaaaaataataataataatgatccagaataacaagttcatgtgggagtctgtatatttgatattcattcattacagtatatagaaaccaactcaatacctcaagcaaggagtaagcaatgagtctgtggcatcctatcaaggaaactgaggaggaaaatgaggcaaggcctcaggaagtagctagaaattgaaaagcagttgggccttgctcaccatctctcatctcttgtttctttgcttgtctgtttcatttacctttccataaacaattggccatcttggcttttgcagcctatagcttttccagctcttgaatttacatgttacaggtgtagccacacagagagtgactggtggtcatcgaatcccatttccacagtgccaggagaaaacatcactgcctgggatgtgaaaggctctcgtgtactcatgtgttgcagtaacccatgggcatggtcagagtgatggggcttctggatgctggcaggagtacagcttccagaatgtgggatgttgtgagctgggtaggcagatactctgaaggtgtctgctaaatagttattattatcttaaattctcatttagaaagtaataccaatttaagggccaggcacggtggctcacacctgtaatcccaacactttgggaggctgaggcgcgtggatcacctgaggtcgggagtttgagaccagcctaaccaacatggagaaaccccgtctctaccaaaaatacaaaattagccgggtgtggtggtgcatgcctgtaatcccagctactcgggaggctgaggcaggagaatcgcttgaactcaggaggcggaggttgtggtgagccaagattgcaccattactctccagcctgggcaacaagagtgaaactccatctcaaaaaaaaaaaaaaaagtaataccaatttaagagcagattggattttatgcctaaaattctgcaaaggagaaaatataaattcagaatattcgtaaggcatgttgtaagtgcagcagtttcccatggtacaaactatgtctcgtcggaaaggaagtctgtatgttctctggtgtagagaaccgcatcctttaggacacggtggggtgtgtttgtatttccgatatttgcctgatttgatttgacaccagccaccaagtttgatttttttatggatatcattagtaacaagatattccctaaattgctgtgggcaagcatgtgtgttccattgactttccctgcttgtcttttcagggaggagctttatctttatatactgcccttaccacacagcagaaactggcaggtgtcactgcactcagttgctggcttccacttcgggcttcctttccacaggtaacttggttgatgcactcaacatgagattactgagctaaaggtagctagtagatattgttggagataaagtcatcttatttttttttattaataaactttattttttggagaagttctaaattcacagcaaaactgagcagaaggtacagagttactatctacctcctgtccccacacatgcacagcctccccaccatcagcatccccacctccacagccatgtttttgctgcagtcagtaatgctgcactgacacatcaccatcaccaagtcctccacttacagcactcatccttttttaaaaataattttcttagacttttgtgatgtattactaggccttatttctgtacgctatactgtctgtattgtggagtacatagaatggaattagaaagaaaccttattgtcacaaatcttatattagaaggatttgatacattttaggatatatatgaaaattaggactttttttaacatatagaaatcatacttatttttagaccaggtgcggtggctcatgcctgtaatcccagcactttgggaggctgaggcgggtggattacctcaggtcaggagtt

SEQ ID NO: 129792 - DNA, 1178 bp, Homo sapiens
tagacactttaattagatgtgatttgcaaacatttttcccactatgtaagttgtcttttcattttcttcatagtgtcctttgaaacacaacagttaattttgatgatttctaatttatctatttttttcttgtcggttgtgcttttgatgttatatctaagaaattgccagatctgaggtcacaaagatgtatgtgtgttttcttctagttttatagttttatctcttacatttaggtatttggtcagtgtttacatatggtatgaggtagcagtccaacttctttgtattacatgtggatatccacttgtcccagctacttttgttaaaaagactattccttccctgttgatttgtttcagaaataagtttgacagtaaatgtgaggttttatttctggattttcggttgatttatatgtctgtctgtactctagtactagtctttctgaatgttacttggtaggaatttttgagattaagaagtgtgagtcctctaattttgttctttttcaagatttttgttgttgttgttattctgggtctcttgagtttccatacaaattttagatcgggttctaatatgtgcaaagtcaggtggtattctgttaaagattgcattgactccatagatcaatttgagagtactgccgtctttaaaatattatatctcccagtccatgaaagtgggatatccttccatttatatagattttcttgtatttcttaatatgttttatagttttcagaaaaaagtctttaacatagctatttacacatatacacatgtgcatatacacaaaactcctatataatatcctggttatagttaatgttatgtaagtattgcagttaatactgttgttactaatctttttatatgtctttaacactttgggggaagtgggttgaaatagaaaaatagttaatagaaaagtatttaacagggggctgggcatggtggctcacgcctgtaattccagcactttgggaggctgaggcagacggatcatgaggtcaggagatcaagaccatcctggctaacacagtaaaaccccgtctctactaaaaatacaaaaaaaaaatttagctggtgtggtggcgggcgcctactcgggaggctgaggcaggagaatggtgtgagcccgggaggtggggcttgcagtgagccgagatcgc

SEQ ID NO: 129793 - DNA, 1027 bp, Homo sapiens
aatgttttattgtattaataacaattctaaaattcatgttaaatttaaatttttggccaggcacagtggcttacgcctgtaatcccaacactttgggaggccaaggcaggcggatcacttgaggtcaggagtttgagaccagtctggccaacatggtgaaaccttgtctctactaaaaataaaaaaattagttgggtatggtggcacaggcctgtagtcccagctactcgagaggctgaggcaggagaatcacttttactcaggaggcggaggttgcagtgaaccgagatcaccccactgcactccagcctgggcaacagagagaggctccatctcaagaaacgtaataaataaataaatatatttacattttttattctgtttctatagtcaccatcaatttacatatttctcaatatacttcgtaagtgtaaacataaaggaatacggctgtcatctgccttggccagccatgatataggtcaagcttttattatatgtagtaatgttttgaggaacataattgaagctttattttattttggactctaataaataggtggaagattgttattactattttttgagacagagtcttgctttgttgcccaggctggagtgcagtggcatagtacgctcgtggctcagtacaactcccacctcagtctcccgagtagcttggactacaggtacgtgccaccacacttggctactttttgtagagacagggttttgccattgttgcccaggctggtcttgaactcctaaggtcaagtgatccacccacctcagcctcccaaagtggtgggattacaggtgtgagccaccacgcccagcctgaagattattttataagtgtgattttttttaagtggctgtgtagtcccaaaactataattagctgaaataatactgtaatgtttaaaacttatttagttatccctgaggtcatcagcacaaatcctgaaatagaaaatatagtaacgatatacttagaaattgaaatagaaatagaaaaagcttacag

SEQ ID NO: 129794 - DNA, 1131 bp, Homo sapiens
tggttgcccctcgcgcggggtgggcgttgcgggcgcgtggcggcctgcggacgaggacgctcctcccggcccgggtggggtgcgaatggtccgcgcggccgggtccgcggggggcgggggcagccggggggtcacagccggcgcgagggccagtccccagctcctccctgcattgcggaggaagtgtggccccgggacccccgcgggccggcctagggcacggcgtcagcctctgcagcgtgtttctgcctggtgtgtgggtgagggaaacctaagtccgccaggaaatcgccttattgtcacctcgcactcttatcctcaatgaaagaagtttgaagattgagtgtcctacaaggtcagacgtactgttttttagaaaactcgtgtatgaaaagtcaaacttatttttgcctccggaagcttgcttttgcagtggaaaaattctacaggatatgtgagatgttcctgatttcacttgaaagagataaactgtttttcttagaatgtgatcatttgcactcaatgtctaactgggacctctcagtgctaccccccccccattcattatctcaggaaataaagggagaagttgatcagaatttttgccatttaaaagaggtcgataaagattaagtcgccgaagatagtgttgtgtaattctctcgtaggtttcgttccgttttccaccttaagcaaagctagtgtgtaacaatcctgtgtgggcttatttaggcattgcttattaattttcctcttctcttataggtgattttcctgcatggattgggagatactgggtaggtaccattattattaatagtaacagtaatgaaactgggtcatgcaacttttgtttacgcgttcaaaggtttaatgtttaagggcgctaaaatggtattttaagattgccagttaatgtatcttacagtgcggtgattttatgttttgaaaaccctcagaattttccccttatcatcgtgagtttattgattttttaactctggtttctggaacatattaaaatttcaaattcctcattagttgctttgggtattggataccagagatccgtggaatgttagtagggacggtgtgcaattgagagctttccagagcagttaaaatttcaga

SEQ ID NO: 129795 - DNA, 1050 bp, Homo sapiens
acattttctagtgttgactattctaggaaaaattggaggttttttttttttcagcttagaggctataataaagtcaatagtgaatgcaaagtgaaatttctattgtctttttttccctagtgaggccaacttctccaaagctcagattttgtcagattttctgttcttccacctgctccagcctgcatattcccctgtttaacctcctgctggcctcttgcttacttagggataaggaagattagtttttaatctatgtttgacagcataatgttgtggttaagaatacagatactgtgactaaactccctggattagaatacttgctttgtgaccttgggcaatgcaacctctgtgcgttggtatttccatctatgaagtcggtatttccgtctatgaaagtcggtatttccgatctatgaaagttggtatttccatttatgaagtcggtatttccatctatgaagtcggtatttccatctatgaagtcgggatagcaataatcctatcataaggttgttatgaggattaagcagcctactattaatgaagtcaggaatgaatgcttagtaggtgtacataaaatggaaatgtagtcagtcttacttacacggattgaaaattagtaaaacaaggtagcctaaataaaatgttaaaaaaaaagtgataggacctcaaagcagagatatttaaaataggaattatagtcgtcccttaggattggttccatgaccgcctcctctcactacaatccagatgatcaagtctctaagatggcctagtatttgcatataacctgccacatcctcccatatactttaaatcatctctagattacttataacatgtaatattaggttggtgcacaagtaattgtggcttttgccattgaaagtaatgtaaatactatataaatagttgttatactgtatttaaaaaagaattgttttcttattgttgtattgattttttttttttttttgagatggagtcttgctctgtctcccagactggagtgcagtggtgtgatctcagctcactgcagcctct

SEQ ID NO: 129796 - DNA, 1052 bp, Homo sapiens
tcattttagtaaaattggttttccagatacaggtatggttgctcatgcctgtaatcccagcactttgggaggcccaggtgggtggatcacctgaggtcaagagttccagaccagcctgaccaacatggtcaaaccccgtctctactaaaaatacaaaatgatccgggcgtggcggcatgtgcctctaatcccagctacttgggaggctgaggcaggagaattgcttgaacccatgaggcagaggttgcagtgagccgagatggtgccattgtactccagtctgggcaacaagagtgaaactgcgtctcaaaaaaaaaataataaaaattaataatcaagagaaactctgtaacatctctatggtacagagttacatctctatgttagagttacatctctaggtatgtctatgagctaatatttgcatctcactttttaaatttaaattttcttttagacattgtatgcaaacctgttccattctttcttcgtggacaacccattccaaaaagaatgcttccaccagaagaactggtaccatattacactgatgcaaagaaccgtgggtacctggcggatcctgccaaatttcctgaagcacgacttgaactcgccaggaagtatggttatatcttacctgatatcactaaagatgaactcttcaaaatgctctgtactaggaaggatccaaggcagattttctttggtcttgctccaggatgggtggtgaatatggccgataagaaaatcctaaaacctacagatgaaaatctccttaagtattatacctcatgaattcccgtccaaggaagcagagttgttaaagagtactggaataggggctgaaggatctatattcccttattgcattttccttatgtataattttccagatggtgatgttacttttcagtgtactcatatgtctcattttcatctaaaattaaatggcaggaaacaaggactgcatagagaaactgagtctgtgtgggttctgtctcaaagatacaaactccctgatagtctatggaaggaaaatgacaactatttta

SEQ ID NO: 129797 - DNA, 1032 bp, Homo sapiens
gcccatatgtttattttattttattttactttattttgagatggagtctcgctctgtcgcccaggctggagtgcagtggcacaatctcagcttactgcaagctctgcctcccaggttcacgccattctcctgcctcagcctcccgagtagctgtgactacaggcacccgccaccacgcccggctaattttttgtatttttagtagagacggggtttcaccatgttagccaggatggtcttgatctcctgacctcgtgatctgcctgccttggccttccaaagtgctgggattacaggtgtgaaccaccacgcccggcccctaaaaagcccatatgttttcttaaaatcattttcaggtaagctttttccatgggttttcgtgatgatataacatactcagaacccataggcaagttcattttaaaaaaagatgacctcttacaaatggttctatttctttctctggctatttggtgtcaagatgacaagtggctgggaggtgtggggtctgtgtaggaagtctcccacatggccacactgagaatgtttattgtagaaagggaacttttgccctgtgaagtcacctcctccgagtcaccagtagctttctgatattctatcacaggaaattcctggtggtccacaaaagcagtcttctgagtgcagctgcagagagagacagaaaataattgccgaatttgacagtaaggtctggggatctgtgttcaggggtggctagcacctgggctgtgtgagctgcaaactgggaggctctttgaacaatgtcagaataatccaaggaacaaaggtcaactgacctctcattgtaatgcatgtaatgcagagaaaaaggtactggaggatgtcttttgtgtttcaacaaggtagctagaaattatatttagatttggttgttttgaagctgtagtaactaaacaccaccctgccccatcttacctagcacttaatattcattatcaaaacgtcagcttaaaagtttggatatggcagtggcatgcttgaagtatcaga

SEQ ID NO: 129798 - DNA, 1024 bp, Homo sapiens
agagacaggcattgattaggtggcccctaacactgggggtcaatctgtccaggtttagagggttgctttgctgtgatgccacctgcagagttgggacaatgcttaggaaagctgagacctgcaaccctaaactggacagaacctacacagataagctttgggaagatctttaacctgactcccttcatacctgcaagaagccactgtaagattaggaaatgtaattacatctgataaagtgattgccaagacattgtttgaagagagggctttatcagccctattgtatgaagattaatagagatctggatcttctagccactggtcttgcgcctccaacagaatgaaatctgattatattagaatgtttacatagtagctccatcttccttagactttcaacactttataatttattccctttgttacacactagcctgggagcccacaaataacctccagtagcgtgggacccatccccagggctcgactggtgatgtattgactggcttcacattctccattgcttgctctgtgctcctccctgaagcatgtgccttgcaaagcactgacttcattacattacaattctgtttctctgcctctctccccactggactggaagacccttgaaagacaggcacttgcttattttgtgttcctggagcctagcatggattttgtcttctaagagtcagcccccacatacctgatcagagaaacctgggcttttcccactggggaatactggaaaggtgggtgagggttgagcagatcagaggaatccatgagaccccaggaggctggattgactatttactaaaaccctggaggggaggaagaggacaggcaggtggggcggggcagagcagaggagaacattctcacagctgaaagatgttcactcctgtgctgaactggaagggagcatctcatccaaacttcttatttcatcaatggggaaacagagcttgaacaaggtcacacagaaagattacatcacgaggaacgttccatgtgacat

SEQ ID NO: 129799 - DNA, 1059 bp, Homo sapiens
gcttataaatgacagagccaagatttgaatgtttgaaaacagaataccataggtgctaaaaaaatacctgtaaaatacattttctgcaatctatctaaggcaaatctgatctaaggcaaatcagaggagaaaggtataatcaagaaacattaaaaatatatatacttccagccggacgtgatggctcatgcctgtaatcccaacactttgggaggccgaggcaggcggattacctgaggtcaggagttcgagaccagcctggccaacatggcgaaaccctatctctactaaaaattcaaaaattagcagcgactggtggcagatgcctgtaatcccagctacttgggaggctgaggcagggagaattgcttgaacccgggaggcagaggttgcagtgagacgagattacgccactgcactccagtctgggcaacagagggagactgatctcaaaatatatatacttccttagttttttcagttctgtttcaccaaagaaggtgttaaagagtggattgtctgagggaagtacctggaacttatcagggaaataagctaatggtggctttccttgagattgaagcttacctactctagatttgccagtgaccattagcaacgcaaggttaaccctccctcaacttttccctgagaaaaacgaattctcctgtttcccccttcatgtagctgttatttaaagtagaatgccttgttttactttcaaatgaaaagaaccgtagtctatggcagagacatttaaacttttgcatgtgacccacagttgaaatctgtcttctatatgacccttataaacataaacaaacacacagttgaaatcacagtttcataagacacaatctgtctttatccaatccaatatatttttattttatagtaaaataattctgtttataactctaaattgattgcaggatccatggattgaaaactcaagttaggaaccttaacttcaggttctcacagacaagttttagagctgtgcccccaaacacacatctccagagctatcccctccactttcatatctactggctgttt

SEQ ID NO: 129800 - DNA, 1040 bp, Homo sapiens
cctcctgagtagctgggattacaggcgcctgccaccacgcccagctaatttttgtatttttagtagagagagggtttggccatgttggccaaactggtctcaaactcctggcctcaggtgatctgccctcctgggcctcccaaagtgctgggattacaggtgtgagccaccgtgactggctttcttttgattttttcaaccattaaaaaatataagaactattcctgtcttgtgggtgatacaatgatcaataggtgaccagatctggcctgtggatcttagtgtgcttacccttggcctggggtatagaacagctgggccaatgatattgtaactattagttgctggataatcacgatgctggccccatcaaaggcagcgtgtagtgactggaaagagacgactgcctggggagatgtttccagggtggagttgataggatttgggtgagagctttgaagaaggtggagtcatggagaattctaatttgggaaactggatggataattaaagcagaattaaccaaaattagaaggagaaattgaacaaggagggagatttggggggagactaataaggtcagatttgggtgtgttaggtttgacgtgactgtaggacaatcatgtggacatgctcaaaggcagctggaggtagaacatgctcaggaacatgggtcacacggggccgggtgagagcaggctggagatactgatgtgagagtcaaaagcatgtcaagtgtaggtgaagccagaaattgcaaacatataaatactgggtttaattaaacctaaaacattttatgtactttctaagaagtaataatgatggaatatgacacactatcacttccaagacacggagacaatcatgcacaacccagctttattcttctgtctagagacactcctggccaggtgcagtgcctcacacctgcaatctcagcactttgggatgctgaggtgggaggattgcttgagaccaggaatttgagaccagcctgggcaacatagtgagatcctgtctctacaaaaaatttttaa

SEQ ID NO: 129801 - DNA, 1068 bp, Homo sapiens
caccacctatagtgatatcactctgtagtgacaccaccttacagtgacacccctctacagtgacagtgctgctccacagtgacattgcactacagtgacaccacctacagtgataccactccacactgacaacactccacagtgacactgctctgcagtgacactaccctacagtgacaccactctgcagtgaaacaactctataatgacacccctctgcagtgagctgctctatggtgacactgctttacaatgacaccactctacagtgacaccagtctacagtgacatagtctacagtgacactgctctacagtgacactcctttacagtgccatggcggtgcactgatgccactctgcagtgaagccactctatggtgacactcctctacagtaacatcactctgcagtgacatcactctacagcgacactactctacagcagcactgctctacagtgacatcaatctacagtgacactgctctacagtgagaacattccaccgtgacatcactctatagtaacattgctgtacagtggcactgctgtacagtgacactgctccacagtgacaccaccttacagaaacgccactctacagtgacactgctccacagtgacaccaccttacagaaatgcaactctacagtgacaccactctacagtcacagcactctgcagtgataccagcctacagacactgctctacagtgacacagctctacagcaacatcactctacagtgacagtgctctgcagtgacagcgttccacagtgacatcactctgcagtaacatcactctacagtgacagtgctctacagtggcaatgttccacagtggcatcactctgcagtaacatcactctacagtggcattgctctacagtgacaccaccttacagaaacaccactctacagtgacaccatgtatagaaggaagcatattatgtcattccttcctctattctatttcttacttctgcttttttctaataatttcctctatacgatcctgaactcgttgaactatgtgtctattttctttctattcactgctacctcac

SEQ ID NO: 129802 - DNA, 1049 bp, Homo sapiens
cccggcccctcctccgggtccctcctcctccctcgcccctcccgagccagggtgggagcgacggcagctggaagagaagggatgaggtcatcctctccctcggagtcagctggtggaggagaggaagcgggaggagggagcgcgcgcgaggggaggagaggaatgtgcaggtccgaggagcgccgcggcggccgctgctgctcctgctgctggcggcggcggcggctcgggcggcagcagcgaagccgggacggcgaggagcgcgggcggcgggcaggggcgcgcgcggggcgccgcgagcagcttggctccgcgcaggcagccaggcggcgctcctgccggccccaggcgcgccgctagcccggcccagcgcccagcccggcgggcggcgggcggcggcggacggcaggcgagccgacgcaggagcaggaggagggggagccgcaccgcctgggagggaagccggggcgaggcgaggaggtggcgggaggaggagacagcggggaaaggtgtcagataaaggagggctctcctccggtgtggaggcatcatggccgctaaatcagacgggaggctgaaaatgaagaaaagcagcgacgtggcgttcaccccgctgcagaactcggaccactcgggctcggtgcagggattggctccaggcttgccgtcggggtcgggagccgaggacgaggaggcggccgggggcggctgctgcccggacggcggcggctgctcgcgctgctgctgctgctgcgccgggagtggcggctccgcgggctcgggcggctccggcggcgtcgccggcccgggcggcggcggggcgggctcggctgcgctgtgcctgcgcctgggcagggagcagcggcgctactcactgtgggactgcctctggatcctggccgccgtggccgtgtacttcgcggacgtgggcacagacgtctggctcgccgtggactactacctgcgcggccagcgctggtggttcgggctcacgctcttcttcgtggtgctcggctctctgtcggtgcaagtgttcagcttccgctggt

SEQ ID NO: 129803 - DNA, 1102 bp, Homo sapiens
cttgtcatgcttgctattccagaaggcactgattgtgtcccatgttcaaataagttgggaaaatgacagattaaacaaagttaaacagctctctctacagcaggacttctcagagccttttataagctaaggtacagttatcagttaagtttttaaagtcacatctattaaacattcttataatgatgcatgcaaagcacttggataaatatgccattcttaaaactggccaaacaaaaataataacaattttattggcactttaaaaatatacaaatgtttttttctactttttatgtcatctacattttaaaataacctaaaagaaaattattagtatctgtatatgtgagacaactgtctcagagaggttaagtaagcggcttaacctcttaatagggtcacccaactattatgtagtgtagttaggattaaaaacggggcccattttaccatacagtctatgctttttctggctgaactggctacctccaaatgccaacttggataatgatgacaacaatgtataaaaataacaatttaccttcactgtggatggcaaagtgggaaagggagctgcagtttagatggattaggggatctttccaataacacactggtagttaaacagtaaaacagagacttgagcttagctctttgaactcccagttcattgcctaacttactataccatttggacatactgaggttgttttattaaatcccagctaaggaacatgatctcgtagtagttttaatgattacatggcataatgtatgtgaatatgtgaaaagttaattacaaatgataaagaggttctagagataaagaatgggtagaaaaactaaggaggatataggttacacctttgactattaaaaaaggtggtcttcaattctgagttagtcctgaattctgatatagattaggcaagattggtgccatttgctgagtttatcaaatggttattttctgcatatatgtgtttcctctctatacatataaattaattagtcattcaacacacactgagcacctgctatgtgcaaggcactgtgcttgttactaattattccaagatgaataacatatatatatttc

SEQ ID NO: 129804 - DNA, 1115 bp, Homo sapiens
gggagagaaggacagcagatgagaagggggtttggggccaaactaaccagcaacttgggcgctctcttaaggaatccgaagttgactgtgttggggaatgcgcagcaatgagtgtcaggggaggctcacaggccacactcagacatgtattttcaaacagtttccttttcaaagtgggaaagaatcaattgcagtttgaaagtactggagaaagaagtttcctgtactcttcagaggtggggaaaaggaagtgtgagtgaggggtggacttgaaaaatcttctgagctttaaaaggctccataatgagtggagtgaaagcatttaagtgggcttggctgagttcttactaaagattctggtagtgctggttaagaactctacttaatgaattattggaaaaggcataaacataaacagagttgggagcatgttaaataaagatgctctgtaaatgcaggctgggcaattaaaaaagatttaccagagtaaagcttaatacagtatagtggataattaatgagcctgtgacaactcagtaataactaccctgaacttttacaatggtgcatgaacatgtgtgcaagtcagaaggagggtttgttttcacagtcagctccagttagctaggaaatttctcgacagaagttaattagggattcctggtaatggagcctgctgcttaaccaacctcctgtgccaaaggtaactgactttgccattcattcatgggtttcttgttgagcctaaagggagtttggttgtaaatttgattctcccttttctcagttccctaagctctcactgtagcacatgttttgagtttaagtagggcttacctttcttactttaagaaatgaacttctgtttgttttataggcgggtgaactccaccctggaaagacctctgttggtgagctataggtgcctgactggtccaggaaattcaaattattaggatgtggtgaattctctgtctttgatactttgggaacatgggttagaaactgctcagtaaatattcttaagaaaatggtacttttgagacccctgtcaccttttatttcagtatatcttcatttgggaagttttcggtttacagaagaattgaatggaa

SEQ ID NO: 129805 - DNA, 1014 bp, Homo sapiens
tgttgttccattttactaagaggttgaaagagaagttaaggggcctgcccactatcatataattaacagggaatgctaattttccaatccatgtgtatagttgtccccccttatccacaaggaatacacttgaagaccccttgaaagtgtggatagtaccaaaccgtatatatactgtttttccctatatgtacatacctatgataaagtttaaattagccactgtaagagattaacaataataactaaaaattaaataaaacatttataacaatatactgtaataaaagttgtgaatgtgatctctctctgtggctctcaaaatatcttactgtactgtaccacaggtaagtgaaaccatgtacagtgaaaccgaagatatggagagactactgtgcctgactccagggccatattattaacctctgcactagaatcccgtgtcagaaattgagctcgtcagaccattaacttcaaggtggtgtggctgctgggtcctaacgtacttgcctggtgaggagttcctaagtgggaaagcctgggtgtaaaggaggagtggtgcatccaggatgttctcagaatagaattctactaaaaggaatgggcgtccgaggcccaggatcaggtgagttactcaaaccagggtgtcccatctgtgctcagctccctgtgccatgtgatggggggccattctccgatttgtgaggacagctggaagcacatgatcatcaggtaagcttagtcctggctagggtgggttgagccagtgggtgacaagtgactatgtgaccaggttggtccttgaaagatgactgaggtttggacacctttgcggggtggagatgagaggaaagagagagaaatgcatttttgcctgagcaaaaaggggccttgtttgtcttgttcatttcatttatctaaattcatgttcaagaaaaatacgaacaattaatggaaaacagccacaaacttatggaaaagcagatagtggaatacacaagaaatttttaagag

SEQ ID NO: 129806 - DNA, 1050 bp, Homo sapiens
ctggctgtggattcgtgggcccatcctgcgttatgcttgaggcaggacctcagcttggtgatgaagggcgccttgcccatcaactgtggcctatttttagaagagtaatctctgtcaactaagaaaataaaactaggatcattaggctgtctgagagacctttcagatgaactgtagatgttcatttgtccatttttattgtgttgtgacaagcattttttaataaacagttttattgaaatataactcacataccacacaattcaccaatttaaagtgtacatttcagtacttttagtatgtccactgcgtgtgaaaacatcaccacaatcaattttgtaacacttttgtaccccacagaagaaactctgtacccattagcaatcagtccccattcccctcccacccacgccttcccagccctaagcaaccactaatctttctatttctataaattgtgcggcaaacattttattttaaactccgcactgggaccgccctgcctagcagcctggctgtcgcaggaccgcctccctcctcctctgcctccagccccctctccagacgcatctcctggaggtattcttcttctcttcccctgtgtcctgtccctcccgtgcccctcaactgtggccgctctggcatcgctgtgggccacagtggggaggtcggatttctcctctgccctcctcctcctcaccttccgtctctactggggccccaaatcccatcttcctcagggactttagggtcacacgagtcagaaacctatgaaaaccgatgcaatcaaaggagagaagagtgggggaaggccaggggaaccccagtgcagggacttggcagtgggggttgattctcgtcaccctctgcatccgagtgggcctgagctctactttctgtctctcttggtgcttctgcttctctctctctctctctctctctctctgtgtgtgtgtgtgtgtgtctctctctgtggactggcgtcttctggtcctcttcctcccagtccataagtaatagtccctaaaacagcttgacacagattcaaat

SEQ ID NO: 129807 - DNA, 1056 bp, Homo sapiens
gcagagaatgggtttctcttcctactgaggtgcttccccactatgaattattaaagacttgaggatgaaagtgttattgaagacaaaagtacaaataagccaagtgcacccatgtcttaattagatgacattgaagaaatgctgctcaggaaacacatttacttttttttttcctttacttctaaggtgtagccctatttaatctttgcctagaaacaagtttgtaatgaatgtatttggataacgggcagcatggcttggcctgagccttgcaagcagagctgctggctgtgtctctgccattcgagagtctatggcttctttataacttgctagacccatccagctatcctgattgtccctcatattatctaactaattgtttccatcatttactttagtcaactagttctctctttcagttgactccctttttctaggtgctagggaacatgaaaaaatataatactagagctgccttacgctgtgacgtaggagaatctgaagggaggtcggggtggggacaggagcaggagatgatgcatttgaaaggcttaaaacacacaagtaggagagcaagagaaacaaaagaaaagaagtgggcctggatggggtggtggggagcctttggcatcgagaaaaagtttaaatttatacattacataatgttcatcagagtttcttggcagcacggggatggtttttgataactaacagggtgatcgttctcagaatggttgtcaaatgggaagagcgtttcagaagatgccccaagctctggcctttggagtatttatagcttagctgagcccatagccggacagcagccagcaggctgggattaggaaaaaactagctgatatatttgagtctagttgtttgttaactattgcagaagcaggtgctgccttaagatgtacctcatgagcacctttcctaggagcatgtggtgctggatctaaggaaacttgcctatcaaaaatcatagtgagggccttggctatttatggataaccaatccatacaaggggaaaccatattgacacattctttata

SEQ ID NO: 129808 - DNA, 1085 bp, Homo sapiens
gatcgatcatattttttttttcaaaggaattaccaggcttgggatgtttaatcttggcagatggatgcagtctcatgagcctgttttgcagatttccagtgctatctgggcagagccaaatgaaaaataaatgcaggggaacatggacacaggttctagagtgggcaatccctcctgcagagtggaagtccttacaaatcctgtaaactccactccagtctcttaaattggagagattccctaccactctgtgtacatgaagagcagagagtttagagagcttgagatgcttggctgtaatctattcatgtgcacatttcccacctgagggccaattatcatctcagattcatttagttgtgactgagagcttcataaacacttctttgatattgacatcatatgaaactgatagatgggctcctaaaagaaagacatgggtggttcaaaatggaatcttatctcaatcctgtcattctgaccacagatcacatcttgcccctcaggagtcattttccgttgggttgtacatccaagtcccctggctcttgtggccaaggggagggacctctggatagctctcttcaaataggaaagtggaattctcacttttggggtgggcaggcaacttgccggacattagtgatgcttgaccaagtgccaggaagaggccattagctgggtgcactgctgagaagagcccattagcacccagctgccaggccacagtttggaacttggagcaagctatatattcacagcttagaaattgtgattctctcagtgtcctacagatggcttggaaagcgtgcaaagatgaatcatactctataatcattttgaaactttttccccaagatatcaaagagacagaagaaaaattaaaattgtggtcagtttcctggacattttatacacttgcggctgctttggaaacatcaaattttttaaatttttatgaacatacaaaaaatcatgtagaacttgaaaattgcctgaatttttcccacagtggcactttgttaaatgcaaaacccatttttcaaaaattactcatgagctaaataaaaaataacaattataat

SEQ ID NO: 129809 - DNA, 1034 bp, Homo sapiens
tggtgcaaataataatctgaaatgcataaaatttgtcagtccacattcttatgcataaactgactcaggttttgctttgacagaactgggccatccccaggatacactgcctcgatggccatatgtaaatgaggacatgcattgtttatgccagaaggtgtgtagtttactgctttctgatgtgtcagtccatgggaaagcctcaaaagaaagagaccctgctcaaagtctgtgaggagctgggacttagcttgattctttgtccagtgggagaggcagaggcagaaggaatggcagagaatgaaggttgatcaaaatcagaaagagtacagaccaaatgagatatgcatgggctatttctggggctcgttgccttcagcttgtcctgccttatgctatattcaggcaggggatggaacatagggaagaaaagtcatcttggcctccagctttccaaaaaccagggagagtaggatatgataccggaaagcacagggagtggaaagaacacaaatcaaatgcatttgcttgattttacctgctttgttgaagagttttgtatgtagaaacagaaactgttttgaaaatggagcatttgggtgatctgaaaattttacttactatgctatgccttttccttccgacgtaaatattctcttccttcctcagctccatggtagtaaaaaaaaaaatatgactaaaacttttcaccaccatggaagccaaatgcaattaaatggcgacatgcctctgtgttgctttcctgatatgcttctttacaaagacgatggatttaataccatttatctacatagatggcagggaagccacacttttttttgtaatcttcatctataatttctactgggtttatttttatagctacaattaaagtggcaatagaataatatccaaccccataatttttccaacgaaccattgtgaaaaatgaaaggctagcagttctgtaatatttcttttccagcactgcatagattgtgtcttgttccaagattcttaccttaaggatttat

SEQ ID NO: 129810 - DNA, 1031 bp, Homo sapiens
ttccttttaaggaaatgctgttgcacgtatcacttccattttcattccctggtttagaagttagtcacacagccaccctcagctactgctagtgaggctgcaaaatggagtctttgactgaacgtccatatggccagctaaaatgtggcatcccactattaaaagaaaagggtagactggagattgggcaggagctaatggtttccttcataattacctgttaagattctgaacaagtaatttaattaattaccttttcaaaagccttttgcacctttttccatcctccaatttgccaatactattttttttcttatggagaaaacaaatacagataccacacagaaaccaagctttgcaatccaattccagtgcaaatttagagaattaatgaacaacaaggaaccaattatgcataagtaaaaaggtcatagttgagctcctgttgagattagaagaaggaagtaacagttttagatggaaagaaactgcccaagactatgcaggaccagaggagaccctaagattggagaagtcaagcaggactgctgagataaagttggcaattttcatactcaccacaactgttgttttgtaccaaaacatgtatgtgtttatgaatgtaggtagatgttcaaaagaaataacaaaattgtatattatacaagaaagaataagggccatcagttaatacatttgggttcttatttctatttttaatatttagttgtgtgaccctgaacaaaatgcttaacgattgagggtctctatttcttcatccataaaatagagatgttgacttagatttataagcaatagaaaacacatttcaaaagcctattctgtgctagactacattccagacatgtaagtaaatgcttcaaggagctcacagtgtcttgggctggaggattggtgtctactcataaacagacaattccaacatgctgatcaacacagcatcaggaaatgatacccaagagcttggggagcacatttaaaagaggcttcagactagaaacgtgagattt

SEQ ID NO: 129811 - DNA, 1209 bp, Homo sapiens
cctcccaggttcaagcaatgctccttctgtcttctgaaggagcctcctgagtagctgggattacatgagtgtaccactacacctggctaatttttgtgtttttagtagagacagggttttaccatgttggccaggctggtcttgaactgctgacctcaagtgatccgcccacctcagcctcccgaagtgctgggattacaggtgtgagccactgcgcccaccctaaatagtcattttaaattgatttttttgttgtactctttacacatttctcacctataatcatattctttgatctagccacaatgaagaaacttcactttccagtgtaataaatatattttaattttgtggtcaatgagaagagtcaattaatgattacttgcagtttcctccccccaccagtgagcagtgtttggttcaaaattgatgaaatatttcagaatgaatgaataaatgatataaaatgaatgagaaatttgttttgggtcaactattgagttttaaagactgaagttagccaggagtggtgtcatgaacctgtagtcccagctacttggaaggctgaggcgggagaattgcttgagcccaggagttcgaggctgcagtgagtcgcaattgtgccactgcacagcctgagtgatagagcaagcccatggttctattaataaagactaaagaaagaacagcatttattgctaatgtggcaaaagctattatttttacaatatttaagttttactgctttaattaaaacctttttttaaaaccctgatattcagactaacatcattgcttcagatctttatctttgctatttgagtttaattcccatttataagagtcagagaatatgactaaatatagaaatatggctgggcatgatggcacacacctataatcccagcactttgggaggattgcttgaggccaggagtttgagaccacctggacaacataacaagacctcttatcaaataaaatttttttgtttttaaattaagctgggttcagtggctcacacctgtcatcctaacactttgggaggctgaggcaactgggtcacttgagcccaggaattcaagaccagcctgggtgaaatcctgtctctacaagaaaacgcacaaaaatcggctgggtatggtagtgcacacctgcagttacagctacctgggaggctgaggtggaaggttgagcctggagaggtca

SEQ ID NO: 129812 - DNA, 1643 bp, Homo sapiens
ccatctctacaaaaacaagcaaataaactatatttacttatatgtataaataattcagtgtattttgtcttctttatcttcttgtgttttagctttatgagttaactccatcaaattttaatttcttcatttgactgctcttttttacttttaatttttttgagacagagtcttgctctgtcacccaggctggagtgcaatggcgtgatctctgctcattgcggcctccacctcccgggttcaggtgattctcctgcctcagcctcccgagtaggtgggttacagacgctggccaccacgcctggctgatttttgtatttttagtagagatggggttcaccatgttggccaggctggtcttgaactcctgacctcaagtgatccacctgccttggcctcccaaagtgctgggattacaggcatgagccaccatgcccggccctgactgcgcttcttttctttacctaacttctccccttttcctaactgattttgagattgctgctgtctatttctgacttttgtattcagagaatacaaattaattcatttagaagcattgtctctttgctctgtttactcactgtttgtttaattcctccatctcactttctgttagcacctagtggattccaggcacagttctaggtgctatacaacagtgaacaaaacaatgtccttgcagtatattaggcgtcttccttctggcgagaggagagatataacaaatgattggttagttatatgtgaagtagtaggttttatgaaggctttgcctgtagtctctttcctttagtccactgtattttactgttttccaaagcttagtaggaataacttttaagcttatttaaatatctcacctattaagcaggtaattttatattaggcatttactcatggttgactgtaagtaatgtaatactcccccaaccaaaattttatctattctgaaacatcatttaattcagtatattatgtatatttttaagtgtttcattcaattttttatctattttagtattcacagtggcataacctctttacatatcaatacttcattattttatatgtatttaaggttttcattattaaaaatatactgaatcattgatatttttggagaataaaaatcatgaacttattagcagaaattctctacaatcaattatggagaattcttttttttttttttttttttttttgggagacagtgtctcgctctattgcccttactggagtgcagtggtgtgatcttggttcactgcaacctctgcctcctggtcttaaacaatcctcccacctcagcctcccaggtaactgagactacaggcacgtaccaccgcaactggataatttttacatttttttgtagagacagggttttgccatgttgcccaggctggtctcgaactcctgggctcaagtgatccacctgtcttggcctcccaaagtgctgggattacaggcacaagccaccgcacctggccaaattctttaatatatgtgcttttcctttttgtctgtgtggttgagtcttatagttacttttcattgatgttgagtattttagatttaatagactcacaaaaaattttaccaattccacgacagcatcttgccaaaacttgtcatttaaatat

SEQ ID NO: 129813 - DNA, 1180 bp, Homo sapiens
taagaataatcaatataatgtatatgaaaacaatgataaaaactaaaatcctaatcaaagatggttcaactttcaagtttatattttgaaagaattgttttttcaaaagtttaagataaagatgacaaaaatagatttaaaatcacataaatatgccatgggattccaattcctcatccttaagtttacattttcggcaacatattgcttggaagaaggactgaaagagataaatgatgcagagaaaataactctttctaatcctcgagtttccagataattaatttaaataaactagataatttaattgagatttttatataaaactttagaaagtttaagaaatacctttttataagtttaaaaacaaacagaaatcttataagtttgataaatattgtgccaccccaacatctcatagcacttttaaacactttatcttatactcctattcagtaaggaggtgatgcatataattattccaatgttgcagatgaggagactcaggcacagagagatggagggatggaagggatctggtcattcagcaaggcagcagtagagcagagcacacagttcagaactcgaggcaaccggtactgttgccattcctgactacattgcacagtgagtctgctgacgtctaagactgaaggggcttcccagatacgtgagggaagtctttcagtaatatatatgtgtatatatgtatagttgtaagtggcacaagtatcccctctggaaaatcccttaataggcctcacaaaattataagctgtgaacaaaatttaaggctattgttacaggattaaccacatttaaattgtaacatagtaatagaaattaaaggggaaaaagcctgattgtcaaggcaagttcacaaaatattggtagaaaatattaaggtttattcgaaagtgacagactttttgatataatacaaatcaccctggtttgtgaattcttgagacttacaactttggtaagaacttttagataacttcatgtctacataagttgaggagataactagtccatttactgtaattgtaaagtaaatagcagatataaaagaaaatattttgtttcaataaaattatatgaattatctcactttatccataaaaactttgagatagagataattattatttattcccatttgatgcatgaagaaagt

SEQ ID NO: 129814 - DNA, 1124 bp, Homo sapiens
tgccagttttggaagagctaagcgtagtttgattcacattctcctgagtgattctcttttttatagggttaatggaagattagatttctgattgctgatgggatatcatttctgaatcccattagaatcctatctctggaatctctgccctgccacttcttagatgtgtgactttgagcaagctattattctgtaagcccaagttttctcatttgtaaagtggggagaagaatacctgtttgtcaagattgttgtgagttttacttaagaatttgagccagagaagcttaatatcaagcttaagttaacctttagagtttttgttgattttaacaagtaaaaaagtttactgatttaagtataaatagtacactatgtagtttgtgaagatttttcttttgaagaattaaacaagaaatacttatgttgtaacttcatactcatgtttcttacagggtttagtttattactggatgtgttttgtgctctacatggaccaagagaaaaatgtgttgaaattctgaggagtggccacttgttagctatctcaccaggtggagttcgagaagccctaattagtgatgaaacttataacatcgtatggggtcatcgcagaggctttgctcaggttgcaattgatgcaaaagtggtgagttatataaaattaattattgaagtaaagcttagtcaaatttaaaataaatggttaagtaatgagccaaattgtataagaacttagacactttcgctgcaataccttaaaaattagtatgtaggccgagtgtggtagctcacgcctgtaatctcagcactttgggaggccgaggtggatgtatcatgaggtcaggagtttgagaccagcctggccaacatgatgaaaccccatctgtactaaaaatacaaaaattagccaggcatggtggtgcatgcctgtaatcccagctactcgggaggctgagggaggagaattgcttgaacccaggaggtagtggttgcagtgagctgagatcgcaccactgcactccagcctgggtgacagagtgagactgtctcagaaaaaaaaaaaaaaaagactggagaatttgaatgtcattttgttcttttactttgccttcggaaagtat

SEQ ID NO: 129815 - DNA, 1063 bp, Homo sapiens
tttctcttactagtaatactgtacagtatttttaatgttttcaaccccctcctctaacagtgaaacctggctcccgttattcttactatgttgactcatttgatcagtccccctgtgtgtaacccatctcccatcattgctgccttcccctacaactcatggatgccctgtccctgcttgtgccaggccaccactctgtacagtgccctgtccagctgctcaggctgtgatgccctacaccaggccacctgtctcgggctctggcccctcctgccaggctgcttgctggttgtggatgcccccatttcactcaggctctgactcccaagcttccgtgacccttgcctcctctcttccccctcagcagccccccaacctgtgataggctctcttctgtgcagtgccctcgtgactctgctctggttctgactccccactccgcaccacctgtgtgagtgccttccttagtgtctggcgccaacactccaggctacctctccacacaggttgtctgcttcactgtggcccacctaatggctgtaggactgatttgttcaagaaagaaagagaagaggaaagagagggaagaagggggaaaggggaagagaaccaggaagactagtgtacttttgtgagaaaagactgagctaccaaccatcctttactgtaaacgaattaatgaatatattttaagtatttgcattttgtcattcaaacaggttatgaagttcatggaatggaaaaaataccagaagatggaccagcacttataattttttatcatggagctattcctatagatttttactatttcatggctaaaatatttatacacaaaggcagaacttgccgagtagtagctgatcactttgtctttaaaattccaggtaaactttcactgtagatagtaatgtaaaaatgttttattaacaaaaccaagttatgtggtcgtctctatcctgagctctctaacgtcatttgaaaaagctttttgccttttagggtgtgtataacactcttggaactctaatatgggaatatctaattatcctttttaggcaat

SEQ ID NO: 129816 - DNA, 1033 bp, Homo sapiens
agactggggattccgaggcggctcctgggagaccggacgcgcgcggcctccgccgctcccagtcccgccagacccgatgccgggctggagaagcgcgggggccgacgcacctcggataggcgggggcaggggcaggggcagctctcctttaccctagagcggcgacagaagctcttcgggggatcagtggccaagggggcggacagatttgcacggcggattcctccgaagcaacccgtgtgaaagaagccaagcggcggctgcagcccgggccgcgatgggggtgacaccgcccgtggtcccgccccttcccgtggcccctcggagccacttccggcggcagcgtccgggctagttcccggcgcgagcggccgcgggccagtttctatctcctcatccagggcttgcgggcgaggcctgttttaagtctccagtaaccgagcggaggcccggcaggcgcgacccgggctgcgtacgtcagagctgcctccgaagtggtaaaatgtgctgcgagaagtggagccgcgtggcggaaatgtttctcttcattgaggagcgggaggattgtaagatactgtgcctttgctccagggcatttgtggagtaagtagaaaagagaatctcttcatgttctagcacagtcattacccagaaatgtaggtattgcaaacgtggttgtaattgatccctgaaagcagccagaacatctgacccttgggcacggtgatgtttaagaaaaacaaaaccctcagacatgacggagtggtcgcccactgccattatttttatgtgaaggactacatctacttggtaggctgctatgaaaaaatgtcgtaggtgctatatgtcatctcatatttgtaaatcgaggggacatttaaaaattgggggaaagcgacatgtaaaatgaaatctctagtagatatgatgtcataaagtgaaagtttaaagttgagtgacttgctttggttaacgtctttttttaaacctaaaaatctacttaagcccaaatgcacataattaaaacttcaaa

SEQ ID NO: 129817 - DNA, 1029 bp, Homo sapiens
aaagcaaaaaagatactgagacagaaaatcctccagttgaaaacacattatctccaaagctagaaattacagagaaatgggaaaagtattggaatgaatatggaggaggactattgtggcaaagttggcaagaaaaacatccgggtcaagcactatcttctgaaccttggaactttcctgatacaaaggaagaatgggagcaacattatagtcaactttattggtattatttggaacaatttcagtattgggaagctcagggttggacttttgatgcctcgcaaagctgtgatacagatacttacacatctaaaacagaagctgatgacaagaacgatgaaaaatgcatgaaagttgacttagtatcttttccatcttcacctattatggttgataatgatagctctggtacaagtgataaggatcatagtgaaatacttgatggaattagtaacataaaactgaattcagaggaagtaacacagagccaattagattcctgtacaagtcatgatggtcatcaacagctaagtgaagttagtagcaaaagagagtgccctgcttccggccaaagtgaaccacgtaatggaggaaccaatgaggaaagcaactcatcggggaatacaaacacagacccaccagctgagggtaagattaaccaagatttattctgccatgtaatggttagcaaaatgaattcatttagcaaaataactactaatcctttattgtagagttaaataataccaagtacatttcatataataatgaaatgatttaatccatcctgttttcatatcacaagttatccttttctattaataagaatatttgcatgcagttctcaaaagtatcattccttctcttgtactttggtggctaatgaaggaaaatgtggaatctcttgagaaatctaatataaagtgagcttggaacttttagttttccacagcaaatgaatttataagaggcatgttagaaagcaattgagaatgtacatttgacattaggcaaatgtcttatgagtca

SEQ ID NO: 129818 - DNA, 1061 bp, Homo sapiens
ggaaaaacaagcgtgcctctactgtgctacctctgtatggtagacattgcttgttaactccccagttcctgctagttactggaggcaaagatcatgtgtgttcaatgagcgtaacttattttgaaggacaaactttgtaagaattatttctcaccattttcctttacttggaattacggccagggatggtcactggttactaaaagatctctagtaggtggattctcctgggttacctaatatcacttgtatcacaaccttattctttttagtaatttttttcttttaaaatttttttggattgtattgatacttatcaaacgtttccttgtttgtttttaagggaaacctctggagaaatcactttaggagattaatttaaggctgcagcttttactgatgtttttccaaaggaaaattgagagattatatttgtaccatacctaggaatagaaatcattacttgacatgaattaagactggaatacttattgctgtgttccaaatgctcctgggtacttaccttatttggaaaattctaattaaagtattttttttcctggtttcctggatttgtgaactatggttgactatggtgttgggaagtttgcatgggtcaattatattgccttttttatatttatctgaactagtgggctctggtggtaatggcttatcactgtttaccttttctttatttagccatgaactggacattgatgaaaacccagcttcagactttgatgacagtggttcccttctaggattcaagtatggctcaggacaaaagtaattattcataaaagctattgttttccagaagtcctaaccacttcaactatcttagagcactctgatactcagataactaataaatgatcatgtgttgagatgttatcattaaatcacttcttgttagaattgtggtagagatatccctgtacatttgatgtgttcatatgctttaactcagttgcactttatagcaatccagtgttgttattccatttcatagataaagcaactgcagctcacagaggctttgactttactggagaggg

SEQ ID NO: 129819 - DNA, 1227 bp, Homo sapiens
tctttgtgtaaaacagaaaaattaggtcatattatacatactctccagtttgcttttctccctcaacaatgtaccatagacactctttcttgttggtagaaacatttagctaattctgtaaatgagggcattgtgttttatcagttatcctaattaacaacatctaaattgtttcctaagatctaagcataatgccctagaaggtccctccagattattacatgtgcctgcctgccttccttccttagggtctcgctctgtaacacaggcaggagtgcagtgctgttttaagttttttcatggagatggggtcttgctatgttacccaggctggtcttaaactcttggcctcaagtgatcctcccatctcagcctcctagagtgcagggattgcaggcatgagccaccacgcccagtccatttattccttcttattgctgaatagaattccaatgtatggatgtaccaaaatttgctcaaccatgcaacaattgaagggcatttggattatttgtggcattttgctgttacaaataaagcaacagtgcaggtgcagtggctcacacctgtaatcccagcactttgggaagctgaggtaagaagattgcctgaagccagaggttgagactagcctgggtaacatagcaaggcagaaaataaaaaaataaaatgaaatttcaaaagtaaacaaagctgctgtgaacatttgtgtataaaagacataagatttctctgggattaaatgcccaagcattaaatataaaggaacatgggtagttgtgttagaacaactagagattttatcgtacatgacatgaagactaaactgagtaggtaaagcctgctaaagacagcttacaccagtaatctaaaccatgactgggttctttgatgtttctaagggttgagatttcaggtcctacttatctgtttcataagttgtgaaatttaagtagatacctacacattatgaaatcagcaagaaagggacacgaggaatgtctcaaaattgaattgaattcaaattagttcagaagtacatgttgactcttgtagtttctaaagattatcagtttttctcccttaggtgtttcaaggcaattatagttaatataatcaatagttcatataatcatttaaggctaagatcataaagtttagcatgtaaaaaggtttttaaattcctggcaggatgtattactatgcacatgtaattttattgaggaa

SEQ ID NO: 129820 - DNA, 2665 bp, Homo sapiens
cctcaatacagtgtcctccctaacttcagcatacttgtaaaatatgctacatatatatagctggttttattttgtattacatttcaggttggttggctgctggtgatgttttaataaatatgttcgtggtgctagttatatctgaaacagactgcctagtattagtccagtcagtgccataggactttccgtaatgtgttggatataatagcccctatgcattcatctatagatgagtgcagaaacagctactaagcattgctgaggaaaaaagatatgtaactgttgtgtctaacttagatacctaatttatttataggcacatttctttagaggaagattctgggttgttgcccatcatgtctaccacttcattctaatttactcactctcaggaaggtcatgaagacaagataggaagaatattcttgttacagaagatgcaaagaagtatatgatctgatgctgagccttgtttacattccaaagaacaaacatttgctgggacatatcttactggctctactgttgcattaaaaggcaactttgatttttttccaaggtagactgcttctattcttacagaagaattggccctaaatctttttagggttcgtctttgatgctaagtaacatttacatagattgtagcttgaccattgcagaaaggtctatataatttgaaaaactaaaattaatgattcagtagtaagtaggtacatttgtaatgtagctgtagcacagttaaattgttaagaacccttatggaaaagccactgggacagtttggctttatcctcttagtatttattgatagcaggaagtatttaatctgatatttttttccttttaaagaaaacttttaataaggtcatggcatgcccagatagcattctgattaggtcagaattacttactattaagcttgtgtgatgcagtctgcttttcagagccaataattttgacacagcttttcagtcaagtcacaaattgtaataggtaggaagattctgtgtagtttggaattaattcctgctcatgatgtcatcttaaaatttaaggtagaaaaattcctcacatgggttaataaaccaatggatgaagaagcatcacaggaatcatcttctcatgacaatgtgcacgacgcttccacaagtagtgattcagaggaacaagacatgtctgttaaaaaaggtgatgacctactggagactaataatccagaacctgaaaagtgtcagagcgtatcttcagctggtgaacttgaaacagaaaactatgaaagagacagcttgctagcaactgttccagatgagcaggattgtgttactcaagaagtgccagactcccgccaggcagaaactgaaggtaacactaaatatgcttcaacttgctaatggatttagataaaattttttttgttaatatgttttttcttagttttcacttgtgaatcttctgtacctaaggagtcactgctacttatttttaagtgagagaaggcatattaagtgtacatgttctaactggctatgacttagcacccacagcactcctcactcttggctgagtgaacatgatcaagtagaaaaggaaagactgttgggagcattgtgtctgcagaccactgtctgcagttcaacttggcctctgctggtactcagttccatgggctaaaggtgaccatcctttgccttcttcgtatgtggtgtagctttggtttacttcttcctttttttgtgtgagacagggtctcattctgttgcccaggctggagtgcagtggcacaatcacagctcactacatccttgacccccagggttcaagcagtcctcccacctcagcttgagtagctgggactacatgtgcataccaccatgcctgcttaattatttaattttttttgtagagacacagggtctcactatattgctgaggctggttgccaaaggctcaagcagtcctcccacctttgcctcccaaagtgctgggattacagacatgagccaccatgctcaggctggtttccttttggtgtgtttttgtgtgtttgtgtgtgtgtggttgatgatggtcatgtgtttttgatggcacgttaatataaaaagtattcagagcagttggctctaatgaataaactgagtaacattttcaatttatgcacttttgtattcgaatttttatagcaaaagttcttatatagtttaataatggtattatgaaaccattatatttattgtgatccttcatcatatttctttattactatggaaaataacttatttgagtcttgattttttttttcttagtgcaagtgtgggtgtatgtgtatgtgtgatctttttatcacatatttctttacattctaaacagcatacctacagtagtttacatttattttattatcaatgttataataaccgatgttcatatgacatttgtaggtttgtgaaatgcttttatgtgtcttattctcatttaatctgtaaggtagccagggaagtaggtggaattattttccattctgtaaatacagaaagtaaagctgagagaaatttaaaaattagcccaagtaagtggcatagctaggactcattaccagcttctccaattgctaagtcccattttcctgcactatcccacttccataaacaccaattctcat

SEQ ID NO: 129821 - DNA, 1034 bp, Homo sapiens
agatcatgccgttgcactccagcctgggcaacagagcaagacactgtctccaaaaaaaaatggagttttttctggagtgtccaatacaaatccaggctattgcttcaaccttaggagtgaaataattgggaaactcagcggagtgtgggggagctagccaattagagcagctagttctctattttccacaggagtcagtagttaaagcctcaaagagaaacatcaaaattgtaaattcagttattggaaagatggaggtatacagtattacaaaagaattaggttaagaattgaggtcatcatttctgtggaaattgggaatggtactgctttttataacaagctttgaatttttttctttaaaactgggtgatttataattttttaaaaagggaaactaagctttttaaaagtatgtaagatatagtaatgtttgctatgtttatgcttgccttggcttcttgaaattgaacatgctaacacaaatactcttcctttgcagagggctggttttcagttacacccgagaagattgctgaacacattgctggccgtgttagtcagtccttcaagtgtgacgttgtagtagacgcattctgtggagttggaggaaataccattcagtttgccttaacaggaatgagaggtaattagccatcaatggaagtgaactattttatgtccagttaattcagtaaatgtttccattttgctacagcctatcttactgagatttaatatataattaataatttaatatgaaatgatataaaataatagctagcatatattaagcatatactttgtattgcatactggtgtaaatgcttcctacagttgacccttggacaatacaggtttgaactgtatgagtccacttacacccagatttttttcagtaaatatattggaaaatgttctggagatttgtgacaaaaaaaagaaactcgcagatgaatcccttgtaacctagatacatcgaaataatttaaaaggtaggaatgtcatgaatgcatgaaacataggtagatact

SEQ ID NO: 129822 - DNA, 1642 bp, Homo sapiens
agaacaggaaaaacaccattataaatgtatgattttgcaatatgttataattggtgcttatatttattgttcaagtgatttagcacattatttctcaaaaatgttaacaaatttggaaactagcattttctggaaaacaatttccatgacaaccacgccgtaagcgtaacggttacacttagccctttcaaatgaagaatactgccattaacacagtagtgcacatgcaagtatactgagtagtttactgcaaaacatggataggctaaaattaaattatgtctatgttgctaattataaaattggaataaagtaaatgaaagtccatttggtgaaaacataatatctgtttcctctacctaaaatgtctcattaaacattatcggcaggtgtttttacatttcttcttcatcacttggctacataagtttgtaaaaatgtgttttattttggttttccttagaagttgtcgaatttctgttcattttgggcattgctacattttgaagaagtttgtcttttccaaaacctagcattacaggctgtccatacagtcagtgaccttttcctactcaggctgtagcacagcacaatggtggccacatatttggcactcagtagatattttgtggcaagtattgccacttggttaggaaaagctgtagaatgagacaagaaagccaagtccttcagtcacattttcttggtacaacacagtgaatctttctaatttaaataaaaaatttaaactgaagtctgtatctcgggtatatgtggccaaatgtctcctcctctttataaagagttcttatacagaagatgacagactattcgaaagacaaactatcctatataagtaataatcagtgtcaattaactcatttttttcttttcccacttttagtgattgccattgatatcgatcctgttaagattgcccttgctcgcaataatgcagaagtttatgggatagcagataagatagagttcatctgtggagatttcttgctgctggcttcttttttaaaggctgatgttgtgttcctcagcccaccttggggagggccagactatgccactgcagagacctttgacattagaacaatgatgtctcctgatggatatcctttggaagtcttaagagtttactgaaacaatgattgtggagagaaaggagcatgagagtgagagagggagtgtgggtgggtgggcagggtggctcacatttgtaatcctagcacattgggaggctgaggcaggtggatcacctgaggtcaggagttcgagaccagcctggccaacatggtgaaaccccgtctctactaaaagtacaaaaattagctgggcatggtggcacatgcctgtaatccagctactcgggaggccgaagcacgagaatcacttgaacccaggaggcagaggttgcagtgatctgagatcgcgccactgcactccaccctgggtgacagagcgggactctgtctcaaaagagagagagagattggccaggcacggtggctcacacctgtaatcccagcactttgggaggccgaggcaggtggatcacgaggtcaggagatcgagaccatcctggctaacacggtgaaacctcatctctactaaaaatacaaaaaattagccg

SEQ ID NO: 129823 - DNA, 1167 bp, Homo sapiens
ctcagcctcccaagtagttgggactgcaggcgcacaccaccacgcccagctaatttttgtatttttagtagagacagggtttcaccacgttggccaggatggtctcgatctcttgacctcgtgatctgcccgccttggcctcccaaagtgctgggattacaggcatgagccaccacgcctggccctcatctctccttagttggcagagtacttgaggctccaattgtctttttatattttgttctctgatgtctaggaagggaaatgttcctcattgtaacagtcacttctaatactttattttggtaggtaggtaagtagatagatagataggtcgataggaatgaggtacttatttataggtaatatttctaaaacttaccatatataagaatagagttgtaagtatttgaataatgtatttgaatttgaataaatatgaaaaactattaggtaatattgttatgtggaaaatgttttaaatataactaaattcagtttattagcatttgtagtggttttggctaaatacaataaaaatttatcacagatttctttgcaaatattctaagtagttatagtatctgtgtatttaataaatagaagattgggtcctaactggtttctaaatactagatttttttaatttgtgtcaaatttttctgaattaagttaatatagtggaaatctaatctaatggtagctctctcgtagaggtagagaacattagtccaggtttaggaaccagaagcatgagagaataaaaagaaggctaagaactggattgggcttctggtacatgttggaatagtagactccaaactagttacttgaaaatagcctttacaactcagagcactcacaagtgcattcatcctactacactaacaataccctgcattcatacactatacatctacagcataggagctggcacacacacttagggtgtacagtgtcctcttagccatttcattgactcatcatgacattctggagcagtgtgtctctggagcacctgatttcattgaaggctatggaggtatggtgatttgcctggtcattctgccacacagcgacagtcttattacaccttgctgtctcccactgacacaatgttcattaccaagaagaaacagatttatctgttatcacaatattagctca

SEQ ID NO: 129824 - DNA, 1049 bp, Homo sapiens
ccttccatgaaaccagtcacggatgctaaaaaggttggggaccactgctctagctaacctagactcctgatgatttgccatctatagctaataagcagcagaagcttatggtgtgatacaacattccacttcttttaggtgtcttgagctgagtttcacttttttgtaatttcataataatttctattatgttacatgcatttagataagctgacaactcttaaagtgggacataaatacactattatatgtatttctgaatatgggtggctggattgttgatcataaaaatctgaatctggaaacaaagttgatgtttaataactctccttggttggctggatatacataattcagactctgctttgaatgtccccttctggtcctttaaatggtctatttccctaccttacgtaagtttccatgagctcatcttgttttcatagtgttcccttttattgttaagagaaacaaaaccaaaaaaccccacttgtttcagcaatgccctgttgtcttcctctgtgtgaaattgctcaactaagagttatgcaaatggggatgcggcacgtggtggaggcttcttgcagcatgttgatgggggaccaagacctggtcttgcctcttcctcctccccctgctggcttcattccggtcataccagctcctgctgtggccatcagctcatcccaggaccttggcagggcctgtttcttttacctcacactgaagccccaaactcttaggctccagtaatcctcccagcttggcctccagtgcactgggattagagatgtgagcccccatgcatggctactctctaagttcttactcccacggacaattagagtttgaaggaccttaggccatgggttcagattatcttattttgcttcaaaattttaaaaacttttttatttttctgtcatatacatatacgtgtgtgtatatatatataagttatatatatataacttgtatatgttactttttatatataataaaatatattatatttttaaataaaatatattatattttaaaatataata

SEQ ID NO: 129825 - DNA, 1016 bp, Homo sapiens
atgcaaacacaaatatctaatttcacaaataattacaaagcaaaaactggtgtgtcgacctctgagaggaaacttgctagccccagaagcccccaccgtccacccatcccctcccacccacaccctacctgtcccccagagacaacagctattccgaccttcctgatggttttctgacttcttcttaattttgccacttttgtatatggggatgtatgcatccccccaaaatatagctcagttttgctgtttttgtactttgtatgaacgaattataccaaatgtgctcttttacgtcttgcctcttttactcaacgggttggtgagaggcatccatgcttttgggtgtggctacagttcattcatcttcattccatgtggtgttggtaagatacatgtggcttttgggtatggctacaattcattcatcttcattccatatggtgttggtgaaatgcatccatgcttttgggtgtggctacggttcattcatcttcatcctatgttgtgttggtgagatgcatccatgcttttgggtgtggctattgtttattcatcttcatgccatatggtgttggtgagatgcatctgtgcttttgcgtgtggctacaattcattcatcttcagtccctatgatgttggtgagatgcatccgtgcttttgggtgtgactacagttcattcatcttcatctcatgtcgtgtttgtgagatgcactcgtgcttctgggtgtggctatggttcattcgtcttcatcccatgtcgtgttggtgagatgcatctgtggctacggttcattcatcttcattccatatggtattggtgagatgcattcatgcttttgggtgtggctatggtttattcatcttcatgccatattgtgctgtgctgcatgtgttttcaagatatacgatcatttatccatttatttcaccatttactgatgaaattggagttcatgttagtccattttgctttgctaaaggaatacccgagactgggtaacttataaagaaa

SEQ ID NO: 129826 - DNA, 1081 bp, Homo sapiens
gatcgagaccatcctggctaacatggtgaaaccccgtctctactaaaaatacaaaaaattagccgggcatggtggtgggtgcctgtagtcccagctactcgggaggctgaggcaggagaatggtgtgaacccaggaggtggagcttgcagtgagccaagatagcgccactgcactccggcctgggtgaaagagcgagactccgtctcaagaaaaaaaaagaaaatgttaagacatgttcctttttttttttttaagatgaccattgttggagatttggcagagggtggtcagttattttagaaagggctcaaatggtgattgccattacccactgtctttaaaagctgaatgatcaaaatagtatacatgaaaagatttcaggaattcataagttttccggttttccttgatggcactttccagtcacctaccctacatatgaaaatgggagcctatttctgttttcagattgcagagggaatggcatacatcgagcggaagaactacattcaccgggacctgcgagcagctaatgttctggtctccgagtcactcatgtgcaaaattgcagattttggccttgctagagtaattgaagataatgagtacacagcaagggaaggtatgttgcactaatgatctttagatgttttattattgtgttttattttgtttttgtctgtttttgacaaagcaattacaatagtcaccattaagaaaaacttatttggtacaacatttaagctgtaccataattgtctgcttatggttctattctaatagtttctagaaggtactctcttgattaactccacatgatacttttgttaggcttacaaatgctatcagttgtatttcaattaagcaatgcaaaacacaaatagattcagcaagatgattcttgtttattttgtattgttaaagttttcactcaaacaatgaatataatatacggggctgtggagaaaatatttgtaacattaattctatattgtttattccagccttttaattacaaattaaaacatgaacattaccatacacacagaactaaatataatgcaaaaaatctacttcttt

SEQ ID NO: 129827 - DNA, 1168 bp, Homo sapiens
agtgttggattaaagttaaataacaatgttaacttgttgtagctttacagtttctagaactgacacttataattgagatcaaccatcttataaagcttaagctattttgtaactttaaaaaattgactcggtagggcccggtggctcatgcttgtaatcctagcactttgggaggctgagatgaaggaatcgcttgtggtcaggagtttgagtccagcctggtcaacatagagagactcccatctctattttaataaataaataaaaatataaatataaaatgactgtattatttatatagtaatatgttattactatattacttttttgtgagcttgtatttctgataacatctctttcattcacattatttttggactggatttttgaaaatagaaataggtattttataaacagaaagattctaggatgaggttgtgaataaatccaagtaatataaatttaattacccagcagttatttgaaattatgaatgctttcttgaggggtggagggaaacacattttcgaatcattattcttttcagttctgaagagggcttaaggtaatgtacagctgtggaaagtcaagtgaccagaaccaccactggtcatttatgtgacagaacactaggtggcactgttcctcgaaggaattgactagaattgcataccaagagtccttttttttttttttttttttttttttttgagacagggtttagtgctctgtcgcccaggctggagtgcagtggcatcatcatggttcactgcagcctcaacttcctgggcccaagcaatcctcccaccttagctttccaagtagctgaaactacaggcatgtgccaccggctaatttttttaaatttttttgtagaggtgggggggtctcactttgttgcccatgctgatctcaaactcctgggctcaagccatcctcctgcttcggcttcccaaagtgctgggattacaggcgtgctccccagtgcttagccttgttcattattattaactgaagtccacactttattcagacctccttagtttttacctattgtcctttttctgtctcaggatcccacattacatttgagtcatcaagtcatgtctccctaggcttcttccagtagtggcagtttctcagactttctttgcttttgatgactttg

SEQ ID NO: 129828 - DNA, 1068 bp, Homo sapiens
taagtaggtggttaataaaaactaaatttttctctatttgaataactatgcgtatccctgataagacactcaggcaccttggtagccactgaaatgaattcaccatacatcaaactaatagaagcaagagaaacaatctggcaaagaaatactcaatgaaataaattccaaacatctgtttccttttatatttattaatcattgcattctcacaatatttcagccaaagcctggggaaagtgagaactctacctatttaaataagttcaacaaaaagcccataataaaatatttagcataagacacagatctaaaaaatgaaaagacatagatctaacaaaactgcaattaaagaactgtgcattgttttcctataagtgatttgtcagatgttttaaaattatatatttcttattatttgttcacttaagatttatcactttgtacattaatcaagtctcaagtgttttcatctccaagagtcacactgtgagcttgaatctttttcaaagaaaaatcccattaagctttgctttaaagaaaacaaaggaaaactcacaggagcaaaaagtattttgtctcctaaaattgaagaaagaggccaggcgcggtggctcacgcctgtattccaagcactttgggaggccaaggcgggtggatcacctgaggttggggttcgagaccagcctggccaacatggtgaaaccctgcttctactaaaaatacaaaaattagctgggcgtggtggcaggtgcctgtaatcccagctactcaggaggctgaggcaggagaatcacttgaacctgggaggtggagggtgtagtgagctgagatcacaccactgcactccagcctgggagacagagcaagactctgtctcagaaaaaaaaaaaaagagggaagagacataaaccagtgctataaaagctgtgagcctgatttatcacagttgttaccacaatgccagaaaataatcttgacaagcacaagttctttaaagattcttctttttatttttctttcaaaacaatctcaaatttacataaaagctgaaagaacagtacacag

SEQ ID NO: 129829 - DNA, 1062 bp, Homo sapiens
ttgattgcatgaccttctgaaggtcttgtgtgtgtcttacctttttttcataacttctcttaatttttttttttttttttttttagagtctttctctgtcacccaggctggagtgcaatggcgtgatctcagctcactgcaacctctgcctcctgggttcaagtgattctcgtgtctcagcctcctgagtagctgagactacaggtgtgcaccagtgttcccagctgatttttgtattttatgtagagatggggttatgccattttggccaggctagtctcgaactcctgagctcaggtgatacacacacctcagcaaatcttttaaattatacattctgtgatatttccttgactttcttatccagcacttgtattgattatttttcattttgataatgttgggtttttaaaaactcctttatgatggaaaatttcaaacatacacaaaagtagagagagaatggtataataaacccactcagttttaaggattgtcaactaataccagttttatttcatgtatgactccaacaacttccccaaccagccttcagattatttgaaagcaaatttcagacatcgtattttactcatacattttctagtatctaaatctgaaagagactcttttctaacagttctgtagcattaattatactcatactgttgtgcaacaaatatccagaaatcttttgtcttgcgaaactgaacctcttacccattaaacactaactcccttttttttcaccctgaaccattggcaaccacaattttactttctttttctgtgagtttgattacttgatacttcatgtgagtggaatcatataatatttgtctttttgtgactgacattttatttagcttaatgtcttcaagtttgacccataccatatcatgtggcaggatttttccctttttttttttttcagacggagtctcgctctgtcgcccaggctggagtgcagtggcgcgatctcggctcactgcaagctccgcctcccgggttcatgccattctcctgcctcagcctcctgagtagctgggactacaggcgccc

SEQ ID NO: 129830 - DNA, 2422 bp, Homo sapiens
gaaatatcacaacaggacgtttcaggctatgaaaaataactgcttactaattctaacgtaagttatccagattacgagaagcatttctgccaatgctcatgtcagctaagctcagagaagttacctcatcctcagagagcaacgaatggtatggtctatgtagaaagcaaaatttgcaacggaaaaaccagagttcgtgtgcactttatgaggaagagggttaggtgcaccagacagaggagtttctcaggtttccgtgtcgcctgttctctcgaccaggtggccctctcggcgcaggcggggaccccaccctgcgggacttcggctcctccgtgcggacagggggcgcccgcagccgtgcctttcccgccaactccactagtgctccagctcgcccttgtgcgaccgcctctagggcccgggatatttcctgttccggggcgtgtgggacccggatgcaagcgtgctatataagcgttgctcaagtcccacccctttctttttgaggaagacgcggtcgtaagggctgaggatttttggtccgcacgctcctgctcctgactcaccgctgttcgctctcgccgaggaacaagtcggtcaggaagcccgcgcgcaacagccatggtgaggcggcagtcggcggcgggcggcgcaacgcagggctcgggcgccggggggaccccggtttcgagttcgtgctcctgagggcagatgccggggcgtgtaggggcggaaaggcgctcctgaaatggtggggaaacgcgggaagcttccggaagctgcctttctccagaagtggcagaccatttttggcttattgttctttttcatgtatctaataataggcttttaaggataccggaaaaacacccgtggagccggaggtggcaattcaccgaattcgaatcaccctaacaagccgcaacgtaaaatccttggaaaagggtcagtgcattcgttatgcgggggggagggggaattgggcgaaaagcgacgagctttactcgttaatgttagtgtagaaggtggactgcaagaactaaagtgacaagttacttaaaaaagtaaagcgtggcttaaaattgcttttactgtcatacagctggcgatgaggaggtacctattgtgttgagtaacggtgataattttatacgctattctgagccagcagaagtgaaggccttaagccgattttaattgtttcgattatactgagaggtcttttatttcctgtagtgtgtgctgacttgataagaggcgcaaaagaaaagaatctcaaagtgaaaggaccagttcgaatgcctaccaaggtaaagtaaatcggaggggcaggaagtaggagttgcttccggatgttgcataaattcaggttctttaaggagttcggctgccaaaattgttaacactgatgctgtctacaaacgcacatagaaatcggtggtagattgcggttcctagtaagtagctaatgtttagatatgattgttgaattattgttgctgtgttcttggtgtgctttggtgcttaacaggcgcaagctctaagggtggtgtcctagcacagtgaaaacagacctggcattttcaacccatggtacctgaaaatctattagtgtaaattggaatcataccaaagggaaactaatgaaatgattagaagtaatgattttccagatgttctagggataagtataaaacgataaacacttggtttcctttgtcttttgttacagactttgagaatcactacaagaaaaactccttgtggtgaaggttctaagacgtgggatcgtttccagatgagaattcacaagcgactcattgacttgcacagtccttctgagattgttaagcagattacttccatcagtattgagccaggagttgaggtggaagtcaccattgcagatgcttaagtcaactattttaataaattgatgaccagttgttaacttctgttggtttttattcagaatactggcagattttaggaatataaaggtgtactatgagacttccacttttcaggtggaatatatgggtatcttagagtggtctatcctgttttcgttgtcgtttgagtcatttgaaaactggattccgttaactacataatatgtgagacctgactggttttattggacactggcagtttataactttggcatactctagataaattctgattggtatggggtgttaaggtttctggggcgtttgtaatgcacacccatggttgagaacctagtgcgctagtaggcacgtgttaaaaagctagtaactaatatttttaaattaaccaagtttaacgtccttaaaaaaggattaagtggcagaggcaggactaaaactaagttttagggttttaggaactaaaacttagtttaaaaatacttatattttcagtgttttatattttaaat

SEQ ID NO: 129831 - DNA, 2149 bp, Homo sapiens
ttttcaactacaaaaacagggaacatgtcttcatagaaagaaaattaacaatataaataaagattaacgagaaataacaaactggaggagaggatttgtacctcatattacagcaaagggtgaatccctctagtgtaaaaagagtttctggaatttgacaaggaaaagaccaacagatgaatgatcagttcacagacatagaaatatgagtgattcttaaatatatgaaaattgctaattaaaactacctttcaataccattttccattatggccaaaatacaaaaatttgacaaatataattggtgaggcatggggaccatggggaaatgcctaggcactcttggatattgctggtggaagtacagactttagggaaaataatctgggaacatctattaaaattacaaaattgctggtgtgattccatcctgtgcagctgttctcttgagcagtggtcatttatctctgtcccccttctctgccacctaagtgcgtgctgccacccgatggaagatttgatggacatggacatgagcctcctgaggccctagaactatcttttcggttgtgaactgaaggccaacaaagattatcactttaaggtggataatgatgaaaatgagcaccagttatctttaagaatggtcagtttaaggctgggcgcggtggctcatgcttgtaatcccagcactttgggaggctgaggtgggtgcatcacgaggtcaggagtttgagaccagcctggccaagatggtgaaaccccgtctctactaaaaatacaaaaattagctgggcatggtggcacatgcctgtagtcccagctacttgggaggctgaggcagcagaatcacttgaattcgggaggtggaggttgtggtgagccgagatcgtgccattgcactccagcctgggcgacaaagcgaaactctgtctaaaaaaaaaaaaagaacggtcagtttaggggctggtgcaaaggatgaattgcacattgttgaagcagaggccatgaattacgaaggcagcccaattaaagtaacactggcaactttgaaaatgtctgtacagccaacggtttcccttgggggatttgaaataacataaccagtggtcttacagttgaagtgtggttcagggccagtgcatattagtggacagcacttagtagctgtggtagaagatgcagagtcagaagatgaagaggaggaggatgtgaaactcttaagtatatctggaaagcggtctgctactggaggtggtagcaaggttccacagaaaaaagtaaaacttgctgctgatgaagatgatgatgatgatgatgataatgatgatgatgaagatgatgatgattttgatgatgagggaactgaagagaaagcaccagtgaagcaatctatacaagacactctagccaaaaaaggacaaaaattaaatcagaatggaaaagactcaaaaccatcattaacaccaagatcaaaaggacaagactccttcaaaaaacaggaaaaactcctaaaacaccaaaaggacctagttctgtagaagacatcagagcaaaaatgcaagcaagtatagaaaaagtgcattgaacagtcctgggcactactggtaaattaagcccaaagatggggagaaaggaaaaggagagaccaatatagtccatactgagtgtcatcaacaatccagactgaagtcttctattttaatcccaatccccttttctgatttgccacccatgcctcttcaggctggaaacaatctcactcttggttccctaaagcactttcttctgactgctgtgattcggtgaaccttgccctttgctttctattacttgtgcatttgcatcacctctgaccatgttttttttttttttttttttgagacagagtctcactgtctcccaggctggagtgcagtggcacgatctcggctcactgaaagctctgcctcctgggttcaccctgccattctcctgcttcagtctcccgagtagctgggactacaggcgcccgcatgcatgcccggctaattttttgtatttttagtagagacgggatttcaccatgttagccaggatggtctcgattttctgacctcgtgatccacctgcctcggtctcccaaagtgctgggattacaggcgtgagc

SEQ ID NO: 129832 - DNA, 1051 bp, Homo sapiens
tggacaaaatcattcaagacagccgcattttaatcagatcaaatttcaaaatttcaaatatctataagcattttatgttcttaaaaacatgagaaacttgcaagatatcattaaattcaaaggtttccaaaaccagtttgaaacacatttgtatgtcttaaaaccttttgtgaagtttagctgtatttagacaagtaaaattttatttacgtatctccagagtcaaaatacaaaacccaagcgatcagggcaaagtggaagcaaccaaccccaacctccccgcatggaaacagatagtgtgcgctggtcacatccagggacgtgctccatgcaatccacaaactaagatctgccccgaccatattatatggaccatataaaaattaaagtagctgtatatgtactttactgacatagaaacaagtctatgttatattgctaagtataaaattcaaattttagaatgtcaatagtataatcccactgaagtaaaaaaaaattgatatgtttttcaagtttgagtctataatctttgtatgggaatttttagtaaagcgtatatattcatctacagcttaactttttagtcttaaaaaaggcaaaagtgaaatttcgacgatgaaatccacggttgtaaccagcaataccacacttgcacggttgcaatactcgcgctcttcgcactgtaacctctggaatccactgtaacctctcgaatccgctgtcacccgagatctcttaacctggcggtcccctgccaggactcgggcggccgtcaagagtgcgcaggcgcaagcgcggccgccgtcggtggggttttatgtgctgttgagactgctgttgagcttctgggcctttttaagactgccttccaaaagacgacgtgatgactctaaagagaaaggaaaatttgttgcgtacgcagaagggcaggctgggcgcactctgagcgtctttcggggaccgacggcctcgcccacgtgcttccgggcaccagcgcgcccaaagcccgtgcactaggaaacgcacaaaagcaccagcgggcgagccc

SEQ ID NO: 129833 - DNA, 1017 bp, Homo sapiens
ttcagtggtacagatgaaccagaatgaatgtttatcttctcagaaacactccttcaatattatattggatcatgctgctaatgtaacttgggctacaactcttcatggtgctacaaacttctctgtctcattcagtcgtatttttttatccatagaaaaaggactacattaggtgtaaaagtgtacaatatatttttatactgtgacttaatttgtcattaacaaacttttacaccaccacaatgtattcatgtgcacttgcaaaaggagatctcggacatgcaaatgttaccagaacaaacccagcttttgtccacaaggtgactgtaactcagaatggaaagtgggctttataatagggtgtggagtgaagaacatgctgtatgttactaacagccctttgaatttaacaaaaactgggaatccattaggaaacggattgcatcatacctgaacataagctggactgctgaaattgtatttttagctaatgaaaaagtgtttggactagtactctaaaaatgttctaatgataaagttttgagtcaaaatagaaaagaaaaaaatctgcattccaggccgaattttgtatatttttattgcatttaaaattgctattctgtaatattgggaaatcaagtggcttatcatgtatatcgtgtacttaaaatgtattcacaaactactgttgtatttgtataaaatatagacaaagatcatattttttgtgtgtgtataagctctgtaaaatagcaatcacattatgaagctgcagtgatactacattttaaacattcacatccaaagaagcagactatttattgtccatataccagatttaaaatattaatttgctgctaattaaataatagtactgcagcttcttgtggcctacagtgttatgtttgctgtaagaataagatatgtgaattccacaaaatatatgaataaaattatagaatggctttagataatgtagatcttcctgaaattttaatagatgatacttttctattt

SEQ ID NO: 129834 - DNA, 1998 bp, Homo sapiens
gttgagtttgtagagggtaacaaagtaaagtaaaacaaacctatcttggttaacatgaaaataacaattgagaatatattatattcactgaataattataggcttttcctcacattagacaaccaacataatcttcttaaaggtctaattaatatatttttctaagggtcagttgggacattaacctaagaaacatatctattaagcacttgttaacaccttattttaggaccctttccgttggggatgggggcaagggtgggaggtttttagaagagtatatatctctttaaaaaaaaacagaaagaaaaatatttctgagcactcattagccctatatggaaacttctttcctttttgtagggccagttatcactgcagattgcaatgtttaccaagaatttctaaaaatgagtgcagattactgaatataatacattatttaaaatatttgggagtagtataatttgtggagaaatgtaaattgtaataatgtaaatgggggcttcaatatatatatataatacacacacacacacacatgcacacataccgcacttcatagaatcaaagttgctctctgaaggagctttggctcctgatattttatcatgctcctatatttttttaatccttggagcagtagtttttatacttatgtatttaaattttattatgaaaaattacatttattaaaaaagtgtgttccaaaggcattaaaattatatatgttaataaggaagtacatttttaaatttttcaaactgctcctagcttttgattaggagaatattttttctgaaagtaggcttttcgctctgcttcattactgcttcctttagtttctatgaaacagattgcttacctaaatctttagttgaatgattagtgttcaatattgctttaatcaccatataaaaggaaaaaaattggtgacagagcacaaatagaaaacctatttttaaatagaaatcacaaatagcaagtgtggaagcactactttattctgtttaaaatgtacttaagaagtcatcaaattagtgaactgagacattggccttagtaggctgtattcactgctaatttaaaaaagggagtaccaggatttattaagtaaagcattttggaaatggggaatagcgccatatatgtatgtatgtgtatgtgtgtgtgtgtgtgtgtatatatacacacacacacacatacttaaatcttgccctgcatgaaattcaaatacatggaggcacatcttcagggcaccagtgttaaaattttggagtcttaattttcatgtgtacacctctttgcctgttcccacccccagacttgaaataacacttcagagtaagagggaattcagctaatttgtttttaaaattgactgtagtggtcactaaaccctttttgagagaatttctattaaagatgaggcagactcgcttatttgaattgcacaatgttctaacaaggatgtaacacagaattggcttttttttccctagaaaaagattgtttgtttctatgtcaactagatatgattaaaaataagtattgccaatgctgttttcattctctagtggccagaatcattatccttgaaatttctggtagtgccttagcttggttaaaaaaaaaaaaaaaaaaaaaaaaaagggattaacattaaataaaagtagtttagaatttgggcctcagacaagatattgaacctcattcagtttcacttccacatgtatgtacaagttaggtcaccaaacacggaagtgtgagtgtggaaggatcttggcactgtaagcaatgctatccattgatgtatacaagtacctttatagttatcgatcactgttaaaactttcattttaaaatcctattaccaagttcagttttttaaaacttcaattgtcctggctgattatgcatcactctgtgtgcaacttttttatttcatttagtgtttctttcaagctgtgtatttttgcctatttgttgcttgtgctt

SEQ ID NO: 129835 - DNA, 1044 bp, Homo sapiens
ggttggatcctcagattgggtccctagatgatggtgcaggagacctctccctatccaaaagctctatctccatcagtgaccccctaaacacaccagcattggatttttctcagttgtttaatttcatacctttaaatggtcctccctataatcctctatcagtggggagccttggaatgagctattcccaggaagaagcacattcttctgtttcccagctccccccacaaacacaggatcttcaggatcctgcaaacactatagggcttgggtctctgcactcactgtcagcagctttcaccagcagtttaagcacaagtaccaccctcccacgtttccatcaagcttttcagtaggattctgggacatggattcattacagaaatgtatgtgtagctgtgccctagatgaccatttttattttagtgcctactttaaaacagtataaaaatttctgcttttgtataatacaaattttcattaagccagtataaaatagaaactagcttttaaactgagctttggaaccatttgtgttcagttaagtttacctgggtattttgtcctgattcactgccaattgtcacattttaagacttttttttttccatataggaaagccattattagtagtaaacttttacaaatcccattttcaaattacttttagatcttaaaattttcatttttgtctaataacagtggctctaccttttgacatctggctcattaaaaaatttagcaatagaatgtaaattgtataaaaagtttgtgaataactcaagggtttaaattttcttactagcttctaaatggattaataatcaagtgcttcaaatgaattaagagtccagtttcggaagataataaatgtttgttagatacaccataatttcagatcagtatattctgaagactccctgttgtctggctaaaatatttgccatctttattatgagcctttaaggaaaacaaaccctaaacacaaagcatcagtatttatagcaaaaagagactctgttaggtgacatggcatttcgtgtc

SEQ ID NO: 129836 - DNA, 1463 bp, Homo sapiens
tgagaagccacctaaagctatatcatttagtggagttgggcagttcccaagtgtccaacaagaaggcctggtttaggctgcgatggccactgtcattcctggtgatttgtcagaagtaagagatacccagaaagtcccttcagggaaacgtaagcgtggtgaaaccaaaccaagaaaaaactttccttgccaactgtgtgacaaggcctttaacagtgttgagaaattaaaggttcactcctactctcacacaggagagaggccctacaagtgcatacaacaagactgcaccaaggcctttgtttctaagtacaaattacaaaggtattaaactctatttgtctttcagattatattttctcttatgttggctgtttgaagccattgtaaacgtatgtatttgtatacacatttttcagctaatttgcaaagaggaaatgttaagtagattagacattggtttagtttttagtattctaaatcacatacttttatgtgttagtgtctttggactttttaaaataaaatgcttaatgagtagaatttccatttgtagaaagaaattacaacaagaaaagggtaaggacgtttacgtgagtatattcagtcttgctcatttgcttttgtaatgatagctggaaaccagcaaaaactaaagtggcaacttaaatggctcaagttttgcagtaattaggtatattaactatcctcgtggtatatattaagttaaacagtttccattactaagggaattctgtgttagcatagtagtttagcttccatttgaaaagtgaatacatgccatttttgtcataataactacttatagattatatctgtgtttaaaggcacatggctactcattctcctgagaaaacccacaagtgtaattattgtgagaaaatgtttcaccggaaagatcatctgaagaatcacctccatacacacgaccctaacaaagagacgtttaagtgcgaagaatgtggcaagaactacaataccaagcttggatttaaacgtcacttggccttgcatgccgcaacaagtggtgacctcacctgtaaggtatgtttgcaaacttttgaaagcacgggagtgcttctggagcaccttaaatctcatgcaggcaagtcgtctggtggggttaaagaaaaaaagcaccagtgcgaacattgtgatcgccggttctacacccgaaaggatgtccggagacacatggtggtgcacactggaagaaaggacttcctctgtcagtattgtgcacagagatttgggcgaaaggatcacctgactcgacatatgaagaagagtcacaatcaagagcttctgaaggtcaaaacagaaccagtggatttccttgacccatttacctgcaatgtgtctgtgcctataaaagacgagctccttccggtgatgtccttaccttccagtgaactgttatcaaagccattcacaaacacttt

SEQ ID NO: 129837 - DNA, 1028 bp, Homo sapiens
caggttaggaaatcaaataatgaaaattaaggtttgtttcctgccttggtagaatgctttataccagtttatagtgtcattactggtcacagcagagtagctgtttagatatttccaagggaagcagaggagctagcttttgaatgagaatataacagaaatagagcaagaagcccttgagatccagaaaatctaaaacaaaaagaacatatgttaccattggtaatgtcagttgcattgtgttaatgtcacttttaaacagcaaggcggatttttagaccgtttgaatagcacaaaggccttgcctgtatctacctaataaagaaagacacctgaagcaagtactgatgaacttacccatatgccttactatgttaataaagtgagtggataattgctgtattttgcctgtttagaaacagcctttacattaaaataaagttagacctattgtaacatagagttaattttacaaaaatgtaggtatttagagctcctgcgaaagtataactggaatccgtgaaagtcagtctaatagtaacttggtagtagcttgggacagcaagtgtcagtgtcagtctggtgccaaaacacaggtgatataaggaagttggttttaaaagaggttgcaggtattatttctatggtctcttaaaagtacatcacaggccaggtgtggcggctcacgcctataatcccagcatgttgagaggctgagactggaggactgcttgagccctggagttcaagaccagcctgggcaacatattgagaccctgtgtctacaaaagataaaaaataattagccaggcataatggcatgtacctgcagtcccagctactcgggaggctgaggcacttgaagatagcttgagcccagggaagtcaaggctgcagtgagccatgattgccccactgcactccagcctgggtgacagagtgagactctgtctcaaaagaaaataagtacatcactcaactagcctttataaacgttgaggaattggaactttgaggagttggttttc

SEQ ID NO: 129838 - DNA, 1034 bp, Homo sapiens
gtagctctgagaggcccccgttgtgctagtgtgcacagtatgggctgagtgctttcaccgggagcctgttgttctttgggtggctccagatgtaccctccgaaaggggcctaaaattgtcacttccataatattaataaacttaataaaattttgatcatttggtttataaacagtagccctaatatccatttcagtaggtaagtcagattttagaaataaataaatttgggaaagaagtggggagtcattcagcatcacaaattgctatttatctaggtaatactttttatttatgcatttatttggtcacgtaaatgtgcttagacctaataaacatatgtagttggtgaaaattaatgcatgactcgtaagcagagtatggaatgtaagcatgtgccatgaaactgcaattcttttatcctgtattttccatcatttacataccggttccatttagaggatagtccattttcacttttttttcatagattggccaaaatgggaaggattggattccactctcttccacgaagagtcaatgggactggctaagatcaaagtctgaggctttttccatcagtaatcaggtatgcattgaactaaaaatcactataattctatgcatgcacctttaaagtatttgactgatatgcatattatgaatgtggtcttttattagattttgagctcacaaccttatcctatagtttgaaatgcacctatgataattaatttgagttttgtaatatactaaaataaaaaggtattatcagccatgaaaaaatttcagctggtcttagaaaagtgtaatatttgaaatcagtgcaatcttcattgctcagtatgtacatccaaagataacagaattcatttgttactccatattgattatcaccaattttagtaacaatcaaatgtttgtatattgcatattggtgcacttctaataattttttttaataacttagaagttgtttttcttaactggaattctttgcccattatggttggattttataacacaatggcaaa

SEQ ID NO: 129839 - DNA, 1028 bp, Homo sapiens
ttgacatcttctgaattacttactaaaggcatcttgtaagcatacaggagaataaagctttgatgcttgatggtatttgcccttaattagcaaaatctgtttgacttttaaatatgaaataattattgatgcaggtaagtgaaaaaattcacagctcttagcaaaatgattatcagaactatggaatttaaaataagcagttttaatacaggcctgttcttttgctggcatctcataggaactgattttagtagaccctctgatgtatgactcattttggcttgttagttttttatatgagtcactgttttagaataatgtaaaacatcggaagataaatctgggtgtgtgtgcacaaacacgccatactctctctattgtttctgtatgcaaagttgccctggaaaaaattgcttcttctggtaccaacaaaaactagaagggtattctgaactgctgttcatcttagagtgatttgaaatgggtgtatgtattttctactttggttcacagttcatcagaccaaggcaaaggagaattttcgtcacttgaaaagcacaataaccaatctttgtgagttttttttttttaagtagaaaagaaaaacatgagtaccaaaccaagttttgttgcacttttcagaatagtactcctggtgctttttaagtttttcttaatcctatacaagagaatatacagataattttatctaacttttcagttaggattacataaatacaaactgtatattttttattatatcaatccaaagaataatttctaaccagtcctgctttcttttttggggggagatatttagtagaactttgaaattatttggcaactcataagaactcaaaataggttcaatttagggaaattaagaaattcaagattatgttttgggataaaataaaatgattggctgtgttattttagactgtaaaatacatagaatgggtgatttctagactattggaatatgtcacaatatacataattttaaactgtgttgaaatacttagatg

SEQ ID NO: 129840 - DNA, 1057 bp, Homo sapiens
tttcagttgggcatggtggctcacgcctgtaatcccagcactttgagaggccaagacgggtggatcacttgaggccagcagttcgagaccagcctggccaacatagcaaaacccccatctctactaaagataacaaaaaattagccgggtatgatggtacatgcctgtaatcccagctgctgcggaggctgaggcatgagaatcgcttacacctgggagttggaggtttcagtgagccgagattgcaccactgtactccatccagcctaggtgacagagtgaaaccctgtctcaaaaaaaaaaaaaaaaagaaaaggaaaagggagttttcaaaagagaaaaaaaacttttaacttaacgtggcatttttgctctataaaataaacaaccaaggaaaatatgtctgaattgggagataaaatttacttgatactccttcttcattgggttatctgttcattctctctggctactctagaaaatgagtggcctgaaaaggaacatcctgcttgtacagataagagaactgatattggggttttctgattccactttggaattcattgactttttcctgttggttcttacagacaaaaagttatgccatttttcccctcacttctcacttctcaattagtttttattatctgtatactaaatataagacatttctaaacatcagtaaggctaatttttatggtaaatttcaaaaagatgtcctagaactatattttaatgaattgctcaaaatgagttaaaaatataaaacgcagtaattcaaaaagggcatccttatttttgattaactttagttaactatgacatctaatttaggaaagtaaatagtgtagttttccacaatccagttataaaatgcatttttggggacctgctgtaaactcaggcgagttaggtgcatgtcttggctatgtctcctgcttcacagtagttgctccagctcctttctgttcccctctgtagggaccagcagccccaactgagagtctcgtccttcctgccccataccaaggactaatgcaggcatcaggcgtgtttt

SEQ ID NO: 129841 - DNA, 1094 bp, Homo sapiens
tgatcaaatagaattggtcaaggaatatagataacaaacctcttctaattgttccagccaggagagtacatggggtcctctggaggcagaggagagagcggctacccttgacatgatggttttgcctagaactgatcctgtttacccttaactgtgtgggaataaatagaaatagttgtttctagaagtgattttatcctggacatgcacatgagcataacttagggaggacagatggatggtatgtgcagacctgaaccaggccatgaattctgttttcattacattttttagtactactaaagcatcagcacatacacaacatttatgccatagcacaagcctgtctttaaagtacactttactttgagatggcttaaaactaatttctgcttgagcttttatagataagtacaacttatatttatagctaagtaaaactttctttagcacttttcttataaagtgtctgatgtctgcctttttgtttgaatttataggcagattcagtatgggtgcttgacagttcagacatgaaatctggattattctgtatttgcgattttaatagcattaggcaatttactatacatgaatggaggcatgttctctagatatttaggttccttcattgtgaacatttttatagttggtgtcaaacatttttgttgtacccccagaaacttaatcagttactggtaataagatcaataacttaccacaatttgggatacatacagttttcagattgagctgacctgtgggctacctactttgtaatcagaccaagatcaccaatattttgggactgttttatagaaaaaaaaaaaagcacaggaaattatctaaaaatagagtattgattaagcagtcttactttgcattcagatataattgtccttctttgctctctgaggcatcattgcttcccttttgcacaatttctttttcatttcctctttgaaaatactaatggccccatgtgaaaaaaatgaaaatatctcagtgttgtaccacccattgtatttttaagtctttttattttgataaaaatacacaatcatagggaaccccccacccccaccccaaatagc

SEQ ID NO: 129842 - DNA, 1777 bp, Homo sapiens
ctcagactggaaccatacataataggtgttggtaatgtttattccatcagtgtcagatattcgtcttaggagagtggtaaccatgtataattgagccttgaccctctgttgtagggaaatgaagcaggtgattttctgcatagaacttgtggcttctttttctctcttagttaatatccctagagatcagtcttcataacctgcaccaacagacggatgcaaacattgaatacttcagaatacattttgcattttctttgtatgtcgttgaggatggacatgacctgggaatttaattgaaaacaagcaataatcgcatcataaagactaattcaagagctcagaaattgtccctggctccttattctgcctctgcttgagggtgctcagtggcttgcacccttctctgtggacaggtggcctggtctctgactgaggaaagcactcatggggcaagatttctcccatagcaattgttaaggacaagatagacaccacaaaaggtttttctgaaaactgtgttgcagagaagataatgggtgtgtttagaacataaataaaataagcagcagttttgagaaatgacagtaaacttgaaataatttatcaaaaatgtgaataatctagataactgtgattcgggaggaaatatataaatctagggatattaatttgtgtacttttcatttttccatgtactatacatttttaacaggatttaagatacatttttcaataaagtgcaaagaatgtgaataaatgataatgaattaaaagcagtttggttcatatgccattaaccagattggcctgacttttggaatttaaaactaactcttcttttctttttaggttgcctcttggtgctgccttggccgtatttggcacccagaatgcttcattctgtgacggtctattaataaggttgccttgctagagtttggagcagggcctcaggtaggtggcttttatcattatatggcatgactttcaaagtgattaattattccagttcctaaatactataagatataatattaaaagctttgaaaagcatgccacataataagcatgccacttacaatcttagggtctatcagtatgtactgtgatggggacttcagtaataattatggtcgaatgggaggcttgaaatactagcaaggagcagtcttcctcactctttgcacaaaacacatagctgctgtaaaaacttaatttgttcctgttccccagatagcccacagatgtactcttaagctcttctttctctaaatcttgcacagtgatacagtatcccatgttgcccttatatcttttttttttttttttttttttttttgtctcctgggcgggatcctattacctatgggcaggtggagagggggattagacttgctcacagggatggggcagatgctagaataaggaacccaatgcaacaatagcaatttgccagcattgttgggaagaggacacacacaagctatctagatttcccagcctgtaggcgcagctcagtgtcacagaatcaaggtgtagcaatacttggaaatccaggcacacgtggatttggtaccaggtaagtctgtcagtacgaccttcaagatagggtagaggttgagaggccaggacccccagccctaggacggggagactggaaaaaaaaacaatggtggctgtgacagataccaggggatgggctcctgaactcttcactgatggcagatgggggaaaggaggccttgggcagggtttcacaagatacatcaacaga

SEQ ID NO: 129843 - DNA, 1015 bp, Homo sapiens
aaacatcctcttgttgaatatcatttgcttatcacccaatgagctatccttatttacacattctcattctccctcctcccattctctcactccctcccgccccacccaataacttctcttgctgaagtttggtgtcctcatgcctaagtggtgaacctatgggccagttctgtagctcttagcatttttatctttgtggtttccgccacatttttcttccttctccttgaagttctatctctggtctttctccccttaaattagctgattttgcctcatagaggtgatctttaggctctatcagcaattaaccagtaacttggcttgaatctgtctctgtaagagttggctgtacaactatcattgtctttcttcctcatatctctttttgttaatactattaggcacataagtggactttcttctagtaaatcttatttttgctggttttcatctccgctttggataactccaacacatatcttctgtgtctcattcaaacaagcacttcctttcctccctctcccgtcctacctccccaagcatttgctgttctcagtgctttcaatccatctcataatgagtacaagagtgtgaacagtccagcccattgggcacttttctcatctgaatccgtacagcatgtataaattacacttcacggtagccagaaggtcatcttagaatctaatcatctgtggttctaatctctgacttcttttttggcagtcatgccctcccctacaaccacacacacacttttttctttgtctttcttaattgtacattttttaaggcaaaaatcaccaaatatccatagtactcttttccttttctgaccttctgtggtacttttttataccatataatattgtttttaaatgttgatttgtcactctgataccacgttatggcagatcttatttaacatttatatttcttaacttgacaaaaggtatatattctttttttatatacatactttaagttctgggatacatgtgcagaacgtgca

SEQ ID NO: 129844 - DNA, 1483 bp, Homo sapiens
acaaataatttttaaagtttaagccccttctgacatgacacgtccatggctccttcacccttcttgtctcctgcagagctccagtctgcctctcttgctcttagctccaaaaacagtgaatcccctgaagttacctagacccaccatacagtttgtgactccctctacctggagtacctgcccatgcctggctaatacttgttcttttgttaccttggcttctgtgttacttcatttgttttattgaattaatcaaaggcaagcctatcaattagcatggcacttctttcttttaaagcaactgctaatgaacattttttaaaaggctatgcagaggctgaattgaaacacttcagggggtacttcctttggtatttgataaatggaacgtatcccagaactatttatcatccgtaggtctcagttccagttagatgtattcttggagactttaaatcatgtagtgtgatatgccagcccataaagcaacaggtgaaccgaactggcttcctccaagtttgacagctgagaatgtggctctaaaacctgcctagatatatatccttttctagtaaggtctgagtgcaactcacatttaagccaatattcctttcctcttttttccctccctctgaatgggaaggagagattttagtcattttgagtcattgcacttaaaggattttagtttatcagtttgcagaaagttttattttcgtacttctgtaaatttatgtgatgatgagtttctcatcattttgttttttataatacaaaaactctgccattttattgttttttaacagttttggggggtataattgatattgtataaactgcccatatgtgaagggtgcttgcagttttcacatatatatgcatacgtccctgaaaccatcaccattgtcaacatagtgagcatatccgtcatttctaaaagtttgctcatggccttttgtgatggatccctccctatcctaccttctgtccctagacaacctctgatctgcttcctgtcctctatggataagcttgcatttcctagacatttgtatagatggaatcgtgcagtatgtactctttgttttgcccaacttctttcattcagcctgcttattttgaggttcatccatgttactgtatgtatcaatagcttattcctttttgctgctgattagtagcccattataggaatatactacaacttgttcatttgttttggggtttttgtttttgtttttctgagacacagtcatactctgtcacccagactggagtgcagtggcatgatcttggctcactgcaacctccgactctcaggttcaagcatcccaggttcaagcctcccaagttcaagtgattctcttgcctcagcctctggagtagctgagattacaggcgcctgccaccacaaccggctaatttttgtattttcagtagggatggggtttcaccatgttgcccaggctggactcgaactcct

SEQ ID NO: 129845 - DNA, 1406 bp, Homo sapiens
catgtagctattttctctgatttttagctattataatattttcataggtgcattatcatcttttaccaaccaaagttaagccataaacaggggtcagtccattgctggatagtcaataattacatattacccaagttacttttcaatttaacatgcaaactgactgctggcttccggtggatcagttttactttagctgtgatttgggtttatgtatgaccatggccaccataaaatttaaggtacaccctgcctatgccacagagatgagtaagatcagaagtatgctacttcaccaaatatcacttttaatacaaatctcattatatatgagccttgttctcaggaactattcccattgtttgtccttcaaagattccattgactgtgattccgtataagagcctgtgcccaaaaaaaacaaacccttattttttaaatccatatcaggccagggcagcacttacttctgagtaacactctgaatataacagctttgcattttgagccctcagaactatgctagagactttacatacatcactttaattcacacactactgcaaggtagatgtttttcccatcctacagaggaaaatgctgaagagagactaaatacatcattgaaagtagttacacagatagtgaaggtcagacaggattcaagcctagttctgattcttgcctttgtctctctgctgctattcccctgcactgctttaggttctgaatcagggcaaggattcatgttttcgggccctctccaagtcagagttttaaagtagcattgcaaaggtgatttccagaactatactgcctgagatgatggaaagaccttctctctgtaacacatctgtgtatcgcagtagggaaggagaccaggggaatgggggcaaactgaggagtgtatcatcatgcagtgtaggggccaccccagatcctggtgctgaagcttcaagaaggaggaggctgggactttgcattgatgggttttaaccccattttgttaattaactgtcagcaaacactgcaaaggcttaagtgagtttatagtttaggaaggtcaggccaggcacagtggcttatgcctgtaatcccaacactttgggaggctgaggcaggtggattacctgaggtcaggagttcgagaccagcctgaccaacatggtgaaaccccatctctattaaaaatacaaaattagccaggcgtggtagagcatgcctgtaatcccagctactcaggaggctgaggcaggagaatcacttgaatacgggaggcggaggttgcaatgagctaagatcgcgccattgcactccagcctgagcaacaagagcgaaactcggtctcaaaataatgtaataatagtaatttaagaaggtcacttttttttttttttttaatgcta

SEQ ID NO: 129846 - DNA, 1059 bp, Homo sapiens
catgataccttgatagttaaattaaatgataaggatttgtttatctgtaagtttgttcttatatcccttacccggagctctgtgcagatagggggtctatactggtctgttggggaagacgaactttctggacatgaccacaagatggcaacagtgactgcagcgtcctgatatctgtagagggtgggccaagtcaagaaagagaacaatgtcttcttgattgcaggagactcaagggaaatccaagagaattttcaaatttaaagcattgtgtcaatgcccagttattcacagaggtgagcaaatagattggacaactgttttcttccgtgggttcatttggccaacagcatggaaagctctcctcctgcccttcctctcatcttccttttattcattcagcacatacttgagtttcccctgtgtgcatccactgttctaggtactagacatacagaactggtcagtaaaaggcaggatcctgttctgatagagcttacattttgtggccttcactgggacccagtggaagatattgcagacagaaccaagagtttccttgctgttttttgttacttctggagtcatcttttcccctttgccccagcatggattgatccatagttttatattatccccacacgtttcatttcaacaagcaaaggcaccactggtcagcgaatcacagtgactaattttgttttagccatgattattggtggccttctcccctgcttcccagttacccagttaatcaagaatcgactgtgttcttcttacagttgaagatatggaagttaaagaaaggtaaaaaatcatgtctaatgttgcacaggtggatacatgagaaagtacatactcaggtcttggtatcattcattcctttctgatcattgtcagtaaagttttttaaagcaaaagaaagcaaacaagtccagcattgtgataggtgcctatagacaaatttgacatacactgtgtctgtgctaaaggtgacttataaggtggacctaatgtaagtttacttaaagttgcatgtagtgtttagaaacatttctt

SEQ ID NO: 129847 - DNA, 1573 bp, Homo sapiens
ccacagtgtgtgctgggaatttgagatgactacctaaaaaatgtgtgtgcatgtgtagaatgaatgaacttatgcagtatgtcctaggttaataggacaagaaatttgcttaaaatatttccttacatttaaaagtggaatcttcttaatctaaaaacatagaaaacctagcaatgtgaaggtgttaggaagcaaaaattttttttggtgccttttaaaaataagaattttaaacaatgaaagtatgtaacaataagtatggactaaaatgtccaaaattcatggtaaagaatttggtagataagaatttcagagtaaaataacaattgtggtaaattaaaaattcatcttatgtgaataaataataaccaactacaaggcaaaagttgtaattttgccttaaaaattagataattggggagatctaccaaagaatatttttaataccaattgctggtttcataatgacctttttaaaatagatccccaaagcctgccttccttctcttcttagatttgaattaaactaaattaaattctaagaataatttgtaatggttattcagaattttttttaaataagaaaaattactttttgctatttttataaaatattttgaagattgttttgaatgtgtgtcttcgtgaagtgtcctgagaaagttagaaattattgaaaatcattttcttcattgttcatcagaaagtttaaaactttaagttaatgaaataaattttaaaacctcagtctaagaatagtttgcttcatggacttttttagagcaatttaaataatttgttacagacttagtcacatttaaaaagcctttcacaagataatgataacatttcaccaacaaagctcctaatttctggtatgtttttaggtctatgctgccgattaaaggaattttttctttcccgtttattaattagcaagtgcttttctgaaagagtatctaaacttttggtataatcttctgggatagaagttgcctttactattagaaaatattttgagagaggagggggcatcttttcttaaaaggcaacagaatcctttacagattgtgaaggatgtgccattagagagtcttgaactcttcttttttgagaatgagagcccccttttagcctttcactcattaaatatttgaattattattgcagaccaatattggaattgcacatatatatattgattgtgatttcctatctttttgtttctgaatgtgataatattctcagaataagtgctatatgttaaaggctgccatatcagtttttaaaaaattatctctctttaaccagtggttagacattagagccctttaactttaaaatacatttttggagactgttaaactagaaatcaattagcaaataaggaatttagcccctttggctcaaaggcaaaattggaaggtgtcataatcaattttattcctttgaagatacattagtaaatatttattgaattgttcttgatcatgagaattttaagaaattaaacctggaaacttaagatagttcaagtgtacagtttcaaaataacaccggttggattttagtc

SEQ ID NO: 129848 - DNA, 1109 bp, Homo sapiens
gttctttggaaaattaagatatataaaaaattaccagttacacacatccccaaggaaaaaaaagttttactgaagaaacttacttacattgcttggaatacatattctttttggtgtgtttgcaagtgtataagaaataaatattaattttttctctttatattgataacatcttagattctttaattatttgagtaagggaagagtttcaaaaggaggaaactgaatctgttcaacaaaatccaaggtagtgaatatgatcaaggtaaaagggctataaatcatcccttgagccatttttaaatgtcttaagaacctgataaacaccttttctgaaacattgaatactttgaaactatatcagtcacttctgaaaaacaaaggtagacctttagtttctttagttctaccaggaattaatataggtagcatatttaaccaattagtaagtgtttaggtagtcatggaaaagtatttacaagtaagtaaaatatgaatgcagggtaaatcagattgattagctgtaaagttaacctgattttagaattcatgcatgggaattcttttctattttaccgtaagactactttggaggtaactaatttttgctttttgtattttattgcctaaattttttgaaatgctcaaacctaaaatccactgttactacttttcatttatgttagattaacttttatatcttatttgcaaatttcattgtaaaatttgagaaattaaattaagatttttagattataacattttataaaagtattgagctattaacatttgaagttgtaagaaatgtatgtgtatgaaagcctagtagaaattattacagggacataatttgatttttacttttaaatcgattagtctgctgtccagaggtttgcattatactcactgtttatagctatccctgcctcctctttacagggtggtactgacaaggatatggtggtgtggaacctccaagggcacttgggtatttttgttttctgattttgtgtatgtattggtgtttgttgttaagaattttgctcttaaaaaaaaatgcttatcagaacatttaaaaattttataaaacagaaatatcttattttttt

SEQ ID NO: 129849 - DNA, 1978 bp, Homo sapiens
cttttggggagggatgtggagttgcttggtttcccccttcctgacatgtttgcttcacctgttcatccttcctaaagaatgttaagctgaggttttctggttttatgtgtataaaaggatgatgtctcttgcatcacattgatgttaatgggaaagtgctgctgatgttggttccacgtgggatatgggacagagcagggcattttaaagggacagcttctcttttcttatggttttcatcacctacacagaatcactgtctgaggaccaaaagcagaggtgctgggagggtgtggtgatggaagagccttccctttctgttactccagtgcacccacccataggagtgatggagggacaggagggataaacagcctcaaccgaagatggatatgtgtatagtttgtatccaaactgttcctttgtgtaacaagccctcccaggaacttttcatgttacattgctttgctttggaagctgattttggaaggaattgtggaaaaatggaaatagtttaaggtgtgtggtgtaatggtatagcattattgaacagttatgaattctgtgcagtgagatcaaagagctgtgtatgcccataatgtgattttacagccattttgtaaaaactgtaaaataccttaatattcaatttggcttaaggtacattgaggacttctggttgaaaattacagagtggtgaagattctttaaaattgtaagcagtaggcatttctttagggggaaggaaagcacacacaccaacaccatggaaaagtttacacatccatttttaaagtccatcctatgcatgggttgtaactttgcgcctttgaaatgaaaagatttttaaaatcctgagccctgtgagttttcattttctaagttgaatttatttgtgttatttaacagaaagtgtttactgaccataaactactatcggctcttatgttttagatttccacgatattttcaaaatttaaaatgtgtaaattgttagctgtactataatggggattaaggttaatcttcagtagaaattacttgtgttccattttccacaggtatatggagtttctgaaataaatccttatttcctcttgtttttattatttatagacatggattaaaattagagctgaatttttagacttcttatatagaatgttttttcttgccctactgtataaacaagttattatttttgtagtctattgtatgttaacttgtgtttacaactgagttcttccaactttctgtaaatacctctatacaacatcacatcagtaacgtgtttgagtacatcatcttgtggtttctgattttggaagcaattacaactttctaagaactcattaaaagattaatctcatcacccacagttaaatcaaaattgattggaaaaggattaagctatcaatagagaagggaaactcctccatgcccaatgatcttctgtccagaggtttcagaatgccattaagacttacaaagccttttcattttatcttacgttttcattgtattttggctcaagacagttacattgactataagtagtcagaattatgctgtgcatttaaaataaatgagacttagatcttgaataattgccactttgacaaaccagatactaatatcaataaattcaatctctataaaaaaatgaaggaattcaagttatattagattatcgtgttattcaggttgtttggacactatgactggtttattgtcaatctaaataaaagtgctggtattgtgattttttttcttcctctcatatagggtggtgtaaaactttcttcatgtttgtattttatgcaactagctacttgtctgttcagaaaacgcactcagagtgcaccaatctaaaatctgtaatcgcttagagagtcttatttagatggggcacagcacaatatttaatttgaagtgattgtactgagcttttgtgatgccttagaaatactacctgttg

SEQ ID NO: 129850 - DNA, 1787 bp, Homo sapiens
ggattaattgatcacagttatttggctcaaattcctgtgatcacatattcagaaaactggcccacattataaaaaggaagatgttagcctgagcagagtgcatactgggatagctggcgagattgtccagtttttattagtctacccatcaaaatgaacacaaatgaactatttcacattatttgcttctggggaagcagcttttgtttgtttgtttgtttgcttttagatcctgttctaccttttaaatgatgcctctcttatatctgtaaggaatctgatgcttccaccagatgtctggatgaaaataactatgacagggaaaggtgttccacttacttcttgaggtacaaaaactgccggagattctgggtaagcctagattggttagctttgtgttaaaacccatctcctagggttgaaactgaagcctaaaattagtcagtacccacaatcctttcccactgatggctgtagggaaacttaacttttcaactttatcctctgtgtgctactttagccgtgaaagatccttgagagctcttgttagctgcctcgtcgtcctctaagctataagaatgcagttttaatataggtgggtcttcttagacatttaagtatctgcagccctaaaacaatgtctttgttataaatttagttttcctggagatgaacagaatgtttaacttcccttgtcataacacatcatgttaggcttcaatttctgcctttttctctctcactgccatccgtggaagttaaaatggtccatttttctgaaaacattggtatataatttctgtttccttgaaccacgggatccagctatttcctttcgctttgctaaatgcactgttggttttatttcacgattattcagtagctcttcttgacagactgtatatacttttgtactttgtactttgtatattctcatcccaattgctgttaatgtattcctgtgggaatgagtacttctatttaattgttactaatttaaatacgtttatctggagtcctataattaggttttgggattttttttttaaaaaaaacttggtttttagaatttcctttttgaggaagcaatagcaaattactggcaaatgattagcatttaatacatgactgattttggtttcttcttttttattttaatgcctgtacacagaattctatcgtgatgcagagaagaaagaacggagtgaagccatttatgcctacggcagcagaaagagatgaaatcttgagagcagtgggaaatatgccctattgaatgtttgcattaaaagtgtttatataacttagaagcagatgaatatttctaataaatgattgctgtaatatttaagactgtacacccctcacccagacagaccttaagttcttcaagtggagacagtgaagtcaccccgtgtcctttttgcttgctctcagtgccatgccgatggtatgttgctgttggctgtgttgtggcatgagtttgcatgactttctggaggcatggagttaggtaaggctacatgagaaattgagcttttccactgggttttgaaagaagagtatgatgtgaacaagtaaagactgaatggggctgagatgaaggcaatgtttccaaggaaaggaaatgttatgagcaagagtgtgaggcaagagaagctggaaccacattcagagagtatcctgtagattgctccacctagaatctcaggtgggtggagcagtggtgggagaagactggaaaggtaagttgaaggtaaggaatgtgtggtgggcctcagatccca

SEQ ID NO: 129851 - DNA, 1066 bp, Homo sapiens
ttttttataaagtactttcaatgacaaactaattgttttgggatttttaatcagcaaatccttaacatatatgtaatgactctgtccaggcaaaacttgttcagtttaaaatttgtcttcagtaattccctaattcctagtttacctctttacacctaccctgaaaacttcagtatactcttcttataacctggttgttcaagatctcatggcaccacttttgagtggcagtcttgggagtttttctcatcaccactgttaaatttgcctctgttgtatttatttccctttccaagattctactttgggagaggtgaagctaattaatttgataaattgtgtcagtgggcgccatgagaaattttggcgtcggcaagcctttgatatcaattatcaactgacaaaatatagagaaggcattttgctgtgttcatgtgcatctctgtcctgcaggaaccatcttattacagattctcagtgggttgggggaggatggtgcactgtgtctgtagcacggaaaagcatcttttttttttttcctttttgagaatcggatctagtatttgtaagctcctggaggacataatatcattcacggttatagccataatgcctggtctgcttctattatatagtaaatggtcaacaaatgtgtgtgtttgaggaggtggtggcttttaaaattgaccacactgaaaaacatgcaggttcaaacaatgcaaaagggtatacagtgtacaataaatctgccccagaagcagccggtgtcaagttttcaagattttccatgcatataaaagcttatctattacataaaaagaacatcatagtacgtgagctgtaggataccttgcttttttcacttaatgatattaagtgatattaagtttggaatgattttctatctgtgattatagatttactttatttctttcagtggcttcagtttctgttttatgatataccattattgaagcaatctcctgttgatgagtgtgctataaacaaggttgcaacatctttgttcttgggtctttgtgcgtgtttttatctgtaaaattgctaa

SEQ ID NO: 129852 - DNA, 1050 bp, Homo sapiens
attaatttttaacaacaagatcacttagatacaactttagaatggaaatattattgctccttaaatatcttaagcttctaatggtgtttttatttgttcatcatatgtcaggaataaaataagacattttaattattaatggatcatctttagattcttacgtagttatatatttaatcttctcagacacgaagcttaaatactcattaagagcttactaaatacgtgccttcaagattttgttgcactaataaaatgctttctttcattgtgaaaataatatatgtgtatttaacatcacttaatataccagtatatttttaataataccaagaaagacttcagagggctgtaaaaaactcctgaaatgctaagaaatatcatgcatgttttgtaaatgttcacatattagtactctctttatcatacccaagtgatgtgttaaatagaaaaaaacttaagatcattcgaatgtatagacttacaatgattttatatttaatatttatataagaaaaaggaaagaatgtatgctgatgattcctattttaccaaacaccatgatttccattgaaaaatactttttctgtacaacagtgactaaatgtgaagaaaataaacatgaataatttgtgcacttgcatttgtataattttatatctgatctcatcattatagacattttgttcaaaataataaagtctgttgtatccagcaaagaaaaaaggaaaaaaacaaaagatctgtacttacaacaaattaacaaattaataagaatgcaaataattcatcagatttaaattgagtttttaggatgtgtttataaactttttttaaattgttgtttttctttgaagattgaaagtatttgcaggaatactcgataccattttaggtaaaatattaacacaagaaagcaaatgacccttaggttattaatattgattttatctctaagacaagaagataaaaggaattttgaggaaatatccctgattaggtaaataaaaatttctcctttttggttagaaaaatctcaaacaaaattat

SEQ ID NO: 129853 - DNA, 1069 bp, Homo sapiens
ccacctttcagatcctaggggactttgtctcctctgcgaagtttttccttacttctgcagacagctgcttgcttcttgctctaaaattgctaatgcatgggctcatgctgctgtcaccttgctcactggaaggctggactgccttttttatgtctgtattctttgccctcctctcattctttggtacttcgtagatgcccaatttccgttcattgaataaatgaatccctcacttggctcaagttaaaatcaatcatcttacctggactgataaacatttcagctccctggagctcctcagtcataagtatattgaggtagcaggttacctagatgaagacttacaaagcaagaccaattatctcccactccttccctgctttccttccttttatcattcttctcgtagagagaagaggacctggaaaagactagcattttggagactgggaatggtgactgggaggccacaagagggctgcctgaagaatgtgctggaatgagggaaagagattgtgtgagagggtttgggctaccccatcctccagggctcattcgaaagcactgttcagtcactagcgtttttctacttaatcaatggtgaatagctttccacaggatttcacttttgcaacatgattggtaatggctacatagtgttctttagatgacgtcttataatttaactttagatgatgtcttataatttaattaacttcccctatttttgggaagtcagactgttgtttcttttgcacatctaaaaaaggaacacctctcaggtctgactccctcctgaggacagagatctggctgtgcccttgtctcttgcaaggaaatctacatgttgctaggctgttttgcacccccagcctgtcctctgggaataggaacgagcctgctcactggcctggatattctgtcgtaagagtcattttttttggctttgtaacacataagtatttcaaaagccactcttgtggccttctattacactatgaaaaactgagggtccacatttgccttgaatgcagacctccctgccctgctggggatgtctctctcattt

SEQ ID NO: 129854 - DNA, 1045 bp, Homo sapiens
ttatttgtccacaaaaagaatgaagtactgatatgtactacaacatggataaagcctgaaacattatgctaagtgtgagaagccagtcaccaaagaccatatgattgcattatgtaaaatattcagaacaggcaaataggtagacagaaagtaaattagtgattgcctatggctgggtgagtgtagagaggaggactaattattagtgggtatgaggtcttttatggggctaatgaaaatgttttgaaattagattgtggtgatggctgtccaactctgggaacataatagaatccattgaatgttacatttaagtgcatggatttttgggatttgtgaatgttatctcagaaaatctgtttttttaaaaaaacaaggaagtcaagatgtacagacacatggttaggcacatagccaaggctgggcaaagaaggcaaagcaaaggcagcatcttctaggagagggtagtggagctgcaacctagagtgattaggagttagcctgggtaaggtgaagaaagaatgggtatagaattgtaggcagaagagacagcaagtgcaaagccagagataagaggtggcacagcatgtctagcttatggtaggctgggtatgtgcatagtatagagacacggcttgtgggtggcaataagtaaagttgaagggataaagaaggacctgatctcaaagggctgctaccatgctaaggatttaggactttagccagaaagcactgctgagctgttaaaaaattttaagcagggaaatagcatattagatttttgagacttagaatggtcgcttttgtagcaggactgaagccaatcaagcaggaggcagggagacaagtagggagctgcgctgtggtctgggaggggcttgagtaaagcatgacccaaaggtcttcaaatgaacatgtgcttcagtagagcctctgcctcacctgggtccatgctgagaccaattcctgacacctgaagttcaaccaaaaaattgaaatactcaattgttacatttaaatacaatgaatactgtcttggagatgt

SEQ ID NO: 129855 - DNA, 1038 bp, Homo sapiens
aagaaatcatgtcctttgcagcaacacagatgcagctggaggccattatcctaagcaagttaatgcaggtacaaaaaaccaaataccacatgttcttagttataagtggaagctaaacactgggtacacattgaacataaagatgggaacaatagacgctgcagaacactagatgggggaggataagaggggagtaggggatgaaaaactacctgttggacactatgcccactacctgggtgccaggatcatttataccccaaacctcagtgtcacgaaataaactcatgtaacaaacctgcacatgtaccttctaaatctaaaataaaatttgaaattatgaagaaaagtaagacttgacttcagtaagagaggaatttttccacctgtgctcaagatactctaccacaaattttttcaggaaagcgagtccttgctatcagtttttgttggaatagaatctaaagctcatgatccaaagactagagagactcagtcaagttatctcaagcaatgggagcaggaggatggttaatgggagatgatatgagcacaggaccaaggaaatcccaaacaacaaggtcctaggaaaagcacaccatggctctacattcaactgctccactgtcatgggcctcagctacactctaatgagatggctcaaattctcagcctctatccacagcctgcatctggttttcatggtttctacttcctcatcacttcagcttccacatgacaacttctctagttcccgtctatatcataggctcttcttgctatcatgctaacttctcgtctattttttctctttaatttgaattattgaaagaaaaaatgtatttggttttgctaatcattctctaccaggtcccatcttgtttttcaggcatactctactgacagccagcccttgtgtgagaagtctatttctggtacactcaacttgactctgggtgatgggaagtaagggttccctggcctttatagggctttctttttagtagagggtggagattatttgacttggaatggagt

SEQ ID NO: 129856 - DNA, 3594 bp, Homo sapiens
ttgtgaccatttcccttaccggttcatgttctcctttatctctgcttttctttcttagccaggatacttccctcacaactctcactcccaaattcttttagatatacatttttctggatattggctgctgaaatctgaagctctggtaaagttcctagtatcagagatcaatcctggaggaggcctagttcactattagattacaaagactcctcacaaagtaaaggaaaatcaccttcaaaaccacaaccctttatgttgtcaagtctaatatgagtgtttttacgaagtatttctttctacccattgttcaagaatgtaaatgtaaaaaaaaatacaagagagttgggtagatatgcatgcttgaggaaacttgcttttactgttttcctacttgtatccccagttcagttgaatttacaaggacctacaagatggtcatgtttgtcttggtatgtgctaccccaattttagtgtttctttctttattttaaatcagtaattattcagttgattgtttatactatataatgaagtaacaaaaacattttggtttgtatgttttaagtaacagttgtgcaaattcctcttgtttgttaggtgctccctttgaatattttgtgaactgtgtcagagggagaggggtggtggctaggaagagggtcagaaagaagctagagggaggtcaggagaagggtaacagggaggatgcaaagcagacatctaccctggtcaccccaggatcaggatatctgtccttgtttcatgttgaattcaaaaattggatctcacttaggctttgaaggtgacagccatctctgatagctgagcataagtaaagaaaggtggagtgccgatgcagaaaggaaaatattcagctttcctctcttagatcgcactttgaagatggccttttggagacaatctgacaggttaaaacaggaactgttggaattattctagctgtaactacctattggctatgtgttgattgatcctagaaagaaaaaataatttttcattttagatcttgattgaatttaagatgtatttatatgcctacaaaaggtctgtcttgtaactgttgtataaaataaacctaatctatggtttcatttttaatctaaaaaaagttgtgccttaacaatagggcattgtatgttaataagggaaaacaacctttttagtagatgggggaaaataggaactttttgccattaaaacttaagttcttttgatgtttttaatattatagttgggggagattcattaaaattaaattgaaataaaattatttttgcataacctagcatttacaactaaagtatgttttttataagaactggcatcttgatgtatataggtctgaaataatatttcatcttttgatttttaattttaataatattagaccaggatagatcacagttttacaaatcttagttttaaataaattatttcagtgtgctgttagtcctctacagtcattttggtttaaaaagtgactatttatttatggtagcatatcaataatttattaatgttaaaaaatactgtgtatgacattacaaaccagaacagttcctgggggagaggattctaattgattggcagttctgagagggcaagaagaatggaactttatacttcaaaaggaggttttggttttaccaggtactgcttatgtaaatcgtttatttttatttcatcaaagcctggcaagtatatgcattccaatttaccattggcaaagctttatttatttttaaggttggatgttgaattaattttgtgggaaaatgagatttgtaagtagttttctttctagataagataacataaaccaaactttcagaagttaaggatgatgaataatattgaaatgacttgttatatattgtaagggttcccttaagtatcataattaacaatttgtggaaattgaaaaagcataaactgtgttatttgattagtaatatgttcccttaaaattcattttgaggtgtatgttatacacacagtaaatttttgttcaggaatgacttgctcattctgtgtttttaaaaataggaaataaggcatagtgagtcatcattacatcaattaaccaaaaaatatttcatcccctccgtcactgaaattatctacttcagccacctttcttattctcgtgttaggagggcacgtttatggactttttaatttccatgtgccatattgtccactaccggcagtagccaaagctagctgtttcagtcccacagaagagacagtgctctgccatgatgacagggcactgctagggctggtttttcttgtttttcccttttggcagtgtggacttcaggaactagatgtatatgcacaagggattgagtttacactaaaactaggaaatggagttttcaatctatgttcttgcctcttcatacttttatttattttttgtcatcctgccttatactgggctaacaatgagataaaataaaaatacctttgaatactcttttccctttcatgcatttaaagccatggaggaactagaccattagctgttgccgtcacatgcttagacaccagtttacttagcgtgttatgaccttcctcacccatactaccaaatttaaatgggtcccgacttcaccctctggaaggaagtaaactcttctctccccatggtttcagagcagtttttacctgcaagcaccatctctgtatgtgctcttactagattatacagttcttgagagggattgcatcttagtgtttttgtatttccacctcacccccagcacatagcccagtctcttgcacaaattaagtacttaatgtgtgttgagctaaattgaataaaggattattagcattagcatattttgtgccttggttgtataagctggttgtttgttttgttacctttgcaaatatttatgattatcacccccccacatactaaattgtttttaaaagttttgcctttccttcagatactaccccaggcaatttgctgtagataatgtgattgcttccaatgacataattatcccaaactctctgccccggatatactttgccaaacgaaatttgaattctctgaataaattggtcatgtctaaaagagatggtgtgctgcatctgcttttttttgcgccccccgcccccccacctttttttctcattgcggtaaaacacacataaaaatttaccattttaaccatttttaagtgtacagtttagtggcagtcagtacatttacagttttatgcaaccacctggaaccatttccagaacctattcatcatttctaaacaaactatactcattaaatagtaactcttcattctccaccatcctcgccaaccactgctaaaatccctgtgcccacccctgagccaactcctggtaactcttcagctttctgtctctatgagttcatctgattttgaactcttaagtcatctgtttgagaacagatgtacatgacatacatataaaactaacttgaatcctttctgagatttttaaaaagtaagatggaggataaaaaaagaacaaaagacaggaaaaaattgtagaaaggtggtagtgttattg

SEQ ID NO: 129857 - DNA, 2299 bp, Homo sapiens
aaaaataaataaataaataaaaataaacaataagttactttgcaatgtatttttgttctgagtttaatgtttatacagttactttaaaatttttttaatttgaaataattttaaacttaagcagttgcagagactgcagcaagctcctgcacactccatcctgctattttaacaggatacttaatcaaaaaagtatgctactttcttaaaattttttgaataataacctaaattctttgtttatcttttaggttataaagttttagcacttttggatgtgcctgataagagtcaagaaaaagctgatttatacatccatgtgacatacatcaaaaagtgggatatatgtgctggtaatgccatcttaaaagccctaggggggcatatgactaccctgagtggtgaagaaatcagttacactggttcagacggcattgaagggggactccttgctagcatcagaatgaaccaccaggccctggtcagaaaactcccagatctagaaaagacaggacataaatgagcataactgattacagggtacagttcttcacagctgaaatggttagcctgagatgctggaagcttcaaaggattggtggagactatgcatggttaaggccatcccgaactttttaaagtatttatgaagcatcagagacttattttccctgtaatagaatgcaaaatcagggaaaatgggttgctttgtgtctcaagtattgtctttatttttgagactattttcatacagttgtcatacacaaggcgcatatatatatttgtgaattaaaatctgtagctgagtctacattgttatgagtcaccattttcacacaacatcatgaatcttcactgttagtactttcatatagaattcggttgaaggaaagattgatttttgtgtagatgtttaatataactttacaactatatctcattgaaaataaagtcattggggatttttacctctaatttggatggaaagcacaagaagccacacattcattaatatgcaacaaatgttgtatttatgttactgaatatttctatggattaaaatagaaaaagtttaattgattttttcttttaaattttaataacaggttcaccagctggtagaaaatagagacacatgatgatttgcattgtaataatttctgtgtgtatgtgtgtgtgttgttttgtttttataaagaaaagtgtgtttgtacccatgagttcagcatttctgccatcttgctattttcattttccctgtggaagatgcatggttgcatccttttccttctgaccaacacttagtctttaactttgtaaggttcggtttaaggtttcagggttagcactatagttttggttcattttctcattaacgataaaatatgctgtaaggcactataagaatataaatgattctattacaattgaaagttacttgacattacatgaattgaactgcctttcattatcttcagacactttgttttagtatttttttttaatttgctaggtttgtatatagaagatcctttcattatcaagaatgagtatggttgcttttgccatggttgcttttactattaataaatgtatctagcctacccaaactctgtagtaacttttgagattctcttaatttcccctcagattaaaatagagaaggttgaaggtactttttgatgaaatttttttctagtctggttagaaaaaaaaagttgtgacatattcattgtgttaccgtaactagaaccttgctttgtgaactgtctttcattgggatgtatggtttctctcaatgtgaaatctggaaacttcatgtaaactacccatgccgttatttcatgtgactccagtgcccttgtattccataacatgctgatgagagggatttctcacggtttctttctttgctaaattttttaaccataaagcagcttaccctttattttcccatcttggaagtaaaattgaccaaagaatgtacgttctagcctggtggaatgtgcatactttaggtttgtatgttacattgtccaaagccctttactttcttattagtaaactgaatctaatatgacacaaatgttttcacccaatctcttgcaactggtcaaattcgagaaggtgttgggccttagcagtaggccttttcagtgaaaattcattcaaagttttggtaggtggaacacttgatatttaaataggacttgaaaattttgaaaagagtatcagagacctcatttttttcctttgcaataagctgaagaaactttctttttcaggagagatggcaaag

SEQ ID NO: 129858 - DNA, 1054 bp, Homo sapiens
tactctgaaaaaaaaagctttctgttttgggggaaaatacaaataattttttagaagagagctattttgtcagtcatacatagcactttgggttctgaagaatataacctttagttttaaagcttcagtgccattaatggatattatatttgcttttcagcttgggcaatggtagatggtggttcaaatgtgaaagcccgctcttcctacaatgagaagaccccaaggatcgttgtgtctcgttcccattcagggatggtcaaacaggtcgctcttcagacttttggaaaccagactacaattatcccagctggtggtgctggtatgttcctcttcctgtgtggtccctggagaatgttcctggcatggtcaaggctatgttaggagactaatttgcttgtccatgcttgggaggaaagtgaggaggagtggtgtactttcaagacaggcttggtctcctgtttggtaacctcgagggtgggattttagtcactctgcccttcttattagaaagaagcagtctcacaacagtggtttctctttcttgaatacacaaaagcatattcccattagatctaccactaattgctttttatgcagtctgatttcaaaataattgtcttacttaactgtgggaatatcaaggagaggaagaaagatcaagcacttaagatgcttcatatggcagaaagacgccaggagtcatcataagtattattagaaaggctaatccctgagtcacttttaacacccctgaactctttaacctgcatacctgggatgagcaagagaggctagtgcgcacccaccttatcgtatattctctactattgtattatagtcaacctagttttttggaaaagaaaccgataataaaatttgaagcctcatgagccatatatatacagtctctgttgcatactattatttgattttctttaatgaacttttgaacatattttttaaagattctcatcttaaccctgtaagaacaggccatgacccggatttagcttgaggggctgtttgtcaactcctgttatgagtactgtct

SEQ ID NO: 129859 - DNA, 1010 bp, Homo sapiens
actggctacacaggacttcatttgatccttaacagcaactttaagaagtaaattttatttctgcctactatacaaacgggaaatctgaggctcgtgacactccagcttatatgaactatcccacattttagctagatttttagaaggctatttaaaacttataattgtagaagcttaaaagcagtaatagtgaaatacagcaagcagagttgatttttctttttttaagtaaaaacaaaagtatcttaaatgttgaaaacacatctgtatgtgtgtgcattctcatttattagcaaacaataagggaatggctgccaagggcagtgagctgcattttattaacataaaagctaagcttttggaattgcagatgttgaagtctctggcttaatataaaacaacttcttgttttcttgtgactatttgaatgtttgcatgtgcttctgtagtattcatgttgggtcatgactgaaggaatagaagaggtttgtgatcatttatacagtgtcaaagtagggatggtgtcatgttgagcgatctccttatacccctgtgttataggctagaggccaaatattgtagccaactaagtggagaatcaacctaaaaggagtctttctccttttttgccttcccctctcctaatgcccagaagtacagtcttaaatccctggttaattttgaagcctcaccccaaatttcttggtaagaaacttaaattatatcccacttagtttacttcctagtggaaaaagaccattgagaagcaacagatacttctttcttttatcctagtgccctatgtaaatgtagaaagatctgttttctcccactactttcctatgtagagtctgaagtctgagctttcgtatgtaatgttcactcctcagtaaaaggatataccaggggttatcctagagcactcaactggagacagttttgtcccctaactgacatttgacaacgtcggaagacatttttgattgtcacaaccaggggtgggatgctac

SEQ ID NO: 129860 - DNA, 1035 bp, Homo sapiens
ctgggctttcctttcctggacaccacaccaggcatttccaggatcattattcactgaatcacctcagcagtcccctggggcaggtctctttgatgcctgttctacaagtaaataaacagtggcttagagaggttgagctacttgctcagtgtcacatagcaagggtggacagagttaggagggtcaatcgcaaacccacctaaatggaattcagtccacacctttcctaccactcctcactatgctgacccttagaattttggttcacaggggtcaccatcagtctctttatcccgaggggaacaggctgtgatggctgctgaggcaacctgcatttctgtcccccacagctggccatgaggggacagcccttggagaggccttggggaaggccaggttatccaggtccagaaaagagccagccatggactctgtgactcagcctagggacgaaggacccttaagggtctcactgacacaaggctgctggcggagtacctggaaaggatgaaagttcagcagctctcaggtggccacatctgtgccccaacactgtctgaaaaagatgtggaacccaagggggcaaactccaggaataaaattacacttcgcagcaggtgggggcataatattcagaactgaccgttccttttatttgtcccaaatatgacagaaaattctactttaaatgactgccactggggcatatttaatccattcttcatgtattgaccatcagagtgcagtgacctggcacgaggcacccacttgaggcactagagcttcagagaaacaggggagacttctgtccccagggagctctcgggctatagggagacagggacagacacgccagcagtcattctgaaacagcatccgtgttgaagatatagccctgcacgagatatcatgggaccctgatggggaaatttagcccaggaaatccacacaggtttcctggaggtggtgatgcatgagttagtatttgtccagctatgaaaggagagcccagatgagaacaagaggcaggaaaca

SEQ ID NO: 129861 - DNA, 1090 bp, Homo sapiens
taaatttttcgtcttcagtagaaatttctaaacatatattgatgaaaaaataggtggtgggaactttgaggactgatccaaatgtcatacatttcatatcaagccagatcagtaacagttggtaccaagatgccagtttgattgaggacataagttatattcagcctatcatttggtttccaggactccagtctccgagttactcttatgcagttcaaagagaaagttgttcagaagagctgttatggtgtttaaagagactcactgtaaggaaagccaggagatggctggccagaattataaatgaaaaaaaaaaaatggtaaatgtgacttggcaggaaatgcctggaaaatgtgaagtgaggagggagtgaggaggcagtgtcaaagcaaaggcagtatttgtcaaaagaagtgaaaattatggcattgccaagctacttccaaaccaaatggacaatgagcagagaataaaactggcttctgagggctttaaataaatgttctgttttcacaacagccgcctcttccaaaccattggctatctttagttggaggatcacctgcagtcttatttgcacatctgtattataatttaggtttatggtttatattcacagattcactgcaaccttctatgtttgctataaaaatgaactgaaatgagcctgtatttaactataagaaaatgaaattttgaggacataaataacaataaagagcatatgacagtgtctgtatttatagccaaacactttattttggatgggacaggaggaggaggaaaggaaaatttagaaatatcaataaagctttttcctatgacatgtttttaaaattgtaaaaagctatatttatgtgcttctggaggtgttatataattatatggctctcctagcatttttgaccacaaaaaacctaactgttgtctgggagatcagaaggatagaatccacccacctctgcagtgttaattatcatccaatatcacagagttcttcttcccctgaaaggtttccttaggttccccactggctacaaacccaagcccagcagttcacagacctcacctagcccttcattcactcag

SEQ ID NO: 129862 - DNA, 1025 bp, Homo sapiens
gaattaaattctccttggctcactcgtgtctccatcacccagcggagctcataacttggcaacaaagcccatacaggctgtgggaagccgcgatgcctgctgcccagcctggtgccctcctattgtttagagctggagctgtacagtgtaaatggcagtgacaggtctcccttaagctggctcgtggggaaggaagggagataactttgcagtgtgcttaaattactctggaaagtggaaagaaaacacctggtgctcagctttttaaccctttcaagttgttattcagatttattgacacacacacacagaaaagtgcaggctttctttcctgcctaaaaaataggcaacctctgtgttcttcctcacagccaacttatgtcctctgcaaaatctggcacacatctgtgacaacattgcacttctggcgtaactggtctatttctcaaaagggaatatgatagtagaataagcatttttgcagtatggatagtaggacttccattttcttcgtttcctttgttggtgaagaaggtatttattattttccccccagtttacacgtagtgatttctgggaagatacttgtattaatttcttgtactcatttttgtgacatcacaacccctggtcattcaggtaagctatttattaagcatagttattctagaataaaggtgagttaatggtaaactagaatccttcactgataacatcccattggtttaccctacggtatttaatctgtagtattactatagattgtacatgtaaagtcactaattgaacagagaggtggttggtgccttgttagcctgacataaagtgcttagaacagtgccttgcatatagttctaggtgtcagctaatattacttttaatttttcttatcaagctatgtgttattttctgtttggaaaatggtcgttttgatttttaaaattctgatctgttaggtcatgatctattttaagtctgtggttttaattttagatcagggctgaggttgggttgttattatgcct

SEQ ID NO: 129863 - DNA, 1064 bp, Homo sapiens
ctcattgtaatgacttttgttagtacattgattttgatgctgtttgtatttttcaacaggaaatcatactcattttagaaataagaatatttgtgtattcttcttcaggcttttaatcttgcacagtttttgcttgttgactacaatccttgggtgaagtttaatgaataaaatgccaagatttatcttcaatccttttgtagacactccacattcatggatgtgtatatatatttagtcacacacgtgcccagacatgttagtcagtttactttctctggctaccacgggggccaccatttctactcttggtcaaaaagagacatttggaaattgggcattcagcaattttgggaaataccagtgaatcctgattacgcttgtgtgtttttaccacatagttaaaacaaggtgagagttgggaggttcattgtacagttgactgtgagttggggatttaaaaaaaattcctttaatctatccctagccagtgtcctttcaaatgatcatttattggaatgttgtgattttaaaatcagattttttccccccaatacattttattcttgtttagtgacaatgatagaagaagagaaatcattgtgtgggttgttaatatgactagtcatgggtgctcttcacagcttctgttggctttgttccaacctgcaacatgcacccgggtgtgtaaccataaaccgttttataatgttttggtaaagtggccacagtttttgcggggatagactgcctgcctagtaacttagttccttaatttaatgaagatttttttttctagttcttcttagtgaatctgtatgttcctctcttattggtggagagtagtacagtcatataaatatatattttgtgggtagttgaaatgttcttttaggtagtgccagagaatatctgtggtctgcctgtattatttggaaattgacttcaaatgaattttccatggaagcagtgaaagtgccacacttgtcatggagctagtgtgtgcaggtgtgtgtgtgtgtgtgagaaaggggcctagtgttcagtatacacatagcatttcc

SEQ ID NO: 129864 - DNA, 1088 bp, Homo sapiens
tgatgggttttctctaggatctccttctcctgaaatgctgtgtgatgtctctagaactgaggctggctgagctttgcttatcaacaaagatttctctctttactgcactagatggcaaatgcctgctgttacagaatctttccccaaagtggatcaaagatggagtatcatcagtatcatcgcaagaaatgtcaagtctggcagaagagtatgaaaggggcagctttgggctgtccccatggcggtctttgggcacacatcaggggcttatggtggggagtgggtgttgtcctgtctctggcagtagtcccagcctggcgcactttttggggctcagtaaatagttgtttatatattggaaaggccctggtgggatggagggatttgtgaattatgtgcgttcaccacattgctgaatccacgagggagagtggtggggaagcaggcttcagcttaatgtgcagtcccaggtgacccaaaccaggatgggctgccaaataaagtgggccctctgttgttcagggacacagagggggagtccagtggggctgcacagtcatcttttggtcctgcatgctgaagccgagatattttttatcttgacacatcatcctcacccataaactacagttgctattgctatttctggcaccaccttttttacttctcattttgggtttattttatcatggagctctgagcctgcctgctctgtggtagactcaggtactctcagggacaaagtgttggaaaataaggtcacttctctctttaacaccaaaataaactgataaatgcttgtacgcagagtacagaaggagtaaggtagctggcctttcgtgctggcatgcctgtcactgtgctgtgaaagtgactgggacatgggcctcttgtgaacaaggattgactgtgcactaagacgtggcatctgcttgtgatgatcatgcttttgtcatccgttctctctggcttggaaaaggcccgagccaaactagaactgtcagacctaaattggcgtaacccatgtcagttcttcctcgaagagcccttccggattacctgcttcagtgatccagactgtctagtaa

SEQ ID NO: 129865 - DNA, 1067 bp, Homo sapiens
actttcttcctggccttaggctcctttgcatttattattttttgctaggcccatagaaaagtaactttttattttgtccaggtaaaattttttgttgccatcggatggaaggcttttttgtgcttctaattagacacagaaatcttctatacatttttaaagcaagtgccccaaagtgtaaagtgtcaatgagttctcttgcccccggatgctgattgggtttcaccagttggaagcactggatgaccatcagtgcccagttgtatgtgttaagtgacattcttctaatttttcttttatccaacttaaaaatctgtggtatctgtgctattctattgggtcaccactggttactgatacctgccaaccaaaaaggatatctgaaaggcagtaaaaaaattaataaataaataaaaccaagcattgctctgtaggacttgccctgagacactctttttcagttatggaactgcccaatcacatgtaagccagaaaacatgaaaagttaaagacacatacacagaaccgattcctagcattactactacttatggtttaaatgtaattatttactgtttcatgtactgtatcaatgttgttaaatatattgtcatttagtagtcagaacaacccagagtaacactgagattctaagttggggttgactacagaatatacacttttaaccactgtgctataaatgctaccttcttcaaccaagttgatcaaccagtattattttatccaataccaacttggatgagcaaggtatcatttatagcacaatggttaaaggtgtatattttgcagccaaccccaacttggaatctcagttttactctggtttattctgactactaaatgataatacatttaacaacattaacatgaatttccttgaagttctagagagcatatagcagacattaaatatggaaagttcaatctgcggtgaaaccttaccctaattgttttacacacatactctatggcctggctctagcattccacttgctggggagccagtgttgagagtttctggggtgcacaagtaagaagggagctga

SEQ ID NO: 129866 - DNA, 1057 bp, Homo sapiens
cattctctcctgcctagaatagcatggtagtcccacagaacatatcagagttacccttgtttacattcatacatggggatctaaatagtagtcccatctagctgctgctcacatgttggctgggaactttactataaactctgtgtttgctttgttattgtattcttcttttctagatgagttaggatttccagctattgactcaaaatcattgaaatcgtggaaaatgacaacattattaattagatcatatccagtcagtaatgtgctagctttgaaaacatgtatttgtatactaagccgtgtctgagtaccatttttaggagtgttaaaaatgaaactgtgagctgtgtagcactctttttaaaaagctgtattctttgccaccaggtgtatttatctttaatttgcaaccaagtatatttatccttaaaaagattttgtgacactgacattgtactaagcacttacagatttttccatcatggcattttccagaatttctatcttggcttaacatttctttgaccatatatggatttgctaaatgttattgtttatagagaatcaatgaacaaaagtgatgggctacatttgagtaaatttaatgaaactttcactgtgctttttttttttttttgtaaaacccagagaaatatacggatctgtttcaactcggtccaaataaaaataaataattagaatacataaaaggctttttaagttgtctttttccatagcatgtgaggagcattatagagaggggattttggtcttactagtttgaacctcagagagatgtctctaattgtataagcctgcctttttttggaaagaaaaggaaaattttccaattgttgggaaatcaatgatccataaccaaaaagggagatagaaagaactttattaagtgactcttctgtgcctggcatttttacatatattattttgttgacatacattcctccaaagtaggcattatttctatttgttgatgaaaaaatgaattgcctaacttgatttgtccaaggtacgttatgaataatagtggccagga

SEQ ID NO: 129867 - DNA, 1066 bp, Homo sapiens
tctttcacagtgtttacccaaaaacccagggaccttaggctacatcttccctctcctgtatgtcactctccatggattatcaagagttttagaaagtttatccctttacattgaagaaatttattgtagactaaataggattagaatacattttggaaatctattgtaaggtcacaacttattagaagttgtagaacaatggaataatttagtttccttataagcagtattgttgattattggtttttcttttttgtggtctccagatacttagccatcattgattgctataatccttattaagtatttgaagatgttgagtaccatccactgaaggagtcccagggctgattgaggaagttcgtgaatattaaaagatgggaacactgagttttttttttttaaagcacttttgtgagttacaatgtatatataactaaatttactgattttaagtgtatggtttaatgtattttcgcaaatatggcagttatgcacccactaccacaatcttgaaatagaacatctccatcaccctgcgtgttctgtcgggcgtctttgcagtcagtcccttcccccacactgtgactgtgccaatcattgatgtgctttctattgctccagtttgcctttctctaaaatttcatataaatgcgatcatacgtgtagtcttttgtgtttggcttcttttccatagtataatcctcttgaaattgctttacgttgttgtatatatcagtaattatttcctttttattactgagtagtattccttcgtgtggtataccacaaattgttgatccattcaccagatgatggacgtttggattctttcaagtttggagttattatgaataaggctgctgtgaacattcttgtgcaaatctttgtgtggaatctctgtgtttaaattttgtcctgggtatatacttagtagtagcattgctgggtcatatcgtacgtgcttaactttataagcaactgccaaattagttttcaaagtgcttgtaacattttgaatttccaacaatcattgtaggagaaccaagttgtttcatatccttat

SEQ ID NO: 129868 - DNA, 1005 bp, Homo sapiens
gttttgctcttgttgcccaggctggagtgcagtgctgcggtctcggctcactgcagcctccacctcctgggttcaagtgattctgctgcgtcagcctcccaagtagctgggattacaggcgcctgccaccacgcctggctaattttttgtatttttagtagagacggggtttcaccgtgtcagccaggctggtcttgaactgctaacctcaggtgatcccgcccacctcggcctcccaaagtgcttggattacaggcgtgagccactgcgcctggttaacacttgatattttgaaaccttttaaaattagccatcttatttggtatgtagtggtatctcattaaggttttgttttgcatttccctgattaattatgttgaagatctcttcctgtgtttacttggcatctctattttctttattgaaatgtgttggaatggacatcttgtcctttttccccccttaatatggttgtttggcacttagtcttaatatcaatagtgagtttataaaaagaaatataaggaaaatattttgttgctttcacggtttctagaaaggagtatttcttattggatgttttgtttcctgaccatgtgtgtgcatgtgtgcttttttgggcatgcgtagaggagttcttctgtcatctgttggccagatttcatttatcttaccttgcttccttgcacatactctttatttctgcggaatctgtcagttcacattccccaggaaaaccgcatgtggatttactaactacccatctaaagacacactcacagttacactctcatcccatgcaaaccttaactccagtgctgctctgaaggccttccttggtgacctccatcatcagcccacagtgggcaggacaccatctggtgcttttcggttctcatgcacctagcactgtgcagcaataaataatgggagagtcaacacatgactgttgttaataagctgctgacctgggtgacccaagtgctctgcagtgattctagggtt

SEQ ID NO: 129869 - DNA, 1099 bp, Homo sapiens
aagacagggaaactatatactctttttgtattaaatttatctaggttagacaacctaagaatatcccaaatttcattttggatttctcatgggcattcatattttaatctagctttatcagtgggacaaaaggcagcgtatgcccttgataacttttaacagtgggttatattgacagaaagttgagttgactcgtgatgttgtaatcatgctgattagaaatgattttttttttgttttacactaaaatagatgaaattgtaatctcttaagaggttatttaggaaattaaagatccgctatgatctaatagagcactggatttacacctagaaaacctgggaatctggagctggcttagctgtgtgactttgaagtggtcacttaaccactctgggctttctttttctcatctgtgaaatgagtcaactggagcagatgaccgtatgatccctaagtttcaagcatctgtgctatgagttatttgtattaggatcgttttgatttcacatggcaactttgaagataaatccaatcttgaagttctccatatgtggtattactccctgtcttaatcacagttgagtgacttttctatctgtgaattcattctagtaagtgttcagctctttgctattttctcccttcaaaagtgtgagaaggataaggcaaaaatcatgagaaaaatgaacagggattttagatataatttttggccaaaataaaagtattggttgcaaaatattaaaatacagaaccttttgctttgttatatgggtcacaatcaaattaatatgggcccaaatatattttaaatcaatatttctctaacataataacagcacatgatttcattaatttgagttgctggaaatcccatatacttcagcaagcaaataaaatactatcttaaatttcaggtattaaagcaataaaaagaaccatgggacttggagtttatatttctattttaatctaatactaatttactctgtgttcttgttgaaccttgttaggtaatgggacaggagaaagtaggctgttttgaaagttttgaaagtgagtggaaagtatcaatcttagttgttatttaaatggg

SEQ ID NO: 129870 - DNA, 2118 bp, Homo sapiens
aaatgtgttcagaatgggacagacattgtgacccagagtgtgggggaatatctaatagtagtagggaagaatggccgcaagttcagtcatctcatcgttagtttaagtcattgtctaaactttggtcacaaaggctcattcataaaagctttggttatgattgactactagagtgaatagtcaagagttatgtgtccaaaaatccttttattcttattaggtgctactttttaaatataaaaggcaatatattcttggatttttatgaaatttaaaaatcaacttaagaataaagatagtagtaattattttgttctctcattagacaatattttttatcatccttaaatgggaagtatactggaaaatgctcacttatgttatatggttgttatgaaatgattaaagcaagcaaattgaaatctattaacatttgaccctgtcatctcatacctaaattaaatgagatgtgtttaacaaactttggcattcattttcctctactttgaactaaagacacatttgaatccttggtatattagagaattttcttaccatttgtttcacacatttgtttttcgtatacttgaaactaatgacattacttggcttaaaaatgtgttttaaagaaaagagtatgcataattcactgtaagtcaccttagaaagtgaatgtgtctgagccctcctggccatagagacctgtcctgttatcttagcacccaggcctggcattaagcatgctcagtacagatgggaactgaattgaaaatgcagcaaaggaattgaagatgtgaaaacccatttgttagaatgctgagaatatgatgacttttcaaatttacctttagcagtacagttaaactataaagaaagacattgtagtgggagtaacatgtgcatttgagtgcagtgatagtgatacttgttctttgctctatgctaagtttaggatgccgatgggctggagtcatctgtctcttgtttccttctgccctccttccctgcttgccccttccccctccttatcttaccatccccaactcctcctccttatgagactgaccttgtgcaaggtcccatgtgttcttgttctcccagcattccctatgcagtagcccgggcctctatggaggaggtcctgatgtgaagcaataatgctactacacttgctgtttctgcagtggtgacttgtattcctgtagacccttatatcagttacacaccaagggaaggagtaggcagcctctctttcagaatcatggtgccacgtctctcatgctgacttaagtccacctcttagagtggttttatcagtgtcctttgctacatcttttctcagctaatttgggatgaaaacattctgtctctattaacatcattatattctggcagagaacagtattacgcctgaatttcagcaagtctgtttgcatttcacaggagagagccaggctcagccagacattttatattctgtgtgaaatcaagacttattatcttacttgataataccattcctcatggtggaaatctaaaactgaacttgctaagtgttcttctttccaacagtagacatcagcagtcttaaaaatcactgactttttaaagtaaatttgccttatttcatggttgcccacaggttaggatttgtcatgagattaagctggtaagaataatacagccacctctcaaaatttgtaatcatgccaagtgaaagtttctgaaaaccaaagagtagttaaggtgctgatctgaatgggatagattagtgagaacccccactcttcttgcacacatgtgcacatgcaaacacatgtgtgcacacatacacacttcccagaggtgtgatttgattttggacttcagctgtaattgagtttgcttccttatttgctttaggtattgatctgacttgagtaccattgaagagcaaaccccttaagcatgagtgtattttaatatgtagtagtatacagttcttcaacctcttcaaaccctaagaatttgaatttttcttctccaagtacaagagtatactggttttgtgaaatttggtaatataaacttagattttcccggaatgagtttcccttattgttatccaatcatacttat

SEQ ID NO: 129871 - DNA, 1811 bp, Homo sapiens
atctatagtaaatgcattcttattgttacataggattatctttttaaaaacagtacttttagtgatttgaggttttatatattaatatataatttttacttgccttctctctaaaaggaagtttttttggtttgtttgtttgtttgtttgtttttttaattaaaatgtcctccaatttggagcttagaatggtggcttatgaaatcccaacactttaggaggccaaattgggaggattgcttgaggccaggagtttgagaccagcttggcaacatagtgagactcagtctccacaaaaaaaaaaattaaaaattatcctagtgtgtggtgcacgcctataaccctagctactcagttaagcttaggcaggaggattgcttgagcccaggagttggaggctgcagtgagctgatagtgccactgcactccagcctgagcgacagagtaagactctgtctctttaaaaaaaaaaagttttccgatttaggttgcatacatcagtcatgatgatgaaattcttttttcacgaaaagtattgttcacaatctgtttagcttttttagtggcatctcttttcagtgagtactgtctttggcaatgttttctgacttgtttcctaacttaattagaattggaaaacagccgttacttttctctctttctctttgttgtctggggccgtcatacctgactatcttgattttcgctttctccttcccccactacagttaacgcttcatctctgaggctactttctttgtttggagtctatcagctgaacagataggcatcaccaatgtgtgacacaagcagggactgtctgggtttgaaatgcaagatgtattgtaccaaatgaattctagattgttttgcttagtagctcacccaatttttgtttctttaatcttcgaaagatacgactgggaggatacttgcacctattgagaaagcgtgtggtcctctccctgagtgattgctgatgacatagaaatgcatggtagcctcttttcacttaaaaattaagtatcaggtactgcttactctaaattaggttacagagctgccatcactcctcatcatcaaccctcggaccattaatgactgttctgtttactcagagctgtgttatattttgcatatggaatcctggagtgttgaagacagagatgttgcatatttaattttaactccttgattttcagaggagaaaacggagatcatttcacaattgccttgtaaatagctataagaatacagcaaaggtattcttagtgtaggtattcttcatgtaattaaaatatctatgaaaattacctttaatcccagcacgttgggaggccaaggcaagtggatcacttgaggtcaggagtttgagaccggcctggccaacatggtgaaaccccatctctactaaaaacgcaaaagttagccaggtgtaggggcacaggcctgtaatcccagctactttggaggctgagtcaggagaatcatttgaacctgggaggcaaaggttgctgtgagccaaaatcgcatcactgtactccagcctgggtgacagagtgattgagactctgtctcaaaaaaaaaaaaatctctgaaaagtaacaagtgcatcaaattatattaaaagtgatgagctctctctacccacccttcagatccacttcatcccggacccagagaagagcttggcattcaggaatttcctaaacagctgtgtgtttgtgtttgctcattcattggttcctttaacaaatgtattctgggcacccgctgtgcggtgccagaaagacgtggctcttgattgagaa

SEQ ID NO: 129872 - DNA, 1075 bp, Homo sapiens
ggctgaggtccgtgtttcctggctgcaggccaaggactgaagtttttagaagcttctagaagccacttgcatttgtttgctgtgggccttctcaggaacattgcagccaacagcaggatccctcatcagattcctgtcagacttcaaatctctttggattcttttctgtgaccagccaaaggaaacccttttaaagggctcatgaaattaggctaggcccacccagatactctctctatcttgaggtcactgtgccacatacctgccaatcacgggagtcaaatccatggtatttactagcccagggattacgcacagggcatacaccagggggtgggaaatcctggcccctctttgaattccgcctccatggaaaggtcagttaaaatgcttgggaaatgctgccaaattcaccccagcgtttatactgcttctactttgagatgctgaagaccgtgctctaagaactctcttcttgtttaaccttactgtgtttctatgggaaagaaaaacagctctgtccttggcatgcagagatgttcttaatttacagtcagtagggctgagggtttgatgcttaatgatttccattcattgacctgtattgtttcagccaatcactcctgggccagtggtgcccagatgaggactggagccaggtgtgcaggtttgcaatgaacatagaaaccaaactgactcttgttaagggcttaacctaggttaagaacgtgacaagctaggacacagggagctgccctgagttcgagaccagaggagcaacttatcaaaatcactgttttgagcagattaaccttgaagctgtgtggatggtaagaggggagaagccagaaacaaaagccagccaggaattcagaaatgaatgctcatttatcagtggtaagggagatttagaaatgttttgtgttccttgaattgctactattggtggtggtagtgctgggaaaatgaaaaagactggggaagtctaagcaagctataagacaaaatcaggctgcttgttaggacttgtgaacacctgggtagcctatgtttacttttcggagaggccgtgtgc

SEQ ID NO: 129873 - DNA, 1175 bp, Homo sapiens
aggccaaatctctgaagccaattcctcttggagtttttacctcctggtaatggtgattgcactctgataattcactaggatgatgcttcaaggtagcacacacagctctcattttctttagccaattatctccatcatattttttcagggtttgcgtatgtgtttgcattccagcacaagttttcactcttgaatttatggaccatgagtttctgtgctttcccttgaagtttatggtccatgtcattcctttcactggtttgtttcccaacagtttgtggtacacaaagattggaggatgaaatgcccctttgccaatagtcctgtttcttggctactaattaatctggttcctcagagcaaatcataatgcctcttgagcatgtcagctttttgtaaagttttttagctaaaaataaaaaaaaaaaaaactacagaaaagggaagtttgcattttatctttgatctttggaatggaatttgactggtagaacatacccacttgtaggaaatatgaaaaaaaccatttaacatttacagatttgattagatcagctcaggactgctaattctgtagaacacattgagaagaaagaaattaggggaaaagaagtagataaacaactctcagaacggagagttgcatttgactggctgacttctctcccttttcaacataaatttgtcattttaaatttaatccaactccttctaattaaaacttttcccaatttatattccatagaaaacatttttaaaatttatatcattaataaaaataattagaagcccttaatttcctgaaaatttatttttaagatagctttgtatagaatcaagtgaaagtagtgactattatgtatctaaaaagaagtaggggaaataatttgccttataacagtgaataccaataatggttctgtgtgattaatcaaccctaccattagcttctcagccttcatggcttcagaatagtatttctgacagaactgtacgatggagacatgttgaggtactctcttgagtgctgtgatgctggaaagaaagggagacaatatggagtggttgagatcactactactcattagagcttagtatagagcccagaatccaccctgtgccaggccctgtgctaagcacttacagctcattggcagtaactcttcgaggtggct

SEQ ID NO: 129874 - DNA, 1086 bp, Homo sapiens
atgtggttgaaagggacactatagttccacctgttcttctccaagaattgcaacaaagcattttcaacctcatctgcagccaattttaaggaaatctaataaagaggtttgcagagcacctgagagcagctaagatcccaagacaaagtagaaaattacctattgaaactacaaataaaaatgaaatttaaatatatcgttttatatatgggccatttgcttgctcaatctctttgtacctgggagtggagggaaaggctgggagtaaaatgggactggattaaaatatagtgattgtagatttttatgacatatgaaataaattgtaaatattaaaaagttgacctgtagtaacatgcttgcagccatctatgttattaagacagtacttaacgagttttgaaacaagtactcctggcaatattactactattcttaacctatatgtgatagacattttcaaaaagtcatcatatctgattgccttctatgctgttctttaaatgtttgaaatcgtgtttttatatatgaatacaaccaatcagaatacaggtacattgcttcaagtactatttcaaaaagtttctccaatgacatgactcagcgatttcttaaaggatagaaaaacactttgttaatggagaaaaccagaagtccaccttctcttggaaataaatgttgaattttaactgagtaactttgcatcagccacatcgtattactgacatgtattaggtggtagatttctgtagtagcagttctttaaaggaaaaaaaaaaaaaaaggatttcttttccattgccttcttttttttttttttaacaaaatgagatattcctcagatgggtaaccttcagctttgcagcctgagggccatacctaggaagtggaactaggtgccttgggtcagcattgtcctgtgttagggggaggtggtaatttctaagacttttgccattttcctgaaattgctttgggctccatgttacctaaggtttgagaacaagctctgaagctggatacacgcaggtttcatcacagctctaccactcaatatcagggtgcacttggcaaacaagttaatta

SEQ ID NO: 129875 - DNA, 1026 bp, Homo sapiens
ggcacccaccaccatgcgtggctaattttttgtatttttttagtagagacagggtttcaccatattagccaggatgctctcaatctcctgaccttgtgatccgcccgcctcagcctcccaaagtgctgggattacaggcatgagccactgcacccggcctgaatgaattttttaaaaaggataggtgatttatttttcagaactttttagttttcctatattcagatgcctttttcaactttgaatgtttatgcaaagcttgggaatctgattgttgccccaatataaataaatacactgttgtagtccattgaattagaacaaaagtgtctagtgaatttgaattccatccaatcactacttttcactttgcatggtttcaatctgcattaatttcaattctcgtattttagttaaataaaaccagttccccaacgtcacagttcaaatcttagttaccatagtatattaactgtaattaaataaagtgcaaacctcatagttaggtcttcattccccaaatcactctgtaaatagcaggtgctcatcatgatcaatgaccaatcatgccccttctttccatgtctgctggtgatggttctgtgcacatttattattcagttttcacacagacaggaaaggttgtccttgtgttgcctccccaccaagagtgataactcatgtggaattttacaaaaatagatttaaaagatggaattagtcaacaaagatggaaacacagcagggcaatgaaaagtggcagtcaaattagaatcaagcatgtgtagaagaaatagctgatggtggggatgttgacactgctcgtgatctgggaggagactctggataggccaacaggaacccagggaaggcagacttatcagcataaatgaggaatggggttttgacagaaaggacaaagatatcccataggaagtgatatcatcaaaaagctttacattaaaggagttctcagaaagcacaaaggataaaatgttggaagctgacccaaacttacaaagggca

SEQ ID NO: 129876 - DNA, 1086 bp, Homo sapiens
gtgtaaatagaactcataaagaccccagggcttactttttggtcttcaagaaaaggcacagtagctgtttttattagcggcacagaaaaatgattttgtttcctatgatactgatcctgcacaagtttttttctttttttcttttggttactggctaggggtatatggaaattctggggaggaaggcttgttgatgttcctgtggcttatacacctgcccaaagctgtgctccactgacacaactgaagaaggacagacaggaaaacgaggccaggaatcctggacaggccaaagtgcctgggatacccacgggggatccaaagggccaccaggcatccccagtgacatcggaaacacgaaaggctgtagggtggccagagccatcagcctcccaaaattgtccacccttagactaaacaacatcctgctgccttcccatcattaacctgcccttttatgcaactgattttttatgggagaaaacagtttattgcgggttattcagtttacttattcagaagctgtagagtggctcagcgacagggacaaatgaaaattcggaacatcatactctccatgtttactgtgatgattcttctcttccatcactgtctataaacaacactgtgaggacagaattctctgaaaagctaagatatgggacaccacaaaggcctgaagcttccatccaaaagaagtaatctgagttggacctagtggggattaagcatgctattgatttagtattcattttttatatttggactgtttaaaattacttatccaagaaatcctccaaggcgcatgattatattatcatactcatttgttggggagggtgggggattgtagttattagtgtaatttgccccagaccagaaagtactactaaatgctatgattagaaaaaggagaaggaaatctgtatttatatggaaaagaatttacttaggatgttattctgcattttaaattgtacagaagagaaaggaaagaaaccgattaagatgcttaaaatttaaatttcttctttggagaatcaatgactaaaatgtctcagaaggtatgtattaggatcatagttg

SEQ ID NO: 129877 - DNA, 1041 bp, Homo sapiens
tggcagagctgaactgggcctgggcaaggtggatgaacttattagtcattgctgagcttcctgtcacttgaacccaaaaatatatttcaagtgcaaattgtgatgaaaccttacctttaacattctaggcttgaaaatgattttatgtaagacacgttaagtgctggaaagatgaaaatatgtgctgcaataaataggtgtctatcgtcttacgtgtcttattttgaagattatttatcccacagttcagtctgaatccacagaagtgaaaaataaactgttcttttcagaatatacttaaggcaaagaactagttgttctaacaactgctatacaaagaactcttcaagagatggaaaataattctaggtgttttttgacaaatgagatcaacaatattcactatttttttaagtgaactcactggttctgctgtaaaattctaccttgtattcatttccttttgccccttatttgtgctctaagcagaattcagtgctaatgtgtttcttaggtggtgaataagcagtctccatgtatttgccttatattggagattactccaatcaaaaggaggtacttggagtatcgtttcaaatatatacacattcccaacttcacttcccaagattttatctgacattttcattgggcctttacaatatgaaagggtgtgctaggtattctactgaatgcttaacattttagttcaactctgggaacatttgaaataatgcctactatgtgcatagctgagggctttactaaaaatagcagtaaaattaggtgatctctgctcttcatatgctctgtgcagtaagatagaatgaaaccacagtcttatgttactgttctttttcaaatctttcattattttcttcaaagttcagccaactttgacagatccacagtcagcagcgtaaagaaggaaaatttaaaatgaacagaactcagtttataaacattttaccttcttttttgtgcatttaagctattaacaagtagcatggttatttggtttaacaaaaaatcaaggctttt

SEQ ID NO: 129878 - DNA, 1104 bp, Homo sapiens
agacatcctctttaaatgtctctggacatcagtttcctcatctgtaaaatggggataacaacacttggtttagggatgttcacgggatggaactcaaaaatgtgtgaaaggcattattacagttctggggacaacatatgtgcctaataagaaatggtcattactaatggggcattattacagttctggggacattgtatgtgcttaataggaagtggtcattactaacaggtaattttttaacataatttttgtagcaatttatctaatacactcacagaggaattcacccaaaatactgctttttctcccttcaaatttaaatgtttcataattttattataacacacattttatttcagagtaaatatcatcttctgccctaaggctgtttactagaaattaaaatatttttcaaaaataaatgttctgtatatattggcacagtaaactttatcatttgtgctagatttgccctagagtacaagtttacacagctaaaggagaaagcagtaacatgcaaagtgcggacccttaaaatggaccttggtagaagcactgggcacggctccccaaatccacaccaccctgggttctggtctgggctctctctgccactcaccagtactcaccctctcctctatacaaggggatcagaccgccttttaaggaggctcgctgagatgaggtgtgggaactcacagcacaaagacttataaactgcaggagttactaccagagtttataatcaccgagttcattgagttgttattactgctggaaggtgtgcctggttcacccaaaatggggaatccactaactctcagacttacagtagccagcaagtccttttttttttttttttttttttttttagacagagtatttagctgtgtctccaggctgaagttcagtgatgtgatctcggctcactgcaacctctgcctcccaggctcaagcgattttcctgcctcagcctcctgagtagctgggattacaggcacgtgccaccacgcccagctaatttttgtatttttagtggagacggggtttcaccttgttggccaggatggtctcgatctcctgacctcgtgatctgcccac

SEQ ID NO: 129879 - DNA, 1027 bp, Homo sapiens
tgatgcttaaagttagtaagcacaaatactattaccagaaaaatcaaaaagcagtgttccagagaacagttttacacatattgtaaacgttttgttatctggcatgttaggaagctagaagaatcagttctagaattcttaataacttcaaaggtaaattgcttcttttatttgctcccaagaatgtttgagctaaagacatttttcagctcaccagattgaacacatttgtttttatagataagaaaatcaagacacttagatgttaggtgacttagagctgaattactcagccttgctctttcaataccccccttttcctgctgtgagacacaggggaattactcattctcacatagaaacttctgtgggtgaatccaggttgtgttcagttcccagggcccttgctctaactccagtgctttctttcctacttaaaatttaaagactaattaggcattaactatccttttctttttcattaccagaagcactctttaaagaggaagtaacaaaacagcagcccaaatgtggccaacagtgtttttaatattgaatttttaaatcgggagagtttgtgcagagctctggatttgctgttgcgtcaacaatgagccacattccccatggcagcccgtagcggggggctcctttccgaaggccacacactctcccattatctgcctggcctcagaggctttgaggcacaaattgcccggattacaggaactttggctttagcatttttttcaaataaactgtgtatgaggttcattctctatatctaaccacctccaggattgcaaatgttcttgaggtctccccaaggttatagttcagctgagggtcctgttcacctgactgcacctgttcacctgactgcacctgtgaggagctggcagatgggaagttagaaaggttcaggccactttggttttaaaaacttggaattctctgagattgctatttctgtgcctaaaaagctcagacttttgctcattcagagacaagtaactttggcctgttt

SEQ ID NO: 129880 - DNA, 1049 bp, Homo sapiens
tagaaaacttggagtatgccttagtatcccacaacaccccaaacagtatctttagtttgttctgttgcttttgggtcttccaataagatgaagttgttttttttccttcccagagttcacatcaaaactataaactctaaccatggtcatgtcaaaacatcatcactgtgttgaaaattattagggaaattgggaatagcagaggaggagtgggaaggggtagaagccaaaaggaaatgaagtatgaaatacttgcagataattgctatgtgtgacataattctttcacacagattttaagattagtaattgttgaggggtgtggaacaattgtgagtgctggaggagccgtcttgagggtgtctgccacatgaatagagaaagcagtgtgcaaggaagacaagcagctttctggaaaatgcttcttagaagatagactggtattcctcactcttgtgaatcgacagtcaggctttttattcagtgttgccaacagtaccaaagcctaccttaacagacacgcaggtgtgcatggaaggccacgccagtggtgtaggtgttttaggcttctggtcctaatatgatagaactagaagagaagatggttagaagagaagcacaggcctgcatgaggaggaatgttacatgagaactacaactcatcttcagagagcgttggcctaagaacagtcagtgcgggaccatagaaaaattcagtcattcaccaatattccaacacgccattttgaaactggaagtaattccttcattcttagatcctcagaacctcacgattttacagtacgaagggattgaaggaatcttgtccaactaactcgtgccccaggagaagggagatgaactttgtctcccactgcccactaggtggtattcccactctagtcctcaggcacaaagctgaaggttgcagatcttggtcctgcccctcactgtgcccccaaactttctggtattgtcctggggtcagccctctcccaagggtcccgggtatgatgacctcggagttgcatcctggcccaggctctgct

SEQ ID NO: 129881 - DNA, 1012 bp, Homo sapiens
ctttatatattctggatatacatgctttgtcagatatgtgatttagatacattttctcagtctgtaacctgtccctttcattctcttaagagtgtctttcacagagccaaggactttaatttggatgatgtccagtttactaagtttttcttgtatgcatcctgcttttggtgtcatatctaagaacactttgtctaatccaaggtcacaaagatttctccctctattgtcttctgaaagttttatagtttcacattttgcatttaggtctatgattcattttgagttaatttttgtgtaagctccaggatataattctaggttacttttatgcctatggatgttcaattgttttggcacaatttgttggaaaatctattctttttccagtgaaatgtcttggcacccttgtaaaaatcaattaaccacatttgtctggatatatctttggactctttattgtgttctattgctctatctgtctatcctttcaccaaaccatattattttgattactatagctttagagtaagtcttgaaatagggcagcatgtgtccttcaacttgattgctctgtcaaaattgttttggttattctaatacctttggttttctatataaattttagactcagctggtaaatatgtacagggaatccttctgggattctgaatggagttacattgaatcaatagattatttggggaaaaattggcacgctatcattgtttcaatacacaaacaggttatatctcttcatttatttagattttcatctatctctttcatcagtactttgctgttttcagcatataaatacagtatatattttgttagatttatacctaaatgtttcattttttgatataattgtaaataatactactttttcaaatttgatttccagttattccagctaataggtagaaacatgattgttattgtataataaccttatattctgtgacccactaaactcaattatttgtcccgagagctttttatagattcc

SEQ ID NO: 129882 - DNA, 1039 bp, Homo sapiens
accagtcgcagataatatgtttaaggtttgggtaatcatcattaggatctaaaaagattgaaaccgctcaactcttctgaagttgggaacattatcagtgggtaacccctatcacaattttcattcaacttgtactggaggttttagtcagcacaatgagattagaaaaacaaaagtatacaaattggaaataaataaagctcattatgtgtaatgacataattgcatacaaagaaaactgtaaaagactgattctttttctgattcctctggtcattttgatgttttcctcctgtgttcctcttcattcctagaattttgtcccttgtcctctgtgcttatctaagtcctaatgtcctaaatccttttaaggcccagctgagtactaattctgtactacagatgcctatcttttattccttttcacttatatttaataagttagtttgaatgagtatagagaattacttcagcaatcaataaatatttttgccccaaacattcatgaagaattaaagttgaggacttacactgctgcatgcaaagacttattgtaaagctgcaatggttaagagagtaagaactgacagtagaccatggaccaaaatacgagaactcaagaatcataggcaacttgatttatgacagtgcagagcagtgaggggcagaatttcattaggtggtactgggacaaatggacatttatgtagagaaaaaatagttcttgtcctctaccttataccacctataaacgtcagttccatatgggttgtggatctaaatatagaaattaaaacaaatttctggaagaaaatagaatatctttatgaccttagagtaggcaaagatttcaaataataaaaaccgttaaccgtaaaggagataggaaatcatttgctatgaccgatttttgcggtaaggtctttctcactaagactgagataaaaaggaatgattattcactttgccagattagagatgtggaaagccttgaaggtgacttccattcctcgtttccagggcactccagagaggggag

SEQ ID NO: 129883 - DNA, 1028 bp, Homo sapiens
tgaaatactatatattaaagaaagttacaacacctttatataaagattaaaattttgtgatttttattatgattcagttttaagtttacatgaaaatatgattttttatattacaaattatttttgtcttatttcttcaggatcctggatgtccggaactttattgtacagtctcgtcctgaatttgcggctcttgactttattcttgtgacttcatttccgaataaagagctaacagatgaaagcctgacactgctagaagcagatattcttaacactgtgttactccagcaactaaaataatattgttcctgtccatgcagtagcatgtgggaatagatgatgtgccgtattaataaggacaatacttcagcattaaaaacagccaaattatttttattatttttacagataaattttggttttattgttattctgtcttccaatctgaatatagacaaatttggattaggaatagaccttgagataagtatgtttgagtttttagttgaaggactggcttatgttgatagtttttggatttctaggcaaatgagttgttacatgcttagtgttaatgtaacaacatttgtttgcagagaaaaatgaacaaaacccctttttgataaatgcatttggtaaaatttgcactaaagtttcttgatgcagcattgaccaacagccattaagaaatcttttgatcaaataagttgaaaatttgtctataatatatactgaaacgtgtcttttgattttgaaattgtttgatcatacaataattatttctcctattaagattttacacatcctttttacttactgatttagatatattactagtatcagaaactacagttttgccttgtattttacagaattatgactgttgtgaacttaaacagaaacacataaaggtcagcaattctttttttttttttttttgatatggagttttgctcttgttgcccaggctggagtgcaatggcataatttctgctcaccgcaacctccgcctcccaggttcaaaa

SEQ ID NO: 129884 - DNA, 1099 bp, Homo sapiens
gaaaatgatttcttaaaagaattgaacattgtaaatcaaagggcattgtcctgttttggattaacaaaacaggaaaaataaccaatccttgtaaaattatttgaaattttcttgtttttatcagttgagtgcctatagatgcacatacaaaaacaactgccatttttgtatataatagtcttccaagatagagatttacattaggagagaattaaacatccaggagggatgaacagtatttcatgtgtgctatgtagtgttttgcttcattgagagtcattttcatgaattatttttactactgcagtcatcttaaatttataatcatctcaaaaaagatgtcacaatgaacagacaaccatctgtgaggtcagtcattttgcatgatgtatgtaatcaaaaagtttgaaatgtctgcttactaataaagaatgttttcactgaaacttattggaaaggtttttcaaattttctttgatttgtagttttgagtcctgaatagattgttttaacatgaataacatttcctgtggtttaatttcccttggcgcacctttgtcagggacagggaaggaactggttgtagcatattatctgaatatcctgttactgtttctgtttttattctacccaaataaaaaggttcaggtgcttcttttttgccacaatggatttctgaaaaccttgtcacaactgtgaaaggaaagcaaatcttgggaccccagaatcactaagctaaagggaaaagtcaagctggaaactgcttagtgcaaacctgcctcccattcattctattcagttatctctgctcactgagataaaggcctgtctgattgcctcctttggaagggctcatcagaaactcaaaagaatgcaaccatttgtctcttacctacctgtgccctggaagtcctctcccacacttcgagttgtcctacctttccatattgatccaatgtccatcttacatatattgattgatgtcttatgtctccctaaaatgtataaaaccaagctgtgccccaaccaccttgggctcatgtcatcaggacgtcctgaggctgtgtcacacctgtgcatccttaaccttggcaaaata

SEQ ID NO: 129885 - DNA, 1028 bp, Homo sapiens
tctgaaaggataagtagattgtcaaagatcgtgacatcatgaaccgtctggaaaatgtttcaaaagtatatggcctttaagttcaaagataataaatttgagatgaagacaagccagtataccggtgaaacaaatgccagtgaattcaaagggcaacagagagtcattgaatctattagagatgatatgtgtgggaataagttagtgaagaattagtagtagagccagtgccattttcatagacatcaaactttatcggaaggaaattatttgtggattgctttttggaaagccaaaactgagtaagttccagttaattatcattgtttttttcaaggagagtgtttctagatattgacacattgtatatggttttgtcagcagttggtagcaagaccttccagtataaactatatggtggctcctgtaactggtaatgatgttggaattcgtagagcagaaattaagcaagggattcgtgaagtcattttgtgtaaggatcaagatggaaaaattggactcaggcttaaatcaatagataatgtaagtattttaaatacctatttgaatttgtctaaatctcttacataataagtgattaatgttaaaataatttgaaatggaaatgctttaattataatagtgcatctgtagttgagaatattttaaatctactaacttaaatgttttcaattggggatgttctattttgcagaggcatagttgggacttctgaccacattactttgaaagatgtttcttttctgaatattctaactggaatacatttcactggcctacatatattatagtttgtataatagaattgtggcaattaaatagagcagatgtgaaggttaagaaaaaactttccaatgagagtcaatgtcagtgtgcctttttttttttttttttgagacggagtctcgttctgtcgccaggctgcagtgcagtggtgtgatcttgactcactgcaacctctgcctcccggatgtgtgtgcatttttaaaccaaatgatcagtattta

SEQ ID NO: 129886 - DNA, 1092 bp, Homo sapiens
tgtctatctgcctcttgagattctggagagaagggaaacttactcttagcattccaccagcaagaattctccattacgaaccaccacaactatatttatactgagcagaggggtggtaggcagtgcaactgcagtcaattgcactgcaaattgaaagctgaaagcatgcccacttctccttgcataccttttttctaccaggcattataaaaactgaggaaagtatatgtgaattttattccgtacttgggaagttgtaagagctcatccttaccaaccctctgatttaaataacttacttcaaatttctagataaaacaccagtatccattccttgggtaaaagaaccaaagggctgagaattaaagtatagtgcttatattaagtcacatgaccatatgcattaagttgaggaattgtttacttaccgcttaataatatgttcaaagataaaagcaggcatgattgtaatagtaactacagtcccagatgttgacagtatgtctgcaatttgagagtcctgataaaaacacatattaaaaattaattccacagaggctttatttaataaatacaaaactatgccagtcttggtaaagaaatacaaaatatatgtcttggtatttctaattttttctagtatttcttaccaagtttaattgtacactattttacagctagtaaccaaattgcttaagtaaactgagttgaatattttaaccaaaaaaaaacttttcctttctgaatattagataattttccccatatacaatattaccatctcctcttattaactgtgtattctaaatcaaattctatgaaatgaggaggtcatgcttaaaactttttgaccttaagacagacttatttaggaatttgtggaggagaaaaactataaaaataaagtattaatatgaaccaaaactattattcatttccttatattcctggattgagaaatgctgggccactattcatattctaaatctttgttgcccatatttccacagaattctagtgtgaggtacttctgagatcatttattccagcccacttgttataggaactgtagttctagatgacagcccaaat

SEQ ID NO: 129887 - DNA, 1051 bp, Homo sapiens
gttttattataggaagcagacaagaaaaaatagaacttacttcacttgtttagtaaatgaatagcaaagcaagagtaagcatcagagtaaagtttatctttgggtgcctcctggtcaacttcctaactaaccaaaatgtctttctctcaggtgctgtgacatgtatatggatgaatgaacagtgtagcagtatcatcacaggaggggaagacagacaaattatattctggaaattgcagtattaagtgccttttcctctcctgaatattaaattgaactctatttaatgcatttttaaaccaaacttttaaacggactggtgaatgtgcaatgttagtaattagaagttttaccacatggaaaatttgtggttttaaactttctaaatcatggtgacttcattgaaagccattagttgctattctcttagggcagataaaatgcggctgtgttaggaaaaacatgttacactgtaaggcagatgatcgtccccgtatgatgattgtcagaagacaggactaagtagcagagaatagctaagagataaattgggctggggaaacttgtcagaaagcactgaacaattaagaaattttccaagaaaatgtgcagtattctctgctacttctgaatctgttttgtcttcctaatctatcacaattgccacccatcgggttttgggtgtgtgttttcatagcgtggttactttctataatgctgtacccagattctaagaacctggagaaggattagcagttcttagtaagtttactgtgtataggaacggtttgtatttcattacagctattcatcttttctacattaaaaatatttttctctaaagaaagctgttttcactttatttaagtaacttaaaagactagtgtttttaagaccacaagtctagaatcatcttctagaaaaccatatttagtgatatgaatgtaattccattattttgaaattatcttcagactcaggtagataatcaaatatttttttctcttctaaatttcaaacaaggtaagctgtatagcagtagcagatttcc

SEQ ID NO: 129888 - DNA, 1065 bp, Homo sapiens
agaaatatttagtatgtaattcatgatgatgtgcaagtatagcctcgagagattccgccactcccacaaatccctcaaataatcatggactggctgtgcttcaggcactttggcggctcactataatttattattcatagagttatctttctgagactgtcagttttaagctattttaaaacagcattacctttactttagcaatacttcatttcttcttgtattccctagcttataaagaatttaatttcatttttaaaataagttattccgtaggatgatgttgaaatacatctgcattagcaacaccggcatactgcacaatagagtttaatttatatcatgatgactacatatttgaaccagactagagaaacatagctaatgaccataaatctaatggaatatgtatcaatgtgttttcttccttaggtagatacaatcagtttaaatgctgcaagcacactgttagtttccggcaccaaagaaggcacagtgaatatttgggacctcacaacggccaccttaatgcaccagattccatgccattcagggattgtatgtgacactgcttttagcccaggtagatattatcctttttaaaacagataatactaggtaaattggaattttgaaataaacaatattgttaattttgaaataaacaataaaacttacaaagaaaaacactatttgctgataaaagaggttttgccaatggctaacactgctttatgccagggtacagtatacttgtggcatttgtatcaggtagaaaagccggactgggtatttttaattcctcattagagaaattaatttaagataaaaatgaactcataatcaaagggtcatctcatccttacatcttggaaagggctagaaccatttcaaggagaggatagtcattgcttaagtacaaggattttgaagaaaacgaatgtggagattaggccactggactcagaaataaaatccagaataatgtaaaccacattctgaagctgtcactcatatctgagtctcaccttgtgttgcagatagtcgccatgtcctcagcacagg

SEQ ID NO: 129889 - DNA, 1089 bp, Homo sapiens
ctgtcataacttcttcatgggataataatgtgtatgtatctgtgcaccctgctctgtgattcgacgtgcagaatagctgcctctgtggacatgaggtgtgaaaagccagaagctttccctgccaggacacagcactgttttctaaagggaacagatattagagatgaggacagtatggttggatttgaatatgattgcttagattgaataatttctccaattggagtctgtttttctctaagttttaaattgaggagaaaacagatgagccagacatggaaatttctaattttaaattcaaattttgaatattttgatttagtaatttgagaacaagcaatttgtaattctagtgagccttagtaagtatagaatgaaacaacataatgtttctttaatatatgtttaggagccttaaaattaagccagactactgttttaatgcttctcattatcttttagctatttttattccatagcatttggaagacgccaggacacgttaatgggacatgatgatgctgttagtaagatctgttggcatgacaacaggctatattctgcatcgtgggactctacagtgaaggttcatatataatttaaaaagtttttttaacttggtgtgctatatggcatatgtataatttttagcttaaaatgtacatacagatattataagccactcaactacctattgctaatgtgttcagtcactccactctttttcacaaagcgtgtgagtgtaaggatattgaatgttattgcctgtgtttaaaaaatacatataaaatatatctataatatatatttatatattatttatatttaaaatataatatctgttatatattacatatatttatatatttttatttatataatacatattatatattttttaaacacaggcaataacattcaatatccttacgtatcacatactttgtgatatgtacattctttttattttttgtttaaaaaaaacacttccttatttacttattttttttagagacagtgtcttgctctgttacctaggctggggctagagtgcagtagtgggaattatagccacttcttaatataata

SEQ ID NO: 129890 - DNA, 1071 bp, Homo sapiens
ccagaattctatggtgatgatgtgagctttctagtcaatagcctgaagttggatttgggaaagagacaaggaggacagatggttgacgacgtggagcttcccccttgggcttccagtgagtccccccttggaggtgttgtattatagacatgctttaccaagtagtgcaatttcagtaattattttattgcttagatttttaaaaatcacaatataattctctaaataaggatatatgagccctattccatatcagaagtattctatgagtctgtgatgtaaaaacattaatatatatttgagagaccttaatgtgaaaatgattcttgccacttttttccccaaaaaacttacatttcatatgatagaaaaagaaaactgcattaagaaatatggacctcttgcctgtcctagaagctttatatacatatagatagacaagagaaatgggaggaaaaaaatgaagactccatgatttttcgattgagtctaatctaataggtcccgaggactttctccagaagagcaaagatgcattggaaagcaattatgtgtctgaacaccttcacgagtggattgatctaatatttggctacaaacaaaaagggagtgatgcagttggggcccataatggtatgtaatattcattgaaattttatttagcattgggtgaatatttagcattattcattttcattggaaaatgaaagcaaacaataccaacaaaaaaatgaggccaaagcaattagtcttatttcttcagtggaagcatgttctgtcagactccagcgtccactggctgcatgaccctggatcagatatttttttggttttctttttgagatggagtcttgctctgtcaccaggctggagtgcagtgacacaatcttggcttactgcaacctccgactccctggttcgagtgattctactgcctcagcctcccgagtagctgggattacaggcacctgccatcatgcccagctaatttttttgtattttttttggtcgtgacggtttcaccatgttggccaggttggtctcaaactcctgacctcaggtgatctgccc

SEQ ID NO: 129891 - DNA, 1089 bp, Homo sapiens
gttttgcacctcagtcgacagcatttttggatctctggggagctttctttgctctccagtctcaactctggctttccatttccctgaagatctctcttcattctgcagcccttactcacttctatcataggttgctcctcctcctgccactcacctgttgatctcttctttcctttttgcaatcatgttcatttaggttgctttacatgctcaacattccagtcggttttaaaaagctatgaagattgttcagtatatccagctcattttggttgttagggtgaaagcttcaacagtctcttacagctttcccatcctaacttgaggtggagatcttcctctgtatctttttgtcctgtcacttataaagagatttatttttaacccagttatttcagtaattgccttaaaatgttgatgatttggttgttttcccttattttttcttaaatcagttaaagcagaatgagaagggactttgttgattaaatattttaggagtgagtagtgaagagatcatttttcagaggttttctgcagtaaattcacagagggatatactcaaaaatatacaaaggaatatacagttactcaaatgtattataattcaagtaattataattatgtagtcagagccttataaagtgtagtgtgaaataaatgccacttgtgtcaaaatggtttataggatgataaaaataatgacagaaaaataggaaataatttaaatgtaagaatagtttcaaggcctatttattttggggggaatgagtttagctaagggttatttggtattatttacttgtctgtcatggcttctgtggtagataatctcacctatttctttgaaaaatgagtttttatcatgccatttctaaagagtcagttttatctaagcaatcaatttatattaccatttttcttatattaaatgtagtgtttagacaaatgtcatagaaagtcacactgtagctcccttagataaacctagaaagtagatcaatttctgatttttcttacttttgctgaaaaacctattttcaggttccaaaacatttctgaaaagctgcacatggaatgcaaagcaga

SEQ ID NO: 129892 - DNA, 1063 bp, Homo sapiens
ggctctttacagaaagtttaccagcccttgatctagatagtaattttcaatagctgctaaaacctttaggtgagagaagctgctgggaaattttgtaatggctatatggagattgacatcacctgatcctctgggtgcctctggatgtgaaggcagtacccgtgtactacctctgaaagtattctttgaacactggctgtatacatgatgacattaaagaattattaatttcttagagtgtgttaatgattggtcacttattaagagaggctgtcttcagagatttttgctaaaatatttgtggataaagtatatgatgtcaataattttctgtgttattcagcagggtcccagggggttatacacaagacaagagtgaccacatattgacaattgtagagctaggccattggtacatgggagttttctattctatttgtatatgtttagaaatttcataaaagtttttatgttactattgggtaattttgggtattagaaaagtaaatgcagttaacaacttggaaaaatgatatgaaatggtataaaatttcaaaaaccctttgagaaagaattgcaaactaaatcataaccttcagtagaatgggccttctcatctattcagtacatgtatattgagcactgagaatagaaagccaaagtaaatatttactgctcacaaaagaacaggcagtgttactctggggtgggatgagtgtaggcattctcagtctgtaagactatttctcagtgtgatgtttctggattcattaagtttctagccaatagatgctgtaaactatatggagatacacatataaaccaaagaagtttaattaaaaactttctaacatttgaattgtaaatgccaatatgaaccactattctgtgttttgttttaccagttaatttaaaaatagagacgttctctttatatgcattattgatcttttattatgtgatgctttagtaacctgctttctagttaaaatgtactatgattatcttgtgatttttgttatgctcatcaaacaatctgttgtacttggatccctaggaaaat

SEQ ID NO: 129893 - DNA, 1021 bp, Homo sapiens
actccgtaaaatgtagtttgaaaatcattgttctaaaaatcatgcaacttaattataataatttttacatagaaaaattttaaagcgggtataacaacactttagtaaaaagaaaacatagactcagaaaagtttcataatcctttacttcaaacaatatgatttggttatatcccttcactgtgtgttttacatttcttgcaaaatatgcatattgataaattaaggaggctataattaattcacttaccaaaatgactttagttctaaaatagctgatatgattatattttaataattatatggaagaattgtctctgaaggctacttgtgcatcatagaaataaaattatgccattgtcttattgaagaatacttactctattcttccctctctataagagaaggagtgaggcgattaggaaagagaaggaaggatgtgtaactccaattctgtcttgtgactatattgaaattcagattaagtattgatagtgtgcattttgttttgcactctggcagtttaccctgtaattgattcttgttcatggatttagatatggaggacaggtcaataaaagttacagattaggatggtaaaattggtttctgctatcatttttaattttttgagttacttttcttttggttcagatgatgatgatgatgatgatgatgattttgagacggagtctcgctcttgttgcctaggctggagtgcagtggcgcgatcttggctcactgcaacctctacttcccaggttcaagcaattctcctgcctcagcctcccgagtagctgggattataggcgcccgccaccacgcctggctaatttttgtacttttagtagagaggtggtttcaccatgttgaccaggctggtctcgaactcctgacctcaggcaaaccgcccgccttggcctcccgaagtgctgggattacaggtgtgagccgctgcgcctggcctattatttttttttgatgagcatctcttctggtgttatgaatataacttcttctt

SEQ ID NO: 129894 - DNA, 1084 bp, Homo sapiens
aatcatagcagttttccctgaaactttgcaggaggccaccttctcttctgggagaccagcctgcaacaaaccaatattgttaagtctaattgttctttgtaggtaatctctcttttctctgactgcttttaagatctcctctctgtagttttttgctgtctagatatagatttttttttcttcatctatcctgcttgagcttcctaaagctaaaagttttggaaaatttggagccaagctgaactaaggctagaacaaatgttctctgatccaagtccaacctcttttccactgtaccatactgcttctattttaaatactaggttgtgggctactggccagtgcttatttttatggtatccttgaagtttagactgattcaggaatgaatgaagcctgttttatgtagatatcagaatcttgttagtcaaagtgttgtccacaggccagcagcgcatgtgtgcctggagcttgttagaaatgcacattctcaggcctcaccctgaagctgctgccttggaatgtgcattttaacaagatccccagttgattgtgtgcacactaacctttgtgaagcgctgcgctagataacagtaattcagcattcatcttgattttttatttgtttgttccttccaactgaacttccttctttaacttcttgatagtacatataaaaaggctgagggaagcctcctgccctgcagtatgacacttgatgaggaaactggaggactttgagagcatagatgacatttttaccatttcttctcataaattgctgggacttgaaaatagaattgactggctttatggatggtgtcagtgaaagggattttgatatctgaaccatcttggctggaagtcactgcatctcacatagtcagggagaatgtaattttctagagtccagctgagtgatagaaagctttaacctaattactgaggggaagggctaaaaaggccagatgaaatagtgaaattgtttaaattcatgagaactctttctgggagggaagaagggccagtaatttataggagaaaacaactggtacaggaactagaaatgatacttagtccctca

SEQ ID NO: 129895 - DNA, 1057 bp, Homo sapiens
ttttaacttgtattcagtaagtaacttagaattgttatcttcttggtgagttgaattttttatcaatatataatgacctctttacttctagtaattttttttctattttgtctgatattaatatagctatatcagttttcttctggttatttgctttgtatgggattttccattgttttacttttcactattctgtgtcctaaggctttaggcctgtttcttataaatagcttatacttggactttttttaaatgattcattttgataatttttatcttaatgaattagtttagtctgtttacatttattattacaaatatatctgaattcacttttattttttagttttgttcttttattttgccttccttcccttcttcctttggattaaataaggcccccttgctccctttcatttttccccaaagagtatggaagttatatattttatttgtttttctaatgcttatccttaaaacataagcatattaaatttaagatctgaagctaatcattatctttactctcctctctaccagtgtaagaaccttggaacacttaactgctgtgcccccatcctcagttatagtctgttattgtccggtattttttatctctattttaaacctacagattgtacattactaattgcctggttaatgcttctgtagttttacatgcatatttaccattgtttttgttcaatattccttcttacatgtcatatcctcgttacggaattattttctctttcctgaagaatatcctttagaagttcctctgatcagggttggatgatgataaaccacctctgtttttgtctgtctgaacatatccttattttccttttgctttgaaaatccgttttgctagatgtttaattctcagcattttgaagattatccaaacaaaggcaaagggccagggaatatgcatcagacttgctggagtgctctggggtgttgggggggtacctcacagagaaaggtcagtgatagttgtgccttgtccccctggggtaacgttcagctacctggctgggccaacttcagactt

SEQ ID NO: 129896 - DNA, 1027 bp, Homo sapiens
atttgtttttaacttacttaaaagttaaaaattggtagcatatcaaccccccggccccccttctggatttgcagtaggattaagatgcagcaagacggtctgcagaaaaggcgcttgcaacttggtatgtaactcagtatttcacaaaaccttcccctcctccaccccaatgtctattaatatctgcaggcacattagtgttctgtggaacacagtttgcataatattgatgtgtttaccagtctgggttccatcctatgaaatgtggtgcattatttttaacaggttttgttgcattttagtcataatgagcttttggtcataatgagtttgaccctcaagcttgtaagttgagaataactgacagtgaacaaggaaattaatttgcaaattagactcttggggagaactttcgttcacttctttcttaacagtagctggggcctccgagtttaaatggccttcatactacagttcagtttaatattacacagggcagacaaagtcatagattgtaactgaaagaattttggggacgttttgaatgcaaagaatttgtgggatctatttaatggtgctgcaagacataatttgagtgacagagggaaggcaggcaatctgtaattaaagaagaacaagggttcttttggttagtcattgtcacaaatatttaatattatgggatttgacttctatctgttattggaatttttttttttactgcaacttgttaagatcgtaagaacatttaatacgttattaatctgttttgaaaaagcaaccatgtggtttcactcatttgtaatttaatttgacctagtaatggagaaggaagctaatgaaagatcagtggtgttccttttgtacaagtgtagcaaacttcctacttgtcaagcctttaactgtgacttatttgttcattaaataatccagcagcacatgtatgaaactattgtaagtccttttctgaatggtggaaactttatttggcacaactatgccatttaatgctttttactgttcacaa

SEQ ID NO: 129897 - DNA, 1107 bp, Homo sapiens
cacatgacataaataaaagtggttttatgtttcaccttcatctggtaggtgagcactccaccttttcttgtgaaacataatcggttgtgacatggcaaaattagatcctggctatttattatcttctgaaatcaaaccccataactgggaaggcatgtggtaggtctgctggggcagcttgcatgcagagaggaaaggggggtgggtttccagttttataagctcaaggtgattttctccaacatctcgaacattttaattaattaccctgaaagattgagtaaattattatttgaatactttatggcattacatgttaacatttcaaggacaaagtgctgtactttgcttttcaacaatgcttcatctgtcagaatatatctttgaaatttatgtagtttgctacagagtaaagggggggacagacctggagtcctatgaattattaggagacaccagagtcaaatgtgatctattccacaataaaaggaatatttattggtatctgatttcaagttaggtattaaaaaattaacagtgaaattgattagctatatttttctccaaacatgtgaaacaaaattggctttctttgatgaagtttgtctgatttttttttaaccttcggcaaagctgaaaggctaagcaaatgcctttaaatcagaaggcaaaattcatgaaaacggttttgggcatgccagcttctccctgggtgccatgcttcacaaagtatgttgtaagatatgtgctcgactgttgatgcttttagagaaaaggtctttcagtttagatatagaaatctttaaaaatatatatttcattttcaaagcattcttcagcctgcagaaagcctggcttgctgagtttgacaaagtctgtttaaatgtagaagtgcataatatgtcataggctgtttagttgatctttgtaaccaataacaagcttctctctgcagatataatctttctttctccataagggcactgaaccttttactaacttcatcctaccatcagtagattagattaaatccccatttactgcatcatattaatattttcaatggtgcactaatccaagaaataaatgtgtcagtttctatggcta

SEQ ID NO: 129898 - DNA, 1026 bp, Homo sapiens
gctttagaatcctacaactgtagctacagtttcccggtgacatttttttcaatgtcagaagagactctaatggagaaaatgaatattctcttcctgaagctttctaaactaaaatgtgattgttttactctgctgacactttccggcactgctgctctatagattgccaaaatgctacttacatttttcagttaataaactctggaggaggcatttttggaaacggtttaatctagtattgctctactgtaagactaatacacgttatgaacatatcactatgcaaagtagcctccattttcacatagcccattgtgggaacaatgcgaatgatgttggttaaggcaagtgtgtgaggcatctcttacacaaacagccagaacggatggcatgttgctgtatataggtcagtgttggaaatagcagtgtagctcatagactggacagacacatggaggctggagttaacagtattcacctcttgcagcctaatgcatggttatatttcagacattgaaagatgagtaccatagtggagtttcatctaattagactattttaagtaacattgtatcccttaattgagctgaatgctaccaaaataaattggattaaatgagcttacaattggagttctgtagtgatatagtcttgttttctattctagttaaagatgtcagatcatcagtttaaatatatacctacagagtaataacagttcttttcagtttcttagtgcagcgtcatttccaaagattgttttcactggttttatgctaagataggacaaagaagtggtactttttcatttttacaacgatgtgatgtgttcagttattgctcagtatctgcccacataaggagtagtaatacaattatgttatgacatggctaatgacagggatggtgacctcggcctgcagtgggaggagaaataatgggcttcactgttctcagtggttgcctttatggaatcatgtcctgaatctttctttggttgatttagaaacagggaagtccaaaaca

SEQ ID NO: 129899 - DNA, 1033 bp, Homo sapiens
caggaagatgaatggctgttccaagggaggcatcacacaggaagacttttttaagaacgcatcatatgaatgttataaataaaactaagagaaaagctgacgattttatcagttgtattaaattgtaatagttcattaaataatatctcagaattgctttaggtgccaattagctgatcccctcccaacaacaatggaaacaagactgctgttgagcaagacgtaggcatagcaaatagtaagtgctgaatggttccaaaacagccctggggtggaagaacactattaactgtaaaatagccaaattaaaaatcattgaaagttagatttcaatatggtattttctttttcaagagaaagcatgaaattacattaaggctcatgttgattactcaaaacagagaaataaggatctcttcttttgtacagcagtgtgtttgctgagtacaagccttcattttccgctacatttctctgcctcagtacataattgttgccttgtatgccagttattccacacgtattgaagtacaccaaggtggtgagctaatccttcggtttaatgcagtattatgcttagagtaagattcacaaatattttgagtgaagaaatgaataaagctccaaattggatgattaaaatcaccttgtattcttacaagggaattggttaaacacaaaacacactcagttaatgttcaacttcatgggtaatcaggaaatgcacattaaatcatctatgatacatcacttttcacctaacacacactgcagtgaattgtaaattgctacaacctttctagaaagcaatttggcaaaatatatcaagagctcaaaagagttcataccctttgtcaggataataacacatccaagaatctattctaaggaaataatcagcgacacaaagatttttgtacatcgtcttgtagctgtagcactatttataattgtaaagatattacgattttgaaacaatgtctgaaaatagaattgttgcatttctatgattaaagggctatgattaaatgct

SEQ ID NO: 129900 - DNA, 1032 bp, Homo sapiens
tcttttctgaataagccattgaggattttcaggcaaaaagagacagccaaaaaactgtataactgctggaattgcttcaagttccaacatgtacctatcacacctgattacataatatataactttgtattcagcatatcacctagtaaagtatcttgtacacagtaggcatttggtaaatgttttaagaaataatacagaagcacctgtgtatctaaattttctgtattaactaaacagaaaatagctgtgctttatactcatatagccttattttttgcagcctctcttctggatcctttagcgctgcaaaattacttgcacaataattccttccaaccaaagcattcattattctagatataaccagagctcttctggaacagtcttcagatgagagttagagatcagattttccttgtttttagtgaccttgacaattttgaggagtactggtcaggtgtttcatataatgtccctcaatttgactttgtctaatgttttccttatggtttggctgggcttgtggtttgaggaagatcacagagatgaagtgccattctcaccatatcatataataggtacatgctgtcatcataagtcatgatgatattaaccttaatcttaaccttcatttctagaagaagggagtgtttgaaataggctgtgttaggtaaatcttagatttgcaatcatatatttgctttttatttttcttctgtagaaattgactaatactttaacaaaagctgattggcacaaaaggaaaaattggaatatagataatagaatttatttaataatcctgagtaattgcatgttaaatatttataaagtctgttgtttttatgagtttatttatgaaagatggattttttcccagggggcttaaactgattaaactttttctgaggctatttgataagaaaggaatagtttcctatattttgttcacaaatagtaatattaataagtaatatgacaggagataaacagaataaaccatgttacagcacatattgcatttataat

SEQ ID NO: 129901 - DNA, 1044 bp, Homo sapiens
tggaccccaggttatttccttttgcagaaaataaatacattgtgacctttaggccccattaactctgaattggtgtgattttacagtttgataatcaatttcatatcactttcttgaaaagtgctaaaagtatatttttaactatgtgaggtaatacacatgctaattagctcgatttagccatttcacaatgtgtatatattttaaaacattttgttgacatgataaatatctacaatattttctgtcaatttaaaaagattaaaaaatttaaaaagattttattgtgactatcatatttgaaatgtagtttggtcctggtagagtgggagcaggaaaaaatatatagtttggaaatacataacccagcattataaatattttctaataaatttttccagacattctatatatttgtatgtatctatgtttatatatgtatgcatatgtagaaatgtgtgtgtgtatatatatatatatatatagtgtgtgtgtgtgcaggtgtgtccacagatacatatatactatatatgcataattctgaaatactgcatagtaatataatttattaaggaaaggaggctattttgttttattattttttctttttttccaaaggacattgcccagaaggaggccatttagtttgtttccagtttctttttgcagtgaatatccttacacatagactctttgtatgattggataattatatgtctattataagttcctagaattccaagtccaaaagtatatgcattctaaattttaatagagatttattacctaccttaggcaactaataagactgcaaatttcccactgccattgctagcaatgctagttcaacatcaaaaagttcagtatcattgaactaaaatcttagctgatgttgttttcctatatgagaagcacattatttgttatctcaaacaagtactattgtcatatatatatatatatatatatatatatatatatatatatatattctgcatttattatttatttaatagaattgtaagtcatttgggaattaggaat

SEQ ID NO: 129902 - DNA, 1048 bp, Homo sapiens
tgacgtgggcactgcgagcggccgcggcctggccaggcccggtctgcggcccccgacccggccagtcttgcagctgagggccgtggcagccgtttgcgacgcccgattcaggaagtgtgtgacaggaggggaggcctagcgcagggccgccggggcccgactcacatgactgcaccccacccccagggccccttgcgttaggtctcttcgcggccccaggaaaaagaaggagggaaacctaggggagcagaaggtgttggggcccgggtcttggttcctgaccagtccaaccttcctccaccagcacgcatctatcaaggcctgggcaaggcgctttttggcgtgggacaggcagccgagaaagagaaaaggaaacctttaaaatatgtattttatatatatacatatatataaaatatgcttttttaacaccttcaactctcacgtcagaataagtcacatctcattacttgacggctggagaatccctttcggggttaggaaagcatgaacgagttctgtggacttttgccacgtgtgaactggggttatatagtaatgtaaagtcgttcagtgctctgggtgtgtacttaggtatgtgtatgttgaggacgctgatgttttagatatgtcaagtccggtgtcacaactgctaattttcaggtgagctcatgtccatgagctgaaagaaattcagttattctcacttaaaatgacgtcctagtatatttcacagaaaagtaaacagactcttcgtagatatttttaatacctgtgatttggcattactttgaatctaataataaacataaagattgtttagatgttgcaactattaatataccagagtctgatttcagtggttactcttgcacaactttggaccctttgcacaacttcggtcatgtaagcagcagtttgtagttgaactaatgatgtggcaggttctataagtaactaaagaagcatgttggccggacgcggtggctcacacctgtaatcccagcactttcggaggccgaggtgggggatcacctgagatcaggag

SEQ ID NO: 129903 - DNA, 1066 bp, Homo sapiens
catggcagaaggcaaaggggaagcaggcaccttcttcacaaggcggcaggagagggacaatggaggaagggccatgccttattaaacaaccagattggccactcccctagcatgtggggattacaattccagatgagattttcatggggacacagagccaaaccatatcaggacatttatactcaaagtctatgatatgaggtggtgtagacttctttgaagtggtcactgaatttagcactaaccagtgcaaaaagacaaccctgctcatttaccctaatcatagtatccattattttttttttgaagtatgttcatgtatatacttagtaactgctgacattgagaatcttgaaagaagctttgcttctgattcctcttaaaaataatacagtatagcgagtgtaaatatacaactgcttttatagggcattttctctagaggcataactcattgaatctatgaggaagacaccattttataggtgaggaaagggacactggttatcacatacagtctttttgtatacagctagtaactgaccaatatggaacatgaacccaggtttttcggactccaaagttcatgctctcttccccatattacagttcctgattcccataaatttcacatcagacctcttctgttggcttactgtttggtctgttaagtttctgtgagagtacatagccttcaattcccttaaataggtaggacctccattcatgcataatagtgcagaactatcctatataaaagtaggataaagtactttctctgctatttaccagccatgtgactatgggcaacccatttgatctttctgagtctttgtgtcgttatctataaaatgggaatgaataaatgatatcatatgtgtaacagtgacttgaataacaaatgattatatcttttttatcctgcttctttgaatgttacaataatttccccatatgcatttgaaaaattcacccaaatctgaccagtgctgtatagtgtctaatgctaataatagcaaaaacataattttttttgccctctgtgtgttctaatatgttgatcgtc

SEQ ID NO: 129904 - DNA, 1081 bp, Homo sapiens
caacctctcaaagtgctgggattactaatgtgagcccccatgcctggctgctcctggctgatttttaaattttctgcagaaatgggtcttgccatgtttcccaggctggtctccaactcctgggctcaggtgatcctcccacctcggccttccaaagtgttggattacaatatgaaccaccatgcccagccctttatcaccttttttttaaaaaaggcctattttttaatgtagcccatttctatatttttaaaaatttcaatctaggagtctgtattttaacaggagaatttaatgtttttatatgtattgtaatcactgatggatttgggtttatttctactatcaagtaccaccctggttcagtcatatagacaaagatcaaggtgtagatcacaggcatgcccacttgtcatgggcttttgggtttagacgggcacatgtcttggcacaggaaacaatgtggtagattttccaagcatgtataggtcacctattccttgcaggccagtagagagattactgaagagaagatacctgccactaacttactagtgcacatgaacaattaatttaaattctgaaattttctgtttctaaaacaggtatagtacctgcctagtgcaccctatagggttattcaccaagactcagggttttgttttgtttttttcccctagctttacagctgtctttaaaatttaagtgtcagtcatgtgtttccttcatttatttacagttgatatatcagtgtcagtggtgtattcatgcttgctctgctgccccagcattattaaaattgatggatgacccttttgcatttgtccttctttagaaatagctactatgtagtcctcgctggttattttagcttagacaccactcttgaaaattttccgagagcctggtatttgtaattagcatatctcgattaatgtggtgtctgtactgtttacttgtgacctcagtaaagttcatacctcttcagttttagttttctcatctggaaaaaccaatagcaatgcctggattatctatacctcacaggatttttgtgagcttaaagtaaataatatgtgaa

SEQ ID NO: 129905 - DNA, 1158 bp, Homo sapiens
ttttaaaaactctcataactgaactaccatttgtcagcttctgattctgttagttgaggtctgtggtagcaaataacagaaaccaactctggttaatgtaaacagaagatttgattggaaatattggatggttcacagacaggaaagcagtaaaatcaagtttgaaaatgggcaaaatgaaggaaggcaaggcacagccaaattgctgttatcaatacggcctgcttgagaagatgctggatgcataccactggcctctactgctctctcatctccactgtagccaccatgtattgtctcttgatggtccttgatattgcagcactttttcaagattctaagttctagataggagtatctgattggctcagtctaggacacctgtctccctgccctagctgctagggagctcaaagaagagtgctctgatgctaggtagccagaaacagcaaatgtccacctactcctgctttgatgaatatcgttatagataatattgctgttagccttcttgtgcgtttgtgcaagaagtaaaattcctgggtcaactggtatttacattttgcattttgataggtactgccaaattaccatccattaaaagtatgaatttagaaagaatatttaattttgactttggtatatatttcaggtacttacaattcaacaggctaaccaacattaattgtgtatattaactgatgcctagtctatgggaatttagcagtttgattttgttactgttaatacattatttctttggctcttgttaatttaatctgtcaattgcacaagagtttttctgcttacagcctttgattttgatacaaaccatttgtattataatatacgacttagagatcatgtacagtaaatttattagataattatattttacatttacatccagtttgatatatactatcatgaaaaagttttctcttcaagcaactttattgaaatatatttctgaaatactgcagttcttatttggaatttttagttatgaaaggattagtaaaatggtcagattaaagtgtgttaagatacatgacttatctatgtgacctacttggaacactattatttgggataaactcagcatagtgcaaatagtattcttttaaaaacatttctctttattagatttctgcagtg

SEQ ID NO: 129906 - DNA, 1050 bp, Homo sapiens
gttccaatccactaaattggtttcatgacctaactagttatggcttactgtctaaaaaacatcacaccagaggacctctctagttccaacaaaaccgacatcctacaattctaagaggtatttataactgttttcttttttattttattttattttatttattttcaggtagagtctcactctgttgcccagtgggagtgcagtggctcactgcagccttgacctccctggctcaagcaatcctcctgcctcagcctcctgagtagttgggactgcaggtgcacacaaccatggctggctaatttttgattttttgtagagacaggatctcactaggtggccccaactggtgtcaaactcctggcctcaagcagtcctcccacctcagcctcccagtgctgggattacaagcatgagctaccatgcctggccgtatagcccagttttattcttcctgatttttcttaaacattctagccgttttccactattaagataaactagtgaggaaagttccatgagttgggaggaagaaaggaatagggatgccatttttgccgcattcttacttgctattagatttaatacctctgtaacttattccctaataaaattatcaaatgctgtattttccaactttttaagatttaaatcatatctagctttgtatttgcaaaaatactgcacttgaagacaaactatgtctttcctaagaaaatttaaattctacctatattcaaataccctcaactttaccaaattaaatttggcttatctaatgaaggatacgttattcatgctagttgtatcattgggagttcaattaggaaacataaactacacaggaatttgaacagagaaagtctaatgtaaacagtccttaactgtaacgtagaattagagtaatgggagaattggctaagaggtagaaagaactctgaagactgtggtaacagcagatagggtagtagtcactacctctaaggctatgcagagcatggaaggaaggacagatctgacattcaaacctcattggaggggcatggctga

SEQ ID NO: 129907 - DNA, 1022 bp, Homo sapiens
gattacaggcatgtgccaccacgcctggctaattttgttacatttttagtagagttgggctttccccatgttggccaggctggcctggaacttctgacctcaagtgatctgcccaccttggccttccaaagtgctgggattacaagtgtgagccaccgtgcccagcccattttttttatataagagtaatgcctacacatggtaatgttaaaacaatatggaagggcagaagattggatatggtgatgagagatgacattatataagacacaatgggtaaaaagcttttccttatgtgaaaactctggggcagaagtcaactcttctagtgtgggctgtgcatagtaatttccttcccaagaatacagtatggaaaagagggggaaagttcctttccattggagaagcctgacagactaccttagccaggttatgaaggttaaagtcaacagtgatcagtcacattgatagtatgtacccttgatatgatgtgatgaaaatggtattctttctctgtcatcttccttccaaacacttataatcccagtctaatcatgaaaaaattagacaaatttcaacacagggcatgttacaaaatacctaatcagtactcaaaactgtcaagaacatcaaaaaaggaaagcatgagaaactgttacaaccaagaggaaccttaaagaaggcctgacaattaaatgtaatatggtttcttagatgtgatcctgagacaacaaaaggacatgaggtaaaaactaagggaaaaaattagaactttaagggagttaaaggtaaagagattttataaagagtgcaggataaagaataatcccagcactttgggaggcagtcagatcacctgaagtcaggagttccagatcagcctggccaacatgatgaaaccccatctctactaaaaatacaaaaattagccaggcgtggtggcaggcacctgtaatcccagctactcagcaggctgaggcaggagaagtgcttgaacccaggaggcagaggttgcagtgagc

SEQ ID NO: 129908 - DNA, 1084 bp, Homo sapiens
aagtcttaaagatgagtagctgagtagacaaaagaagtcgctggttattagagaaagaacactgaataggctgggtgcagtggctcatgcctgtaatcccagcactttgggagaccaagtcaggcagatcacgaggtcaggagatcgagaccattgtggctaacacggtgaaaccccatctctactaaaaatacaaaaaattagccaggcgtggtggcatgtgcctgtagtcccagctacttgggagctgaggcaggagaatcgcttgaacctgggaggcagaggttgcagtgagtgtcgagatcgcgccactgtactcctgcctgacgacagagtgagaatccgtcaaaaaaaaaagaaagaacacttaataaatgtatgcagaggcccaatgtgtaagagatactgacatataggaacataggctttcagctgagtttatatctcatttactcatttttgtgattttggtctcatcccagaagtgttttaatattgggggtactttaatattgtaaaagaaagaaacagaaatagtagtagatgattgcatcaagggaaagagggtagagggttagttcttcatattgtccatttctttttttaattgattctttagcaactctcagctttgttagcgtacttttttctgcactttgcagtttccaggagaaagatcttttacattctgaaagccacatcctcttgggaactttatttttattaccaaacttgatgcctggaatatagtaggcatgcattcaattaatattctttgaataactatctcttctcttccctcctagctttcactgggcagccttctcaaataaatgctctgtattcccaattttcttttcccacaccactcaatatttcttgtgtttgagtaacttactgattgcactaggaattattatagacagaatcaacaagactgggaaactaacaacgtaagagtcttaagaggaatgaaagatgactcttgattagtgtattaggtttttagggccactgtgacagcttacgagcttggtggcttaaaatcacagaaagttgttctgtcacatttctggaggccaga

SEQ ID NO: 129909 - DNA, 1340 bp, Homo sapiens
aggtcacaggttatgaaattatccagatggatttgaacactggtgttaaaactgtaaagcctgttgtttattaattttctgtttgaaaagggcagactttattttttcatgtttcacggtttttcagtttgtaatgtaattacaaaatggctagtttttttgtatttttggtagagacagggtttcaccatattgcccaggctggttttgaactcctgagctcaagcagtccgcctgccacggcctcccaaggtactgggattacaggcgtgagccaccatgcctgacttgcgttttcacatattttaaattaaagctgtttggcttgtggttgtaaaaatagaatcatcactaatattgacgaatcctgcaattagtgggaagttggtttaggacaaggaaaatgaactccagtagaatacccagcacctactcgtatttcttgtgaaggactctttgccttaaaatgcaagaggacttaattagattcttgggccccacgaaagacgtgctaagtctctgggatggggcttcaggaatctgccttttttttaatttttatttttggagataaggtttcacactgtcacccaggctgtagtgcagtgggacgataacatctcagcctcctgaactcaggtgatcctccctcctcatcttccaagtagctgagactactgccatgcaccaccatacccagcttattttttgtagaggtgccatgttgcccaggctggtcacgaactcctgggctcaagcagtcactcctcctgccttggcttcccgaagcactgggttataggtgtgagccatcacacccggcaaggaatctgcatttttaatgggtactacttataattgttacctcattgacttggtatttaaatattcagctctcacaatggtgtcctactgagggacagtgactccgaccctgagtaaaggaagaaggtaaggtattggtagcaactctaatagcagcattaataagtgtagtgatttgtattaattacagagtggtaatgatctgtgtatatccaagatatccacaccaggccttaaaaaacaatgttttgcacatcattaaacaaatattcattaaacaaattcattattcattaaacaaatattcattattcattaaattattaaattattcatttttcattaaatatttcatgaatactagctcaacagatcattctaggtgctttggaggatgaaaagatgaataggaatacagatcttgccctgaaagaactttgtttataaatgttgtaaaaacaggcatttaaataactgtagtgtaagataaaagttagtacatagtaattgtcatt

SEQ ID NO: 129910 - DNA, 1055 bp, Homo sapiens
tgaccattgtttttgattttcctgtctccatgttgggaaatggccattgtcaataactccaaagttcatataccattcaggagagcagagattctctttaactcaatttgaagtttcctagggacgagagttcattggctcaatttggttcaggctcacttatctcttgttctgtccactcttttcatgggcccagaatcacttttgtacaacatggtttccaaattggtagtcgtaggagcaatctgggtgagtagtcatacatagccactaccagaattccctcacacctagctattctatttagtcatcatgtccttatcttttgtcccctgtaatgatcagttctctactctgtttataaaccattgactcctgagctcatgattcttctcagtctgcctctcttgctttctctcttacttttccctaacacgtatagacactatgtgccgtcaagtctttgctgcttgctactccctgaatacttagtactttttcataccctcaatctttctcttctcagaggatgccattgcttgacatctctgcttattacagttcttttctgaacaactgtccatatcccaaaccatagctcccatttaaaggaggtaagatttgtatacccacgcctgtggagaaatattgttaacaggaaaggaacaagtactgtataggcacacagtttcaatataatgctccacaccaatagggattcttagtagctcatgcattagaaatccattgttcataatcaggattagtcctcctaaaaaggcaaagcaaattttatggaagatgaatgtaggaagtcccatctttttacctgctgtgtgttaagggaaactacacccagtacacattcataaaatggattgttttttgttggggtcatagtccagccatggctttagcaacagtctgttattaaagaacaaagatggtagctaacatgaactatttttttaaattgaaattttattttagatcctataaagtgaatgtaaatgtgctctatacattcactatgcagagtctcaatatttaagatg

SEQ ID NO: 129911 - DNA, 1037 bp, Homo sapiens
tgagggtgaaaaatttaaggttggtttatgactaagaaggtattaaatgatagaaaagagaaaataaaagaccgtaaaagtttttaaaagcctctatacaaatattctttaacctttgactatctttgagtcatagaaacagtttataaatagcttcatggacacaattcagaaggtacagactagagccttgctcctcaaaagatggttcatgtgctgttgtgctggaccagcagcagcatcagtatcacgtgggagcttgttaaagaacctactgaatcataatttgcattttaacaggatcgccaagtgattcatatgggcactgaaggttaaaaagcactggaggtaatggcttttaaatattgattacccagctggaaatacactttatgtgctttgccttgtgcacacatcctggcctctcagtggctttacttctccccgccgtgtgatcttggttccaccctgcttcagctactccctcccatagtttctctcagaactcatcattaccaatatctggaaccatttcagaatttagtttcatgcatttgactatttgactttgtatcccatccttcctgctcactttctttagtccctaattactaacaatttttttacctcatcagaattatgccattgattctagtatcttttcactctcatctctcttgtgttgctactttcctccttacccagattcaactttaatagctgtgcccttataatcattcctgcatgcacccacagttttcttgtccctctcatgctgtatcatagtctcgtggctaaaccataggttaaatctagccatctattcctgacatttacagctagacaggtctggagaaaagcacagagccatgctaactagtctcattttaatttcttggacactcacatcaagtaaatccttagtactacctgacaattgtacttttatttccattatattcaccctttagtttcctgtagaacgatatcatactttcttgctctttaagcagacatctttgctatctttactctca

SEQ ID NO: 129912 - DNA, 1045 bp, Homo sapiens
tatgttaaaacattgattatagctagtggcagatttggagatttctttccttgctaattattcatgcttggaaccaatactatgatattgaaatatatctatcccttttagtgttttttataccatattaatgtaatttttaagaaattttaatatttaacatttgtgtttaataattatggctcttggatctctttttttaatttttatgttactgagcctgcaaaacatgaagaccacagttggtttctaatattgactctgccacatttcagtatcttagtattttaattatgtccttagcttatgtcttattagcacctcttccttagcttatgtattttctaagtataggaactgcatttgttaaagttgatctgtatattacctagcatagcatgtcttggaagtaaacattctgtttttaatccttgaaagtgagatatattcccactaattttgtaacaaatcatttcctactctatttaggtgtagagttcggtgctcgaatgataactattgatgggaaacagataaaacttcagatatgggatacggtaagtataggaaaagtgcactgtatgatctcagtaaagttactttatgaaagtacatcgtatatttgttttaatgttattatatgcctgttatggtttgttagacactgacttcctgcagccatgagatgaaatgtggtgctggagtagactggtttttcttatgcactgttttcaatagatgggccctgggtgttggtgttagtgagcatatctgagtgaatgttcacgttatgtggtctaaattgaaatgctctagaaactgtatttttaagaaaaacaatcagcatgtctcaagtacacataggaagtaaaataagaatatcaatattatacaataacttattcttcaggcttattattttaaatgttttagtcctaacaacttgaagtcacgttgctcttaattcagtatcctaattctgtcatacccttgttcattgagtacctattacatgtcatacaatattgtttttaatggtgattcc

SEQ ID NO: 129913 - DNA, 1037 bp, Homo sapiens
ggtgggggatgggggagggagggagtatagaggaagggtcaacaagagcaaggtattgtagagtgttgagtgttaaacagggtagaatatgagccgtccatgcgcattctgagggtgggaagggctaaatatttacattgcaagatcagaactcagaatgtgtaaacatcaatatttttcaagttaggggattttgaatataaaaatcgttaaaattggctttacgtttacttaattaaaatgcttatgtttttgcaaaagtaggaaaagaagggattaaaaatgaaaaataacttcttataagagctgtctcggttttaaactcagacagaacagtcacattcctccccagcaattcttaaaaaaacagaaattagtaccatgagtaaaagagaaattacctagctttgcataatctcttgtgtctgtttcacaagtggatataaagatgacttttacatcctgttgccttttgacaagcattatatatcaaatacagagaaaattgattaagtgtggagaaaaaaacttatataaattaaattcagaaccattttgcttttcataataaaatgattgctcaaagaattccatttgatgactgttgaaagctcactgcagtttatgatataactgataaaatctgcatccttggccttccaacaacctttacaccagcagatggtgggcgtaaagatgtcattcatcatttatttacaatgggttttatttattctagtgtcaacagctgccccagggagtgggttattgaattcaaatgtgaggctctgggttatttgcttcctttcaaatttgtcttcagagcttagttgctaggagtccattctgtcctttaataatgattcgtgtattgtgaagccattcagtaaattgggttgtcagggattgccaaaaagggtttagaggtcttgcgggctggggaggttgcaggagcgactacatgtgcactacatgtgcgtctcgttgacttgagcaatcttgagcaatagcggtgttttgtaactttttcctaagac

SEQ ID NO: 129914 - DNA, 1022 bp, Homo sapiens
aaatataataataaagttttttaactttaaaaataaaacacgctttaaaagcaactgctacctcccctcccccccactaataaaattctagtatgataaaaatgaataccctgctttcattggaaatttctagcttacactttctctctcactccgtttctccttttctgtctctctctactccttctccctccctccctccctctctctctctgtctatatcaattttgctttaagaggaaactgggaattaaacaaactgggatcaatgatgtaatgtatctttagtactttggattttctaaacaatttcctgtagtttctgagagttgtattttaatcacattcatagaaactcagtcagtctggccaatggaggagaatagtatagtcctgctctttcaaattatgttaagcaaaatggctttcttctctgggaatgcactgtactcaaagatataaggtattagactagaggctcccttaagttacggctagttctaacgttctaaagctctaacacagaatctttcttctgttggattgttagttctttgaaactagacagtgtgttctaaatactaaccctcataataccctgaataatacagttagtatgttaaaaattaattaaaagaatggtcatcacaactttgaattccatggtacactttccacaaatgcttctgtttgtaccatgttgattagtaatgtgaccctttctttcccatgtttagtgatttagaatctagaagagaagtaaaaaaagaagaaggtgaagcttttgcacgagaacatggactcatcttcatggaaacgtctgctaagactgcttccaatgtagaagaggtaaataagaggccctttaaaatcttcatctttatacttaatagaaatgttttatatatcttcattttacttattatttaagtttttagtcggatggtctttgaacatcataaagtaggaaagtttcttccctttgaaatcccttgtaacattcaccttctgtcagactctta

SEQ ID NO: 129915 - DNA, 1023 bp, Homo sapiens
ttttcttacatttttgtacgtattttcactccctccctttttctaaacaatttcctatagtttctgagagttatattttaatcacattcatagaaagtcagtctggccaatggaggagaatagtgtagtcctattctttcaaattatgttgagcaaaatggcttctctgggaacccactgtactcaaagatataaggtattggacttcttcgtgttgcatggtagggaaatcttttttgtgttgcatgggagggaaacaaggaaccacactaatgaaatttggaaatgtttcaagacagcagaacgtttgtagctatttatatccacttctgcttatttttttaattttatttatttttttaactgtcaatatattaccacatcaccacttctgcttaaagtattctattattgctgtgtaacattttacaaagcatgagaattctgtttcatctattgatgaaatttgtattatttcagttatttccattgatgaacctgaactattggaacttttctgaacacagtgtattcttttatgctctatgtgtttgtgtttggaggtagtatgtatatacatattataaatagatgattacgtagttgatcctttctaaggtaaatgtattactatactgttattttataaaaagaggtaatgaagctaagaaaagtagtagtttatccaaagtaatacttagttcccgatttctagataagaacagcttataagagcaactacagaaagtagttctaaaaaacaaatgagttaagaatcactgccgtaaggataacagaggtcagggtcctgggcaacagctagcatgtgccttcaatgtagtaagcagtcagtaaatatttattaagaatgatacttggagctcttctgattaacccttgaacctaaaaattgactacagtaattctacagcattggtattttcaccgaagaattctttcttaggtaaaatattatacagtcatgtgttgcttgacaaaggagatacattctgagaaatatgt

SEQ ID NO: 129916 - DNA, 1041 bp, Homo sapiens
cgagaccagcttgaccaatatggtgaaacctcatctgtactaaaaatacaaaaattagccgggcgtggtggcttgcgcctgtagtcccagctactcaggaggctgagacaggagaattacttgaatcagggaggcggaagttgcagtgagctcaaattgcaccactgcactccagcctgggtgacagagtgagactccgtcttagaaaacaaacaaacaaacaaaaatgcttcatttcagtgacaccctgagctgggagggagtaaagactcataggcaaaagggactaatacatgtatataaaatgcttcatttcagtgataccctgagcaaggagggagtaaagactaggaagtactgttaggaagtgacaccacttttatttttggagctgtctctgacctgtgaatcctacagtgaatactcttaaatattttagtatctgtccagatgatattggtacccagatcctttaactatacctctgatattccaactgttttgctcttacctgaatttatgctgcctatcttgaactaggatcttaaatttaaaatggcacccaagacaacactttgaagtttatttccaaagagcataagaataaaatgccctagtcttcctaaactaggtgttacttagcgggaagaatttctcaagacaggatcatagagagagagagtactatcatatactacattaataacactaatatacaaccacatagatatttattgtatacacaagtaatacttggaaaatctggattaagtaaaagtcgacaaatttttctaacagttgcccaagctatacctgggcctttttgagctgcagctagagctggagtggctgagatacacaagcagtgtcctgaggcaacacaggtggtggggccgtggcctgacctacaaaactgttcttccctcttagggcctccaggcctgtgatgggttgggctcctggaaagtctctgaaatgcctaaaattggaattggcgggggatgcgtaacatctcttaacataccatggactgatgtctgt

SEQ ID NO: 129917 - DNA, 1392 bp, Homo sapiens
tctctttatcgtaagcgtcctttgattttgctttcttaaactatatactaaataatacattatcatggcaaaaaaggccctgagtggaactgtattatccagaagtaagctagtttttacatggaggattatgcagtttacataattgaaatgtgtttttctctgtgtgctgttctcatattccaatattcttttttcctctcatggtcatgatgttttcttttgagatataattcacataccataaaattgatgcttttaaactatacaattcgttagctgggtgtggcagcacacacctgtagtcccagctactcaggaggctgaagtgagaggatcacttgaactgggaggcagaggttgcagtgaaccgagattgcgccgctgcactccatcctaggcgacagggtgagcccctgtctcaaaaataaataaataaacaattcagtggtttttagtctattcacaaagttacacaaccatcaccactatctaattccagaacattttagttaccccaaaaagaaacctcatactcattagcattctctcccctttttctcttccatctagcttctggcaaccagtaatctactttctgtctccatggatttgcctattctagacatttcgtacaaatggagttgtagtattgtggcgttttgtgtctgccttctttcatttagcacagtgttttcaaggttcatccacattgtagcatgaatcagtacttcattcctttttatggccaaataatattctactaattgaatatctcaaattttgttttttattgactgaacatttctgtagtttgcacttgttggctgttgtgaataatgctgtttgtaatgctaattagcatgtgcgtacatcctttgttcttaatcttaggggaaaggctttcagccttcatcttcgaatatgatgttagatgtagtttttcttagatgccattctttagatcaggttgaggagttcccttctatttcgacttgagtgtttttatcatgaaatgttggattttgtcaaatgctttttctatgtctattgatgatcatgagggcttgtttattaatataatgtattacatcgattgttctttattaatatgttattaatatctttgttctttattaatatgtattacgtcgattgactttcatatgttgaatgttatgatattctatagagcatatataatgttattttactgctttggttttatataatatgaaccaatttctctatatttcaggcatttattaatacagcaaaagaaatttatgaaaaaattcaagaaggagtctttgacattaataatgaggtatatacatataaatattgttggtcaatattaatttagagttcacttttgattactattttata

SEQ ID NO: 129918 - DNA, 1312 bp, Homo sapiens
ttctgcattatgagaatttcctgaaaagcagcattatccaataactgtttaccccgtacctggtatgataaagaattattttcagaaacatttccacagtgtttttaaaaggaaggaacatcccttaggagatattgttttaattgttgctaaaatctacttgctgtatttttctcagttgtttgataaaattgtatcataaagaattaaatgagttttttaagaattagttaaactatattgtctggtcatatttattgttctgttctcttttatttcaggcaaatggcattaaaattggccctcagcatgctgctaccaatgcaacacatgcaggcaatcagggaggacagcaggctgggggcggctgctgttgagtctgtttttactgtctagctgcccaacggggcctactcacttattctttcaccccctctcctcctgctcagctgagacatgaaactatttgaaatggctttatgtcacagaagactttaatccgtcaaattcttgtataactttgaataaatggttaatgttcacttaaaagacagattttggagattgtattcatatctatttgcatttgatttctaggtcaattgatgtgattatttttgttaaatgttgtcttgtgcccttaactacgaactgaattgtattaaacactacaaagtcatcttgagtattttaaatcggtttgtgtagttaggtttcccaacatctgtggttacctaatgtttaatattatagaactgtcctcagaaactttgtcaattttcacggctataaggaaacagaaggactcttttaattctgtatttatcatttactttctgtatatatagtttaataacctgcttgggtgtaatttgccaagcttgaattctttaatgcatttgcataaattctatactgtttagagcttaaagctacagaagcattgttaggaattgcttggacactgaattttaaactttttgacattgttaacaagcatgttcatcttttcttgtcactagtccaagaaaaatatgcttaatgtatattacaaaggctttgtatatgttaacctgttttaatgccaaaagtttgctttgtccacaatttccttaagacctcttcagaaagggatttgtttgccttaatgaatactgttgggaaaaaacacagtataatgagtgaaaagggcagaagcaagaaatttctacatcttagcgactccaagaagaatgagtatccacatttagatggcacattatgaggactttaatctttccttaaacacaataatgttttcttttttctttta

SEQ ID NO: 129919 - DNA, 1018 bp, Homo sapiens
cgcggggggggggggcgggggcggcggcggcggcggctcccgggcgggggtgggggcgctggtcgggaggctctggggaaggagccgccggccccgagcagccatcattaccgagccgcctttctccggatggctctgcctcgaggagcccggagccgtgggagcgcaccccaaactcccggccggccgcccgctttgtgagcgcccccgtgaagcgagcggcgcggagagtgctcctgctatgggtcggactcttttcctggaggtcacttttagagactgctcacgccttggtttaaactagtttttttccccctcttctgaacagacaatggacaaaagaaaagtagcaacccacatggagagagtttccttttgaattgctagaattagatacactatccagcgctccacttgctaagtatactttttagtttcccattgtatattatctagcaatcgatttaaataacttatcttaaaaagtgtcccttttgggggcttaatttctggaatacattacatgtcttaatttatttttaaaggattttgtgaggccctgattttttattttctaaaaattttaatttaagccgtctttgcagtgggcgatacctttctaaggggttaagtgttatttcaccccagttctctctcggtaagggagggagtactcagtatacgtagtaatcgaagaggaaacaaaatacgtgtctttatttcttcactgatcttgtctgacgatgacaaaaaatatcttagtgactgtgaccttagcagcatggctacctgatttatcccagttataattatatttagattgcagtaatgtctaagtacaaggtaattcctatttcagaaataacttgagcagtgattttacgaagttgaatccttctcccagcccccagagtacatctgtcgcgcagtgtttttgtcttgctgttgcacaacagaagccctccagtctttaccctaaaatggcagctttcatttgactgaggcccattcattgaca

SEQ ID NO: 129920 - DNA, 1727 bp, Homo sapiens
ttatgagaaaatacactgtaaatgcttctgtgtgcctgctgtgtaacccataaaagccatgtaagtgccaagttagtgtagttctttcaaacctaagattacagcattgtattccatatgcttgaaaaagtttgcttgccacacagtcaccatgcctttagttaactttgattcagcaaaccttggcaagccttccatggttaaaacaataaaaggcagtactttcctttagggagtgtaccatctaatagagagcagttctataggtaagcaaatattcacatttgacttttaagataaacttataagtaatagttatctttcatctttcattaactaaatacaaccttttgggtttgatagcagacaccatggccatcttagaaacatcgaatataaatgtggcattgcaagaataaaaatgtttagtcaggtctgagcaaatggctcttaaaacttcaactttgtaagacagtgattctttttcagtaaatgatttctacatgtaaaaagtaagcacatagtcacatagctaaaatcaccaaaaaggatggagaaggaacatcttaggtgatattaagatgatgtcagcaatatattggctctgtgggaccctttcaattgtcttgttcactcatgtgggcatatttgtgtatcttaaaaaaatctgttcttttcatgcgattggaaattcagaatttagcatttttctagacaggtttccaaaaccattatggtttcattagttcaggagatactattttcccctttctctataaaactttattatttagtctttaaaaaaattgttgacattcaaaggtgactaatgttaaaatataaaagaaattgagatcaataatcgcttggtttttctacaaaaaatacaaagatggaatgatttatttcaatttgggtatcactcaggttgcagtgatggcagaggtccatagctgattatggtggttgttaagagctaggaaggtaatttaaaacatcatgactatgtgtccatattttacttttgtcaatagattaaaaattgtaaatgaaatcacatctgcatgataaaaagaagaaatagaaacaggaagttgtaatgatgttgtcaaataaaaattcattttatccttattagagaatgattggatatttagagtgtgaggaccttagagagctagttgaactttctcattttacagattaagaaactaaagtccagagagattaattaaatgaactgcctctgactggccacccactgttgcagagcttatctcagttacagttgtgttcctggtgcctagcatcgtgccagtgcaggaggggtgctggtcttgtctttgttggctctggaagagtacagctcttgctcatgttctgactcaaaggtacctttaggctttagaatcctacagcataggacaacataactcttaaagatgttcctaaaccaacaataatttgcttctgtttttggaggttttttttttttaactatgattatccatttaggaaaaatgcagagataattatttcaagatttgacaactgttttcactttagatgcatgtattgatcaccatagctagattcctgttgcattttaactaatgttaggtgactgactgcaaacatgattgttttttcagagaaggatttttttggggtttctgttctgcttttactttgaaaattagaaatgtctttttaaaagtaaaaaataa

SEQ ID NO: 129921 - DNA, 1517 bp, Homo sapiens
gcttgtttacctatgctaatgtggaatctaaggcactttttaaagtgaccctttgagccttgcttcctctgtgcatgtcaggattggctttcacggccacagaatctggactgtgattagtcttcctgtttcatctgtggttttgctcattgattcggctgtttgttgggtacctgctacctgaaagatgcaatgctatgaattgtcaatatagtgatgacatgagaagacatggtaaactcacacaaaaactagagctactgtaaggtcataggtgtgatgcagtcggtgccaggaggagtgagagcttaggacttggggattccgtcagttgggtggggtattaccccttaggaagtggctttagcattaccatctgaatgatggtagaagaaggggtgagggcacttcaggcagtgcccctcacctgcagggaggctgtgtgtttgaggcattcaactgcaagatgagactcgaggcaggcagtatccaacttggtcagggctttcaggatatcaaatttgggatttttgaaaaaagcagtaggaaccactgatgagtgttaagcagcctttgacacgagcagagtagtgttttgaagaagattgaattggtgggtgcagagaggacaataggttgtagacaatatcctgcctgcttttgttgtggtctgtgggatggggaaatcacaatgatttggactagattggtggtggccatggggatggagagaaatggacagatttgagagatatttaacagtttcaacgaataggacttggggatagatgcgctctcaagagggagatctcagggcatataggtttctagcatgttccctgcttggctggttggctactgatcctattcacagaggcaagaatcagatctgctgaagatttgagaaggaagctcatgagttcttgtagcatatgactgaggtagctgataatggaccatgatgacattgttttatcctttgcattgctagtggcattccagaactttaaaaaaagtaatctgctagctttaaccaaaagatattggacgtggggagttcatcaaggaatgtgaatgggttcagtgaaatgggagaggggagggaagccttacttgctgaatacatagcactttgcttgttacttgcctgatacatagcactttgtaggagtttgctcattccaggttgagcgtagaatcctgtggtaaccagaccttggcacattttgttcttctgtatgtccccttacggaggctgctttctgttgctagtcacatattagggcaaggtctttgggttcccggcacgtgggtggcaggtcccccatgttctcggggctgcagtctccctcggagagagttgtattttagaagttggttgtagtcatacagaagcaaggaaggagtgaatacattatttaaataaatgtggagaagaataccaatgtttatcagaatacttacctggtttttagtggagtatgtataaaccagtttaataagtaaattaccttcaa

SEQ ID NO: 129922 - DNA, 1041 bp, Homo sapiens
ttcctcagtcccttcctcccaagttctctttaccatgtaaagaggagacaagatggtatctgaaatgggagtaggcttgggttggggtcagggatgtgagtagcaactagaacataagaaggttcttaggagagggaaggctctggggtagcctacttagaatctcactgctacccagattggcagggaaatggaagagatggagtatagacaattttcattttattctattctatttctttacttgaaaatgacttggaataacaaaataagtgagtcaaaaagtaaataactggtaacgtgtggatttatgggagatccttgtactattctaactttactgcaagtttgcaaatgtatcaatatcaaaagttttaaaagaacagtagctccaaggggttgatgtcagtagctaacatttatggagcataaagtttgtgtcagttagcattttgctaagctatttacatgaactatttctgctgaatcctaaagtaggattagtcaaaatgctgaggtaggaataataattgctattttacaggtgaagaggttgtttaataaatttgtctaagatcatagtttttaatgagtagtgttgggactcaaagcaggacaggctcatttaacagcctgtagcattaactgctctgcagaaattgctttggatagtcccatcaaaataacctaggtcttagaaggataggaacaacaaacatcatgatcttacacacctgcactttctagcaccagctcctggagaaaaatcgagaggctgaatggtgtctgttaacagattatagtcagtgaggcctctttcctcagatgttgtatcttatcaatggcagacattttcaacctgaaagacacatgctcattacaagacttagtagtgctctaaccctgttttcacttatcagtccaagacgtagccgacatcaaagtattcagcttattacagaattgacttcctcaaagtttctctcagtgtttatccaagatgtaattcacttagcatctttatctcgctgcacaggacta

SEQ ID NO: 129923 - DNA, 1052 bp, Homo sapiens
ggacaacagactgtcttccgcagtcatacactcagtcatattctcaaataggtatacagttcaaatgtataaatcagtagtcttacatgttacagagtgggtggatgttcctttgccaggggattaaaaaaaaaaaaatcccaagtcttaatactgctttctcccacacgaatagtctatgatggtgtatttttggattttgtacatgtttatagtttttttcttttcacaattttgaataaactgttgactagcttgagtatggtaagcctctacttaaaatgtaaattttgctatttttggtgcatttaatattttaatatttgtcttgattgtgttaattttcagagctgtgtttatcaccagatttagtatgttaacttttcaatgttcccacttattaaaaaaaataaaaaaaataaacatctgggctggtgtatgaagcaaacctccagttttatagggaactttgtggctactctggggtgctgagagccttccatttagctgctaaaggccagcaggataaggaaaactgtcttatatgctgtcaaatacattaataaggacacaattcaaggacataagtaatttccccacactgtggagcacacaggtggtgatactgctgtagctgaattgctggctggcagtcagtgccactgccatagcaccacaattttcatttttgttgttgttttactgttgtctcggtatggtgaatggttgggctatgggagtggcacagaaacccaggccgtacctagcagaatggttgacagtcgccgactccctgtcattttctgcagctcagtattttcaggtcagggagctgcccatgtcatttgcatctttctttctttctttctttttgacggagtcctgctctgtctcacaggctggagtgcagtggcgtgatctcggctcactgcccacctccacctcctgggttcaagcaattcttgtgcctcagcctcctgagtagctgggattacaggtgtgtgccaccactcctggctaatttttatatttttagtagagatggggtttcg

SEQ ID NO: 129924 - DNA, 1004 bp, Homo sapiens
actctctgatactgtatatggaaggaaggactctgacagtttttcagtaattttgtggtatagacaggaaaatctttttttaggtaccataattttccataattttaaccagcgatatatctgaaacaatactttcaaattttgcatgttttttttttttcttttctagattgcttggcagttttggctttttttaatctcaaagaaattttgttttacagtaagttacgtttaattggaacctcccccactttttttttaaagtttcctgaaatcaaggaacataagaataatttttaaaaattttctgtaggtgagatctgaatttgattaatattaactgcacatttagctctcagatttcagaccgatttagtgttagcttctgtgcatctcacctaattgttaaaatatgtgagcatgattttgatatttgggaggtggaagagaagcctcttgagacttttgaactaaagttaaacagtttattctgtcttggagttagttggtgtaggttagtaggaagactttaacatctggagctctttcaccttggaattgtatctttctcatggaagaaacacatttgagctgcagacagcctggaaaagctttcaggctatattttcttcacaggagggcaatagctttgcacttataataaaatagcttcaaagtttttgtctccttgacattatgttacctttaatttaccctcaaacattattatatcttctatagcaaacagaggaggataagaaaaggaaaaacagagacaaattgttaacattatccccaaaataataaatgggttgttggtaacataagacttgaaaaccatagaatccagaatatatgcaacttcattttattactgtattgcattaaatttaagatggtgtcagttgtaagatgtattctatttctgatacattgaaatgccaaaaaaaagtcgtggaattgatgaaatctagtagttaaataaaaaaccacaaaaacctcag

SEQ ID NO: 129925 - DNA, 1088 bp, Homo sapiens
tgtcctttccgactttacagaacaactggaatctatgtagtcccttaagtaaataaagcttttaatgctaagactgtcaagcaataagcctgtgagaaggtggagactgtgatcttggttgtaaacttaaaaacgaaatctcttacaccagtcttttccctgttacagctttctagttgctggtgaataaaatgcaaaagtgacaaagaatttgcatatattcttagggaccaatagcttcgttttcatagtgaatcttattatcttttgctgtgtaacaaactacactgaaacttggtggcttaaaagagaagccatctatttagcacatacttttgtgggttggcagtttggattggtttcagctggactcacccctgcatctctggtcagctggtggctgatagttagctggggccatatgtttgcatgtgagagagagtgagcgagagagcgccacatattccagcagattggcccaggcttgttgacatggtggcagaaaagaaggccgctctggtgctcaagcacttttcatatctgtttgcctgaagtttgctattgtctctctggccaaagcaagttacatggccaggcagtgtagaagggaatacttcagggaggcccaacatatttggccaccactgcgaccatcttctacagagaatgtacgtcactctctctttctcctcctccttcctttttcttattgtggtaaaatacacatcttaactatttttaagtgtacagttcagtgatactaaatgcatattcataatgttacgcatccatcaccagcatccatctccataactcttgtaaaactgaaattttatacacatttcacttccccacatgtgcatatctcttaattcttctgtagaatgcctttgaccagtgattggtcatatagcaccagaatgaaaggcctggggaagaacatgttaaaattcatcgctttctcttcctcttattggtcaaggtagggttatggataggaaatgagagaagaaaacaaaacaaaaacagaagactacttgtgctttcattttccactctccccccaccacccaactgaaaaaccaaat

SEQ ID NO: 129926 - DNA, 1047 bp, Homo sapiens
attttacactcacttgcttcctctagtcccttgtgtagtgaagggactgttcaatcacatgccttactccggcagcccctggccagtcaccaacatgtaggctttctagctttctttctcacctggttaggataggaatctcatctgcataggagctctgaatgtgatataaaatctgatccaattgagaggtgagctataaaggaatatataggaaggagagagtaaagggtagttgatggtataagagtcctgaaaggtagataagtgtggagtctaaaagtgagggaataggtctcggcctggaagagcatagttgtcctggaaacaaggaggcaggaggaatggatgggtacagatgttagtgaacttgcgcgtttggctttaggaactcccacagttagctatcagaggggctcctattttctctgcaaagtaggaaatgaaattacttgtttatgtcttgcttctttaaccaaagtataaattcactgaggacaaaaaggtatgaatgcataaacatgcttatttgttctttcacagtactcgtttgatacttaatgttggatttcattgaaaattggactcattgaaaaatcagacttgttacttagggttaaataagacattgcatctaaaaaatgactcacccagtttgtaaaaatattaaacactgtaaataggtgccatattaaattattgctaactacttcctgaatgttaccagtttaatttatgattagatatccataaataaatcttattgagtaaaaatggcagaatttgtgctaacagtttggtgcctgggctttagagaaatgcacaccacctgtactttgagatttaaaaataaagtataaagataatggtgatgcatgtagaagagaaacagggagaaaagtgaactacttggaataatagatttttatatcaactcctatgaattgattaacattatataatagaataagtcacatttatactgtgttttattgcttaccaggcattttaatacatgctggcacaaataatccatatagaaaaggt

SEQ ID NO: 129927 - DNA, 1054 bp, Homo sapiens
tgaaacccctcagtggaaatattttgctatttaaaaaagttgacatgctggaagttagttttcatatatgaaaaaaggaagttattttaacattgcttagtaatctacaaagatctttttaaaatatatatatatttattatactttaagttctaggatacatgtgcacaacatgcaggtttgttacatatgtatacatgtgccatgttggtgtgccgcacccattaactcgtcatttacattaggtatatctcctaatgctattcctccctgctccccccaccccacgacaggccccggtgtgtgatgttccccttcctgtgtccaagtgttcccattgttcatttcccacctatgagtgagaacatgcagtaatctacaaagatcttttaaaataacatattaagttaacataaaatgacactattaagattctgtgtagaagctctgaatatgatataaaatctgataaatattagtaagaaacaccttttgatgctgtctggtatggtcttggaacttgcttattcatgcatccacagaggctgaaatatgcaaatattgacaaaactagatttattgatagtgatttcaattacagtagtgtgatcctctacatccagcagtctcccttgactggcagctcttctgtggaaaggaatttgcttgctttccctgagtgctcttctgtggtcctgctagatttggagattgtcatttactgtctgacctagttcacacacgtgttccctgtgaaccaacttagatgtctgtcttaatgtaactgatagctcatttacttactaatggattggataaataaaaagtttacaagttacccttgtataagaacctactttgagggattttaatagtaactgggaagaattgatgaccagaattgggtaactattaatagatgaccagcacttgtttacttttaatttatagcatcaagtccaatctgacacatcctatgtacatttaagtttttaaatagaaatttaaactgtatttgagggtaaaagaaatctttagttataatttattcata

SEQ ID NO: 129928 - DNA, 1075 bp, Homo sapiens
taggactttggtgtaaaatgagacagcagatgttaaagtaccttccgagaccattgtttccagaaccttcatcacattgtggtattagaaaccttggagtcctccttgactctttcacaagctacattgaatttgttctcaaagcctctggctctgcctttaaagtatatgcagagtctgataccttttctctccacttctaccacccgggtccaagtggccttttttccttgccggtgttactgcagtagctcccctactgctctccctgctgttgcctgtgttgcctgcagtctttccaatgttagcagtcaaagtcatctctcagagccagagctggatcatgtccctcctctgctgaaagcagttcgtgattcatcctcttgaggcaaaacctcagccctcacagaagtaccctctgctccagcctcccccatccagaatctcatgggacaccacactttgtccttgctgtcctttagatgctcaggtgccagttcccctctcagtcttccacagttgctctgatctcctcagacactgtcagggcctcgtagggcctgctgggctgactcctcagttccttcccgatcatacataactatcttccctgtgaggcagtcccttaccacccaatttaaaattgcacctccttcctccaaccggtccctctgctgtgatttggtttttctctcttactttccttttagttatttacttatttattttgtttgactctctccacaaacaaagcttaattaagctgcatgaaggaatcgttgtccataatgtttactgatgcatctccagtgcctaggacagtgtttgacagatgataggtgcacaatacatatttgttgcttaaaattatatgggagctaatcattggagggaaaaatgtcttcggttctctgtagcacactttttggcatagtatagccgatgaaactttgtaagcaagatagcaaatattgttacactatagtggctttcagaaattgaagacagtgtttctctttgagacagtcctgattagcaaattacacatttttcccctcttgttacatctacctta

SEQ ID NO: 129929 - DNA, 1028 bp, Homo sapiens
tctctgaaagcagtctcagggattattcccattgctgccgcttaccagcagtggctccttggcaggctacttaacctttgagccttcagtttcctttcctctaatgggggtaacaaggattaaatgaacgagtgcatctgaagccttagcacagggcctggcatgtgagtaaatgtccaggaaatgcttgccaccatcagcagcagcacctgtgtgggaaattactttcccttctcccttttctatgggagtcccttagagccctgctcagcagcctggatcctcatcagttctgggattccgttggcggctgctgcttttccaagtggacacttttctctttgtcattccatgtcaagggctgtgaagtgaggtcccggaccagcaacatcaacttaggcatggagcctgggcattttccttctggttggtcttatggattgaattgtgtcactctctcccacccaaactcatatgttgaagcccctaatccccaaggcaattgtatttggagatagggcctttagggaggtaattaagattacatgaggttataaagtggtcataaggtaggatcctgatctgacaggactagtggtcttaatacgaagaggaaaagagagagctggctctcccagttgacaaaaaagaggccatgtgtgcacacagtgagatggtggctgcctataagccaagagaagaggcctcagaatgaatcctgccttgccagcaccttcgtcttggacttccagtctccagaactgtgaaaaataagtttccgtttaagccacccaggctgtagagtttgttatggaactctggcagactgagattgttggagaaccacagtcctggtggttgagtgcctgcctcaggcattattgtttttaggccagtggtttgtgcatcaaaatgcttggtaaagcagactgccagggcttactccaagaatttcagatttaggattgacatgagaagtcacatttctaaccagttccccagcggtgctgatgctgccgatgctgcca

SEQ ID NO: 129930 - DNA, 1035 bp, Homo sapiens
tggattatttgtttaaaagaactgttatcttttactccttcaacaagtgcattcatgtacctcctttatcctagtcacagcgataagccctggggataaagaggggcgggaacacctagcccagggcctctcagagccacagggctcccagctagcagcttgagttcctaaactctggatttcagatgtgtggaaatgcactgatggcaggttgttagggatggagatgtcttaaaggaatgttcggttatctctcctgaagggttttaaaaattgtggaagtcaagatcaaggatgaagatgaaatttcttgtggtttcttcatgagagatctcttctatctgtatagtccggaattctgagtagtatcccaaagtgtaccatcaagacagatgatagcagagagttgaatttttatatatattttatattgctaagcatattttttgttagggatttgaagtagttaagtcatcctcacagcatccctgggaatgacagttgacattaagctattttattgttggaaaaggaaattatggaggttacttctcactcatattttttcagcaaggaattgggaaatggaaagaatatattaagcatctgcattataggatgcccttgcagttacattctgaacccttgaattgttattttgatggaagggttacagttgtgtggcagagagcttatattgttggtgattagggagagattgtgtgctgccagacctgtttaggagtaaagggtagtgagagatttcactcttctgagaaatttgcttcagctgactcgcttgttttaggaccaacacactccaggcttatgggactggatctgggaggtacctgagccgttttcctggaggtggtgctggcaggcatcccagtgccaacttcacttcctttaggtggggagcagggggatttcctccaatgagaacaagcaaatgtgttctgagaagtgatggtttacaacagttggcatcagaagtacacaagtttactaccaaaaccagggaggagcagttac

SEQ ID NO: 129931 - DNA, 1050 bp, Homo sapiens
tgactgtaggaaatccagccctttattaaatgaagattccagagagctctgtccagtggaattttctgggatgatagaagtcttctttttggtgtccagtatggtagcctgtaggcccttgtggttaggaagcacttgaaatggggctagtatgacagaggaactgaattttaaattttaattttaaccaacttaaacagccatatttggctactgactactattggacagtgcaattctagaatcataattggtagagaagtagtcttcaaacttttttgtctcctaagagaattttaaaaaaaattctctttttcagtttgaatacatgcattaaaatgtgtttgtcttcatgacaattatctcactaaacaggcatttgtcacctggatgaaatgaaggactgccctcttgatatttattaactctctgctttgctgccaagtgactcttcctaaagaggttggtgtcccagaggtttttatactccagggcaacacactgtaataatatttgggatgagtgaaagccattttggtaaagagaagtgattgtaaaaaggaaggtggaaagggggacttttagaaaatagataccaaagatgacagtgttagttctgatagaatgtattttgagccactctgatttgatacttagataccagaactattctagttaataaaatgaggcatgattagtataagaaagaacacttaaccttcctgctactaaggcaggtgggggcattcatccagattatttaatatgtgagacaaatatgttcaggtaactgcttgtctgtttataattgttttatttaaagtaatagttctcaaatgttttagttttgaaatcctgatgctcttaaatattgagaaccccaaagagcttttgtttattctggttttatctgttgttatttaccatatcagaaatgaaaactaggaaatttaaaaaatacatttattcatttaaaaataataataacccccttattggttcattgaattatgccaatcttctgatttttgtatacatttttttttgagg

SEQ ID NO: 129932 - DNA, 1051 bp, Homo sapiens
cagtgactggtgtacttggatggggtggctgcagccctgcaataccatgggctgcccagtgttagggccatctgggccagcaccgctcagaccctgccctccaacttgtattagtttggtccttcctcattgagataaattcgttctgcatgttgtttcctgtttgccagctgtccctggggattgtgggggtggtgacagattcaaaaacctgtgagattgctcctcaagtaattgctatttacatttctgaatttgctgtagtagaaactgaagagaaaatctttaggctcttggtcagtactggactagatatcagacgactattacattttggtactacagagttcattcaaataattttgaataataacgttaagctaccatgaaaaaaaaaacctgcactcctttgtttgcaataattcatacataaatactgctaaaacaccccatcttatgtgactaagtacattcttattcatcaccccaaattgtattttaaatgagaatatcagaacattaagtatttgtattttaggctgaaatgaagatattctgtcataagtcatctaaagtaatatgttttcaaagtagggatgaatctttgatataaagaagttgaaatagaaaaaaacctcaagtataaatccttttgtaatagcatctctgtagcatttttcaaagcgttcaggtatttccaaataaactcatgtttaagaactctaactaaggctgctgaatagatgctaaggccaggctaaatcacacagccgtttaaactgaaacagctcagttcagagggtactgctgttttataaccatatttaaaaatgtgttcctcttttactccctcaaactgggttcagggatataatggatcccattataggtaaaaggtctgtgactcagccatcgagctactcaaactcttggctgttttaattgccaccattaaagctttagtacttttatctcataaaaatagatatcattgatgtaaaatgtgtgcctattgaagatacgtgtgtacctctgcccttatagttagcta

SEQ ID NO: 129933 - DNA, 1023 bp, Homo sapiens
tatatgttttatgctttttctaattcattactgtgtgctggggaatctctcattagaagctggtgttctgttactggagcaaatgccatgcagattaaagaaaggtaaacatacctggtattaattctccattctaagttttaatcattgtttagactttcctcttttcctctctttccagaaacagctttttctttcatttcctgaaaaatagcttgtcccaaataagtttgatctccgtgtcctgtgcaaaaaagatagggctttttcctttttaattacattaaggaataatatgtacaaactaactcaacttatgcaaactaaatataaaacagttaaatcaggtccattgatacttaggtagtgataatttggacagtgcctctgttgatgtgtaagagtgtttgtgaggaaaggatagaggggcagagggtaactttggcagtgtttagttagttgtgttatccctgcatggaaatctgctcatgtagatctacatctgtgtattcttcttcaaactttgaccttgcctctgtgtttcctatatatcgttactcttttttcagcctcattctcccttagctatgaccagcaaagggcaataagtattttaagattttttaatgccacaggattttggaagaaactttggaaatcacctatcaatcacctaacccaaaaccttcattttgcagaaaaagaaactaaccccagatgggtgaagtgattttttcccagatgatatagctgacggtagggcctggacttgaattttaatctcttaactcagagttctgggctctttctcttacaccagtgcaattgagtgaaacctgtgagcctttcccagaaagatgctgtgtagaagatgttaggaagaggtggacagaatcagaaagtactagagttaggaaactagattcaaatcttagctccgtcactaactgtgtgacctggggtggccacatcaccttcttggacttttcctttctgaaagttgggggtaaattatcacttttt

SEQ ID NO: 129934 - DNA, 1690 bp, Homo sapiens
gacagtgtcttcagttgagtgagtttttacttcctgaactgatttttttttactgtattaactaaagtgctattttaaaactttctttcttaaaagattctctcttaaacatacattttttttggatgagagaagctgatagattctacaactgtatagttggaaaaatatttgctacctgagtatagaataagtttcagaaacatcagccactaactttcagttcttttctttactgtgaagaatgataaactaatttcaattcctatttgtgtctctcagcattccccgtcggagccctttctagagaaaccagtgccggatatgactcaggttagtggaccgaatgctcagctagtgaagagtgatgattacctgccatcaatagaacagcagccacaacaaaagaagaagaaaaagaaaaacaaccacattgtagcagaggatcccagtaaaggttttggtaaagatgacttccctggtggggtagataaccaagaactaaataggaactcactggatgggtcccaagaagaaaaaaagaaaaagaaaaggtcaaaggcaaaaaaagacccgaaggaaccgaaagaacccaaggagaaaaaagagcccaaggaacccaagaccccgaaagcccctaagattcccaaagagccaaaggaaaagaaagcaaaaactgccacgccaaaacccaaatccagcaaaaagtcaaggtaggctgtgggcagaaaaaacaactgcaaaacattgagagtacagaaattagcgccaaatagttacagcctatgaaatgaggggtgggaggggacacaatgatttttgtcatcattgagtttctttccctaatatccaaactaaaaagctaaggcttttacgcattctgaaagttaggacttattgttgtgaactgttgatttacagaccttactggatacaaattaaaaatcaattttttatatttttatgaaaacttatcatttagcaaatggaatgaagttagcagtataattatttataagaatagaccagcaacctcattttcagtgatgatataaaactggataagaaggattatagaagaaaggtcactatatttcactaagcattccagcccttcttcccagaggttgaaccaggattgttaattctctccacttggcggagtaagccttccaggagcagggttgaaatcctagtgagcagcgcaagagaaatcaaatagtacttgtccattggatatgcattcaagagtagcatgaattttaggttctagggaagaccctctttcactccatattccccccatcaattctctgaccgctcccccaatttcttaccccatttattcggtaagaaaaactgagaggagaagacattgaagactaatttttttcatttgtagtgaatgtttcttacaactgttctgaaccagttccagacatctgaatctgtttttcagaatgtggctcatgttagaaaatatagtttccagatggaactatggtcagccttggttaatccgaatctgtttgcaaactccattagaaaacacgcccaccccataccctcatgtgcacgtgtaaacacacacctgtgcatgtacacagtcagttctgcatttgctgtgaactttttgagattgctgccctgtgtgtgcatgcccaagtacacaaacagaggagattaattt

SEQ ID NO: 129935 - DNA, 1020 bp, Homo sapiens
aatttagcacagaactgctgacatctttactctgcagccctgtatgccatatcattgctgtgttgtacaaacaagtgtgctgttctttgagctggaggtaaaggaatcggcccgagggtgctctagctttctctgtgctgtgtcactgtcagggagagagcttggtctgcatcacttacactcaccatggtaaaggacatgtgaaggctggccgttgtcaggggctgattttccttgtgtgtctcctcactgtctggcaccccatcttgttctgtaaaatggcagaagcttgaatttgtgaccattcccagagaactggcctttttgacaactaaaatatgatcatacatgtctttcctctgcaggaggacctaaaagaatctgcccagaaactgttacatagagtgatggtgaagcaggaaaagatgttcagcatcacagaaaaagacatgtaaaaccttgatgagaaaaacgggccacattcctattctctaatcaggctgtatcttttttccctttcccgttttatgttaaatatatattttttgtatcgatttttctagtgttctccccagttgtccttacagctttcaaatattcgttgctaatattgaaaataacagcgaaaacatttgtgggttggagaggataccgttttgcatgtggaaggattcatggagctggaatatgaggatttgcatccttttcaatgcattttctgttgtgcatgcatgtgccttgtgagatgagaaagaatttggaggaagtgcttcctttgaatgactcttgaaggatttaatggtccatttagctatataaagattctttgaatgtacagaaagaagggaacttggccaaagattgtgacttgactactgaagcttaagttaagtagaacaacacagacttgctgctaatgcagtttctaggaatgcctttcattccttgctctatgctctgtccctagtattaaacttagtagaaaactaaaatgttatttttcaattaagagtgaagttt

SEQ ID NO: 129936 - DNA, 1080 bp, Homo sapiens
atagtagcaaaggcaatttaatttacataacttaattttgtccttgatggaaatgttggagggtggacactgaagattttgttgctttttttttgacttcctagggtgttctttgatttgtatattgatggatggaaatgcttagctgtccgttaacaacatgaatagtgaaaggtctgatgagtttagaaatctttccatactcagatctgggataagtgcttcccttatctacaggctttttgtctaaacatttggagagggactgtctgactttcagctatcttggaggttccatacagttcattcttgggaagggcagatggaaaatcattagcacttctctccttcagcaaattgatgtttcctcaaacctgggctctggtcggtttccagatagtaagccttttactcctgtaggaccacgcatgcagggcctggcagccctctaaattaaaccgtgtacatcgctctggtatagagaggtcactgtgaaaagcgcgagctgccaactcactttacctggcagtggttcaactctttgacaggcctacctctgatttaaacaaatttgagaaatatgtaaagttttggaagcagttttgcactgatttgataaaagaaaccacaaaacactgcagcgcaggtgttgagaatgtttgaaagctgattgagggaagcagatggctttagtcagtggcatccagccaaaagagcaggtgctggtcatgtgaccgctggttaccagggtaatctgattgctcttggcgtgcagatgaaaggaaaggggcccagtgttcagctgtagtattgtataatttgtggcagttagagcggaaataaatgctggaaatggaacctcatagtaggggagacttctgtccatgtgtagcgtaaacactaggacagttggatgaggaacggttgtatggatttttttttttaattttaaaaatattatgctttctgtggatctttcggagacagtttttagagcacggccttttttcttttcttttaaataaaaataactttttaaacctaactgccatttgctataatcttgaattgttattttct

SEQ ID NO: 129937 - DNA, 1049 bp, Homo sapiens
tttcttgtttagagttattaagtatatggagaaataaatgtcttttaaatattttaaaacattacaaaacccacaatgtaaagttgccatgaggcagccaaaaataatacatatggcattcaggagagcagttgctaattggctgctgcctgagaaaatggtacacttggcgtctacttaacactgtgggtttggcagaaggccaaatttggggtcaggttgttgtgaatgaagctgcatgtggttagggaggagttaaagtgattcatgtcttagaagctctcgcacgttgagcagaggtgcgtgcatgggcctgagcgtggcagtcttcgtggccctggccacctcccagcacacggtgtgctcatcttacgtgaaggtcctttgctgctcttttcagtcctattttgtgctcatatgggagtaaatcattacttttaaaatattctagtagatggttttaaatacatgcctgaaattttcttttgttgcagaaggaatctggagaggaggtagaaattgaggaattctatgtgaaatacaaaaacttgtaagtaaattgtgattctgtttttaatggggggctatattttccaagtagtaaacgaccatttttttttaaagttgggaaattaagaaactttggtatgatttctttagtcatcatggcctgggaggccattttttaaccaacttttgtatgtttgatattttatgaatttttctggaaaatgtgtaattggtgtaaaagttgactaacttctgtgtataaccaataagtatttttttagagaggataaaaacttctacaataatagaaaaatgaataaagcagtatttccctgtcctctgatcatgaattctaccctgtggggctacacttcgtcccttcacctgtgcatagtgtgcgaggccctagagacaagaactctcctgtggaatgaaagctctagagaaccatgacatcactcaggttctaaaatgcagtgagctatagctttatctgtttttgtttgtttctgatatttatttagtagatttgaattcat

SEQ ID NO: 129938 - DNA, 1068 bp, Homo sapiens
aactaatgcctgatctgaggtgcaaccgtttcattccaaactgccctccaccaaggacccgccccagtccgtggaaaaattgtcttccacgaaactggtccttggtgccaaaaaggttggggcctcatgatttatttgatacacagtatgtttctttagttttggtttgtatttgtattcccttttagcccccgcttgttgatttttattgtttttcaagtttgtgaaatattaatatgttacaaaagtcagaactatacacaaaagaagtgtagtcctccctttccaccccattcctgcttacttccttactaatcccaggtttatcctttctgtaatttttggcatgagcatgcaggtataatttcctcttcgttcttacaaaaaaagaaattggtatactgttagtacatttttgtgctttgctttttttcacactacatcctggaaatcactctacatctgttcataggggtcctcctcattctttgtttcagctgtataatattccattgcatgactgccgtaaccattcaaccagcctcctgtgtatgtgggtgtgtaagtggcttctgatgttttccaattacggataatgctacaatatatattctcatacatatctatatattttcaaattattggaggcatggcttccaggtgaattcccggaagtgagtttactagatacaaaaggcaaacatgtatgtatttttaagagatattgccaaattcccttccttcatgttgtatgaatttatgttcctgtcaacaaagtatgcaaacacctgtttccccacaacctttctaatatagtgtgctgttttactttttaatttttgtaagaaattgtatttcagttgaggttttaattagcattttctcttattgtgaataagaacaccttttcataagattaatggccactttttacatcttgctttgtcagttgtctgtgtcttttgctcattttctgtcatgctcaacttttaagagctctttatatataagggatattagttctttatcttgggttatatgttgcaactatcttatctcagtttcgat

SEQ ID NO: 129939 - DNA, 1029 bp, Homo sapiens
tggaaactacaagttgaaagtagaaaataaaatacttgcagtcctagcacccagaaataataaatacaggttgagtatcccttatctggaatggttgagatcagaagtgttttggattttggattttttcaaattcagaatatttgcattatgctttaatggttaagcatcccaaatctgaaatccaaaatgctccattgagcatttccttcaagttcatgttggtgctcaaaaagtttcgagttttagagcattttgaatttcagattttcagatttggaacctgtattagcattttgatgcaatttcatctagtctgttttctgtgtgtgtatgtacagcatttatatcagttcatagctatgtaagtcatatgtatttaaaatccttttttccctcaattatagaaggactaaatgagtcctatctttgcaaatcatattagacatgattatcagttatgtgctacttaatatcataagcatttcctatatcatgaatcatttttgaaaaatttttaatggttgtataatttttgtttttactttttcttgttttaaacttctgacttctgtgaactaaagcacaatttctaagagtactagtatgttgattctgaaaggggtatatatattcaagatataatttctttttaatattgtcatcagaaagagaaataagaggctctcaaggctgtttgaggggcagggagagggtgatgggacaaaagaatattgaagaactaagcaaaagaatgtcagagttgccataaaacattaactgtgtacctgtgagtgttggagaagaaaagggaagtgcatatgtattccagttcaggtgagggaagacaccatgcatactcagaggaggggatggggagtcttgaggggagggggtttgcccagtgcaggtatagatgatagcaagggaaacattcacaggggaccaaggaatatcattgcagaaatcctggaggaacacagtctgggagaccaggaactgataagaagctggtgaggggcatggccc

SEQ ID NO: 129940 - DNA, 1049 bp, Homo sapiens
gctattttaaatttgaattattttaacttgataaaaacctatttctcaatgataagaggttcaaagtataaattcagaattaaggcctccctgtagtgctaattttatattgaagtataatccattcacttatggaaatagcttgttattaggccattctctctcttctctgtctcttttgtctgtctgtctgtctgtctctctctctctctctctctctctctctctctctctctctgtaacaggtaagagagctggaggcttaggacagaaggcaaattttaggcactaatattgattttctcttcttattctaaacagtggtgggtatattaaatgttgctcagcagccttaatgggtaattaagcaggttattttaattatctgtgtagttgacttttttgaataagacataataaaggattaattatattctacatatttcaaggatattgttttgttctttcagctcttatcttcattgtcagtgggcatctatagaagatctggaaaaagataagagaattcagcaaaaaattaaacgatttaaggcaaagcagggccagaacaagttcctttcagaggtacgacatacctgcttacttttccaaagtatttactttgttaaaatgttctaaatttaaaattttagttccatgaattaagaaaaactagttagtctcatttggtgctgtcaacttgcatattggtaactggttcttgctaacaaatttgtaaacaggaaatttctcattcttcctgttgcttaggctagaagatatgggtccttatgatattatgtggaaatagcggtgatggtatgataaaaatcgtgtaatgaaagtacagttagcagatgatgaaattaagtaagtggacagaagttctattgagatttagcaggttaagaaatctacaatgttaagtacaagttctaagatacaaaagcttgacttctgttggggaaagtatgtggcaaatttcttttgttgaagtcaatgcctaattacagagagttcactaaactcattttcgcaaatgctgtgct

SEQ ID NO: 129941 - DNA, 1021 bp, Homo sapiens
cccccatccctaaatcctggtcctgtttattaagtttatttgtattctctctcctgtagtcacactgtctttaggaaattgtgcctagccctagctacacataccaaggttgaatgtacattatttacctggtaacttggcagctagaaatcttagtttctgtcctgagtgggagttagcagagaaggatagcaatccccttcctccctctcttttatacatgaaagtgcacacgcccccgtttgtttcatcccatacatgatcatggcttcaggtgttccatggctgtactgctttgagattttcagtttcagctgcttttacattctttgtttctccttaggctgccttacaagcctgctgcaactaaaaatgtctattcaaaaacatcatttagactggaaatttcgtcacatgtgtgatgccgcagattactcacttaaagggtagaaatgtgtaggaaaagttaaggattttaattcagcactgactgtgaaagcttatgtttaagaacaagttttcctaaagagagtttttgccatccaaacctagttttgggaaagtttaagtgtttctgctgtacatggataacacgtgtgtttacctacgtctagaagcttttgaaaagccagtgcattaatacactaatactttatattaattgaacatttcaatggatttttttttgccttactaatctacctctgtgtaaaagcctgagatacttgagacatatgtttgtgtttctgctttttgtttcataattcatggttcaaagcttcccaactgggtgttttaagagggccgaatagccagagaaagtttgttgttcttgagcagatgatgactgaactgcttatcttttccacctgcaattcaagggataagaatggtgtctaagtgacttctagtttaccttttgcaaaatattttaatgcagttatgttattgataagttaattgagaggtgcacataataaaatgtgtcttttgttttctaacatctgaaacttgtctgacc

SEQ ID NO: 129942 - DNA, 1084 bp, Homo sapiens
ggtgaagtggtgttcacttccttatgaagacagcacgtgggagcggaggcaggacatagatcaagcaaagatcgaggagtttgagaaactaatgtccagggagccggaaacagagcgtgtggtaagaattggctgatggtagagaatttaatttgaaaatagcatagtggtgtggtctttgggaaaccactaatgggatttactatatttgaaacaggagcgacctcctgctgatgattggaagaaatcggagagttccagggagtataaaaacaataacaaactcagggaataccagttggagggagtaaactggctacttttcaattggtacaacatgtatgtaaaacaagtttttcttcacttttaaatatatctgtagttcctttcctttagttattgaaaataataaaaaagaacttaatgttttaactctaataagagctttttcaaaaaacaagcattgaaaatatatgtaatatttaataaatattaatacagagattgatataagtgtgtaaaaataatttttattctttgagaattttgtttgaaaatatattttgttgaatctaagagaacatctaaagcctttgggtatgcatttgtgggtacaatggtatatattttgtgaaatgacagcagtgtgtcatatccatactcattaaacttttgtacttcattttcctcctaaaggcgaaactgcattttagcagatgaaatgggtttgggaaaaactatccagtccattacatttctctatgagatatatttgaaaggaatccatggcccttttttagtaattgccccattgtccacaatccccaactgggaaagggaattccgaacctggacagagttgaacgtggttgtgtatcatgggagtcaagctagtcgtcggaccattcagttgtatgaaatgtacttcaaagatccccaggtaaaccttcacaggttgtattctttgtacttactctgtgcattttaaggtgttaaaaaaaaatcaaagtcttggtgacttgggaaggtctaaattttgccaaattgagaaatttgctttagatatctgactcaatttacattt

SEQ ID NO: 129943 - DNA, 3020 bp, Homo sapiens
gagaaaaaatattgaaatctgtgtttatctttagatttgggaaattattataaattctgtcctacgtgaatgtgtgactagaatgggtacgcttagtggtaattgatgcatgtgctctgttaggaaattagatccaaaatttactgacagttttctcatttgttttccaattctgttttaccatatcgtttaaaactgccaaaataacttgaaaacagaatgtatgtcacctaaaataaagagatctccaaagggataaatacgtatgttttatgctatttattcatccttaaagttatttatgtaaccattaatgcttaataataattcagagttgttcttatagggtcgagtgataaaggggtcctataagtttcatgccatcatcactacatttgagatgattttgactgattgtcctgagctgcggaatattccatggcgctgtgtagtcattgatgaagcccacaggctgaagaacaggaactgcaagctgttggagggactcaagatgatggacttggtcagtgaccatattggtgattgcactgaacctgaatagaattgttgctgacttgatagtcccgttgctcagaatttgatgcctgtaaacagtatttgaaaagcttgtcaaatattgtgatatattctctggcactttcagttattcaaaagttgttgccttttggattcttacattgttggctagtgtctgttaaacagttgtattatagcagagtgtaatcatgatagtttcactaaagtgagtttcaagtatttgttttaccctttgttcataaatacaggttgatcataccaaatacaaaaatcccagaatccaaaacgttttgagtacccacataatgctaaaaggaaatgctcattggagcattttggattttggattttctcatttgggatgttcaacccgtaagtataaatgcagatattccaaaatctaaaaatatctgaaatctgaaacactctggtcccaagaattttggataagggatacttaacctgtactgccatttcattaactgttgggccaagctttacttcagtgatgatagtccagttatttttcagtgctcataggttttgccatactgtggccagcaggacttgtagatgcaagttctcaatgagttgggtaggatatctggggttggtttagttcgcacagatgcttagaagtttggggcattacagtgcctcagatttgatctggagttttacaccacacttatcccatagtcttccagcttcccaagagatgatcaggtcttcctgattagattttctagatttttttttcagcaggagcatcatggaataacatatcgtaggagtagaaggatttgatttattttctgtctgatactgctgtgtgtgatttcctagtgggaattgcaacatgacctgtcatcctcaggcttcttttcactccatagtttatatagtggttatgatcacttatattttatttttaatgtacatttggaaagcaaagctcctgtcatttagcatgccttggatgatttgatgagtttcacggaagtacaaaaagggtttcaaagtatttttaatgctaatttctgcaggctaatttgatcttttgttaactgagagtttgagatgagaaggagtgttctgtatattcatggccatatgtttttagctgaagactggtattaccaaaaaacacctaaaagctttttgttgcagctgattctctgaaagagcagcttattttattcttaaagagattagaattgccagctatgcttttagtttaaaacaaacaaaatctagttttgcttaaaggaaaaagtctgactgaattatcctatttagggtgggatttcccatttttcttcctaatgaattattattaaagcgatcctaagatctgtctcaaagcagttgactattatttggtggccaatacacaaaacaagtgagagcgcttagaaacagtgaatagtctcagggaccttggtaagcatatggaaaagagaaactctgtgtttgtatttgttcactccaggtgatacttaagcattaaaatgaagtaaacttgtatttgcaggtaaacactaatgcttgtgatataacctaaatatatattctcagtagggatccaccttcatagttttctactaagagacagttatgtcaccatttcctgaaggcttaaacagtcatctgactgaacttatctgagttgtgttctattattagttcatgtgttcccagatagtaaattcttactgtaaaacattatttcattggtgagtacacattaatttaactccatcaagatcaaacaatctgattgtcattgggctatttttttttttaatttaagttctagggtacatatgcagaatgtgcaggtttgttacataggtatacatgtgccatgttggtttgctgcacccatcaacttatcatttacattaggtatttctcctaatgctatccctcccccagccccccacaatctttgggctatttcaaagagttttctattatttatactaacatttgataaatggattagaatctgttatccaaataattttcctattacatattgcagtgttcttaagctttttcacataatggcacgtatagaaaatgatagtagttgaatgccacactcaggtaaaaagagaaggctgcccactgccacgggacaccaccagtcctgggtgtcctgaccttccccaaggacttataacctgtactcatccttgactcaccaactgggaagctctgattagcacatgaacaaaatatttatttttctaatgatgaagaatttttatttgagaagaaatgttttcaagatggaacacattattgttcagaatataattatgtttgtccaattctgaacagctcgttgtctggtctttaaatccttacttaaaataagcatcttgagaacttagccactttctactttttattctttcctagaataagtcacagtcaaaatagtggttagtaac

SEQ ID NO: 129944 - DNA, 1049 bp, Homo sapiens
aaagaagggtttaagcatagaagtcttatgtcaaacacttaaaggtttgtttgtttttaattttaaaagatttggatagttcaagatagaatttttgtatcttaggaaaaattaccagatgggaatgaatgtggagggagatttagagattacaatagttgtatgcttaggtcccccacaaatattccaggaaattgtcctggaaataaattcctctttttgtagttcctttgcctatattaatatgcaattatagacccaaactactattgctcttacgctgtaattgttaggactctattcctttgttttttcatttcggaacagattttgttgtttgtgtttatgttcagctagtaaacatttcttcatttctttagcaatttaggttccaaattttctgtaggtatctggcccttggcttgtttctgccacttctggcttgacagtctgttgttgaaattccgtttttacagacagcaaacatttgtttgttgaaaaatgtggttttccccctgaatgcctcaatgtgttgtgcttaaaacttttaccccttttgtacatccacagttttgtatagacccaactatgagtaagtggatggattcttgttcataagcaggagtttggtgttctggttcctacagtttgcaatgggttttgaaagcaagtgcattgtttttagtaataaaaaccttttacagtattcacgttatgctgtccaatctctgcaggtgctgaagagaaaattttggaagagtttaaagaaacacacaatgcagagtctccagattttcagctccaggcaatgatccaggctgctggcaagctagtgctgattgacaagctgctgccaaaactgaaggctggtggccacagggtgcttatcttttcccagatggtgcgctgcttggacatactggaagactacctcattcaaagacggtgaggaccaccatatcagaataataaaaaggaaatctaaaattaccttcccaggggtccaagcagtccacctaaaagtggaatctatgataaaggggctagaa

SEQ ID NO: 129945 - DNA, 1054 bp, Homo sapiens
tcccaactggtagagaaaaactatatttgtgtttgaatttgtgtgacacccctttgcacagtcaaatgaatgcttctgcagtaactttacagggctttgaagccatttggttaacataatctaagttgttcagatgcttctggttcagaggtcacctgaagttaaggtgcttgtgtataccttaaggaattatgccagatctagagttacatgttgattattaataattaagaacaaagtgtcaaaattatgtaatcttttctcactttacaagctttgcataaaatttatgactgtcgtaagcttttaatatttctcttataaaaaattgtcaaaggcagtaatctcacttgttaaattcttccttgcaactcatatgaaacatgaatggtcatttgaactttgtgaaagtgttgtatttttcctgctggactataagtttctgaaagggaggatccatgtccaatttatctctgaatcactgtgatgcccaaagtggtactttgaatggcagggtgctcagtaaatatctgaattggtcaataagagttctctagcagattgtgggactacaggcaactcctgttaaaaaaaaaactgcagctagagtaacctttctacagatctgatgacgtcctgtcttggatgatttcttccaatgaattaccattagtttcagagtaaacacaaacatatgctgacatggcatccagagctcttctgggaccttgtcttctgttggttctttcccatgggtagtccaagcttctgttaggacagacggcttcatctccttcagtgcgccacgctccatctcatctgtgtctttgcacaagctcttcccactgcctagaggaccccccacttgcacctccgctgggaggtgacctacctcccttctgctctccgtgggtgtccgacgcaggcatcagcttgtgctctgcaactgagtctggcctgcacttcccatcacactcatcatgttgtttacaatttttgagtcgcctccctctttcagtttgcagctccttgaggatggaagctccttcattgt

SEQ ID NO: 129946 - DNA, 1049 bp, Homo sapiens
actttcctggtgagtccagtagacctcggcagcaagatctcaactggataaggcaggatgtaaataagtatgcatttctctttgtaaaagtagcagcaacaaagtctgagcacataatactggcagcatgccaagcgctttgtatggattatctgtttgaattgtctaagattagtatgatttttatccccatttaactgacaagaaaactgagactaaagttgagtaacctcctcaaggaccctcagccagttagggggcagaaccaggtttgaacccgagtagatgagggcagcctcagcttggaagtcttccctgctccttggggctgtggtgaggctctgaggtgtcttcagaaccattacctccaacccttttggtatctcagaaacttggtggttactgctgtggcataagagtgctccctaaaatccgaccccacttacactcttagaaaatatctggtcagtatggtacagtcaatgtttaatctcatgagttaacaagagaaaaaaatctaaagaaatagaaatgagttatccaaagtgagtctcttcagggatttataagctcacacttggcctatccagaacccatgctggccgtgagtaggctcgtggttgggggagggcctgttgaggagcatctgttgatgtgtgattgggagttgtctgttctggtgaatcctagttgttattttgaagttttagggacagtttccataccctgagaacagcatggtgtagtagagcctgaagacctagttccagttgtgccatgtgcaaggtaactctggccttagatttgtcacttatcttctgctaccatcagttttcccatttgaaaacggaaattataacttgccctgcttcatcatagggttatcgtgaagatcaaaagggctagtataagtgtgagacattgattgtaaagtgctgtacaagtacatgatgggattattcagctggggaaatagcatttgtattaccatgtactcatggccaagaaggctgcgattcacgtatcagtcctgaatgcacaccagggct

SEQ ID NO: 129947 - DNA, 1019 bp, Homo sapiens
atggatgaacagcagcagctgccaaaagccactgttggcaaacagtcctgaagttaagaactttttcccccctctgtcttcctctccagggtcctgctgcgtgtccgcatgctgtactacctaagacaagaagtgataggagaccaggcggataagatcttagagggtgctgactcaaggttagtgcgagctcacatttgttctcaacctcagtgagataatctgggtagccggaaaacatcatggattgtgtttcagaaccttcataaaccactagtaacccatctccttttttgcatcttgaatgcagtatttgtccttcgtgcttggggatgtgatgagaatcaggaaaaggctgtttgcatttatgtttgtagtgtaaagagatgtgaactaaagcactggtgttctgagatgacccttaaaatgggataccatgtgataaagttcatttctggtcatggcagagggctactgactcatgccctttcttttaaccttgctgatacctccccaccatgctcagatgtttatcgtgggagagagggcatgtgagctatgtatcacattcattacttggaattcttttttaatactaatatttcttataaatgttgtctttcagtgaagccgatgtgtggatccctgaacctttccatgctgaagttcctgcagattggtgggataaggaagcagacaaatccctcttaattggagtgttcaaacatggtaagtgacgtttctgtttgaatacatctcaactgtatggcttggtctttatttagaactctttacatactcttttccaaagtcataatattaatgaggatagttccaaaggactcttggcgtctaccatttttctgtactaaaaatctaatatgaactgtaaatatcagatgctgtttttgaatgtttgttgagcatttgagaagaaaacatttctttcttggctgtaaataaaacccaaaccatatttgttttaataatagccaagttgtactatagctctccctaaa

SEQ ID NO: 129948 - DNA, 1034 bp, Homo sapiens
ggcttaagctctgccagccaagcttggatctgccagagtggtgggagtgtggacggcatgaccgagacttgctggttggtgctgctaaacacggggtcagtcggacggattatcacatcctcaatgaccctgagttatccttcttggatgcacataaaaactttgctcaaaacagaggggcaggtaatacatcttccttgaacccactggcagttggatttgtccagactcctccagtcatctcatctgctcatattcaagatgagagggtactggaacaagccgaaggcaaagtggaggagcctgaaaacccagctgccaaggagaaatgtgagggcaaagaagaggaagaagaaaccgatggcagcgggaaggagagcaagcaggaatgtgaggcagaggccagctctgtgaaaaatgaactgaaaggtgttgaggtcggcgcagacactgggtccaaatctatttcagagaaaggttccgaagaggatgaagaggaaaagctggaggatgacgataagtcggaagagtcttcccagcccgaaggtaaggccttaccactggcccctctcctgaccctgcagcagctggttgtgagatgcgttgctttctggcagcacggcacctgctctttttcacgagtacttagtgtacattttcttctgtgaagggataatttcaagttatgcttatatctgtgttttgctctcgcaccttatagcacctaaccatggtattttgaagaacataaactctaagaagggttgcatggacacattagcaatttctggtttaaggatggaagttaacttgtagtgagtgacagtgtattaagaattctatgtgattttaattttgacaaatgtgagggaaggtggtcattcactgagtaaatattgttaatcattttgaaacaactggtgcttgttatgttttgattcagaagtaaagagtgggaatagaatctaaaaataaccaattttttaagtcacagtacggttgctgaaactggcccagaataaaaatagagcacg

SEQ ID NO: 129949 - DNA, 1002 bp, Homo sapiens
atctatgttaaagggctgttgtaagctttagacaacagtgcccaataccattctagccatgtagtaggtactcaataaaatggagctgattagtattcacatttttaatcatgtcctttctaaacttcagtttccctgatactgtggttgtgagtaatgcacattaactcatttctcagcaggagctgtctctagagggaagaattttgatgaagaaagcaatgcttccatgagcactgctagagatgaaacccgagatggattctacatggaggacggagatccttcagtagctcagctccttcatgaaagaacatttgccttctcgttttggcctaaggttggcaggtttttgttgctgttgttttgctgaccaaaaaggattagggtagaggaaatctttctagcttgatttttcaagtaattttaaggtaaacttttgacacagtatatgaagactatagatttttcttatacttttaaagaatgatctgaaaaagcccaaagaaaaaaattgtagaacacttttctaataggatgggaaatgtgatgtgaaagaaagataataagaaatagaagtgtgtatatggattgatctttggctccatgtggcttttaggttacttacccccgttgtctagcataatgtatggattatcactgtgttttaaaatttttttgtgaaataaagccttcagatttaagacaactttatagttttggaaacctaccagcttcttgacttggaagagggtgtactgttgacccatttgcttttgacgcattatgagataattccaaatgtagttatctgtaaccaaaagcaaaatggaaattacttttttggctaaatagtataattttataataattccctgtgtaatttaggtctgtttttcagggtgaggaaataatcatcctaatcaccataacagggctgtctggtttaaaacaacacaaaaaatgagcttcagtcagcctaccccccaggctcgtctttcc

SEQ ID NO: 129950 - DNA, 1132 bp, Homo sapiens
agcacataaatcataatgtgtcctggttgttcatgtgtgccacgaccaagggatgtctagggtactttgtgagcccaaaggaagcctgggagtggagggaagaggatatggggagaaacagatgaagaagtttccctatggatggctgtacttcaattaagttttgaagatcatgtagtagttggtcattttaaaagggttggcagagaacatgtgtaagaggagagagcctcttgggtttgaagaactgaggaatttgctgaggaagtgagcttcagcagagatgagcttgcagagaaggcaggatgcaaatcatggagggccttgatgccattcggaagaacttggattttgtcctggaggtaatagggatgcaattattgaaaaaaataggagagtgatgtgacataattttttgaactgggaagggctgcattttagaaaactgactccagcgtagtggtgtggaggttggattgaagataggtgggattagaatcagggagaccatttaggaatattgcaataacctgggtgggaagtgacaaaagcctgggccatggtagagctgtggggaaggagaaatgggtgtctggaggttgaaataactgtagacttcagttagtggtggtctttccaatgttgccacacatgtctgagacaaagtgtcccactaccaacaaaattatattgtgcacagagtgcccataagttacatatagactggcttttagaaattcctttagtataaattatctttaatatcattatccggggatctccaagagagactgagaggccgcctttcatgcatatcagctcagactataccccccatgttgtattcccagtggctggcttaggatttcagagcatggaaccttagtggactataaattttttacctaattactagttctacagtgtgaagaatgatataaaagtttcgtcttcttctttttatttttatttttttgagacgaagtctcactctgttgcctaggctggagtgcagtggcacagtctctgctcactgcaacctctacctcctgatttcaagtgattctcctgccccagcctcccaggtagctgggattacaggcaagtgccaccatgcctggctaatttttgt

SEQ ID NO: 129951 - DNA, 2084 bp, Homo sapiens
gccggaggcgatgcgaagaaccctgctgctgtgctgcccctgatgctgccaggaatggcgggcctgcccaacgtgtttggcttgggcgggctgttgaataaccctctgtcagctgctactggaaacaccactactgcttctagtcaaggagaaccggaagacagcacttcaaaaggagaggagaaaggaaatgagaatgaagacgagaacaaagactctgagaaaagcacagatgctgtttcggctgctgactctgcgaatggatctgttggtgctgctactgccccggctggattgccctcaaacccgctagccttcaaccctttcctcctgtccacaatggccccgggcctcttctacccatccatgtttctacctccaggactggggggattgacgctgcctgggttcccagcattggcaggacttcagaatgccgtgggctccagcgaagaaaaggctgctgacaaggctgagggaggaccctttaaagatggagagacccttgaaggcagcgatgccgaggagagcctggataagactgcagagtcctccctcttagaagacgaaatagcacagggtgaagagctagactcacttgatgggggggatgaaatagaaaacaatgaaaatgatgaataaccagtaccagttccagttcaagtgtttaaaacttttgacaagtggtagtcctactgtttacactcacagttaatgttcatacctagttttataagctgttctgtaacatagtgtagcaaaaaaaaaagttcaagtcatgttatacaggtgtgtcaaaaggtatcttggtcattaagtattgtgcagtgcattatttattatccctaggagagatgaaatttgagaggtgatcatgtctttttaaggaaacttacataatgctctgctttttttttttctcttggtaccattggtattataataaagagcaatttgtaactgagtggcactaatggaagaaagtgctgctcaaaggaagtatgaagttatatatttaattttttaattttaatttttaatttttttgctgtgaaggtcaagctgaaatttaccatacatatcatacttgctcatttgtttccctttttgactgtatgggggttcccacactcgtgcatacacacacatccatacactctgacaatctccacgctagtgtgaacgcctctgtcccgaggcgcagcaataataaggcagctgttgaatgtgaagggtccctttggaaaattaacctactgggagggttcttgccagacagaactacagttccattgtctcgtggtcttgtaatgcactggtaaaaacaaaataaatagatgaataaataaagagtgagagaagagagaatcaggtaccttttttaaattaaaggactttgttactttagccacaaagctaaaacagcattacctcagctctaaactagccttgaagtttacagacatgactttgtaaatgtattgtttttctttgttgtgatgtccttttatttttttctttgaaaactgctatcatgtaagataaaatgtaaattgctgccaactgtagtaatgatgcttttaataaaagtgacccatgatatgcagagatgtaattatagaatgtagtatatagggaaactggtgttcactctattttttttgtattcgcaatagatgcaaatacagcattctggcttttgtacagtttcttgatatatcctcttatactagattagcttttggtaagacactaaactgtctcgaagactagacaggaaggaaaaccttgaattactctcacataattccactccagatatctcaacagaaatgcatacaaaaagctcctattactccctcaaaagggcatctgagaccgagaatacttagaaatgtgtgcagcgtgtgataatgtggtacactgaagaacaaaagggcaaaagaaaaatgaggctttaacaggcacaatatctaggtcatttatccttggttaatgggtagaaaaacacaatgcggtagtgtcagcaagggacacaaaggcactctggtgtcctgcagaccagcgctcgatgccagaaacca

SEQ ID NO: 129952 - DNA, 1006 bp, Homo sapiens
tccagtgaaattcattcttggtagtagatcttgaatctacctaagtattttattttctttctttctttctttctttttttttttgttgttgttgttgagacggagtctcgctgtctcccaggctggagtgtagtggcacaatctcagctcactgcaagccccgcctcccactttcacgccattctcctgcctcagcttccttagtagctgggactacaggcgcctgccaccacgcccagctaattttttttgtatttttagtagagacggggtttcatcgtgttagccaggatggtcttgatctcctgatgcttgtgatccacctgcctctgcctctgcctcccaaaatgctgggattacaggcgtgagtaaagtattttcaattcagtcagatactaatgggtatgatcgtgtgcctagcatggaggaagcactgaggtgccaagggttctcctggcattgctccctgatggaagttctgttcttccctgaggaggctgaggcccgggagttggcatcatccccagcagtaagtgcaggaacaggacttgaactcaggtggtctgactgcagaagtctgtgtatgtgctcctaaaatactgtgcttttaggtctctgaaagaaaattatgacataaggataactgaaagttcgctgtttattccccttcataacatcttaagtttgaggttgggaattaagagaaagtcttgaattagagacttagctctggctaaggaaatgaatcccacctacctcatttaaatttggatttattttgccccacaagtatttctattttataaagaaatcaagtctttaaaaagaatttgtccaaataagttacagagagagtaaattgccagcctggtatttgaaccccaattgatgtaactccaaagcccaggctcctaaccactatgctagtgtaattaacattcatcagcaacattgggtgctgtgtgctagaggctgtgctgggaatatagaaatgaaagcaaacaga

SEQ ID NO: 129953 - DNA, 1046 bp, Homo sapiens
cattgggtctggtgcttcggaaaattgggatctgaataattttttattttatctgtcacctatcaacttccccatcacaggacatactgcagagatgtgatggtccagcagaagcgcagccttccccttatgcattcacatgctggagctggaaaaaagctggaggaatccaacccattcaagttatgaggaagaaccaactcttttcagtccacccagctggtgagaagcaggtactaacacttgggtatgctttctctcaccccagttcttccaccagcacacaaaatgcccttccccccactgtcacaaggttgaaatgtagttaatcatcaagaacaaggatggtgtggaaggaaatgaaaggggcagatacagcctagataataagtaacactatattgggtacttttctcttaagactcatatcaattcaaaaaaaacatagattataatagctaacactattaatccttgctatatgcattttacatggattatctcatttaatccctgcaaaagcctatgatatggatgttattgtcattcctattttatagatgagaaaacgggcttcaaaatgtcaaataacttccctatgatgccactagccagtggcagagaaaggattcaaatcaagaactctctgatacataaatccgtgtccttaaccattagcctatccatgggcaattttcttacctccattttacagctatggactcggcatagcccagtgtggcagagttcttagatacaagttatggcaaccaactctggttcacttacacagaaagagagttggttcatttatgcaggaagaggaaacctagcaagctcaccaactccaggttgcaagaaccttgcggttctctgaggcaccccatctatgctcctattgtccactgcagagcagaactccatttcctctttcttagcagacggattacttcagtcaaaacccataccatcccccacacaccacacactttcttttttctttttctttctttctttccttttttttttttttttgagacagagtc

SEQ ID NO: 129954 - DNA, 1022 bp, Homo sapiens
gaagaaactgaaggcttggaagaggatgataaagaaaatgataaggctgaagaaatgccaaatgattcagtccttgaaaacaagtctcttcaagaaaatgaagaggaggagattgggaacctagagcttgcctgggatacactggatttagcaaagatcgtttttaaaaggcaagaaacaaaagcccagctttatgttgcccaggcacatcttaaactcggagaagttggtgttgaatctgaaaactatgtgcaagctgtggaggagttccagtcctgcctaaacctgtaggaacagtacctggaagcctacgaccatctccttgcagagacccactaccagctgggcttggcttatgggtacaactttcagtatgatgaggcagtggcacagttcagcaaatctattgaagtcattgagaagagaatggctgtactaaacgagcaggtgaaggaggctgaaggatcgtctgctgaatacaagaaagaaattgaggaactgaaggaactgctacccgaaattacagaaaagacagaagatgcaaaggagtctcagactactgggaatgtagctgaactggctctgaaagctactctggtggagagctctacttcaggtttcactcctagtggaggaggctcttcagtctcctgattgccagtagaaagccaacagatggtgcttcctcatcaaattgtgtgactgatatttctcactttgtcagaaagaagaggaaaccggaggaacagagtccctggaaagatgatgcaaagaaagtcaaacaagagctggaggtgaacggaggcagtggagatgctgtccccagtggaaatgaagttttggaaaacatggaggaggaggctgagaatcgggttgaaagccgggcggcagtggaggggacagtggaggctggagctacagctgaaagcactgcatgtaaagagagggcacagccctcctcccaagggaaagtgtttttgtatataatgtattttttcacttttggaggattctttttgtat

SEQ ID NO: 129955 - DNA, 1041 bp, Homo sapiens
ctactacctccgagggcagatcgctttccagatatacttaagagtttcacatcctcctcctcttcatcttctgactctgcatcttcctccacagctactaagtgctgtccactaatatgcactggccctgaaccacacttcaaccttaagactactggtggtgttgtttcaaagcccccaagggaaaccgttggctgtacagacattttcaaagttgccagtgttactttaattgggctgccttcgtaattcattgcctctgcttcaacaatgtgcaattcatcctttgcaccagcccctaaactgaccgttcttaaagacaactggcgctcattttcatcattatccaccttaaagtgacaatctttgtcagcctttagttcacaaccaaaaagatagttctggggcctcagggagctcatgtccacgtccatcagatcttccatcgggaggcagcacgcacttaggtaggagagaaggcggacgaagataaacgaatgctgctccagagaacagccacacaggatggaatcacaccaggggacattcttaaatatctgctagccatgataaagaaatcaatgtactttatgttcttagctcctacaacttagcctaaatatttgccctggcatgcttataatggtccaagcaagcattaggacataacctgttcctcttccttatttaaaggtgtttttacctttctcagcattccacaagttacttcctccttcctttgttttcctctacctttgcctcttttaaaaagttctaagttgctagccaatcgggtcaaatacagaatgttagatcccattccagccgatggaaaccagacacagcagtagggtggatctgtcaggttataaatgaccctgtctcctttgtttggtgtactctcatggcaaaactgctggcgagtgtaccctttctgcagaaagtataaaaatggccttgctgagtaaattaaatttatgttctagtgctatttctttacggcagtggggaacaagcatttcaaacagacacttgttagag

SEQ ID NO: 129956 - DNA, 1033 bp, Homo sapiens
tgatttcttttgaatgagtagttggggactccatttctaaggagactaggtaaataaaatgacctttgacatttcatcctgcatttctagtcttctcttacttcagtacttgcatatttagccatccatatgggtcatgctccatgattgaatatttaccctctcagcaacaaccatggtctttctccacatctttaatggttgcaggagggttgtgggggcaagggtaaatggtttgatagcacttttctttgctgtagtgacccagttgaggcaactggaatggattcattaatcactgacatgtgattttcatgagacatctcctctgcagacacatgctgcactaatgggcttttgagctgcctgtggtaactcacattgctcagatgaaataatcgtatttcacgtccatgtgtcttcctttaacgtcagctcatgacagtcagctagtgacctgacaagagatgtgacatcaaaataattttttgcaggatatcatcaaaataagcaaactttgcaaatacccagacctatgagaacatgctcttaggctgaacaattcgatgctggtgatgaggtcaaaggaaataattcagtaagaatggaaattactggagatactattgtctcagggctttgtactacatgaaacttgacagtggtgtctgtacagtttaactctgatacatttacttggaaatgcacttaattttcaaaaactggagagggtccctgtgtgatacctcagaaaaattcttgtcctaatgcagtgtgtccatcaaatttagtctttattttttcaatttactacaataaatatgaaaggagggagaatcttttttacataaatgccttgcatcatcctccagtcccctcactgggggaaaaaaaaagcatctctcaagtctttgtccaactttggctgctcagaccgatggctggtgacagtcactgcaggggttcaggagtggaggaccttgtgtcaagcagaacacacgtgtctgcatgggtcagttgtgcatgtgcttcc

SEQ ID NO: 129957 - DNA, 1045 bp, Homo sapiens
gctgatattcatcgtggatgtgtggcatccggaactgacaccacagcagagacgcagccttccagcaatttagcatgaattcatgcaagcttgggaaactctggagagaggctgcctttctggttccatctccttgggtgtgaggatagaatttcgaacaccaagagtcaattcccttgacttgcagcccgagtaattcaaagcctcctcctagggtcagaagacactaaagggaatatttgcctcgctgcaattcatttaggaaacaccctgctgtgtgtcatctcatgacagcactggtcttctgccagtatttaaggtgaacatttgatagcttctaccttaccagccaaagatattttttccacatagaataggtctaattcaatgtataatgagaacatatgtagaaactgtgaatggattgctttagtttgtaatttttctatgcagttatatttttctagtgtagctagactattttgtcatcatgtaccactacatttttgtttattttaatgacaagctgtataaatgctttacttctagctatttaatggtagcattactggggaactcagacttccctcttttaattcttcttagtaaaagatactcatgaaaaaagcagttttattttcctaacaaaaaagaaagagctcattatgtcagtgtctatgaactgtacccatcccaactctcaaatcgtttggttttttttatcttgattgagatcctcttctcactatgctagtggtggagatattgacaaaatcctatttctttcaaagaggaacttttcacaccgaaaaaagagcatggaattattttatattgttataaaaatcccagatgcaaatttttttaatgccaattattagagcttctggggaaaaagtatagttcacggaaataaaactatgttctttcagggttgggtggataggtggctgctagggtgtctggctcctggcggctttgccatccatgaggcaagggctgggaacacagtgtctttgcctatggtagatccatgtgaatgtca

SEQ ID NO: 129958 - DNA, 1021 bp, Homo sapiens
atataacaactatttacatagaagttacattgtattgggtataataagtaatctagtgatgatttaaattatacaggaggatatggataggcaatatgcaaatactataccattttatatcaggaacctgagcatctgcagactgaggtattgcagtgcggcagtgatggtggtggtcttggaactaatctccagtatataactaaggatgactgtatatccttatgtcacagtagaaaattgagatttaggcttcaagcaatatcttttatctctatgctattatgcttcaatgtgttattgctattaatattaatgtggcatacagcaaaatttagccatggtaaattaaattttaatagagtaatttaaaggaaacttcaagttcatagtagttttaaaaataaaaattcaacagaagatgggttttataggaagaaattatgactttcattctttgttagcagattaaacaattactttggaatattccaacaaatttttaaaattttgcaacattaagtcatatataaactatagtatctctcatttctaaagtagcactgatattgtctttttcttcatatcaccaaaattaattttgatcaagttccctgaacattggacacaaaatattaaaatataaactcaattcactttattatctttcacaaaccattaatgcctttgaggcagaaaatgacacatctcataggaagattggttgggtgaattagttagagtcaacaaaaggctttgcgatgttaacatcctgtaacaaatattcagtttcagtttagcttgttttatctacagatgctacactgataaaaatcaatctgcagacttttcagtgcaagtgcctatcagttttattcaagagcttataaagaattatgtgccattttagtagtgatatttttccaattctgcaagttgtaaatgttaatacttcattaaaacaaagggccctggggcaccagagaggggacaaggcatacagattatactatctctctcc

SEQ ID NO: 129959 - DNA, 1082 bp, Homo sapiens
tccttgaagaggtccttcacatcctttgtaagttgtattcctaggtgttgaattctctttgaagcaatcgtgaacgggagttcactcatgatttggctctctgcttgtctattattggtatataggaatgcttgtgatttttgcacattgattttgtatcctgagactttgctgaagttgcttatcagcttaaggagttttaggggtgagacgatggggttttctaaatatacaatcatgtcatctgcaaacagagacaatttgacttcctctctttctatttgaatacgctttatttctttctcttgcctgattaccctggccagaacttccaatactacgtcgaataggagtggtgagagagggcctccttgtgccaacagtctggttgttttttgtaaagtttgctttggttactgagtggaaaatggattatggaggcaaaagtagatgcaaaaagaatagaaggctattgcaagtgtacacaagagatgctggtggcttggactgcgttcacggccatggagatgagggaagtgggcagttggtggagctgaaaggacttgaggatggattagatgtaaaaacatcagaggaagaggactcaaggctgacccctgagtttttggttcggccagctgagtggaggataatgccagttactgaccaggaagagcaagtctggagtgatgcagaagtcaagagttcaagagtttgctgttggtcttattaagtgtgtgatgcctatgagacattcaggtggacatgtcaagtagaccattggattcacagagcctggaacttggaggaaaagccagggcaggatatcaaaatatgccaggaagtaaagctccaacagctctgcctagaggtcaagattgtcaaccctgctgggaaatggtagattcagagtgcagaaattttccagacagaggagatgctgacagcacccctatggagaaggtccatgcagacatttgtacaggacacacacaggaactaactcagctgtagataaaacaagtgaattttgttctgaactgaagatggtgaccacttgagatccagatgctcagtatctt

SEQ ID NO: 129960 - DNA, 1049 bp, Homo sapiens
ctaaacgaagaaattctgttttatttgacttccttgagaggagccttccattttcatctttatctgtatcagaaaaagttgtggacatattcaaaaaaactattttaaacaatcttttggacatagccaagaagtagattatgagagtttaggagtcatacccaccatttacatcccagaaaccaagccagtatcctggagagtttcagtatactatccacccactctcccaagaacacattgtagcagataggtaagggctgcattgccttccttggcagtcactgacttcatcacaccatctaggggaggaaatggaaggcgagcctgcagtgtgccttctcctgcaggtctttggtggagaccagcatcaggtttcccactacttgtaaattgttatgcttaataactatttctagtcaaaaaacgttaaaaataaaaatctcttttttctttcagttaagaaaaagaagcctaaacttttaaataaatttgataagactattaaagctgaacttgatgctgcagaaaaactccgtaaaagggtaggttgatattttttgtgcaatggttttgttgttaaataaactcaggcattactcttgatttgttaaaaaaaaaaaaaatagtaagtgtaaaagaaacaacagttgaatagagtggatttttccccaggcacatgaacattccacatgaaatgaatcagatggaagagaattgctaccacatggccaaagagaaatagaactttccttcaggccagccgatgcgggtgtcagcctacctccatcacattctagttatgcagctttggggaaaccacttggctcttctgggcgttagttttcttacagacatgataatgataaatattctttctacctcctaattgagttttttaaagatcaatttaaagatcaaatgagaatttttttttttttttttttggacagagcctccacccaggctgaagtgcagtggcacagtctcggctaactggaacctctgcttcctgagtttaagcagttctcctcctgagtagctgggat

SEQ ID NO: 129961 - DNA, 1010 bp, Homo sapiens
atctcacattagtttagtagagggagcagatgaaaacaattgccctttatatactatttactgggttgtataagttagcatctctcagtgaaaaatatttgttaactgtttggtttaagctttgaatattgacctcctgctggtatatagttgataattaattctgaaaaaacagaagtccattattcttagctgtaggaggcaagaaagagtgtgccatccttggtaagagagtctttcaagagttgcccaaatttacttcttcttctggtaatacctatagagtagatcgtgttagagaaaaaaagcctcagaaggggctatttttggatcaaacacattagcttttctttctcacatggtgataatacaaacaaaggctcctgccagaagcacctccatggctgtctgcatattgggtttctcaacagcaaatagcatgtctctcaatatgagagcagatttatttcagaccccagtgtgaggcatcacagtagggaataccttgcacaattcccacttttaaatgaaagagaaaataactgagggcgcctacccacatcccccgcctgtaggaacactcgtagattcaggtttgcttttcctgtgattagcagataacgtttcatcaaaaatcctaacatgggattcttgaattcttgaatgttttcttcttttttaccctttgccttaatttatagatttacctcactgtcaagacaaatgtagagtgatgtttcttttattgaaatctatcagtgattttaaaaagaaaagcagaattagcttccaatcctaataaaggaagattaaaataagcaggggtcctatcttgggttaactgttaattgctatgaataatattgcagtaaggttgctttatgtgatgactttgaaacttcacaccacatctcagtcagatacagagcacctttttctttaatatcttattttggtcttacttttccttcccttaaattgttttgctttttagattatttttcatcaaa

SEQ ID NO: 129962 - DNA, 1086 bp, Homo sapiens
gaaacactaggtattcctcattgacaacagcctgcctagatgttgcagcacaggctggtggttcagttccagctaaccactatgcctagtaatttttccatgttgttgaagagcaatgtagcaatagcataataaaccaactcaaggaaaagctttgaaaaaacagtctcccgtccacccttgcagctgtgaaaagagattatgagataactgctcttaaagatttattgtagtcattacattcaacagctacagtagttttagtggttcctaaaatacaccagcagttattgtctgattacttccacagataagttaattatacaagatttctgactctcatacaagtctgatttagagagaagtttaattatggcaattttagtgattgaaataagctcagcatatatcatcagtcttagcaagtatagtagaggtttttagctgtgttaaaatacacattctctttgtttttatttttcatttcatgatttctaaccatagtgtagtacatgtgataatttaggacacctgttttcaccagagtgcatcttcagtcaaacacaccacaggacaacaatagcaaattcttcattatcattaaaatcccattctaatgctgcccatggagcactccacattttacaaagctaatttgtataatgattgtgacaatgtgagcaggaaagtaaaatacttttcttaaggaaaaaaaaatcaggtattggtatgttttaaaatgactgttaagattgtaatttttttaatgatggaagatgtgacactccttcaaatcaggcaatgcacttcattgtttatgaacacattgtctatttctatactgaggcaaattaaagattaactttaaccacatatgcttaaattaacttaaaattaagctttcaaaaaatgtgccataaaaagacagtgctgtgagtagttgaatatattcatttatttaaacaagacttcaaattggtgagtacattagtttgaaaaatgctttactgaaaattaccttagtctgagccctgcagacctcttccccatagcacttttcattcttctaatataatggtaggtcca

SEQ ID NO: 129963 - DNA, 2363 bp, Homo sapiens
tttaatttttaaagcaatatattttaaatgcagcttatagtgtccagttgatccttgaaactgcttcttgtatttatttttcaaataccatactagatttctgtttctttttaatagagtgaaaatattgaagaaagaaatttaatgctgtgtttcttaaaagattgagattattcagttcagttttaattctcaagtgctcgaaagaacctgagattttcatcagcagctttgcaagccatccccaggggcttctttcggtagttgattattctgttaccaagttgtccttaaaaacaaacaccaaaaaaaaaaaattactttgttggtgggttttttaaaaagtagaatgaaaatgaagcagtttcacagtctgtgtctggttggtcctttaatttagatttccccttatttttgcagatacttaaagcttcaaaaagactgcccctaccaccacaggaggaccagcctaaccatacgctccaaaagatggctgtgatagatcttgtgaagcaattactgagcagatcaagatctttgggaaggaacactaaagatgttttgaatgaattatagtccactggcattttagtgtatttttttttctttttagaaacacacatttctaaaaatgtcatgttacattcctgcatgtcccttttgatagcattagtggatccattggatttcttttttctttttgtgagacagcttttagtcttacctgaatttatgtgtgtttttccgacagtggttaataattatattggtgatgtagcagcaattgtgttggcagggttttcatatattattagtaattaacactaactgttggactgacttgtgtacactgtgttaaacatgatttaaaagctattaagagtactttgtgttagcactcttaaaaacgctaacagagatcatcattagctgtgaagatttgagttgtatatacctgcactgatattcttatcaaaaatttctacattagctttaagtgttcagattaacacttttgaaatttttgtagcttttagctgattaattagaaaaatttaatatttcagtgaaagttttaaattatcatttatttatttttttaaatgagaggggaaagctgaaattccttgttaagacacaaggaaaaagaatggccctactattatcatgcaaaaatgctttgttggcacctcagattaatcatataatagctatagtctcttcagcatttgtttaaattttagaaaacctgtataaattactggtgcataacttaaagattattctgcctttggctaattgagtaattcccctccagcactagagaccgctcagtgctcttactagatgaactcagtaacgccttgagctgggttgattgaggatgtgtgaaaagctcacagagcccgatgcctgctgctatttcacggcaatgagcctttttctttctacactgaagattttcttcttatttaatgtggtttattttgggctcagaaataattgctctgttgaaaataatcctttgtcagaaaagaaggtagctaccacatcattttgaaaggaccatgagcaactataagcaaagccataagaagtggtttgatcgatatattaggggtagctcttgattttgttaacattaagataaggtgactttttccccctgcttttaggattaaaatcaaagatacttctatatttttatcactatagatcatagttattatacaatgtagtgagtcctgcatgggtactcgatgtgtaatgaaacctgaaataataagataataagaaaagcaataattttctaaagctgtgctgtcggtgatacagagatgatactcaaattataataaaactcttcattttgtgaattatagaagctactttttataaagccatatttttttagggaaactaaggagtgacatagaactgatgaatgagtaaaagtaagttttgctggatttttgtagaactctggacgttgaggattcattatgctgtggttaactttaaatatttttgaattccaaatatctgaattaatgagccttgtctttacaaatatgtgccattgtgcaacatcggtggattttctaaaaataatgtaaatgtcttctattaaatgttgagtgcaataaaatacagaagaattctctatattgtcattatttttgaagtataaggtatttttaatttgttacataataaaatcagttcattttatccttactagtattttagaagattatagcatttttgataactaaaatcacaaaggaataccttcagccagttaacgtatttctaacagataatgcttattttgcatttactatcatgctacattgccagga

SEQ ID NO: 129964 - DNA, 1055 bp, Homo sapiens
caaaggagatgagtttcaagaaagggatgttcagtggtgccctgcgctactgagaaccatgtgagatgagtgctgaaaacctgccctgatctggcgctgcagtggcctcaacgggtgactttagctggaactgtttcagtggacggataggacagatatgatagtttaaaccaagggtggtggcaatgatggaggagggaagtgggcaaagttgagaaatgcttagaaggtaaaattggcaggtcttcatgcatgggtgtagctggggggagacaacaaggtgccaagagccacatacactcttctgcttctgcagcctggtgacagggggtgctcttttcctaacgtgggagagactggagtcaagcacggggcaggggctcatgagtccagttctttacatgatgatagtgagatttctttgaggcatctgagaggagagatcaaatgagccatttggtggtgtttgactctcagaagagaagtctacttcgtgattgtgagtgtgggaaccatcagagtagttacgtggtcatcaggaccaagctctgagatcccttaaggagagcagattgagggagacatgaggtggttctatggctggactttgaagaaagccagcatttaaggacggctaagaaaaagatgaagtgaaaaagaagattgagtgggagaaacgaaaaaccaaaggggagagtatggtcaccctgaagtccaggggcaacagtgtttggagaagaatggtgttgctaaaaatatagcgagggctggcgagtgtccatcatatcaaatgaggcactggagggggtctcagcaggagccttttcagggatggggtcagggtctgaagacaggcgggagtgagttgaggggagaggaagagatgagccatgagatgtaaatgactgaagaaattagattgttcaatggaagaaagagagggtgacgagaagcaagcttaagaaagagtggtattgcatttttaagttcttagaagcttgagcatgtttaaatgctgacactgctcagggcaacagagtgagcacacattcact

SEQ ID NO: 129965 - DNA, 1036 bp, Homo sapiens
agtagtagaagatgaaagattgcaccatgatacaggtattagatgagcattttcattagatttaaaatattaccttagatttttcaatcacatgctgtgtttacatggtgatttttcttttaaaggcatcaaagaagtaatttcgacatctaatgcatgagattttgttttataacaaagttagactgttataagaatatcaggctttcatatttcacctcatcaactaaccattccataacaaaacaggatgtcaaattttaatgctgtttttgtgtatcaaattcctctgtgccaatttgagaaattttaatgaaaataatttacctgccttttaattgcttttgggcagaggcatttattattgactgagcagacattaatatttgaaggagtagagttctgtgtttacgattaagtagtattttgttttaactgaacaattgtatagaatgactcagttaatacttattttgcttttattctcttttttttttcagatgatgtaacataccaagtctatgaggaacaaggtttgcaaatgctttcttttttttttttttctttttttttttgagatggagtttcgctcttgttgcccaggctgcagtgcagtggcacaatcttggcccactacaacctccgcctcctgggtacaagcgattctcttgcctcagcctcctgagtagctgggattacaggcatgtgccaccacgcttagctaattttgtatttttagtattttagggtttatctcaaactcccgatctcaggtgatcctcccgccttggcctcccaaagtgctaggactacaggcatgagccactgcgcccggcctgcaaatgctttctaaccttaagccaccttcttgttttaaaatatacctatagtttgactacaagatgtggaacattatgctttaaactataaactttgcaacttaaaacatccagatgaacggtagcgttcaaagaattcacttggggagactgtttacccattccacggcttctgccattgcctaaataatttctta

SEQ ID NO: 129966 - DNA, 1018 bp, Homo sapiens
gtgacggacagatagctcttctgctatctggggtgtatgggttaagtgttcaacacatttacccttcagctccctaagggtataaagcctcttcagctgtttttctctgttcccatccatagttgctgtactttcgctctagaaaatggtaggacaggtcgaggagatagcacattctagtgggttgtgaagtggattagaaatgaacggctttcctggtctggcctgtgtcactctaagttgtcctctctctttagtccagggggtggtggttgtcagccttgtggggatgagtggactgagaaggagaatgtgtgagacatcccacagtgtacttctagtgaaatataaaagtgttaagcagacttttaattgatagtcccattttttaattttttaaataaaattaatgataagcatagattcagagtacatatacgggatatatacataccattttgtaaaagcagtaaatatcaatctaatttttttttttccagaaaccgagcatagttaccacgtggaagagacaggtgagattttaatttaattctgttcttaattagagtgagtcttcctttaaaagggcatcataaaatacataatatctattattaatgatatatttaaattaatatatgcaagatatgcaattaataattttattacgtcttatatttatggtatttctttgtgaatatacttttttgtgttttgatgcctagttcctgaggataaattttcagtaggattactagttcaaaagatacaattgaattgcatgttttgtacctttcaattacagagtcaacgaaaggtctaaatcatgttttgtcacatgccagcgcccttaaagggcatggccacaggaggtgggcgcatcatctgtcagcactttactgttttgcggtttgagtgtaaaccagttgatgacaggccccccttactcatctttgcatttggcatttaacacacttaatacctatttgtttcaggagtgaacatgtttgaatatcat

SEQ ID NO: 129967 - DNA, 1381 bp, Homo sapiens
tctttgacctgaggataattgaagaggcaaatatattagtaataattatgaattcatttattcattcatcaaatatttattgagtgcttcctttagctagacatggccctaggtgactgggaatatataatggataaaatatataagcttcctgtcctgatgtgtaacatcctaatgagaggaaacctgtcccccaccacatatacttaggcagattagcacttggccagaggaagaaaatagctgtggagtggacaatggtgtcttcagcggccgaaaggaggggcaggggaagccccagcagcaggagcaggtgtgtggcagcccttcacaaggggctttcatgtctcagttgtatgttgccagtgtcactttgttcattgtcatagttgagggagaagacttgcaacaagaagatggacccacaggagaaccacaacaagaggatgatgagtttcttatggcgactgatgtagatgatagatttgagaccctggaacctgaagtatctcatgaaggtagaacacttttttttcaagttttaggataaaatataatcaatgacttctaattactgaagtttttcttaaacccctttaaaactgatatttaacttttgcttagatttttaaaagttgaagcttaaagcttcaattaaagcaaattttttcttaaaatagataccttgattttggttcaaagcacttttcagggaaactcagaatatacaaatttcttataaatagtgagtcaaatacttgaggaaactagttttactatattcttctgcttagggtgctatttgttaaataaaattcaaacaactgatgaaatattggacttgataatctatcacaggctcatgttcacacatgaactctgtaattacagtgagcaaaacacaattcttagcttctgtaccaggcattggcaaacttttttttgtaaatagccagagagtaaatatttcaggttttctggatcgtacagactctgttcagctactcaactctgccatcacagcgtaaaagcagcctttgatagttcctaagtgggtcagtgtagctgtgtttttatacaacttatttgtaaaatcctacccaacatggctggtaagtgcagcggcttgaacacagctcactccagccttgacctcccatgctcaagcagtcctctcacctcagcctctcaagtagctggaaccacaggcatatgctaccatgccctgccaatttttaaattttttatagtggcaaggtctccttatgttgcccaagctggtctcaaactcctggcctcaagcaattctcctgcctcagctttccaaagtgttgggattgcaggcatgagccattgtgtgtccagttagcaaacacttttt

SEQ ID NO: 129968 - DNA, 1017 bp, Homo sapiens
aaaaataggcatttttatgctttggaaatgattttgtagtgtgattagcatagtagatattacatttaaactcttttccttcctgaagtctaaattaactttctattttttgtcatggaagattagctctttgacaacaaccgatgtcactggcattatctcacatgacagcatttatgataccaagtgtagtgctacttctattcactgaacatagattatatttattagagaacttagtatcaatgtagttatagcttcttgttcattgtgtgatgttgcagttaagtctaataatctgataagcaccacagtgtttttggaatgtcatcatttatgttcacttttgtaattcaatttatttgaatttatggatctcagtgtcagatgtggttctccaaagctgaaaggattgtcagttacaatgtaaggttttctactgacacttcctgacaaacctgagtgagagcagtcggctacctctgagtattcagtcctctcacctgcaggagtgccctttctcctctcagggaagataggtaatggttgaccagatacttcaatctgtattgaccttgtcttccacatttctgtctttatttccaactatttccctttatgaaagctttgttcttcccactttattttatcattattgcgaattttattaattagaaacaagtcattttgcttttaataaggctcttttttaaatacaaatctgagcctgagttttctttaaaaatcttattgaaagtattttaatgcttaagtctgttgacagaataaaacaaattttacatatctaccatgtttgccaacacagaacaaaaaaatgtaagctgatagagaaggcatgcagagttgcttagtcaaatatattcattttaatgtgtatgtaccaatgtcatatttgagtgttaggggtccatgttgatgtttgagcttttctacttagctatgttttgcaattattttagaaccccagaatatcgaagatgaagcaaaagaacaaat

SEQ ID NO: 129969 - DNA, 1109 bp, Homo sapiens
atacatgagctgcacagagctgcttaagattagaatactgcccttcacatcaccttgaccttcctgccgcaggctgtccatgcacagtgactactcttggtaggagattcttaatgaggtcaggaggagtccaggatcagcaaacggaatctttgaactcttgaatttagctgttttctaaatacttggatttaattgaggacctattttaatgttccacatacaaaatatcaaataacttcaaataactaagttaatataatagattttagactggccttgactttaaaatcagtttcatgttaacataccctgctgtcttattaggacttgtaaaagggagaagaacttttaaattttcatatgttttagctgttatagaataatatgattacttgtaggggtttcctttagatgataataaatagttatgtatgatttctttttctttttaactgtttttcaagtagaataaataattatataagtgaaaacatcgagtgtacctgaataacagaaaattcaagtgcattttagttgcctcattgctgaattcaaactgcaggacttaggaattaatcgcttatgaaaacaaaaggagcttgaactcatattgaacttttggcaggtttagacatgactgttttagagattcatgaacatttaaacaatgattttgttttaatttgaagtgaaaagctaactaagacaaagagatatattcaaggctcatgtgaagttgaagagcaaactgttttcctacctcactttttaagcatacaattttagaaactattaattagcagcactattaattaaatgtttgaaaatattatttttcctggtttaatgtgacagaaaaccccacaaaaactcaagttaactttgtgaataaaaaaatgcaggacttaaagagagatctacttcagagccagcagtcccgccagaagaggctgagccacacactgagcccgaggagcaggttcctgtggaggcaggtaagcttgtcctcatcctcgagtctcgcccaggtgtgccagagcctgacaggtatccgcatttacagaatcacgttttacctggaatttgtttcacatcatttacagaat

SEQ ID NO: 129970 - DNA, 1185 bp, Homo sapiens
gactacttaagttaattctgtaggtggttgctttattgagaatattttgtattatgacctgcttagctatgcaagtttgtaacttcagaggtcctcataatgatacttggataataaagattccccatagacacttccattgaaaaagaaaagaagtaaacaagtgtcatttgtaatttgaaatgttttaagttaactgtcatgttactgtccatgaaatggatctggtgacttaggctctatctcctgacattgatttctttctcctgtgtcctcaattatttcttctcctgttaatgcccactggtaataattctcaaaatcgattgctcagaatattccattgtaaaatgcaccttggaaatggttgttttcctcatttgtaaattgaagacaatgcctattcctcaaggtggttgtgagaaccagtcaatgttgcatatgtgtaaacagccagcacatggttgggcattcagtttccctttatcattggtagaataagaatagtaatactcaaccaaaacgtctcagtcaggggttaaaaacttggaagcactgaaactgtgcttcctattcctacttaggtcaacagattgcaaaacaaatatttcagtcctttatcctttgtaatgaatgtgtctttgtgaaatgagtatagtggagcctgatttattctattgagatcattgagggggcaaatgcaaataattataaatgttgcacatgagtgaagccgtaagaatgcttaatttttaaaagaatattgtgacaacctgaaaacacaagatatgaaggctagaaaaaaagttatgaaataaactatagccttaagtatatggtacaatcgagaagcctaataaccagcctaattgtgaaaaacttatgtttgttttgtattcagaacacatttttccatagatgagattttatggtcttcagagattttttttttactctggtccacaaaaattgatttaattctaatatccatttctgcaactctcattgtaactatgtttctatggaaaatgcatttatcattctgccttgggatattaggaatatatttagttttacttctgaatgttctccagaatttctttggttacatccatggtgttaaatccattcagataccttacatggacaaaaatcatggattggctcacataattgtaaagccca

SEQ ID NO: 129971 - DNA, 1044 bp, Homo sapiens
ccagttggcctggttaggcctggtgaacatctgggaccatttttgtagttgaggatggtgattcttcccaggcgcacacctgtgcacaaagctttggaatgggagttgagtgggtcccactcaaacttcatcaaatgtagggcttctgggacaagaaagtgaggctttgaaaactggacagaagaagaagcagaacatgtcccccaggcatatgaaagttacacgattctcaaaccatatccccgtgttagatcttttctcctgagataaatggaatgtttttttaaaacttatgtacaaaattttaagtgctgtcttcactaaagattttttgttctctcttgaagaagggcaaacaattataagtgaatttgttgagagcattctggtaatttttaccttagtttttaagttcaatggctatgtggcagaaaatacataaatactaaattctaaacaaatgagtgaaaatattttggaataacctaatcatcaaaagcacataagaattgtctattgctatttagtaaagtactttgaaatgttttggctatctcattgatttttcctttgactgttagctcaagaattgaaacacctcaactaaaacatttaaagatcctttaaaagcacttgtagactagaacttgatttattttttcccatctctcttcttttccccttctcttttctttctttttgtaaatgtttcaactaacttttattgaagttgaagtcacactttatccaactgcgtaatatttaagcttcaactaaaaacaagctttcagtcatgattagagggttaaaatcatgcattgcactctcagttttacactttttattcagtaggttgttatttctgtattgtttgcttcatattgttttctaagtataattaaaaccagaaaggttacctttttaaataagccagctacaacgggacaaaaaattcacaatactaggtagttgggagtcagaagctgttttcgggaagacctgaaaagggaaaattaagtactaaaaatgtaagtttattttgcc

SEQ ID NO: 129972 - DNA, 2832 bp, Homo sapiens
cttaaatgtggcattgcaaacaccttaccttatgatttccttatgagagtacaaacagatgaaattcagagcttttgctaactgctttattaccatgtaaagcaagttgaaagcaataccttccatgagatttggaattagctgtgtgtttcatttaattgctctctcaacccaatgaactagaagacgtgtgttagcttgagttgctctacatgaattaacagggaaacatacttaaaggaatactgatttcatgatgaatataagcagaaagagaattctaatttttccttttaaatactacagataatgatttaaaaatgtcatacacatgacaattttttcctagttaactaataaaatgaaattatatttaattttatttacatatatttgtcttcaaagaagcacgtgtattttaaggacatatgtttttgagctaaacattttaaattatctttgtatatattcttacaaattatgaaaaatttgttcttacgttgccagtgttcctttaattatagttacaaagtgtgagttaatactttgtgcaaagcactgccttcgtggtgccctcaattttataatattgcatgttaatgttttaagacaagtcatactatatttcaagatggaaaatatgacaagcttctagcattttttaatagttgatatttgatagagatttgcacctatttttagccaccataaagactagtgaattaaagtaactttctgaatgtgcatttcctgtgtgtggagagataaaaagagaataccttttcactaacttcctgttctgtgattaagagatcctgtcaataaacattttttcctttaattggaaaatctgaaagttaaagaactcactaaagaagagctcaagaaggagaaagagaaacctgagtcaaggaaggaaagtaagaatgaagagagaaaaaaggggaagaaagaggatgtccgaaaggataagaaaattgctgatgcagacctatccaggaaggagtctcctaagggtaaaaaggacagagaaaaagagaaagtggacctagaaaaaagtgctaaaaccaaggaaaataggaaaaaatcaacaaatatgaaggatgtttctagtaaaatggcatcccgagacaaagatgacagaaaggaaagtagaagttctaccagatatgcacacttaacaaagggaaatacccagaaaagaaacggctaaagctctggcatcatcatcccagaacatggtcatgttccagattgcagtttgttacaaaaaagcatggaaaatgtaatattgctctgattggtgagggtgtgtaaattagccattgaatgtatcattggtgcttagcaagtaaattacctgaaatttaaatataccgtctcatacttctaaatgtaaaaacattttaaaaatgtcatagaatatgatgtaataacttctatttattgatcatgtattcagataaatgtatatgtatcatgaatttttatggattaatatattgaatactttcattgacgttaaataagaatattaagattttaaatgttatttctgtgcataatgccttgtaactttttcaagtatgctaaatactcagggagatggatttgctcgttgttttcttccctccttccccttcctgcttccctgtttttctctttcgtggacacctccccaggctcatgtgccaccaccttccctcctctccagccctcccagccctcccgcagcctttcagggggccgttcctcaggcttttcatgggttctccttccccttttccctcttatctccccttttctagtctccctccccaagtcttttactctctcctttccttcactcctcacctcaccgctgcccctcactcctgcatgcttctcactcctgacctccctacaacaacctcacccttctcccatcatccagtacatacttagtgcttaccatgtgccacatacactgctccgagaactgtggccatagccatgaataaaggggagaattgtatttagaagaacagtttcagaacacttttatttatgatacctttatagtcttagaataactatagaaaggttttaattatttcagattagaatgtactttcattttatatcacactttttttccattattttggttgaatggcatacatttttcatatttgattgtgtcattattatttaccatttctaaggaattgcaaatgtaatctcttcactagagatcagaatttagcaccttagaaaacatttaatataaaagtgaagttttagtgagaaattaattctacaaatggtttgtactattctgtgcctcaaatattaaatatctaattgtgactactgtgaaatgcagttagttgataatgataaaatctctgtggtagcatttttgattctcttaatgttaaccttattaacaacagaatcaaaaatgctaccactaagattttattttttaaaacatatttatttacttttttatgaagatcttaaaaacgagatttttgatctaattaaagatatttcaactcagaaatgagtatgtttaagtgtaaatatttctaaatgtattgtacacctttttcttaggttaacgccttttactatttaaagtcaaatactttacgacatttagttgacagaaacttcaactcaatagaattatacaacagagaagaaatcctagagaatatctaatatctccaatataatcctgttattttattgcttaaaaattaaggcctgaagatattgtaacctgataacttcgagttttatgttttgattagtcaggattttgccatttttacacattacaag

SEQ ID NO: 129973 - DNA, 1073 bp, Homo sapiens
tgattcaaatgtgtagttttcagtaaaatgaaaacttggatgtaaatgtataaccctacattacattgacatagaatttactgtgtttgatattttaattcattaaaaattattgtccgggcacggtggctcacgcctgtaatcccagccctttgggaagctgaggcgggtggatcacgaggtcaggaattcgagactagcctgagcaatatggtgaaaccctgtctcaactgaaaatacaaaaattggctggacttggtggcaggcacctgtaatcccacctactcaggaggctgaggcagaagaatcgcttgaacccgggaggcagaggttgcagtgagctgagattgtgccattgcactccagcctgggcaacagagtgagactctcaaaataataataataataataaataagttattatacctgtcagccatttgtagactaacagctcagtattacagcctgactttatatgccagtggttattcttgttcatatgttagtagtcatattctttgtgggtagaggcatgggggatgtgcatgcctctatataagcctgtttttctttataagcctgtgatattcttgtggtcatttcacgggcttggcatattgtttgtagtttgtttttttggtgaaatatgaacagatgagacttactatgtgattcacagggttttgtgatttatattttaagatcaggaacttttaatggtttaacctcctatctcttctgaataatttctggggatgaaaacaattttcaccatcttatttttatataaataatgatgaaacaaatggacaataaaatattttacttcttgatctagagaagcaaattaaacattaaagactgaattttttaaaagcagttttcagaataagacatgatagcattgcacatccattttacacttttgcaatgccagtatctatgttactgtccaaacgcattgaagtagaatgaagactcagcatgatcctgaatgaatactattctgtattcttaaaagactgtaataaggttttttaggaagaactgaagaatctcctggttgatcacca

SEQ ID NO: 129974 - DNA, 1072 bp, Homo sapiens
aataatttttaaacacatgggaataagtactggttatggttacctatgtatttcatataagtggacaaatataaccatggtcacgtttccatttttatgttgtcagtggtaagagatactaataacatttttgaagaatattgatatttcaaccaaaataaattaccattctcgaatggatgacctcaattgatagatacaaattgctatcaatagtgaaaggggaggtttgaacaatataatagaacagacatctaatactgaaagtagaagttttgagaaacgtacaaagtgggttttacaatttacagctgcaaaaatgtcagatggctttggggactttcttgtgaccacaccttagaccttcgttctttagtgacaggctaaaggccacccttcctgaggagatgaacactacattgcacctccaaccctaatgtgcctaagaaatggattggaactttacaaagtttgccaatacatagcataaaccagcctttatgtgactgagagagagaattgggaagatcagttcattgggatgctaagtacagcctggttggaataagagttagaggtatattgttagagactcaaaaataaatctattatcagaactttcatttgccaagagaggaaatagaaagctattgcaaagtttttagagtgggtgaaaaatgtaaaatgtatgtacataatactgtcattcttacttgcttgtataattttttaaaagacagtgcgaactggtggaagagcagtgattgttcaaacagtaaagatgaactctatcaaaatatgctatccttttttggatggcaagtgtgattgagtagtgaagtaaggtccttggtccttcactctagtatttttaattgatcatctgtgacccaagcggaagtctaccactgagtagaaaatgcaatttccagtggcaattaagtatttctaatgccaacaattcttaaagatctaagccaaattgtgaagttggttaaatcataggctgattataatgcatttatatgttaaagatagtgaaaggaaagctttaaagtgacaaataagagag

SEQ ID NO: 129975 - DNA, 1108 bp, Homo sapiens
actaatcttggattaccactgacccctttctccattactgtatttcccattgttgctgggaaaaaaaaatctgttataaagttacctgtactgagcctctgtcgggggcatgctgctccaacagtttcccttgttagcagtcattctaaacttttccacaaccttccttcttccagggtcattttattcctctgtagagatgattttgctttctgctttcctaagataatctagtgtggcttcattccattattttcttctctcttccctttacaacattactatctcaggatttttttgagctattgtttcttgtctcattcactcacctttttttttcagacactgcatcctctggtttccaaagctagccctttcccttgagcctgtacatcctcctgacctcatcacctctctcctgttatgaacttagcttctttttcttacagacatgcctgcgtttcctcgaccttcaaaacaaaacccggataaaattcttcaaactttttccttttctgttcccctcagaatctagggaaattccatgtatgatcagttttcttctaaggaaatgaggaaggctgatgtgagcaccctagatttttggtcacctttccttccacctatgttttctcatcactgtggcatgactgccttctctactgcttgtaaaactgtattctgaagaaccttagaggatatttagtaagtaacataataaaatagtgccctcatcctaaacctttgttcatgtcttccttcctaaaactgatcatttcactttaaaaaaaaaacaaacaaacacatttccttttttaaaaaatttaatttcattttattttaagttctgggatacaaaaaaaaatttttttttctttactctctttttgtttcattgttacttagggactcttgttaactgtttttggtggtatacttttttcatgtctatatacttttcttcagaaactgaatgtaataattgtttaaattattagcttggtcctttttatgtcaaaaatattgaaaaattattggctatgtttttaagttcagaaaagcataagatgatcctttggagttttatatcatgcattgcactttgttc

SEQ ID NO: 129976 - DNA, 1009 bp, Homo sapiens
tttcagagttgagaaactctgtggaacaggcttcgtgttgagatatagtgttgtctcctcagagtcactgttctggcttattcggatgtgctgacatttgtccgattgcaaagacgctgggttctccggagtttggcacgaaaacaagacagcagcactctggggattcttttcagccctttagcttccttcagcctgccttgctttgggacatgagtggtgggtataagtcagtaggggaagtgtcttctgggtgccaattttacccagtcctgaggcctggctgtcagcctgctgccctggggatcctgcagacgcctcggtgctgaggacatatggaatagtgggctgtcctgcattttcatcttgtccttgattctttctttattctagaaattacctccctgtcttatagagctgtatccagacatgaaagagggactattttctgtttgaattatttttatttagttagatagaacagattgtctaccttgatgtttgtgactttggataattatcaaaaaattagatctagcacagccagttattcttaatttggtcacttgacagttaactttttgggaattgatgctccatgaccctttctaaataatccgctgggctagctccttaagtctataaaacatacaagaaattttctgtgatttggctgtggaatctttgatcacaatgcatatttggaatgcttaaagaaactcagtgacccagactttattttcataagttaaatgatggaaccagtattcagaattcactgcctttgttatttgttgagatgaccctgtaatacttaggagttagatattaagtagtttgtggactccttgaaactaggaaccagatcttcggttttatttgaattctccttcaatgctaagccttgcatgtgatattcattaatatcatatgaataatgtcatatgctggtgtgggtcctgaaggatgaggagttactccttgcataataaaatactgagtttttttt

SEQ ID NO: 129977 - DNA, 1109 bp, Homo sapiens
ttttgaaggagtgatgttccgtggttttaaatctcttccagcttctctaggattttgcttagtgttagtttgtcagagagctaaaaatttgaaaatgcttgcacttcctcacgttttatttaactataatttctacttttcaaatatttcttgtcttctatatctaatcaaattactttcaataagtgtatcattcatccatttattctgaggggactatgacaaatttaaattgttatgaattactcttgtaggctgtcataataacagcctgaaagtagcagcctcaagtcagcatgggacatccattccctctgcccaccatttacctgtgtcagcaaatactgtccaatttgctaatcttattaaaaagcaaacattctgtagctacttttggatgtggatatacacactggacaataatctcttaaagtttaaatgactattaaagtgactattaaagctcttgtttgtcttgcctgcactaatgggcaaatatgttttattctgttaatgcagaagatagtctgttaaagcttctgtttccaaatattcaaggacttcagttaagctgtcacttagtagcatgttctgcaacaaatgagtatcattcagtaatgttccttctgaaaatttattcaatctttgtatttattgtgtcttctgctttcatacttgggtactatgaaatatcaaagtttattaggtttaaattctaaaggaatcttcagccccactcaatgaaattcacccagcctaatttccgggatatactttttaaaggaatcttatttgttaacgtgttgttactactaacactagaagatattcgattaattgataagaagtaaatgattaaattttgtgttaaaaatatttgaaattactaatttttcatcaggctttatttgccctactaatgcatattttatgtacagaaattaattatgctttatttttgtaagtgaaaaacaagaatgtgggataaaaatttgctacttattttgtaccacctctcattagttcctctgaaagcctctgatgaaggtgacacccaggtagctgacgaacccctgacttctgtgacttccgtcaacttgtgcctaagg

SEQ ID NO: 129978 - DNA, 1462 bp, Homo sapiens
taatagtgttaaaatttaagtgttaaaattatctgagttacataatttgagtgtatttttgcccacctatggatgctataaatggtaatactgctaattatattaactccagaatttcctaagtcagctccaggtcttaagtggggtggtggtggggggaggggagaagtttgaggaaataaacctttctagtttgaatgaacaaatgaacgaatgtgtgtataatcaactctcgataaaatctggttggtaaatgagcaaatctggaggttgtcagagtatatatctttttttccctgatactgcttttactcactcttccttttactgtcaactgatttttccattactgtccattgatttttgatgataaaattttgtctttcaactcaacactctaatgagagaaaggtaaacctgggtaggggctggtaggagtggtgaggcttggtcaaattgtggctttcttttgacatttgattgagagttgattgtaaggtgtgcattttaatggacttctttattttccaaataccgtttctgtaaacctctctgaccttgatgcacctcgcttttgagatcacccttcctccacttcttttttccacctaactgctctccttattttctctctctcttcctttattcttatgtaggcctgaccaaagatggcagtaatgaaaatattgattctcttgaggaagtccttaatattttagcagaggaaagttcagattggttttatggtttcctctcatttctctatgatataatgactccttttgaaatgctagaagaagaagaagaagaaagcgaaaccgcagatggtgttgatggtacgtcacagaatgaaggggttcagggaaagacttgtgtcatattggatttacataaccagtaaccttgattcagggactgaagtcattggctaatgaacacctgaagcagcctcctttttcttttctttccttggcttatgcagggcttaatgtgcagtggggtggttgtgatcttaccgtgcaagtcaaccatgtgatcttgcccagtacagctactagctagtcccttgctcgctcagctcccccaacttctattgaagaaaatggtactcctcattcttgtagtcagctacaaagtacactgaaaatgatgttcttggtggtataattggtttctgtatcgttttgtttcaactcatgtattcactgaactaaatttggacacttaacagcaaattgtgttgtggttaacccttgatgcttgtctttctaacacactattaattatgatgattctaatggatttcattataaaaatatttctggcatgatttttaagttaaatgcttctctgttctttaacatgactgatgtataaaatgatggttctttactaagctgatattttttattgtaatttgtttaggtttgtcagataggttcatacaaatttctatgtaaaa

SEQ ID NO: 129979 - DNA, 1140 bp, Homo sapiens
ttattgaaaactaccttgtttgaaaatacattctttaaaaacttattttccaaataaaatcaacaggaaaatgacccaagaactaaatgatgcgaggactaaatccttagagtgacaccacctaaggatcatgtggttgtccttttgtcctatggctagcacctagctggcatcgtatcaggtatgggtggaaagcaaaagggaagccagtcagcacttgctacatcctggaaaatcatttgtagactgatagatgcatgagtgagctgatgggaggagaagaccagatcttgccaagccaaaggcattccctttggttgagccctgttcttagaggttcagaaggaatcacatgccgagagtatatatttttctctctggactagtacttttgtcttgagaaccacaggaaggttgcttggctgggtaaacagttttgttcaaatgcttttgcatattcgttgcatatggtcatctgtcatactgaaggatggaaaagttttatatgtaatacttggaagtacttataatatattggcaaatggagaaaagtaaagatgtttatactaaatatgcagctatagtgttttaaggcaggaagaagaaactgttattcccatagggacttagttgggattatagatctttgttcacagcatttgtctgctgctaaattcagtgaaaacattctaggcttgtcaaaaagtaatttaaataccaactgcaatttgcgtttttcctaccaaaaacatgaacaatgacataatatagttcttttgagtaaagcagagaaaattcactataatctttaaaacttttaaattagttgtcgtcttatcctttatctgcctatcttgattgctggtagttatactacatggagacattgtgtgttgccaaagccttaaatgactgaattacgtggttccaaccagaaaagctcagtggtcatggatgttcacatttcttacagtcagaacaccccaccctgttattcctcctcaaaattaagggcttggtatacagcttggtagattctgatacctactagagctaagaaacctttgctacccagagccagttcttcacaggaaaaaaacaaatgatgaaaacaatatatactttgatttatttctatcc

SEQ ID NO: 129980 - DNA, 1043 bp, Homo sapiens
taataaataacaatgtggtattcccttatttgttttaaagtgctgtcttgctggaaagaatggtgttaatttcaatatgcaaattttatataatctggcctggtgagacttcctttgcttttgtatgtagcataatatatgttaaaactttttatataagagtctttagaaaaataatggatatggcatgatattatacactaagcttataaaataatgacccaaacaaattcttcttagttaacattgttttgtgtatatttattagatatgaaaacatggtaggatgccacatctgtaactagtgaaactgcttttagtagattaattccacctccttatgaaataaagttccaaatatgaaaatagagttttagttgtgattaaaggtaataaaccttcctaatgttgacctgtgttggtgttttttgttttttttttttttttattattgcccattgggaattagtgtttgtgcattgaaacttattatgaaatttcttttcttgtcttaactttaatgaaattttcaatgtagtcctgtcattgtgtatctatatttgagtttctctaaatatattaaatcctcagatgactataatcttaggcatgtaaaagaaacaaaattatgtagaacttatcagaatgatgttaatttgcttgcctataaatggtttattacttcattatattactttaaatgacacattctgaatagcaaagctttttattttaaagataaaataaaatgtgggccaagttccctcatttttagaaataatattactctcatctactgcattttattgatttttatttgtttgtttgtttttgcttaaaaccagctatgtggtctgtcaggaaatgccattagaaattaaaatgtggtatttctttgataaaacacactgatttctatagcaaactattaccttaacttgatttttagtgtatttgagatttcaaaaggtcatcccctttaagttttttaacctaccattaagaagctaattaattgtaactttgaatattgctgtttgcag

SEQ ID NO: 129981 - DNA, 1293 bp, Homo sapiens
gggggagatattttcttctgtgtgttaacagagtttttaagattctgcagaaatgaaatgggacggagaaaaggatttggctacatttttatgtgatttcattaagttgtttatgtgctctgcctttggaaagaggtaatattcaggtcattttgatgagtaacttggatggaatatacatattatactaaatctttaaaaaaattcaggagtttatttcctgcactacttcaaagttagtgttgcatctaaacaatcttttctgttttcagaaatattttgtgtgacgtgttttgagaatttaactggaaactgtttttgaaatgatctatcattgtacataatcccaaattattggagaaataattgtgagaataagtgttcagtaaaatgttttcttcttatgatatcttacatttatttctaaacagagacaaagcatggaggacacaagaatgggaggaaaggcggactctcaggaacttcattcttcacgtggtttatggtgattgcattgctgggcgtctggacatctgtagctgtcgtttggtttgatcttgttgactatgaggaagttctaggtaagaattttgatatccttatgtgaatttgtaagagagtaagtgacatctcttaggagtcttgaatatttgttatcatctttctggtactggtaatttctatagcctttcagtggttctcaatagagtgaggctgaaaggggatatgaagaaggttaccttggagtattgtcttttgaactctttaaatgtgacctgtaggtttttgaaaaaaggctttatattgtatgtctgtcacacagggagaagttttatcaaacagtactcattctcactatatgcagtactttttgatttctattcaattttgttatattataaattttaaaaatacttgatcatgagccattacatttatttaaggacttgctaatggatcataaccacacaatatgcaaaactcttccttagagagggttttcaaagtacacccttctgtgtctctgttgggatgggatgagtacgtgtgcacacatataggtactggatgggtgtgctgagataggcgtttgtagatattattgtgtgtgtgtaggtgtgatctgtgtgctgttctgaggaagttgctgtggtccttctgatagtgtcctttctccacctttttccttttctgtaatcactgaagtttttcatgattttttacattaatgattctttgttatttttggagtcacattctccttcacttccccaaaaatctttttttaaactg

SEQ ID NO: 129982 - DNA, 1829 bp, Homo sapiens
attactagtagtattcaaagcttttaaatttttaatttgcttgtgaagctttaaatttgagtgaaaaatttagtcttataaacaacttagaaaggttgctgcctgctctagatactatttgtgctaaattaatttagtatactaatcagaactctaatgaattctgtgaactgctaatgttagatcagtgaataaatggctgattttatttcccagaagagaatgtttggagatgaggttggggagaagttgaaaaaaaaaatcagaatgtggttgtgtaatcttttcctagttccctttcaagatgatctttcccaggtcattattcttactcctgaagatttttctttccctctcctcacctcccagccttccttctatttctttccttcccaccagtcctctgtccctccttttctagtgaaacattttatgttggtgctttatttttgctgttggaggaattattcctgggatggtgtctgtgagtaagaattctagagcattgattaatttcttactatgtatggttttgtttcattcaagcaatctaatggtctttccttgtagccattttattagattctgaagggccaaatcaaactgtttctgggcttggggccatattttatagcaagacttgtttgagttttcaatgaattggtgcttaagctaaagccgttaaagcctgcttccaagaaaacaaaactggcagcacagtttgttccatttcattttttttcagcatgcttgattttttaggggttggagttagctaggaccaactgggaaaagaatcccgtaagtgggagaaaggctgtggtgttgttagggagtgcacttcagcctaagtggtgattagcagcatttagcctctaaaaataactggtgagcagagtttgtagtcaggtccaatttcagttctagaggcccttacagtgcagggattggccagtctcaagctctggtaggcaagtgcatgcagtgtgcctaaaacctgccagcagtacttttgagtttttttttttgttttgttttactttagcatttattattcatggattgaagaaatcaaaatggctgaagataaaggtatatttttgttatttaggctaaaagtggctttagatctagctgacagcttttcactttattttcagtggtgctctgttaaaatatttttggctaagtgctttgactgtactgtctacattttctattttgaactcctggagatactgacttttcatagtagctgaatatttcattgaataatctgtctttaatccgaatatgttttagtgtcttaatttagatgaccttttagtatgttgtactactggaggctgcattttacaaatttcaaaaaatgtacaagctctcttcttattcttataagttaattacaatgaatttaaagaattatctatatttagattttatataaaattataggagatataaattcagtctcatattaatgaacagacttacctggttcaagcaaggacttaccatttatggaaagtgacctacttttatgtgaagcagacaataaatgcaaagaaaaaacacaagggttttattttgattttaaattgactctttaactttgaagtattctttaactatgtattgaatttaatgttttgtatatatttgcttttgctttactttgtaaattaagatagtctttccattaattgaaagactgcattcactcattatgttgaagatttataaaagaaaagaatagatgtatgaaaactgcttctaactctcagctgtctaatcagcaactgaaaggattctttgattaggatagagaa

SEQ ID NO: 129983 - DNA, 1003 bp, Homo sapiens
cttttgaggtaactccagccactgttttaatatcatgaaaatatgcagcttagtttgtggcttggatacttccatatcacctctaaatggcttgacttcattctgtaccaaggtacaaaaatgtttttcaaatgaacttctctttaataaaccctgtatgtacatataacctatgtacaccccacctaaacctccggggaaaagcctcagccatctatcgggaaatgtggaggtgcaagggctgcttgcttcattatctgctgccagtgtctgctctgcactgcacatgtgggtgtgatgagtttctctggttcggtcctgcagctctggccatttttattagaggactaaggattcaggatgttcttttcttccctgtgtaccactgtgggagtatagtctggaggccagtgctttaacttttttttaattatactttcttctggtactgctgggagccaagatggtattttcttgttagtcattatttttaaaattttagtattttattcccctgatgtgagggatgcttcaggcttttgtcctgcatttgatctttgtttttcagggatgtgtcttggttacctttggctgatgtggttatcttttaacggcaaatcactgaatgtaattcagttcctatcaaattggccacagctgaggacaaatttggtttagataacctattagactcaaaggaaatgttgagctcccttggtgaataactctttttaaaaagaaaatcatcttttgaaggatctgggctattcggccccctgtgagattcaggtcacttgcctagtcatgtgactgtcatcatctgccgtagatactatgtgtgctccagagcggagagcattggtgaattgacttggttgaggggtggggggctggggggtgggagtggttgctgtccagttatagtcaggtttccaagggcagccactatctctgtacttggagaaatgccagcacttctctcctacatgtgtgcccacacgtt

SEQ ID NO: 129984 - DNA, 1010 bp, Homo sapiens
gcaggttttaattattatttaatccgtctgtatatactcaaaactattgatagataagcacttaaaaactcttagctactttttaactctctcaaggtgtctcagtagattgagcagcctttttgtttaggcttaattagaatgaaatatattcctgtactgcctgtaaaacattaacagcttcatttgatgagtatttgtcatttagaaacacacttctgagtttagtttagcttcctttttctttctactttgagtgtctcttagattactaagtaactgagggattcaatacactgctgattgcattgtggagcccttgaatgaagaggccctagcaaaattttctttctttagccaaagaccatcagagccaattgcttaatcctccattactcattctaagatgaaaacataggaggaccataattcttccactgcaagaaccgtcagctattttgtgttcagttcaacagcattttgtccatcctgaccaaatcatatgaaaccaagcactaaataatgttctgagggagtttatgaacacattttccagagaccagttaacctctggtggtctgtggaagtgaaagttctatattttggactatattttagtcttgctttaaaataatctgtctcatagagattattagaaaatgaatgtatgacattttcattttcagccagttatcaacagaggaacttggataaaggctcatagggtctatccatcttgttgttagttaatatcagatacttagcccctgagctctctggttccaatagaaaaacccttttctccagaaagctagtgcagtttgggagaaggaatatgatgacctggatcatatctgtgtaagaatcagaaccaagaatcgctaaaaatctctgttcccagcctccttaaatgtaaagaattattatctactttcttttcagagttttgatatcactaatgctgatttcatatggctttgtgtttctcagttgtttccgttaaagtacgt

SEQ ID NO: 129985 - DNA, 1034 bp, Homo sapiens
attatgtaaacattttcacctcggactctttgagtttgttattcctcagcccagggtgtgctttctcgcagagggccaccagactctttactcgtcaccctcttagtttagcccttcagccctgcagtgcctctccagctgcagaagttttggtgagaactgtatgtgttggtatgaaatggttagccattaaaacactgggcagctgcaggtgagagcttatgtttgacagtaacaaggaagaagacatataaagtcaatgtcttgttaacagaagggtaacaagtagtacttttttacaagtagtactcgaccgaaaaggattattttcttaaaaataggtagagatagcccatttatcatttatcccatcatacaaatgcaggcagccgtgaatagctgaagtaagaaatcaaaaagcaagcataggaagaaaatgaacattgtatggatctgtgcagtaatcacttagggaatatggtagcttgacgtagataaagaactacatttaaggaatacctacttaaaatgtgaaacctaaccaatgttaaacagataggctgccaactctctgcaattatgatagcttcacaaaatcgatgtgacttcaaatcagaacagcataagacagagaagatcatctatgaatgacataaaactaggaggggagacagcagaaaaaaaaagatgtgttccattagctaagtttgactgggtctttttgttgttttctatttccaagttaggagaggttggatctaatgccagaattatggtcaatcttatttgtagttggttggacatgtgtgcatgaacaataagaacttggtaaatttcacataagttgttgtacactgtcagtttatatttcatctaatccttaaaaaaaggaagttaagtcttgagttaaaaggatcatttcaagtattaaagatctccaagtggactcattaggctcaaattcaggtctgctcaaattcaaggttagactcaaattagactcaaattcaaggttctgcttactgagaaagagc

SEQ ID NO: 129986 - DNA, 1051 bp, Homo sapiens
ccgagccctggagccgcgagcggcggccgcggggccgaggagcctgggccgggccgggcggggactactccggagtcaggaggcagcagcggcggaggacgaggatctctggcagtcagcgccgctcggacgccgccggcaccatgggctgctgcaccggacgctgctcgctcatctgcctctgcgcgctgcagttggtgagtgccccgagggcccctgccccaggacaggtccctgctccaggaccggcctctgcgactccctctgcggttccgcagctcccggcaaggggcgaacgggtgaacagggcgctccgcccgcctcccaccctccccaccgcctggctgggctcgcactgctctccagccgcgggcactcgccaggtcgcccctgccctgcaggagggcgcggtctcacccccggtcccatgcgctggggttcgccgcgctcccgccgggcgtcgccacgcggtccaggggccaggagccggcggagtgagggattttcccgccccttgatccgatacctggtttagcaccctccgcgttcgtgctgaagttacacggggacttgcgggctctttcttcttaggatgatttccaggaatgttgcttaattacactgtgtgggaatgcccaggttctgaggagacagaagctgcctcaactctgttagtgaagagtgaggtggttctaaccttaagcaggttgaaaagtgatggttaaggagtctgggacctccaggaaggagatcaggctgtgtgcttcagcccctgcccttccagttccgctttggattttgttgaaatgttgcatgttcaggcggcgacagactgacagctgtcatcaaggagagaacagagtgaaccggctccattggcgcggtgccttgcagagggagtgtgtgtaatgggaagttagaaactagagtggggaaaaaaggccctttcagagcagagcaaatgctcctcttaatccctttggatcctggactggctctgtggtctattccatggtcacttgaggtcaaggccacagaccttttgagtcag

SEQ ID NO: 129987 - DNA, 1013 bp, Homo sapiens
tggctgactagagaaacttgggcaccttccttattactccttccccacttggttctcaagcttccttagtggttcccaagtcttggtacctgctaactggtgattctaccctatgttattggtctgggcctatggatataataagatgcagttggagtttacttggcactgaagttagctacagctactgcttatgctctatgtcaagctcttactactgagaaagatacaagcacagaggcttctattccaatttttatgatacagcatcctcaccctgcaggaccctagctgcagcttgatctgtccagctgtccattgtgatggtaaaattacaacatcacggtgcatgtgccactgctcctgggactgtagcctggctgcgtcacaccatgaatctttctcactagccacatgttttgtgaatgtgacactctcatgaagactcttggaggtcacctagagcaatgttttatgatctgaccttttccacccatatggctgagaaaggagccatgtgatatttccaacatggccactttcttgacctaagaaaagagtgatatcagaagcatacagctcatggcagcacatcatggatgaaacaggtacataaaaggtgccattacagaaaaggagtttggcattaattttaagtcagtgtataagtgatgtattcttaactgtctactgcccaaatcattatttaaaactgctacctcgggcttgagagtacacgtatccttctttctactacttctttgcttttctcttcatcgtaaagccatgaaagtgactattctataattaatctcttctacaaactgccaggcataatcaaattctgtaaacacttttgtctaaacaagatgtgttgtgatgcttatggaagaatatttgggaaattatttctttgaagatctgtagaatagagtagattggggaaacttttgtccaaaaaggtagatacagccattattggaggcaaagaaataaactgagcagctttcagt

SEQ ID NO: 129988 - DNA, 1093 bp, Homo sapiens
tgctcccggcctataatttcttatatttaacatcacaacccactctgatcttcaagaagatatattagaaatttctgagtaatcaaaataaagacaatcataactaaaacaggacagtaacagttcactctgctaacagtgaacacgctacagtttattgctgcaagacaccatgtccaaatactacctatgtgaataatctccctattgaggcttgtaacgtgtttgttttgtcaccattctcacttggaaacttttaaattactaccatgtactttcagtcatgccataccattgatactagagattcaacagcttacatgaaatctgcctatgcaatggaagttcttgcagaactgccaaagctctagttttcatgttacttgcttattttgtggtttagatttgcttttatttttattttatttatttttacaaaagtttattcttaaatgtgcggcaggctctaagatgacacttcattctaactataggtggcaaaggatgttacagcaggaaattcagatgtttaaatagggatggaattcagggtcaccatggcctccggcacaagaaacagcttgctttttaccagatttcttaattccacctttgcccaggggccccttccctgcagcctctgcttttagtttcttgagtttcttctgttcctctttctgcttctgcttgaaaatgttatctcctcgttcatctcctcagcctgcttcttgggctgtttggggggcttcttgccagcttcgtggccagacatggtgcctgcacccctctcccaccagttttacccttaagttagtgtccatgtttgtatgtggaaaatgatgtataaggatggaattccatctcaatttgtctccatctgcacaaacatagatggtggcatagtcttgacatccaactccacaactattaatgttcccctgatttttataagttctgtgtttcccacatccaaactctttctgctccctttgctctcctcctgcttgcctttcttcctggctttgccacagtagcacaagacagctgatccacaggtttctggcagatgccgtagcgccgactccagggcaat

SEQ ID NO: 129989 - DNA, 1019 bp, Homo sapiens
agaggggagatttgttttttttaaatcaaaatgaggaaaggcacatctgaagaagagacaaatatgtacatttttctgaaggtaactattacacatattcactttttttttgaattgtggaattgttcatgagtatgtaaacatagagagagtaatatgaaccctgggtgtctatctatcagctttgacaattgtcaacagctctgtttcccttcttgttttatgtctgcttttaaacttctaaaaaatattttaaaaatttataccacaaagtcatcagtcattccatagactgagagagagacacagtttaggcagtttaggcagggtgtaaaaggataccagaagtgctgccatacttcattctcatatgaataagtcattatgggaggacaggaaagcatgctacaagacgggagaaagagacccactgcggaagaaacttgtatcaccaataaaatgtgcatctgacttttggacagggatagattcctcagctcagcttctactttgctatgagtatctcgaaaagcaaatcgtcctacagattgtaaaaggttgctaatcagtgaaatacgttacagggaattttcacattgattatgaatggaaattattttgtgtctgagagaatatgtacaattttaccttgtctgataaggtgaattataaaatgttttacataagaaataaaccaatttcattataagtaacattttaaaccattcttagtacttactaatttgtgttcttcttacaggatataagtatccagtatatggtgtccagtggcatccagagaaagcaccttatgagtggaagaatttggatggcatttcccatgcacctaatgctgtgaaaaccgcattttatttagcagagttttttgttaatgaaggtaatatgagggtacataattttgttattctggggtagttttgaagaaaattgcccttatctgaacttttgcctacccttttgctctataaatgttttgtaagttctataggtttaacttt

SEQ ID NO: 129990 - DNA, 1049 bp, Homo sapiens
attgaaatggtaatcaagagcctctcaacacagaaaagcccaagaccagctggcttcactggtgaattctaccaaacatctaaagcagaattgataccagtccttctcaaactcatccaaaaaattgaagacagtacaattccaagaatgaaccccagtgtaaactaggtcttgggcaattatgatgtgtcagtgtatttttatcaactgttacagtgtaccacccaagatgttaatggaggaagctatacatgttttggggcaggggttataaaggaaatacttaaccttctcttaattttgctgtgaacctgaaattactctaaaaaataaagtctttaaaaaaataaaacaaaatgcctaaaggcaggtagaccagtttagaggtagttgcagtagtctaggtgtgaagtgttgagggcttggcttacactggtggtgtgggaatgataggtaagtgttgtttaaaaaaatcaccagtacatgatgactaataaaagggcacagggaggaagaaatatataaggatgatggaagttttgaaatcatgggagttttgaaagtggatgactttgcagaatattggtatttatgagagatgctgagaacacgactgtcagcatacaggtttatttccaaattgggttctcagagttcacttaaggtatattggaatcatgtgatcttgtagaaacagtgtaatacatatggggtgagttcatagactagcctgtgaaggattacctgatgcaaaataagactggatcatgatgatgttaggttcatttctgaattttggatgctgggagtcaacttctgtggtttagaagtgaaaaggaagagatgggagacctgggaagcattctgaaatagatgcagaaatttgtctttggtttccttctgccttctttctgccccttctgtctcaggcgcttggtgctctcaggttgtcataaatgcccaatgtgggactagtggaaaagagaatgtcctgcttcctcagaggtagcatacaggagcccatggactgctgcttttggtttaaaaac

SEQ ID NO: 129991 - DNA, 1081 bp, Homo sapiens
gcgcctgtagtcccagctacttgggaggctgaggcaggagaatggcgtgaacccgggaggcggagcttgcagtgagccgagatcccgccactgcactccagcctgggtgacagagcgagactccgtctcaaaaaaaaaaaaaaaaaaaaaaaaaaaaactggaccctgcctgttttctaaaaaacactttaaagtattttaaaataaaagcatactatttaaaattgtataattaaaaataataaaagaacaaaatcacttaaaaagaataaacagtgtcaataacaaaaaacctctggcttacccaacttttgtttctagaagatttatatcaatcaccagttccacttcatttatttttgtttatttcaaacactttcttatgactctgtggaggagtgattagtttagtacccaaataaaggataacattttaaaatgtcctttaaattagatttttttggtgataggttccatagtaaatagaattaagataagtcagttaatctaggcatattttatgatggaactttgaagtgtttataaatgaaacaattcactgaagaacattaaaagaaaattgaaatgaatggtcaaattaataaagtgtcaaagcaaataattgtctaattgtctatattactttagtgattatgccagaagtgccttttaaaaggttaactgtattatgtgctcattgtgttactcaactgcacgtaatttatttgttttaatattgtttgaaagaaaataaacatctttcacataaaccatagtgtacaagttattttttaattttaaaatgtaaatatgaggcattctttttcaaaaactgcttttccttacagaaaaaaaaatcttagcacatctatttgtccatcactccagtgtcagttttttcttcataagtttaatgacaggctggtattccagctgcttagttcaacaccgtatttctctaatgtctttcgctgtacataaaggggaccacaaactaattactaagccatggatagtcaagaagttaaaagttttaagcaaaaaatgccatagtttgccacttaatcagataattttattt

SEQ ID NO: 129992 - DNA, 1036 bp, Homo sapiens
caatcctcctgcctcagcccaccaagtatctgggactacagtcctgcaccaccacgcccagctaatttttgtattttttttgtaccagccatgttgcccaggctggtgttgaactcctgagctcaagtaatccacctgccttggcctctcaaagtgttgggattacaggcatgagccactgcacccggctgtctcttaactttatactaactaacagtatccatcgactgtaccatataaattgtttctcatagatttaattgtgtgctcagatatatgcttctacttaatatgaattagtaccagctagtacatttttatcgtgtatagaatagtcccaaggtattagtttggtaagaatcacttgcacataagggaatagaatttataaaataactttatttaatctttaaaaatttacttatgaaagaggaaaataactttttataaattttatgcagttataagaatgcaaatccaagaaacagtaaggttattagatccacagtaatacaacctaaacataagtaaaattattagattcataaccagaggaataaaggatgtggtatctatttatacactccattttagaagttattagaataccttgttttatgaggttgattttccactggaaatgcatctaatgcggtttccttctaaagtgttttggctatttcagattcacatgcatgggaacaactacaaacaaagcttgcttcagcatttcccagacattcttcctctggaatatggtggtgaagaattctccatggaggacatttgtcaggaatggacaaattttataatgaagtctgaagattatctcagcagcatttctgagagcattcaatgagaagttatgtcatgtgaatggcttcctaactaaaaatacatgagtgatatccaacctggttaaatgaatgaaagaaaaggagcaaatcttttaaactaatgcttgcctgaactttaaaaatgtagaaatcttctgacatgagcaacacaggtgtttggaaagattttttacttttta

SEQ ID NO: 129993 - DNA, 5066 bp, Homo sapiens
ccacggctttgggcagccgccgaaggctcctgctaggcccggctggctcaccgggaagttccctgcctccgtcccgtcagcctccaggagggcgccgccggccgccgtgacttcagcaaggcactactatctccgtcagccgccgcctcggccatcttcctgcccggagtgcaacaaaatccggctctggccagccttccagctgacgccactctgccagggccctgcagcctcggagcgggatagaaggaagccgcagaaaagacgctgaaagttggcgctcgctgacgccccgacgcgctccctccatgacgcatgcgcccaccggccgtgagcgcgggtccggtctccggtgacgtggcggtgaggaggcggagccaagatcagcggcgggagggtgggggaggaagagcgaggtgagcgcggacgtcagagtggagagcggaaggtcagggaggctcggagcggaagtgagactagggagtctgtccgccattgtggacccgagaagcagagagcgagagggggaagaggagcgtgcaagcggaaaagacgggcctcttcctccgactcccgagcgcgaggccctcattttgggttctcagcgaacggcggcagcggcggcggctggaacaatcactcggccaagggcgacagccaactgctgtgagtgcacggggagaggcccaggcagcggcggcggcggcggctctcgggttgcggtgaagaatgtcagccactagcgtggatcaggtgagggagcagaggccccaggcttggcgaaggcccgagccccggagctccaccctcgcgcggggcttcggctcctccccgtcgccgccgctgccggccccataacggtgccccgggcgcaagttgctgcggtgtagctacccgggccggggcgtgcgccctggccccgtagcttgcgggcgggcgggcgcggtgccgcggcgggtgggggcaaggaccggtcttaggggccttaggacagatcctgagggcggcagacatggggcggagaccgggcgagctctgggagacggattccgagtggcgggtgggaggtttaaaggctgggggtggttgggaaattggtggctgtggaggatatggtgggtttttactcctacgcggatagtctaaaataacttgtctttgataatgcctttgattaacacactttttcttttcttcctttttctcctctttaccgcatctttcgtcttgcaacacagagacctaaagggcaaggaaataaaggtgagtttggatttttttttttcttattgctcaatgttgccttaatgttacttttaaactctgtgagggtattttgtttgtttttgctccctcttgggaaaaaatgtaggattagggaaaatattcatcatggctaaggtagccaagttctatccagaacttcggtagttcgttgctttgaagccactttatagaaaccaaagtagtacgagaaacagtttccttgtcagttaagcaggtattggtgtgaacctggtggtatttctttggttttccagtttttctgtgttatgtaacttatgccacaaaaaatttctacatgtgtatatagacaagtatattcttaaagtggacattttgtttgacatgtctggattacactggaaaatggaagtctacatagtattccatcacattaatgaaaattgtactgttaatcactgattctattgaagtcagttgtaatgaggcaacaacatgagagaggttagaactgagtaggcatgccatcttgctctattgttctgattgcaaggtgtgactctatctggtattttataaagggctgagaagaaaatagtttgtgacattttttccaggattttataattttctctttagtaaaagtaccattgaaagtaaagtgtttttttaaaaagtgtgttttgtattaatatggaacagtgcagtcagctgactgaaacattatgacattagtcatgtgacatttagttaagtatagaacaataactgctttcttgggatagtgccaattaaataacatcagagcaaattatatataacattttgtagtgcttgaaattacactaaaattatgctttctgttgatttcagtaacacagtgttagaaattaagatctataatagccttttagatatagattgtctttggtgccctttaaattcttgttagggtatttatttgctattgcaaatttggtgaatttaataggttttggatatgtagattagtttcctctgaattatggaatttgtacataccagttacatggcaccatattaggtaacattttgtttgttttcattaaagatgttttcttgcagtatgtaaatatttagacattttaatttttaaaatttcatttctagaattttttttgttgtaagcataaacctgaaataaaaattggatattgatttattttaaatgagtttttaaaaatttgtgaattttaaaaagaatgatccattaatttcttcttttgctagtctacccattaggaactatgtagacttggagattgtgaaattgtggtcattattgcctagcataaattattttatcctagatctgtggggaggtggcactttgcaaagctatttgaaatgctaagtgttttatgttacccgctttaaggtaagtacacaagttctatgaggtacttgtttgttaaaacaaaatagagcctctacagcactgtaagtcagtaaaataagtttgatttatgagtggtcatttcacttaggtaggcactggtggcatctttgatattagatatgagttgagttatctataaactgcataatacatccactgtttgcaaataagtattttttggttatttcaaaaatttttatccatcagtatcgcttctgttagttgtattcagacacatacacaaagtgtttattttgatagttctttattctcaagaaattttctttctttcccccttgttgttcagtttaataatttcatctaaggttagaataatggattgggattccttggagtcctgagttctaatactgcctttggctactgacttgccaagtgagcttgaaaacattttacctgtctgtcagaatctcccctctataaaataaaaataactctagtcataattcccataattcctatagtatgttgttaggattcttgtaattacagtagttcactgctctagtagcaattatatttgctggatttcttttcactttcctcacttaatctatttttaaggtgcaggaagactcctttgcatggagccttggcaggaggggaaaaatgctactggcctgaaagtattgctaattatttaagtttcttaaaaatggcagatgctacaagtgcacaaataacaaatatacgttacttgtatttttatgactgcagggagaattacaaggcaaaggcaacactaccagtgaacctgatataagtagctatgtgtgtatttgagaaaagcttttctgccttagcttgttcccagctcgtaaaattgttttacaattctgtttactttcatgaagttatttttcttgaactgcaacctcagtattctaaatatgagtaatcttgaattctgaacttagcaagcttatgaaaaatagtatgtccttgagaagttggtgtcagttaaagttttgaacacgtaatccttttcagtcaacttactataatttcagagatcctgtttcttttctgaattgtctttagttgacagctttagcctaacacctagttttagtgtctttgattttctatatatccttaattacttaattcattacagaagccaaaaggaattctaaataattgtctttgatatggcaaaaatgttttttgtagaataagtaataattcaaggtttacttgttttataagtttgaattcttttttaattaagtctgtccctgtgttaaatatcagaactctttattatccttggcaagagtagtaccaaaggatagtagaaatttaaggataattatttgcctattggttcataatttaacacttcgtattttatttttttattaagtagaatttttgcttattggaataaaggtgtgcagtacttttatttgggagtactatggttggaagtgtcagatgccatacttacagtcttaggccttactgcctcctttctcctctaagtttataaatagcaaattcatggaacaggatttatctttttcctcctctccgctctcttccaacggagagacgtatgcattgttttatacaactgtaatttaaaataattaggttaaatttggctaagttttaattttcgaaaagtagtggaaaatgccttatattttggcaatattctgttgtattctctcctcgtcctcccgagaaatgatttcaaagcactttactatcattattttaggcttcattttatcaatcctcacaacatccttgtaaggagatagcgggtatatggtattgtcgctgtttttgtaggtggggaaacatgatgcacagatctgttgactttcctaacttgatgtagtcaggaccagagcaaagaatcacctggctcctaaggcccatgttctatcttgatttgactctgtttcatagagcagaggaaacaggcgaagaatcatgtaagtcatctgttctttttacccctgaagaaattttacagactatggaactagcttggatttcatttctatttaatggttttcagactccaagacattagcttgtcattaagtaaatattcaaaaacgaaagtctttaagatagttttctttaagatacacttccaaaacttaagggctagtttaatgcaaattgcttctcggtatatgtgaagtacttttaattaaacattttttaaagtagattgactttttgtactatattttaagactttatagacatttatgcatcatttaaaaatgaccgtagactgtatttataatagtatatgggttgttctcaggcctagcctcttagaagagaaataatagaacaaaaaaaataagaataacaggattatatttatatatatata

SEQ ID NO: 129994 - DNA, 2898 bp, Homo sapiens
gataaattttaagtaagtactttttcctttttttttttttaaatagaggcagagtctcactctgtaccccaggctggagtgcagtggcataatcatagctcagtgtaacctggaatgccttggctcaagtgatcctccttagactcctgagtaactaggactataggcacatgccaccactcctggctaatttctaaacatttttcgtaaaggtgggatcttgctgtgttgcccaggctggtcttgagctcctggcctggcactttttgtatttgtatgaactagattttcgagaacctagtggatatgagagatagttagtcataatttttaagttgttagctgtttcaaatactgactaacatgtatgagtgtaatagtgaagaattttttttcaagaagtaatagaccatgcatacttacctttgatttaggagcagtaaagccagtgtcagaggagaacaggtatgtcagaatctcttggactgaaatgaataacccagccttataatggcactagaagtaacctaaggcaccctctttattttggtttctagtggctattacatatttaaattccatggagcatatttagctcaatcctagttctgatgcagtccttatcagacatagttaaattatgttagtggagccaggatcaagttgaccttcaggttgcttcttgtggcctctgaggggcagtgtggtgtagtaagaagtctactttgaatgctttacacagtaacatcatatctttgatctttgccactcattggatggcaaagatttaagggattttgtatatctttgctcccaagccactgttaactcataatattacattttaggtgctctacactcatgggaaaatttaaggataataaaaatgttatattacagaggaatacgcaatttaaacccgtcaccctcctaacttcataaaatttggtgatgttgtacctttgagcagtaaatctttagatactgagttctttttgtttctaatttgtagacatccatcggaaactttcaactttatcttcactagtatagaatagtatatttacatagtgccacctcatcaagtattagcttagtaacacttctgtttaaatggttctaaagtcatattagtcctatttggatcttgtaatatttaatgtgattacatttaagattattgaacactgtcatttaataatcagatgagatgaggtaggtactattcatacataaccttctgaaacagcgaacagtcaaaggttagagagtttaaatccctaactggagatcatctcctcagtgctggacttgagattcaaattcgggaccttacttctgagtctgctcaaaagcactctgaaacagcatccagagaataacaactttagagtgtttatggagatgacctttgaacaaaattattctctgacttgtttctcatgtattgcaaggataattatggctatcttttgtgtcttaattttgtttgtagtttcatgtgaaagtcttcattctggggggcttagaattaaagccctctttatttagatatttcataattataagtctattcattgtgatattgtttcaagttaattttagcctaaactttactggagacatttaagacatttactataacaaattagatcgaaaatagttatttcattctttattatactaaataatttagagatttaaacaaaggtagagaacattcagaaatcttttttattgcctacaacgctacttgaaatagttattttacattcaaatatagcattagggaactctttccaacattcttatgtaacaatttactcactacagtgttgagattgggatatttacttaaagtttttggtaaggggaagtgtatatatggcttgtgtttatgtaatcttgggcttatgtatcaaaagacttttaagtttttgtggcacatgaatatttgtatctaaaatagtttatccttaagagggttcttaaaaataactcagtattattttttctgattactttttttggcttgaaaaatattaaaaacattaggttgtgctgcgagtttcataaagataactacaacacttctaatacaaacatttttttagtttcagtacaaaacggttcgattcatcaaaaagatgctgtaaatgatgatgattttgagccatacttaagtagccagacaaatcaggtaagtcttctgacagtttcagattttaggaaattaaccttttattagtattagttgatttttcaaatagattatttaatgagattaaccataacatggattcattcatctagtgtacctatatagtaagtgagtagtgagtagcagttgcagatttatggcacaggagagttcttcttcagaaagtataggcaccagaaactaggttatgaaatatagaataaagatttgaaggtgaccattatttgtatatattatggttaggttttttgtgtgtgtgtattgaaggaacttaatcttttaatgtcactgctatatcttcatagcttaagctaattataaaaggcttaattagctagaaatttgggtatttggaggagggattagttacctgaaattgcctgcaattttgggtcaaatgtagtgttttctttttttaagacattgcagattgaattcattgataactattgaaaattttaacataccttggtaatgtcggtgatagaattaaggagtttataaacatacttgctttataaacacagttacttctgtattgtagacatggacagttttatcaaatcaagtaattggtaactggtggctttgagtatttgtgtacaagcgtaattccaatttaaacattgaagaacaatgctattaggtatctgtatgccatttctgcatccatttct

SEQ ID NO: 129995 - DNA, 1060 bp, Homo sapiens
caggcacatgccaccacgcctggctactttttgtattttttagtagaggtagagtttcaccatgttggccaggctggtcttgaactcctgacctcaagtaatctgcctgcctcagcctcccaaagtgctgggattacaagcatgagccaccgtgcccagcctaaaattcagattttaattggcacgttaaagatgccagttagtttgtgtgtgtaaatttgaagagtaaattggaaaactgaatgaagtttgacttgtctgcttgcatatatggagaaaatgaaaaacgtactctaaaattttaacctagatttttgaaactctgaaagaacaaggaaccaaatcttactacagaactgaacagtttgtacagtagagttatagggaaaatttgaacaaaaagtagttcccaatttgtgggatgcaggattatttttaggattatggagagtggtggttgtgttcaacctcatctacctcttggttacttccccttaaccaccccttcctatctactgagcaacattcctagcatacatgggaggagaagaaataaatgggaaagaaaaaaactttacgatctcagcaaaattacttttccacgtaaagattatgaaagtagatcatttgttgtgaaatgtagtgcaagttttaaaataagcgtgattttactatattctggctcacatagtaatctcagttaacgcttatggcagtatggcagtattttccaactttgctgagaaatcttaatattaggaggtgtaataaatattccttcaaaaagatgtccatgtttagatagatttgagaaattttggaggctaaacagttgaactgttttttttgctacttgatttcatagtttataaattataattgaaaatgaagttcttaagatgaagatatagtataaaaaatcctgacttgttcaaactcttattttttttttttttttgaaacggagtctcgctctgttgcctaggctggagtgcagtggcataatcttggctcactgcaacctctgtcgcccaggttcaagaaattttcctgcctcagc

SEQ ID NO: 129996 - DNA, 1043 bp, Homo sapiens
gtcttaaaatcccaagtctgattgtgtcactgtaatgttaagtaattactatagcttctcaacagtggatgcatttattatatgaatgcccttaaagtggttccacttccttttctagctcatcttctgccaactttctccatctgattggcaaaatagaacttaccattattttatgaaagtataaatattttcttaatatttctttcacgatctcaatttttgtatgtatgttttatacagacgtgtacacacacctatggcatttcctacagaaagtcttttctgattttccagttacttactccctcttctttgtacttaagtgttttgttttgctttctttgtaattcatttagagtagctatcacattatagggtaaataagtcttcctcacgatacctgtgaagtgctcccagttggagaccacgttctttattttttgtctccagtaaccagcacagtatctggcacatatagcattcatgtttattaagtgaatggatggattaggttatctaatagaattagagaatgaagaattacggttggtgaaatactcaggttgaatattattatgacatttttcttatgacatgattagatatgcataaattatacttttagaaaattataataggagaaagtacatagcataatacaagcattaaaattagaatgaacatcacttttggttgttaaatcggaagtcatgtcaggagtttgaagcacttcaatttttgtgtgtgtggttttttttaaattttttttttaagagggttttattctgtagcccatgctggagtgcagtagtgtgatcatagttcactgcagcctcgaactcctgggcccaagcgatcctcccacctcacctcccaagtagctgagtctacaggcgtgcaccaccatgcctggctaatttttttttttttttttttttttttaatgagatagtctcttgtgcaggctggtcttgaactcctggactcaattgatccaccttttccagcctcctgagtagctgggattacaagcacaagcc

SEQ ID NO: 129997 - DNA, 2700 bp, Homo sapiens
aactatgataaggaatttgttttatgtctttttttgaaatgaacaaggcaaagcaaaacaaaaagaaatttgcatcatgctataaacgtaatcttgaatcttctcaagactgtgagcatttctccattttttccttaatgaaagtacaaaatctaatggttgaactggattccatcatatagataagctgtaattcctctattattcggcagagttgtctagtttatttaatccttgtgtgtaagtgattgcatacatcaattgattaaagtacagctggctgtaaatggtaattttgtgtccacaaagtttatatattagccttttgtagaaattatgatatttttaaattgtgacagagggcctggctcttcaaacaaaaataatactcattatacccccactctcatccctgaaaaaagccatataggttagtttgtaagaaatattttaagatgtgactactcatcagcaaatttttctgttgataaaactggatttgaaattttaattttgtttatctagaataggtacatcttttattttcatttacttaaaacttcttgattttaatctttcagatttctttttttgctcttttaagaggacatttcgctactgattgtgatattttgttttgcagagtaacagctatccaccaatgtcaatccatacatgcctagttactatgctccatccattggatttccatattctcttggggaagcagcgtggtccacagctggagaccagcctatgccatatctgacaacctatggacaaatgagtaatggagaacatcactatataccagatggtgtatttagtcaacctggggcattaggaaatacccctccatttcttggtcaacatggatttaacttttttcctggtaatgctgatttctctacatgggggacaagtggatctcagggacaatcaacacaaagttctgcttatagtagcagttatggctatccacctagttctcttgggagagctattactgatggacaggctggatttggcaatgatactttgagtaaggtgcctggcattagcagtattgagcaaggcatgactggactgaaaattggtggtgacctgacagctgcagtgacaaaaactgtaggtacagctttgagcagcagtggtatgactagcattgcaaccaatagtgtgcccccagttagcagtgcagcacctaaaccaacctcctgggctgccattgccagaaagcctgccaaacctcaaccgaaacttaaacccaagggcaatgtgggaattgggggttctgctgtaccaccacctcctataaaacacaacatgaatattggaacttgggatgaaaaagggtcagtggtaaaggctccaccaacccaaccagttctgcctcctcaaactataatccagcagcctcagccattaattcaaccaccaccattggtgcaaagccaactgcctcaacagcagcctcaaccaccacaaccacagcagcaacaaggacctcagccacaggcccagcctcaccaagtgcagcctcaacagcagcagctgcagaatcgctgggtagctcctcgtaacaggggagcaggcttcaaccagaacaatggagcgggcagtgaaaactttggtttaggtgttgtacctgtcagtgcttcaccttctagtgtagaagtgcatcccgtgctggaaaagctaaaggccataaacaactataatcccaaagactttgattggaatctgaagaatggacgtgtgtttataattaaaagctactctgaggatgacatacatcgttccattaaatactctatctggtgtagtactgagcatggtaataagcgtttggatgcagcttaccgttccctgaatgggaaaggcccactctatttactcttcagtgtgaatggcagtggacatttttgtggagtggctgaaatgaagtctgttgtggactataatgcgtatgctggtgtctggtctcaggataagtggaagggcaaatttgaagttaaatggatctttgtcaaagatgttcccaataaccaattacggcatattcgcttagaaaataatgacaacaaaccggttaccaattcaagggacactcaagaggtacccctagaaaaagctaagcaagtgcttaaaataattgctactttcaagcataccacctcaatctttgatgactttgcacattatgaaaagcgtcaagaagaggaggaagccatgcgtagggtaagaatatagtaattttttgtttggggtctttgtattgctggtggggtgcatggatgggtatattctgagtttaagaactttctgtgaaggaaaccaactacttaagaaacaactctacaaacacccttgaaggtatctatgtgtgtcctatatgaaccatttcttctttcctttcccagggtaactcacgctgagttagcctcttgctcattcttcatactccctagatgataaaggccattgggcctcagtgtttatcatcaaagctgaatgaattttggcatttgtaactaaacagacttcatgaactaaccaggggctctaatcattaatattattaatcatactaacataggagaaaatatatttagagtttgaaacaactttttttttgagatgacatcttgctgtgttgcccaggctggagtgcagtggctattcacaggtgcagttatg

SEQ ID NO: 129998 - DNA, 1897 bp, Homo sapiens
ttctcttgcctcagcctcccgagtagctgggattacaggcacacgccaccatgcctgccaaatttttgtatttttaatagagacgagtttcaccatgttggccaggctggtcttgaactgctgacctcgtgatccgtgcgcctcggcctcccaaagtgctgggattacaggcatgagccactgtgcctggcaaaatatgtttttaaaacataaaactcttgaagtatttttataatttttatacttaaagcacttgtacaaaatagaggctttgcagaatttgattcctaattctgttatataccctctgtaagattgagggagacattcctgaaataaaacatgctgtttatccttgtattatattggccagaatatttttatttttattttttaaaaatatcctattgagtggcccatatggggattagccccccaaatattggctagactttgatcacagggccacaagagtcagttcaactagggaaagttttctcttccaaactgtaacgtaaaattggggtcctatttttaggtggaaagagaaaatggatgggcttttctataggggatacatttaaatttcttttgaaacttagtaggggtaaagttagaagctcctccagtaaataatgcttgttactatggaaagcatgttcttatggaatgcttgttcctatgtagaaattaagataaagaggtaacttaactctatgtaaaatcagtgattgtttctgtgtgtgaagctgaatatcttgtctttgtggttgtgtgcagcacagggaagtgcttcaacattcctcagagggaaggtgttggaataatgaccctagagcagtagtttccaaaccttaagtcacataagtgttaattggggtgtttattgaaattgcagattctcgagacccatcccttggtatatttgataaaggaacttgcagtgtactttttaagtataaacattccaggtgattctggtgctagttattgattgctgtgttggattgttggaaactttgctttggagtaattaatacaaatgactttaaggctctgctgaaccttttagatgggttgctgaatataattgtgttttctcccacttaaatatgagaaatgagagaaatgggatcaaaagtagctactgagtctttcagtttagcagttaagtaaagtggtcatattgtaactgccattacaagtagcgcatcaggagaaatgatttgaggtatgaaaggtgggatgcaagttaagacttcatttttagattgtgctgattttaagatacctttgagaaatataggcagcaaaatctctgattaggcagttagatgtccgagtcacagatttggggaccttttgttcttaaacagttaatagcatggaagtgggatgagattacttaggacaaaggatacatggcaaggaaataccaacttttctttcgcccaccactgaggagataatcacccttctgtgtctttttttttttctaccaaacttgaaaatttaatcctggttttgttataatgtatttggtatgttaatattatgtagttgtttcaggaaatttttaatgacaggtatatattgtagctgtattattatatatattgtagccatatacacaacagtgatttaaactttaatattacccttatattgtttcattgttttgttaaataaagtttatcctaaagccgcctccttacatattttaagtccagcctaaaggtttttctgtacatggcgaactataacaagtggaggtataaacagaccgcagcctactcttgtgccagtgaccaaattttggctgaatcaaatgtagccaactgttcaaataaggcaaataccaacctgtaatcaatccagctgtttatctcacttccgt

SEQ ID NO: 129999 - DNA, 2922 bp, Homo sapiens
gaaaagttatctatcgtgtgctgaaagagagagtgtaagatactctctttgtgatttaaagttttttttattagtctgaaatcttcattgaatgcaattgtactgcaatttaatgtaacttttaacctttttctcctgcccctacctcagccaatagcttttagtctgtttgacacctcaagatgaaaaactctttgaaaggactgaaaagatgttattatattctcatcataaacaaacaatagggatgtggagaggatctatactctcctgaaataggtctttgtgtttgagagttctttatgtaaaatgttttgtggtaataatctcactatggtatatagaggtaattatcaattgtttttaattacttgaattagtacttgaactttatatggagatgatttacattatatgtgcatatagtttaaatctttaaataatgagagtttttcattgtaattctttttgtgtgtgtgtgttttttttttttcaggagagaaatagaaacaaacaataaccgtatgaagatgtcctgttaaatttacaacactaacgatgtagactctggaaatgcctaataagtcaaagaagacgtattaaagctcttttctgcttaaggtgacatctttgaacactttaacacaaagttgactcttctcgtaatggttttcatcagcgcatctgcccttatactcttcaccaaacacacttgagaactgtaacttcgtcaagcactttctgtcctgaagcttttaccagtatctgctgtcttttgtaattatgcatcctagctaaggcacagaagactgaatgaatgcaaggattcattaactctttgaatttgttaaatactaacagttaaccattagaagtggttcaatgatgtaagagtcacactgcttcaactttttctttgttgtagtttttaaattgtcgatttttagctatttgacagattaaaagcaaaataatcatgccatatttagtcctggagttcaagtctaaatgttgatgtgaaaaattattgtagtaaacttttaatatggcaaagcaaccttaagctctattttagccaaatgaaacataatctgaaattatattagaacatttcccttgtcttcaaactgtttggtgtaacagaatattgatatgcagcttggtggatttcaccagttaatgcacattcttcttccctcctccccccattaatatgtatactgaaaaatgtgcatttgtctgaggaattattttgtttgctaccacttaatgaatctcaaaattttgagtaaatgtacctcagtctaatcagactttttatgacctttataactacatttaaaacccttaattcctatttctgggtgtttgcgagcctgattgctatcatgaagtaaaaatttattactctaggtattcactagctaaataaacatagttcttgtttagcaagcatatgttgttcctcagctcttttctccagcttttgcagtgtcctggcatccttaaaatactttgaaaatatggccttgatccatggattaaatcagtatctaagtgaatgtgttgatgttttattgatcagatctatataagtgggaatacagcatatatctggatattcttatagttatctttttaacatcttatttttttcattaattacatatcaacattaattttgtatcttgaagcaaattgattttgtataattaaatgtgtcaagcatctgtattaattgatttgatggcataaggttatgaaaataatgtactgccccatgtattactgttccaaaaggagaaagctatgtagaaagatacattaagggtgaaaatagcaatacagtagatttgaataccttgatgttttgcattacttcatttatgtttacatcatgtttagaaatgttttcatttactgtggtctttggtcacttcagctcaaagacctagtgatggatatttctttgaggctttcatttatataattttattttgtacaatgttttttttaaatgtgcaaatactgtattcaagtgaaaaaaatacagtatttgtagataaccatagctactacacagttcttcggtagtcccagtgtagttatatcagtgtttactgaagggaacatcaaaatattaatggtatattataaaataaagactttcttaaaggaaaattgcacctattttacctttttaagagtaagccatgaaatcttgtaacatgtctcttaactatttataatgaaaagtggcatttgggtatagtcaccacagcaatgttctacatccctaagattatctaggtaggacatgtcaaagatgactgttgtcattctggaggtcctattagagaatattataaaagggtgaccttgtaggaaggatctgagtcctccccctgaggttctctttttcttggtgctttattagcaactctggatatttttataaaactagttacattataaacggtttcaaacatgtttaatttacattaggtttttatgtaagagtgtcatggaagcactcagcaagcaggctgattgcaatagactcagacatgcgaataaatgtaattgagagtctattcatggtgaggagtacatcccagtgcctttaacctggatttctaatcttaagtgaaatgggtgcagcattcctttggaaaaaaaaatctttttattttcaagtgataattttgtgtttttctcatataagttttctccagagcacccaccttctcttccttcttggtctgtcattatattgcaaaatatttttcctctgaatgaaattatcacaggttgtctcaagcacaaccaactgaatgtctcttaactgtggggaccaaaagggagagagcctggggtctacaagaggagacacatcatcaaatgtttgaatgatcacaaatt

SEQ ID NO: 130000 - DNA, 1478 bp, Homo sapiens
tccaagttctggcttgaatatttcttattaaagctatcttatgtgggtattttattttgaaaggtattatagtttgtatatttaacagtaaggaggaaactgtaaccaaaattagtatttctctatacgtattggtacttgaagattcctttcaaaagaaatccagcgttttcctaattttagtacttaatttctctttttaatttaagtgatctttctaattcgaaagctgtgttctttttgaataccgtgcatgggggttaagctgatgttaaaacagtttgcaataaaaaaaaatgaatcagcttaagtcatttaatcatttcaagtgcattctgcatcctttaaaaataagtttaagaaatttaagagaattgtgttttcattaagttttgcatatcttttgttatgccatgtaaattccctttttcgtatgattaaaggaaggttatgataaaatgattagttcatttacattcacttgtagcaattacatgagaatttgaattttgtcgtgtttgggtttgttcattcctgtgaatgatggtacagttaggtgagattttctgttatggtacccaaactcaccatttggtcctctttaatctttgagggtttcaataaaaattgttcactcatatctgtgttctttccattttatcttcatgaatatgtattgcttgccagaaaacgtaacatttttgcctactctgttatggatttcctgattgacatatctttcacgtacaaatagattatatcactccttctggttgactttaaattaaacagagcagttaatcagagggagggtaacagtttaccttattttttatccattccaaggagcttattgacttacatgcttttaatactaagtttagaacaaaagagaaagagaaggcctgtttgttttttgtagcaggaggaaatagtggcagcagctaataatcctaatcccccactcttggtaccaaggaatgtttttctgacattgtctgcattacctcttgggattgatagtttatgtggataggatcatggcaactctgggtgatgcactgattattgctgggctctctatctaaggtatttgttcagataggaaaattacagaattgttttgtgttgtcaaaaccagcaggctacatataacactactggcctgtgacgcgggcacaagcttaaagaatcactccaggtgcctacactgcagcagcatcagaatcctcccttttactactggtcatctagagagagcaagggtgtatggctcatcagcatattaaaattgaggctagtcagtcatagttggggcctaatttggcttggctttatgttgcttagtgatactggatttactgattctagtctatgaaccaacatattcttgcagtcagaagttaactgaccaaagttgttatctttactttctaatcacagtacttgccattgcataatcttgatgtattctttcc

SEQ ID NO: 130001 - DNA, 1095 bp, Homo sapiens
tgtaatataatggccaagaccttgaattttagagactaattgatctatcctggaatcctaggttcacttcttaactaactctaagcctcaattttctggtcaattaaaaaatatgaaagaatgataacagaacctatttcagaaaggttaaatgaggtaattatcaagtgtttagtacaatgcctggacccatttcaagccctcaaaagttagttgttaactaccttcttttgtttctttgggagaatttagaatttattgattgccattgaagattttttaggattcagtgacagccatgccttttccaagtaaaatatagcaatatagagcttatcctgctagagcagatgacagaaccaaaggtggattggattaaaaggaaagcaaacatgggggaataatggtaagaaaacatataaacaatagaataaaattaaagaaaccaaaggtaaaaattagatgaagatgtattttgatttgcttattacaaatgccccttgatatttagtgtcatttaaatatataagtaaattgtaagtacttcattatgtctggtatcattacagaatggaaacactaatgcagatgtgttacttccatatttcctcagtgaagttgtgtaactttaaagggaagaggtatttggtatacacaaacttagatggcaattctattgtagtaaatattcaaaaggaagattatataagtttacacatgaaatatgaaagctccaacataatgctgttgcatgctaatattaaagctactatccccaacaaatatattgtttgctattactactttgccagattaagtgacttggtgtccgctggaaagcagccagtgctgagagtacaattggtacttgtatctcagctattttctagtttgctcgtgtttgtatgccttcctagagtcatttgtgcttctttctgaacttgttgattccagtcgtacttgttttgttatgaaatttaaatatgtaagttgataaaatgtgacggaaaaagaattgtttctaagaagactaagttgactgctttggaaatacctggtaagggtgagttgtctgattaggtagatgaaaacgat

SEQ ID NO: 130002 - DNA, 2771 bp, Homo sapiens
tctaacagtaacgggtactattattgagaatggagattgtttactccattcttttttttttttttttttcttttaatttttttgagacggagtctcgctctgtcgcccaggctggagtgcagtggcgcgatctcggctcactgcaagctctgcctcccgggttcaggccattctcctgcctcagcctcccaagtagctgagactacaggtgcctgcaaccatgcccagctaatttttttaatttttagtagagatggggtttcaccatgttagccaggacggtctcaatctcctgaccttgtgatctgcccttctcagcctcccaaagtgctgggattacaggcatgagccatcatgcccggccttgtttactccattcttaaagccatggttctttattgaataaacacagtaatgcttcttattctgagtttttcctgtgacatgacttcattctctagacttctgtatcaaattgtacctgtactatggtctcattcaccccaagccagctctcagctagttgtttggatgaacaatcctgattatggcttaatgctaaagcctgctgacatgtttctaagaacccactaatggcttacctgaaggtgaatgcaatggtggtatccaggcatcatattaggaagagcacagttatagaaaatgcagagtggagctttggcatttttaagccagctatatgggtagtctctaattgtactatctgcccatggtttgaattttatctgtccagcatgaagcagagaggagcagtcaaattgttggtgctactgagagtatcacctgcctgcatcagagatagtggatggtcttctaattttaagtgtcaccctctcttatgaattacctctttttaaaggcactctaccatactgccttttattatgcttttattttgaaattgtaagcagcagttgccctgtatcagagttttctgaacacagatttttgaatgaatgaatcaatcaaaccatgacttttcctagagtttgatagtccttccaatcatctaattgtatgtcatttgtttagtgagatatcatcaagctgttttgcttcttgagaagcattcagatggtaagaatcgccgattgacttgattgttccacagacatataaacactgctggcagagttcatatgtctagaagatgcttctggcatctggtactgcaacagtgtgataaggtgatgcatccaggtgagtgaaatacacgtcagaaatagatcccataaaaattcagtgctgcctgtctcctttagttcctttaagccacaagtatgcttggttttagcttttctgtttatttggacactgctttttatcagcaacaggagatgtgttgttttatcttttgttttaaatgtctgttttaaaccttaacccccttttccttcctaagaatgaattaaaggtctatttttgttaatatctaaaattgttatcccaggaaatgagtcagtgaaaatacttttgcataaaatgacaatagcaaaatcttttcttaatgagatgtattgttctagcaagaggtcagatgattctcccatattacccctacaaaaacctttgccaatcaagtcaatatgccagttctaagcctggttagcaagtactttctaaagtacttctaaagtacatcttcagtaagactgttcgggctttccttgtgatgccctgcattgggaaagtatagcttatattccccttgaatctgcctgccctgtgaccatttaaccaacagaatggaatggaattgacatttgcctcagtggctcaaagctttaagatgtctggcagcttttagttttgcagttttggaaaacctgagtggccatataaaaaatctagcttcctgttggagagaccacatgacattacatggaggccaatatcgatctatcctgttgtccaaggaaaggccctgaatgacttcagtctcatcccctcctgactacaaccaagtgagaaaccagcagaatctccctgctaagctcaaactatacaagtatgagagataataaaatgattgttttcttaagtgcctacagttttgttgtggtttgttacatcgcagtagaaaccaaaaccgaaattgtttcttggaagtggagtgtggcttaatggtaaactattacatgagagtttgactttgggataggtagaagctggaagggcctcgaggacaattttagggaagcctgttaggacaggaaggaacttgtcattaggagaaaaggtgactcatgttacttatgacagaaagcttggtagaaagttggaaacatggaaaatagaaaatataactaatacacttatggtcctagctctttgcatatatccactatactcccctgaacagcttgttaagaatgggaacaatattcctattagtgaagtgaggaaatcccaactaaaggaagttaaatgtctgtccagtatcatatctggtaagttgcggagagatacttttaacacaatttggctaaaggaatttttcaggtgaaagaaaaagtaccaatggatttcttttggctgcgcatgaaaaaatagagatgaactaaagaagaaacagtttagtttttgagcagaacttgaaggaaatatttctaagcaggaagctgttagagacttggttggtgtgtctgtatgacaagaaagtgaggaaagttatgttgttggatgtgaaaggcagcaactaggccttctcatatatgattccatgcctcaagccatcacacagactattc

SEQ ID NO: 130003 - DNA, 1068 bp, Homo sapiens
atgaacagcccccaaatctcactcgtttaaaacaacaaagccagtatcttgatcatactacatcctctgtacagattggaagggaggctctgttttggtgtttgaagaagtccagcggagtgaggcttcacctagttatagatgccataattatataatatccaataatatgttagagaaagagaagactaaagattcaagtataaatttttgacccagaagttatagctatagcttccattcacattttattccctagaattagttacacggttatgcagaaaattggaatcttcatgtatctagaagttaaagagaatagacaccggtgaatagtgatgcttaccaaaatatggcttcttgccaacactatcactggtatacagtggctgactacatcatccctaagagtcctggaactcagaaatcaaatgtggctaaaataaaaccttggtccaatgctttttgtattgttttgaaagcagtgaagcatggaggacagggcttaaacagaaagtcaagaaatcttttagaataaaaatagactctctgaattgctgtgtgattttagaatatatcttttatttctgagcccaacttttctcatttgaataatgaaaggatggaattgactatccaaaaatatattccaaaattcagttatttctgataataaaagtaacattaatagcaatagaaatacaacatcgtctagcatatgtagagtaagctgctgaggaaagctcttcatttccactccacatggagagtattggttctaacactgaattctggggatcatcaatttctctcaaggtattcatgatattttgtgaataaaggactctttgggatgcctaggggagcatgcccagcatgcctaagacacatgcacatgatcctcgtcctttgaatagataataatgagacacattctgcccagcttctcacagagttccagcaggatcaagcttaaaacatcaccaattcacaaaacacccttggattttctctacccatccctgccctcactccagtttccctggaaccactcccaaaataaattgc

SEQ ID NO: 130004 - DNA, 1034 bp, Homo sapiens
agtagtagagatgggcatggtcgcacccacctgtaatcccagctactcaggaggctgaggcaggagaattgcttgaatccaggagggagaggttgcagtgagctgagattgcaccactgcactccagcctgggtgacagagtgagactctgtctcaaaaacaaacaaccaaccaaacaacaataccaatatcattactgataattagactactaaatggagtttagggtttcttggcaatttttttcttttgaaatatattccaataaatatgtataatcaaaatactttattctaaactcaattgaaagaacactcctctctctgatataaatttaggtttatttatttccattttcatggcttttttattaagttaattttatgattatgcaacacatatgtttccaaagccatttacaaaatatatatgtataattatttttaaaatgccctttttagaaataaaggttttaaattattttcctaatatatgtcatttagtggctttgatgattatgttggatttttagcttttacatgagtttatcagttagttccaaatatgtcagatcaactaactttatttgctacttcagttatggcctgatccacctgcaggtatgtctccagaccaatgacagttttaatatacaaattcttaaaggaaccaaaatatcatatagagcaaattaatgtactatagtaatataattgtcacaaaagaatcttcaaaaaagttagaacggtactttttaaagctatcaatggtacatataaagattaatttattttagaaagtaacttacctagttggaaacagatcaatgaaatgatccttaaatttcttcctgtaaggcctaaattgacattgttaatcaaggagacagagtcagctttgaaaaatcaaggaatcattatgcctaataaactgaagtaaaaattactagttgttcaacattaacttttcctaaactcaaatgtatttttataaactaatataaataatgtttatgttacaattttaactggttt

SEQ ID NO: 130005 - DNA, 1050 bp, Homo sapiens
actggtcagtaaagctcagttcttaacaactcacaggcagccttatcttaatcacagttgcagttgttggcagcttgcagtgcctggtgtaaattttatctcaaaatatttgcattcttgatggtcatttttcgacaatgcattctaataattagagtcctattacctgctaaatgttagtataaattaacaatccattatacacaataagttttataaaacatttacagatagagatcatctttaattaaaattaacttccatatgaaagccaagtgcattaatgactcacaatgaccttttattacctgcagtcccctgttttggctggatgattgacagcttgctgtttggctaccatgttgaatttcagctgacaagacttttcattttaactcaatttgcccgcctatcacaagctggtggcaggccagacccaagtcacccagctttgcctcagcagcttgctctagttctcattagtacgcatttattcagtggaaattggaagacaaatgcttgaaggcatgtgaactaagtatagcaaattaggtttaaagactgaatatttataagtatatggaaagttttttttttttttttttaattctagagcgaattgagaactgagtgctagctttggtataaaagaaattaagatagaagggggaagattctaagaataacaatactataagctttttctttccactttggaaacatgtaaaatctctctgacaacaccttatcaaataaaaacctggcttctctttcatggagtgcttgcacaaagaagtttagcacctcatgtgtgagaagggggaaaaaatgagggtcatgttcatttgttgcttggttatcccttggtatgttttaaattgccttgtttgttcggcactagcacagaaacagatgttgctctaccgtgcaggataatttactgtacctcctggtgcagcatggaagtcctcccagggcccagctggtctgtcagtggcactggctggtgtctgctcaactatgacaactacaagtagaggctgcaatttt

SEQ ID NO: 130006 - DNA, 1033 bp, Homo sapiens
tgttctagtttggaatcctgtgtcagtcacaagtcaatatgtgaccttgaacatgttattaaatctcccacatccataaaagtgaaaatgctggcattagtggatttttgccagtgttgaattagacatttatttgtgagtacctgctccatacagtatggtcatttatttgagttaaaattgttgtatttgaacaaaactcagatgacacctaagcatgaaaaagctctttatgaagtataaatactcagaaatggaatggcatgttgccaatttgttttctgctttattgagggaaatatatgagaagtatttaagtcaggggattatgagaatatttaaaggatatttaaagtgttcaggtactttagttaaaataaaaattggaagagtaaaccatctttgcaaaggttagtaagaacttcaggatatttaacttcacgtttctagagtgttttccaccatctttcaaaggaaacatgtagtgtaccttcgaatgaaatggatttgtattaaactttttgccttagttattagggtctttctaattttgattaacatattttttaatttgtggtgtttatttctgttttattaacaaacgaactcatattttctctctctttttttttttctaggaaagtacataacatttatcctggaccccttccagtaccagctagtgataaaaaatcataaacaattaagctttcgagtattttctaataaattattagagaaagcatttagcatcagtcagttgcaaaaaaatcatgacatgaatgatgagcttcacctctgctatcaatttttgcaaggcaaatctttggacatactcttggaaagcatgatgcagaatctaaaacaagtttttgaaccccagctgttaaaaaccacaagttgggacacggcagaactgtatccattctgcagctcaataatatttgagatcacatttacaactatatatggaaaagttattgtttgtgacaacaacaaatttattagtgagctaagagatgattttttaaaa

SEQ ID NO: 130007 - DNA, 1849 bp, Homo sapiens
aatgtcggttcatcagctgacaataccagttttgtctcttaattagaaaagagaataaagctgtttaggggtgtcaataaaatgacagatgcatcattagcagacggctatggtggatcagttttgtgcaaatacttggaatggaattaataggaatttctgctagcatatttaaattgaaagcttgggggaagaaagcagtgttttaatgccgtgaactagtcaaagaaaacgggagcaaatgaccatttaatactgaattaagagtgtaagagaaatcaagttgcaatagagaatatattactgagaattttatatattattaatatatcacaaatgagccattatgagtattgtatgattaattcatttaataaatatttattgagggtctactatgtgccaggtggtaaatttaattagagtatacaagtgagtccagacccaatgtcactgtcctgtataattaataggacaaaatttcacttcaaccctaagtatccgaaggggttcttcagaggttttgcattagatggtctcacagtgtataaaacccaggtcatccaatgtgattcagaggttaattccatttagtccatatattctaaatggttggcaaggttgttttagcaagtacaggcaggtgcacatgggtgtgctaacgcgtaagatggtacattgttttatctagtcatcaggaagcactttacacatgagactaaagcactttgtccaattcaataattatattcttagtgcctaaaatagcaccactctggagtaggtaccccataaatatgaatgaatggttgagaaaataattcacataaaactgaagacaagcaataggttaattggacaaatattaagtaagatatgggttgggatactaaaagacctttgttttgtttgaaatctattcatttgtttatttattctgtcgatgcttagaacacttctgctgttccttgcactctgtccggactggggagttaagaaaggaaacacacaggccctgccttcaaggagctctgagtttgtgctgagtgattttgatcctcagagacccccctgggggtgtatggtcctaggatgtagaaaagtgcagaatatcatagacctctaaggactggccttggagctatatacaaaagttggtttttgtgaatctcacaggaaaaatgtatgaacccttagtcaggacctaggtatgtgctattgtgggtatttcaagtgcatcctctaagaaacaaccacgctcccagttcttgctctcaaattccacatttcaaccacgtttgtttcagtgttgtacctgatgtacttgatccccagagtggatttttaatacttcttctatatgacagaatcatttagtgatagttaagtaataattagtaatatgtattttcttaatattttggtttttaaaattaataaagaagaaatttcaatgtatagacattactcaaaatcagtaaaataataataatagcaaaatacttaataagtaatataaaataataaaaaataaaattaataaataataaaataatgcatgaactgaaatgtgtatttaccaaacaaaaatagcacatcttgcagttttcattgttttattatttaaaaattttaaatataaataaaaattccaggggcttataaagaatgaggggattataacacaagttttctttactgttacaatcactgtgctagcatatttatttagaatctactgttgaaatgaaggacctagtagaaggactaggttaggaggaatgaattacattcaaagtgaatttacaccttttgcacagttaagaacttgtacttgaaatgaatgtag

SEQ ID NO: 130008 - DNA, 1018 bp, Homo sapiens
cacatatgtgcacacatatacatacccgcacacacacacggacgcacacatatagaaatgtatacatgtgcatgcacacatgcacacttacacaaatgtgcacacacatcccaagtgcttgacactcagttgtctcccaatagccatggccagacctgcacaatttctgcatgacagtactctgtcatgcagatcatgtctgaacgacatactctggctaggctctgcaagtgaagataatgggacttcctttggagaacagtgattgcaaatgagaccacaaggtcattgccctgagagcaaagaagcaggatgtcttaatgctgggacacttggcaaagcctagtcctgaccagcctcttcagtccatgaggagacagctttgaatgatttgactccaaatatgaaattctggaaatagaaaatggaaaagcatttttcaccctagtaaactggaacatgtggctggaagagttacatgtggctcgagaacagtttggaagaattacagaacctcattcattcatacatacattcaaacatttatagagcatctataatgtaccaggtccagtgcctggtactgggtagacagtagcaagaaaaaataatctgagtatctgctctcataaaaaatatggataattataatacaggtgtggaaatgactccaggagacttttccctcttctgctgtctttgaaggtgtactcaatgtgataaagtcagatgaagctgtggaatccaagcctgagtttattctgacctttacgtaattatacctgtgatcctctcagcccactgtgatctagattctgttctctctccacttctctaagacacactgagaaatgtccatgaccattttctgttgctcttagatagatagctgacctaggcatgtcaagggaagcactctcagaccgggctccatctctgtgcaccggggtctgcttcaacagcttggagtctgaatttgtcagtgaatacagattaaccaccctctcataaactgatg

SEQ ID NO: 130009 - DNA, 1023 bp, Homo sapiens
ctaaaacaagaacttgtgtttgtagcatttgccacaatttcacagcacttttactgctttgtcatcatttatttttcacaaaattccagaaatgtacaagaaacccagaattgagctgttaagtccacagtgactgagagagcattcagaccagaaatttgcatgtatttttacaattattagtttttaacatctcatgttcatctcataaaagaattacctaggaacttgttctgtcagttaaccagtgcttcagaaagtgcttaaataattgatgaaatataagaaaaaaaaagtaagcaatatgacacaaagaatgggactatttcgtatggaaatcaggctaaatactttacagtcacaaatcaatgctaagatgaagactgacaaagctagcactatgtctccttagccatacatattccaaaaagactggggctcagagtagctggcttctcatttcctttcctgctgactagtttagtgaccatgaacaagtcatttgagcttcctggttctcagggtttcatttttcatctgcaaaagatggtctgaggattaggtggtaaaaataataatttatatctgattttttgctttgcagtttatagtttccacatatattatcccctttaaccagaactttgtttcaatattttaggaatctgtagtttcattataaaggctaaatgtttgatttccaaaagtattgtcataatcaataagttcaatatgtaaaaacatctggtctaagtgagtaccatcttgtctgtcttggtcagcatttaaaaataaggccttcagtgcaggcatcagataataatgaccctgtatgataacctcatacctgctttggaaattatctaactgtggaaatccagtcccctaaatgataagtgcttgtattggtaaagaatagtcatgaccctgttaataaatctgttgttgggtcttctttgttctggacatttagcattacaaactcagaggaatgaattaatgtccaataaattataagaatta

SEQ ID NO: 130010 - DNA, 1064 bp, Homo sapiens
ctcttaacattatcgtcaaatagagagactatctatacctacaattaaatgcaaattttattcaggcatttaagcagaatcacattcattcattaaaccaaatgattcttttatttgaaaaaatatatcagcacatggtaatatcacaccctgcttacaagggcctctagttctctgtcagtgcaaaagtttactatttcattattaaaggattaaactacagcaaaagctgcctggtgaccatgaatgttttagttaatttgattatgcccataaagaaagagtttaattccatagcagccagtgggtcttatacctggcagtgtggttccaatgcattacgggcatgatcttatcctgggagagactgaaattgccatttgggtgaagtgtggaggaagagatgagaactgggttcactggtgaacccaggttaacaccatgcctcgacgttttcaaaatgcttccttttcttagttcttagttaccagagtgttacaaagaaagggttttgatctcatgtagatagcatagcattaattaccctgacactaattaaactgcatcaaacaaataccaccgtgttcctcagggggacaacagaaggcagtttaaaataattactggagcttcatgcatgtgtgaagttttcattactcttaggacacaagcaaaaaagatttgatatcattaaaatagccaccttttagtgattgcaacaacaacaacaacaacaacaaaaagtgactaaaatttccttggagcatattgatgtctaaatagtggtggcttcagttcttcagaatggtaacttttccttaagaattggaagtgtgtgaagcaggaacaggtgttccagtcacattctggtatgattatgtattagcttatgtttgtcagaccatttcattaaccacccactgctatcacatatacatatactttgttctttctgaaccatgaaatgaaatgcatatatcttcactaatgcttgctatcaatgtaaatgagaaaaagaggcttattaccaatcacgactcccatgaagtccacacctctgtaca

SEQ ID NO: 130011 - DNA, 1005 bp, Homo sapiens
ttcagagagtgacagatgacaaaaccaacactgggcagatggccttcccttggcacctcaccctctttgtagcgccaccatttgtcccttcccaggaagcagcggtggtgggcttctctgcagtgactggtcccaggcagtgaggccaccaagcaggagagacgccaggaggtttaccatgcagctgtgaaatcatttccactcagctgtgagttgtatacaaatagagaactggtttgctgtgattctgctagtctagaagttgtagcaacagatctctctgtgctgagctgacagcagatatgaccactatcattagagttaagggctcctagtgcctctactcttgtcttcttctggtgtattaaactttgagagatttgaaaaccttttactccctccctccctctcatgcccacatctctcttcccccttctaaaaatatagaacagaaatgggcaaactgcaatgtgcttgtttctataaatgcagtttgttataatggtagataaagtattcttaaggtgagaagtatgtgtggttttattctttaagatcttgcaggagttttcctattttaaactactacaaagtaggtatctccttttaaaattgggctgcttgaatattttatgtattttcaaatatgaagcttagtttgaaaggtatttatttttataaggtgctttatgtttatatattatatataagaatataaataaaatatatttatatgtactttttatacaatttatattttacaaggtgttttgtattcatctgttgctcaaccatggatttatccattcatgaaatttattgatgtactaccatgttctgggtactgttggcctacagtgatatacaaaggaggtttctgaatctaaaaatggcaagtatcctaactgagatgttagcagaattcagagaaaagaaagattatttccaaggttggaggaattggggatgtaagaaaagtctaagagagaaggtgtcaaatatggt

SEQ ID NO: 130012 - DNA, 1612 bp, Homo sapiens
taacaatgagagaagtcaggacagtgaggaaatgaggagccaagtgaacagaagcccaaaagtgttgtgtgctaatttatataaactgttcagtggaggcccttttatgtccctttcccttctaagcaatactatgcatactttagacccctgttcacagtgattttccacctcttcgcccaaaagattagttattctttttacagtctcataatatatttcagtggtgtcagatattttaaaagattataaaaaatttctagcatttttcttttctagaaggggcaatttacgtagtaagatgcccactttaacaaacatcttaacaaacaaattgaagtgtaacacaaatcttaatttctatcaaatttcaaagtagacaccttggaaagcaacaaagatacttccaaatttctggcctgtaattcatgggttgggtgccttgggagccatcagggtctcaggccatttacagaagtgccctgccctgtttccttattcctagatttggttggtttggttgttggatggtttaaattcccaaataaggaacacggtcagttttattcatacattgggagaaaggagtatacatctttttataagacatcctgtctctctgcaacattagattaaatatttgcttaaaaaaataaatgttgagtttatcctgttgattttctttacctttaaaaaaaaatctcaccatcattgtgtgcagtcatttatcctgagagtagatgatggggacatcagttttcatacgttacatgacacagaaccagaaatgggatgttgtcgtgtccagacctgtccatcactgaggattgaccttagacttcctgatcaattctgacaagtcactgacagtttgcaggggaagcacatatgtgacaaaggacaagcagggctacatgtgtcagcaagaaccctctgattgcaactagaaggagtcaagttgctgacaactgtagtgtctggatgttcttagttttcttttaaaatatggcttcagaaaatcacaagtacccattcctccagatacacagttttcctgctgatttagtccatggttaaatggcgggtcacaatggtttgaatgctaacatgttcttcatctttttgccagtttgttcatgcatttgcacacatttattgatattattctggatcctggaagataaagtgtaaattcatattctttataaaaaccacactgaattgttttaagatttagaagtgtttagcataaaaatggacacatctggctcaagtttgagtcttaaagtgttaatgtttgtccattgcacagaaggtacagaggccatatagcatggttaagagcatgaatgctgaagccagaaacacaggtttgagtctttgctccactcagaaaagctgggcgacattgagcatgccaacacctaatctttctgggagtcagtgccctgatctataaaacagagatacaagagatcttatcaccttgtgttttgggattatatgagttactacctgcaaagcatttaaagcagcacttgacataagatagatgtttacaattattaaattctgtcactgattcttaatatatttaaaatgcagtcactat

SEQ ID NO: 130013 - DNA, 1059 bp, Homo sapiens
cttttgacttatttgaataattcaataaatgaaacatttacagtagataatgttatctatatcatatgtgtcataattatataggctgtgtatcttgctatctatcataaagatatagtgttatttactgcaaatgttttcatagatatgaaatatatatctgtaaatattttcatctatacaaagtattattttgtatatattagatagaatccaggatggctgtaagtcatacacatttttaagacggtaaatttcaagaggagagcttgctgttgcgaaaaagtcctatcgctaatactgtgcatcacaaatattaatcttttaatcatccttcacctacatttatacattggttttgcttaaagtgcgacagacctattttagttttccctgagagattgttggttattttaatttggctttttacagattgatatatttagacccctaaatgatgaatagatgtggtaagaccaaaataataccaaataaaatacagaagctatgatttttttaaattagtgggaaaaaatgatatctatatgatcctgtttgagcaaagccaggaattcacttaacgctttctagcagtcagggcagatgtttattttgtactggagctagtataagttggtgaatgacagaattgtttgtaatttcgacaaagataggtgttgtttttctgtttactttttgattaatttcaaatattgaatacattcacctttaaagcaaaaacaaagcaaaaaatagcaagaaagtttagattgactttataggtaaaaaaaaaaaccaggtaagaatcagttttctatactttgtcatttgtgatgatgtttgattttgtaacattttttattttgatcttttgttttggttttaaataatagatttttgtttaaaaatatcttatttatatattcaatttctgataggtttttgcataaagaaaaaaagcctttgttagtaatttacaaatagattaaatcaaaaagataattgagaagcttttggcaacccctgctgagaaagtatatagcactttcattacccaga

SEQ ID NO: 130014 - DNA, 1020 bp, Homo sapiens
aattgggggtgggggactgaaagcaccagaccacaaaatcggggtggggtgcatgcaaaagtggcaagaaggaatgggaaggagattcaacattgtctgctatacagatgatcctaagttaacttcagaatcgtttccaaaagaaattctcccaaataatagtgatggttatctgtatttgtacaggccacacaagcttctcacatttattatcccatttaatctttgccttaacacagcgaggtagaacactcaaatcttgcaaatcaggcagctactgttcagagaagctaggtaacttgcttaaagatgcagcgccaaaaaatggaagggcaaagccacagccagcaaccctgacttcaatctagtgcccgttccaataggaggttgcttttattatgtacttttttaacctggttagtttccctgtgagattcaaactactttttgtaactgggttcattactgggccattagtcaatgcatattttctaagctgatttctattaaattgaatttaaaaggcagactttcttatcccccaacgtacatcatcagtctctgcaatttctcagatacttgtagatttatggggctagcctatgggccattttaagtcacttctgaaacaactttgttaataaaaagaagaaaacgtttgggaataaaagaaacaattgagggcatttttttttaaagatcagaggggtagaagaaggtttcttatcctacatgtttgttccataaaagggatctatatttctttagtttcatctcaagaagacaacaccttaattaaactccagtgggccagtttaattaaaaaatgtcagtcagatcctcacaggagaacaagatatccatgaaacagacggtctgcttcctttgtgattactcagaaatctctggccctgcagccacacgacagcggattgttgtggtgagcagagcttgtgcatatccactgagaagggtgggcttttggtggaccaatgagtgaggtcagggcatgatgaagga

SEQ ID NO: 130015 - DNA, 1030 bp, Homo sapiens
tttttatattaaagctttctgcacactataaatgtagaatctccaaaagattagataatggcttaaaactatagcacaaaaagtcattagctttggttttaaatgttgagtcctggttagctctcccaattagaaaatgcacaatcatattttatctggaattattcatacactgtttaaagttttataatttatttacaactcagaaatatgtagaaacaatcttgatattgcaatatttgcataaatattaaaaaggacattttcgtctatgcagagagcaaatggaagcatacaaaatgaacattatactgctgcattctttaaataaccggaatgctgtatcttacccattaacatttaagctttttggttgtccttgccacttcattgcatgcatgctaatatcttctcatataaaatttaatctgttgaactaaatgaaggaattagtatctgaaagacatctttcattaagcaattaacgaatctctccaacaaatctacaaaagcatatgtgtttatatttaataattatttgtatgatcagccagttataacacatgcatacatttagttttagtcatagtattactatacctcaactcactgtcattacgctataaagccctagtaaaaatgtggtttaaatgggttatttgctaaggaatacatacatgtatagtttattgacttttgaaagtcctctgaggtccagtatagaacaaagaaaattcccacaaatagagatatttggttgtggatcaaatcttgctttatattgcagtgaaaaccagaagtattataacagggcaaaattaagacaattcatgggtttgcagagtacatctcaaagaagggtcagcatcatatgtgccagttaacttttactgtcaaatgtaaggggccaggataagactttggtgtttcttaagaaaataaaagaaaaaaatcctatcttagttatccacaatttccattgcttaaataattatttctgagctgcactttaattagtagcctaccttcc

SEQ ID NO: 130016 - DNA, 1050 bp, Homo sapiens
atgtaacattgggtttggttatcttccaaaattttaaatggtaaataatagtaacaaaaaagtctattataacaattataacacgtttactttcctgtttctaataatttgtttttgaaattaaaatatttctctgggctaacaggtaacaattgtcttgctgtcagtgcttactataaaaatgcaaagcaaaatagtattgggatcatagacacatataacagttactacttcttttaaatcaccaaaatacaaatgcatttggatcaatacttgagtcttcacagtcattgcaactaactgaatgcaaaatatattttaatatattctgtaaatgagtgatgagagcatgcaggaatgacagtgcctcttgcgttattctcattgcaattccctggactgatttttcttgtggtaaaacaaaaccaggagaaaaatgctttccttttaaagtaaccttaaggcttgcctttaaatagacaacagaagcttgggagatcaatgcttggggacttaagctatattattatttttactgtttagtattgcagaattactacccataccatacatgaaagtctatacagttttaacaaaagacctggctatattgacttaagaaagggattttttttttcttacctctgaaaatacctacttttttctttttaattcaacttagatccagctagagagtttaaatatatttaaaatttttagtggaaaaaattatcctttaatatcaaatagattaaaaaacatgcattgaatggttgactcaggggctttcactaaactggccatgaatgctgaaaccatctgtttttctggacgttgtcagggtgagtatggcagaggcagctgtttgcaaagggacgctttagatgatgaaccagcccattgtttctaagcaattcacttgcattcagaggctctacccaagcgtactatagagcaatcaaaatcaaactattgtttgtaccaatcatattgatctgaaaagattgtggtgggatgaccccattgtagatgcaaatagttgttctgagc

SEQ ID NO: 130017 - DNA, 1688 bp, Homo sapiens
ctgctctccctcagtccagcttgccatcatcatttacctggattactatggtaccttttctctctacccccttctaatctattttctacatttagtcagactgatctttctaaaatacaaatctgggctgggcttggtggctcacacctgtaatcccagcactttggaaagccgaggcgagtggatcacctgagatcacaagttcgagaccagcctggccaacatggtgaaaccccgtctctactaaaaatacaaaaatcagccaggtgtggcagtgtgcacctgtaatcccagctactcaggaggctgaggcaggagaatttcttgaatccaggaggcagaggttgcagtgagccaagatcacaccactgcactccagcttgggagacagagcaagactccgtctcaaaaaaaagagaaaaaagaaaaaaaagaaaataaaaaagaaaaccaaatgtgatgatgtctctcccctgcttttatacatgtagaatgaaatctaaatcctttctgcatattaggttaacctttgtgctttcatctctggagtcatttagtgttgtaatcatctgcatagttatctttctctagctgtagactacagctctatgaagatggagactgtagtttactaatctgcacatggatgagcctagcactctgcctggcacaatgctcaacactatttgttgagtgaatgaaggatgtgagtttggaggtcatttttagttgaagtcatgggtgcagataaaatttggatgtaggagatgttcagtaagggttttgttgtatgaatggatagaaaatgagggtgtgtagactgagaacaggcgtagtcaatagaaccctgaagaatactaacatttcactggatggtaggggaaagtaaatctgtgagagtgattgtgaaagtcagaggaaagctaagggagagtgtgggaggcaggctaagcagcagagaattttaatagtgtttccttggatctccaagacccagcacaggggcaggtaaatgaatagcagaatgaatgatcagcagattcaaattctgcagcaaagtcaagtaccaaaaggactgagaagtacttactggatttgaattacagttgtagtgaagtgtttggggcagaagaccagggagggattgtaggggaggaaggagaaatggtgaagatagaccactcttagaaggaaaaggaaggagaatagacgggggagtgtctgtctgtgtgcatttaaagatggtagacaccccaagggtgaagagctccaccttctgctttgctgctcacccaacatcagagcttctcagcaggtgcttcagtcctgggcaaagatgactgaatagtggatgaactgatctttctagaatacaaatctgatgatgtctctcatcagacatcatcactgcttcaacactggccatggctggcaagctcaaaaatcttctcgttgtccccagaagaggagtttgggtgggaaggacagcaacaaatcctgaagttgtgaagtatggcttccaggtgctgcaatgggtcatgggctaggccatgaccttagttcctcccctgcaagtttttagccttacccattgggtgacttcatactttcttctgctctatgttgtctttatactttctctagaaacaatatgacaatggtgatgataataataataataatgaata

SEQ ID NO: 130018 - DNA, 1055 bp, Homo sapiens
taaaagattaaggtgctgtgctacttgggaatagacctgggtttttggttgtagatccattagactgtgataggcagaataaagccttctcagctccagagatagccatattctaaccttcagaacctatgaatatgttcggttacatggcaaaggggaattaaggttgcagaaggaatgaaggttgctaatcagctgaccttaaaataggggattatcttgcagtttttgagagggctcagtggaatcaggattattaaaactggaaacaggaggcagagaaaggaggtcagagttatatgatttgagaaatacttgacttttgctggcttggaagatggatggtggatgaagtatttcctgagccaaagaatgcaggcagcctttagaagctggaaaaggcaaagaaacagatttttccctggagcctccagaaaggaattcagccatacctgccctgccaatactgtgatttttagcccagtgaggcccatgtcttctggcccacagaaatgtaaaaaaaatgaacttttgttatttaagcccctaaatttgtggtaatttgttataacattcttagaaaactagtgtaatggccatattccccatgttctttgccttaaactacactgcctcttgcaaggaggttcaaagggtgaaaaagattgggagattggaccttggtggactttgctggttacttatgaggagcaggatggaaagtgaacattctgtaataaatactcagtgcctttgccactgtgctaatacatcatcatttgagaatttttggtctcagattttacagattatcatggggtcacagattagcattgatttctgtgttccttacccatagattcacaagtaagtcttgaatgtttgttatgcatctagcaactccatgaattttaaaaatcgttttgaaaataagtcagacattgaaggtattgagactcagatatgatttggttaggagattttttcttgcccaaacccggtgcatacctacttatggttgcctgcagcctggaggagaaaactgagcttgactc

SEQ ID NO: 130019 - DNA, 1050 bp, Homo sapiens
actgacagacatgaaagacattttgatggcttccaagttttggcagttatgaataaaggtgctaaaaatatttatgtgcaggatgttatgtggacttcagttttgaactcgtttgggtaagtatgcatgggcaacattgctggatcacatggtaagtgtatgtttagttttgtaaaagtactgtcaaactgtcttccaaaatgactgtaccattttgcagtcctaccagcgatgaatgagacttgcttttttctcacatgcttgaaaacatttggtggtgtcagtgttttggattttagccatactaataggtgtgaagtgatacttattgttttaattttcagttccctgataacatagaatgttgtgtatcttttcatatgcttatttgccatttatatatcttctttggttaggtttctgttaagatattttgcctatttaaaaaaattaggttgttttcttatcattgaattgtaagagttctttgtatattttggatattttgaaaatactgtctcttagcttttgccttgtatctttagtcttttaacagtgtccttgcagaagagaagtttttaattttaatcaagtccaatttcttattttttaaatggaacctgcttttgatgttgtatataaggagtcactgtcatattattttaactttttttcgtaaagtgtttccctgctttctgttgatcttcttgttagcaactgaggttttatactattcaaaataagtgcgattcagttcagagttatatttgcacattattctgatgaaaggcagcttcatatagtggcaagagcatcaaacattcctggatttgaatctaggctccatctcttactcattttgttatcctgaataaagtatttaatttttttgaaccatgatacattaagtatgtgccagtaccagatacatactaggtgcttgatatatggtagttatactgagacttttcttgaagaatcaagacatccagagaattctactgttgagttgttacctaaaggccattgaggctctagtcaacagttcac

SEQ ID NO: 130020 - DNA, 1041 bp, Homo sapiens
gtcgccgaccgcgctgttcgcaggcagaccccgggctgcccaccgcggcctagcgcgcgccggatggcaggagaagtgtccgcggccacgggccgcttttcgctggagcggttgggcctcccgggcctggccctcgccgcggccctgctgctcctggccctctgcttgcttgtccggcgcaccaggtaagcgcctcggccgccaggccacgcatgcgccctgggccccgcgggccgcgcgcgacccagatggcgaggggagtccccctccatgatttccagtgcagacagtcagaacttgctgcggggtactggcttcctttgggactttgtaataacaaaggcttcttctgtctttttcccacacatacgcgtacatattaaagctttgggaccgaattccatttgctgctccagcgtaagttgtaataagccctaggttggcggtatgcattatgcatcacagacacattgtgtgccttgccactgcgagttgatattttatggcctagaattcatagagcatttcaggaggggaatattcttaaatttcatcagttaaaagagaactgtttcaagaaaatgccagtgcatggtgtgaacaataactctgagtgcctctcttcctcagtttacctcactgtacctcatttggaaagctgaaataatagtacatgcctcgtgagatttttgtgagtactaaatgagttaatggagagtattttatgcagttgtcctatcatttttataaggacaaaacaaaacacacaataatgacaaaatctagacgtgtgtcactttaatttgaattgtggaagtagaaatagagaagttcagataaaatcattcactttgagtttaatctgtttttcctttctttctgggtcctattttcatactgctctggtgttcatcgcttttgagaaccaagcggatgcattttgttggatgataattgatatatgtatgtatatttgcatacatatgtatcaatgtatagatatctatgtgtgtgtgatacaggttgtttctcaatagtttt

SEQ ID NO: 130021 - DNA, 1772 bp, Homo sapiens
ttttcttgtagctcaagttgtgcatgaattactgaatattttactgtgcttttcttcatgaagggtacatgctttgtactcttcactgaaagctgaaaacatttcttgttaccctcttttgtgcctttttattttgccaaccgtgtttatagaaaggacattactaatgacattttgcagattaaaaacattcatttgaacacagtagtcccctagaaaaacaactctacaaaaattttgcagccttattcattataattttgataaaattaacacaaaatcagtcaagaaggaaacatgtatattagtgaagtgtttttggagactgtttgaatgtgaccaaatgtggttctagttgacttcttttcactttggcttatatcaattcttgagagttaatgtgatcatgatattgcaaacaactataaatggtctctaggccttactttgtgattatacgttatctccggctagaaaaaaataatggtagtaaagaaactgacaaactgaaaataagaaaacaaaaatcaaatgcctataataccataatgccagtttggtatagagtccaactttaaaacatgaattgctcgacagagttctattcagtaggtgtttctttgtattgtcttttgtgaatttattatgaaaatgctgcgttgtgttgaatgaaaaagacccaaattactgcttatgaagaaataaagccagcattgatcacttaatcctgtttctcatgtccagccagaaaaaagaacttcagtgaaggtaagataaataaatacatacacatatgtttttttggtagataagtgctaattacatatatgtaatgctttattaaatttctgaaatatttggtaactaaaattttctttttggaaattaataaatccagatacatattaatgttgatatgagtaaaaacaaataggaagaaattgaaatttcttttcatcaacatgtagagctgctattttactatttggagaatatgatgtgaaaattggacctcaaagggtttccttgtgttttcattgtaaaataccatcatcagtgagagtcttgagttcactaacattgtcaccttctggagagagagttaatggggggcattgaggatgatatttttttacatgtgtttggtttctgattcaagtgacacgcacaaactgaaaaaaaaaaaacaaaaaaagcaacaataactttcagggcacctattgctctaaatgcataatataacttgctgccagaaccagatgtgtttaaaaaagaaaataaaaccaccttctttctatagccattaaagcaaactttactgttctaacaaatttgtattttattttgcattgccacacatctgcttatttaaaaactacatccctttggtagtaatgtttcaggacaagtaggtattacagcttgatgtttgtgtgttctaattctaagagttctttattccagatcatatagagtagttaagacaactgtaacagcattttttgaaatacattgtaaaataataaaaggtaacataattaaaatcgagtggatattatatacttgtggtataagcattattgattatttatttttaaattttattttaagttctgggatacatgtgctgaatgtatcataggtatacatgtgccatggtggtttgctgtacctatcaacccgtcatctaggttttaagccccgcatacattaggtatttttcctaatgctctccctccccttcaccccaccccctgatatgccctggtgtg

SEQ ID NO: 130022 - DNA, 1100 bp, Homo sapiens
ttccaagggcattttattctttgtagacagagtatgctaggtttttgttcactgatgaataagaaagctgtaaactagccacttttccctcgggcacttgttttagggctagaaatagtctagaggataaaaagcactggcaatattaacagttttagaagtatagcaaagcttactagcttgaactgtaaagatctttattgtgattttattgttaaaatatgtgtgctaaaacataatttattggaatattgaggacaacatatgttctttaaacattgtgcacacaaattttttcagtcgtcttacgttcattttacttttctcaaactgtagagttgccgatttctaagtttttatgtgatttagttttagttacctgattctttctaaaggtgttgtaatcctggttatttcacaagtgctataatatacctcagcagcctagaactaattctgcaaaccttttctacagaatttaagattttattcatgtgcatggcatagaagatgaattcttccacttccaccatgagtgaagagcctgacgctctatcggtagttaaccagttacgggatctagcagcagatccgttaaacagaagagccatcgtccaggatcagggatgtctgcctggccttattttatttatggaccatcccaaccctccagtcgtccactccgctttgcttgtaagttgcctttagtaatttcaatctctgttctatttttgcagttaaggtgagaatttggaaaaagtgctagatgacaaggtaaaaaaacggaaagagagcaattagttgtttgtatttatgtaggtacaaacatatgtatgtgtggtctgtggtctgtttacaccagtggtaacatgctacattgtttttattctttatttttttttttttgagtcatctaggcctggagtacactgtggcaggatcttagttcactgcaatctccacctcctgggcttaaaccatccccccgacctcagcctcccaagtagctgggatgataggcacacaccaccatgccagccaaatttttgatattttgtagagatagggtttcgccatgttggccaggctcaaactcctga

SEQ ID NO: 130023 - DNA, 1100 bp, Homo sapiens
taagcgacagaggcgtcaggtcacctgggaagagtctgcagagcctttgcccgccagcgccttcgctctttggctccctgagttagtccggttgcttgcgatcgccgcggccggggctgcgaaccgaagggctcgctccgcgccgcctgggtctctacctcatccgtaggtgtggccctgatggtgtggcaggctctggactcctaaagctctggagcggtatgtggggtccacgggcggcagacaaagcagtggagccgggaaggccgcgggaagcggcccctgtaccgaggcagcgaatccgcctgggaggggcgccccgcctgcctcttgtcagatccagtagtgggtcccagtgaggcgctttagcacgctctacccccacgtgtcccgtgaatctgttagctttgctcatttcttctttgtcccccctcacatctgacttttactaaccccagtattattaatgggtgtcatctcatcttttcatctctccaggttattctttggtaactttctgttagttttgtgcacctgcgtgtctcctaagagcggaaagacatagttgtgttaggcttaattcaagagagaccagtgttcccatttttatatttaagactgtgttttgggagggcgggggtaggtattcgtgcagttagcaactcctttcgtgatacttagtgcactgaagtgtcagggcagtgcagaaggtacctccaacacctggcaggacagatgtccccacatgagcaagtagtattctggtttggtaattgctggtgtttgattttaccatttcgcgttcttactttaatctgataaccgctgaggattgttatgtgagataactgaggctctaagaacttaacttctcaaagttacagttaactcttcgagtaaggggaaagtcagatttaatatcaatgcttatgttatttttatcaaagcccacctaactgaataaggatttaggttaaacgtattccctctgcatctcttggcatgtgagaattaaatctttgaattgaatggtgaatcttgactgtacgagaaggaaaaatcttgcaggcatctgcctaattacaggtgtctcacatgta

SEQ ID NO: 130024 - DNA, 1025 bp, Homo sapiens
atatcttttcataaatgtattttttacttaaattagccatactaggtttttgttgcttccagctaagaatactgactgaaaaaaatacaaaagaaaacaaaacaccttatactgttacagttactttaagcaagctgatcacaagcaaatcttgttttctcttaaattacacatgaaggtttttttttttttgagacagagtctcgctctgtcacccaggctggagtacaatggcgcgatcttggctcaccgcaacctccgcctcctgggttcaagcgattctcctgcctcggcctcctgagtagctgggattacaggcatgcaccgccacgcccggctaattttgtatttttagtagagatggggtttctccatgttggtcaggctgcacatgaagttttaaaaatgttttaggcttgctctgtgagacatgtagacagtacaaattctaaataataatgatttcattttagtatttgcattttaaattttcagtgtgttttatggaccatgtgctgctatgtatgcctgaagaagtacttgaaatgcaaatttggggagactttgccatataaatgcttggctggattaagcgcctaattaggatggtttttcaacaagttggagtaagcatgcaatcggtgagtgctcaaaattcattttttaaatcccgacatttagatattttaagaattttttctgagaaaatgaaataaatctatatatgaccaacatcttgaattcaatatgtttatgtactgtttaatttgctttctatttaaatcatagaagtgaatcttttctcagcatctgaagtaaggaagtaactttctgggttacattgaaaacttaccagtattcatgtgaccattaagagcaatatatttgttattagtgaggaaaaggcttaaataagcagaaaaatcattgcataaaatatgcttggccaacacttgacagcgctcttaatgttgtagaatcattaacattgaatgctgttataatgtgtttaaacaacacagttg

SEQ ID NO: 130025 - DNA, 1847 bp, Homo sapiens
gtatgcttgaaaaaataatcacataaagcaatctgttcttttccttcctttaactttgtagaagatacctaaataatctacttattccttataattaaaagctgaatcggctgggcgttgtggctcatgcctgtaatcccagcactttgggaggccgagacgattagatcacctgaggtcaggagttcgaaaccagcctggccaacatcgtgaaaccccgtctctactaaaaatacaaaaattagctgggcatggtggcacctgcctataattctagctagatagaattgctgtaacccaggagatggaagtttcagtgagccgagatcgcaccactgcactccagcctgggtgacagagcgagactccatctaaaaaaatttaaaaaaaaaagctgaatcattggccacttctcttgttgaaggcacctagtatttttctgatattaaacagatggaaacataatagttgacatttcaccctgcaacatgcgtagtgaagaatgctaaaagcaggcagaaacatagttcctgaccttggcaaatcctttctaaatttttctttgtgagctttttgtcctcttcatctccagacaagacctttgcttgctggaggggagaaagattcactttagactgtctaattgtcacgttgtaatgcacaaatagcattccacttgtactacatcataggagaattttgacttgtgactaaatagaagactcaagaagagaaatgactgaatggtatacttacttttgccctatggatttatttgtaaaagaacaggatctattaaaatgtataaggtagggccatgtgcggtggtgcacgcctgtaatcctaggagtttgggaggctaagacaggtggatcacttgaggtcaagagttcgggaccagcctggccaacatggtgaaaccccgtctctactaaaaatacaaaaaaattagccaggcatggtggcattcacttgtaatcccagctacagtaatctcagctactcaagaggctgaagcaggagaatcacttgaacctggagggggcagaggttgcagggagccgagattgctccacttcactccagcctgggcgaaagagtgaaactccatctcaaaaataaatacataatagtaataaggtaaaaagtttgcttaaatactgtcttagaattatttgcccatgtttgttctttttttggtgggtagtctgatgttgacattgtagaacttgcgaggcttcccatttttctctagtcagatgttttcctttcccttagtcctcacgttattaagactacttgtgtcataatcctgtatgattattgatgtgaatgatgttttcttctaagcttcagagtaactttgcttcttaacattctttgtatactattcatattttaatatttttatcttcctttctacttaccagttttctaatctttgccatcctttttatttacatttccgaagcaagagctatcatttttgttggttattggagtcagtataggttataagtactttttggaactcttctaggtaagattcagtgaaactttggaaaatgtgtgataaaaattatatgaaagctatggcaggtgccaggggtattatatatccttctatgatttccactttgttggtttttttctcaggggttggggggcggggggacatggtctcactctgttgcttaggctggagtgcagtggtgcaatcctaactcactgcagcctggaactcctgggctcaagggaccttcctgctttagactctcctgtagctaggatgacagcatgcatcaccacccctggctaagtttccaattttttgtagagatggcggt

SEQ ID NO: 130026 - DNA, 1052 bp, Homo sapiens
ttctatctcttcactttttttttctttttccactaataatagctgtagtaggacaggaccttgctgggaaccttcagtaagttgtccttttctttctcaaacttcccatgcatgtcgtggtgtctaaatcgtatttccaagaatttcttaatgtcagtccttgccagggctgacttcaccttgacttgtactttactaagtgcattgtcctggaaattgtcctttgcatcccatgcctgtgtcactcaatgaatgcttccctcaccaacacctgaaacggccttttataaagaagattttcttctagttttattttgtcttttgaatgagtttgacttaaatgccaaaactattttgttttgtgggacaggatttcaagtacaaatgacatacatcttatcagttttggaattggttcttgagagcatcattaacattttcatcttattgagcacatattatggacttggtatcatttgcctaattaaggcttaagtaagatccaaattaagtccgtggaatagtttgttgtatcttgttgttttgtttttttaaagtttgtgcaaaagctggcattttatgtttaacatattaattttatggaggcattatttaattttatagatgtaaaattgagaaatgtgtttaatccttaattactatttatgatatcctgaaaatgagttaacttatatttctttgaatatgtattcttagaaaagtagtactggctgggcgtggtggtgcatacctataatcccagcactttgggaggctgaggcaggtggaacccccgagcccaggaatttgagaccagcctgggcaacatggcgataccccccatctctaccaaaaatacaaaaaatgagccaggtgtcgtggtgtgtgccagtaattctggaggcttacgcaggtgaattgcttgaacttgggaggcgggaggttgcagtgagccgagatggtaccactgcactccaacctgagtgacagagtgagacctggtctcaacaacaacaaaaaagaaaagtagtactttgtttttttgtttttct

SEQ ID NO: 130027 - DNA, 1100 bp, Homo sapiens
gtgctgggattacaggtgtgagccactgagcccagcccagtgcaggcttttaatgcttagtaagtcttatatgaaaatatacttaaaatgagtcacaaatttgttagttttctcaaatcattaaaataatactaaattgtcaaattgtatgtaatgtagacttgtttttgcagtactttgttttatatttctgttaaaagtgattacaaactgtgctgtagtcaaacttgaacatttgatatcacaaaaacacctctgttaagttaaatagaaattttccatctggatagttttggattgaatgatacagtggctgagattcaggcatttctcatgaagtaactgaaactgtcttgcttcttacataactgaaacgttaagaatattgtttttaggggtacaaaaatctttaacatcattttgcttttaaaaactgatattttctttgcttaataccagtgggattaagtttgttttcctttgtttctgtaggtgacttagattctaccacatttggtaccataccaccacaccctccacctcccccaccgcccctgcctccccctgcactggggctccaccaaagtacatctgctgttgatctgattaaagaacgaagagagaaaagagccaatgctggaaagactttggttaagaacaatccaaagaaacctgaaatgccaaatatgctagagatccttaaagagatgaacagtgtaaaacttcggtcagtgaagaggtgaggatacattcaccttctttcttccccatttgtttgtcttataaaaccaaagtaccaggcttcttgaggaattttgtttataacatgactgccatgaatagtttttagtttaaaaaaaagatgagccccagtggcttctatacacagtagctaagagattagcaaaataagctaacatttcccaggtgatgtttttagttttcccattttatttaaatatcagccttttcatgtaaagtcttcactgcagttgctcagtgagcattcactaattcaataaaggcgtgctgtgtaccactagcatagtcactagacatgcatggaacagggaactctatttgccctgaaggagagtaga

SEQ ID NO: 130028 - DNA, 1050 bp, Homo sapiens
cccacatcaaatgtcaccctcttcagaagactttcacagggtgccctgagagaaaatgatctcactgtactttgaatttctatgtcacaaaatatacattgttactatactgaatttcacttcactatgcttaaataaaaatataaccctgcatagaaaatgtaacattggagattacttagtagtgagctcaggggttaactttggctttcttctttctgctcttctacaagtttcaaatttccaaatgaacaactattattttcatagttagaaaagtaaaagtgtaaatgctaagcaaagatgtcatccttttcccaaccagccgtgatctacttgtaaggcagggaccaaatcctgtatcacctccctttggaacttacagatgacacaggtgaatcacttgcaaaatgcaagtgcttggcaatgggatggatttctacataacaggaaagaaatctgggcaaataactcaccaacactctctctgaggtggcctctgattcagactttggaattcctttttcaacttcatcttggctatcacttcgataccgataagcaaatttctttttcagagcctctgctatgagggcagcagggtcagtagcatccactggcttgggcttcacatcttgctctgaccttagagaagtgaacacaaaccaaggggacagatcaatacactggccaccctcagggaagtactttgtcaaccttttgcctgacagcacctctccagcatcatagctactccatagagacctgataaatactgctagcattgagatggaagcctagagctaatgctcaacaaaagcacacagaagtccaataaagggccatgtaatatgtctgcagaacatggactctactctccttcagggcaaatagagttccctgttccatgcatgtctagtgactatgctagtggtacacagcacgcctttattgaattagtgaatgctcactgagcaactgcagtgaagactttacatgaaaaggctgatatttaaataaaatgggaaaactaaaaacatcacctgggaa

SEQ ID NO: 130029 - DNA, 1237 bp, Homo sapiens
aaaactacatctttcttccctgtcagtactggatggcaatgacgtgaaagcagctttcctggttctcaacttcccttcaatgggaagcattatggaatttcagcagtgaacatcatctggttcctattcaaaccccagctccaagaaaatgtgagagagaatctaagatataagttctgttcaaggcaagaagtttccaatctcaaatatttcatgccaacaacttatgttataccagctgttccatcattgaatgctaaatgatcattgaaaacaaacgaagataacagtgccctcgttgccatcattcattactaattttacataaactgtttatgtccaaaaatatgcatataaaacacttatacagataaattagtgttaagaatttaaaatgtgcagtaacatccacaaatgtcctttttgtgttgtgaaatctatacaattgttttcaaaactggaaatctgaacgccctggccacatattagaaacatgtcagaacacacatgttgtggagagcaccaaagctgaccatctcacaaaagcaaaaccaaacttagtgctttcattattgcttaatccactaattagcctgaaaagaagaccactgaatactaaagaggtatttactaaacagtgtcgatttctactagcaaacttggccctcacaaatcaacaggggaaccaggagtcttttcgcagctcattgtctattaggagtctgatacattttcaattaaagccttcatttttcctgttggcttcaacatgtgtggcccaaactagaaacaaacaaaaagtataaataaagatattggttcaagtaacagtaacgatacgcccccacctcccaatcatggattagagggctgggtatgttctgcatgaaaaaccaagcaactactgggaatattaaaacctttacaaattgatgggttgttatgaacacagaacatatcaacagaatgaaaggtaaagaagtagccaaactgcttcctctaaatgaaaactacaaccatcttggcaataccctgcttttgttaaattttacttctctgagtaaagagagaaagtacaaagtttcctttccaatgtcttaagaagtttcaaaggtgctggaatttctgagatgcctgcctctctggaatagattagcacacacacgccccaggacagtaatgttaataaagggaatgtatcaattattatgtgggagcttccatgaaatgtacccag

SEQ ID NO: 130030 - DNA, 1586 bp, Homo sapiens
caggaaaaatgaaggctttaattgaaaatgtatcagactcctaatagacaatgagctgcgaaaagactcctggttcccctgttgatttgtgagggccaagtttgctagtagaaatcgacactgtttagtaaatacctctttagtattcagtggtcttcttttcaggctaattagtggattaagcaataatgaaagcactaagtttggttttgcttttgtgagatggtcagctttggtgctctccacaacatgtgtgttctgacatgtttctaatatgtggccagggcgttcagatttccagttttgaaaacaattgtatagatttcacaacacaaaaaggacatttgtggatgttactgcacattttaaattcttaacactaatttatctgtataagtgttttatatgcatatttttggacataaacagtttatgtaaaattagtaatgaatgatggcaacgagggcactgttatcttcgtttgttttcaatgatcatttagcattcaatgatggaacagctggtataacataagttgttggcatgaaatatttgagattggaaacttcttgccttgaacagaacttatatcttagattctctctcacattttcttggagctggggtttgaataggaaccagatgatgttcactgctgaaattccataatgcttcccattgaagggaagttgagaaccaggaaagctgctttcacgtcattgccatccagtactgacagggaagaaagatgtagttttccagtagtgatgaatcaaattattgaattaaatttcttcttaagaagtaaaaactcagaatgtaccatcttgtttcctttcagtttattaaatggcatcataaagatgactttgctaagttaatagagttaaaaatttttttaatataagccaaaatattaactttaatgaaacattgacttggcaaatgaatttcctataaattatcattggtcagaatgctgttttgtttaataatattacgcaacataaaccataggtgttattagaagtggagaactgcctttttcatctggggcttttaaggacttgctataaatgattattttttaaatgctttataaatcttcatggtttttctatttctgatacactcagctatagttaataccagagtatcctaccaggagtaatatttggaatatttaaatctagtaaaagaagaaagttgtacttcctggctgggagtattaggagatgggagtagagattcacttttaagttcttgaaaatatatgcattctcctaaatattaacaaaaatgatttggggaaatgacatggcttgattgttctgtttaaatttgtactgtggcttatgttacacatgttcatgttcacctctcattcacctgttttatatggtttaaaattctctttaacaaaattcagaaaattcacctgaaacgtattttgacctaaaagaaacatatttttgtatcagtattgaattttggacagtgcccccatataaggaagttactgttttaaaataaagcaaactaactgttttattttccttggaccatagtgcttccattttttcttt

SEQ ID NO: 130031 - DNA, 1608 bp, Homo sapiens
tctagtaattcttgtatttttaaaattgttggctgggtgtggtggctcacatccataatcccagctctttgggaggctgaggcggacagatcacctcacgtcaggagttcgagaccaacctggccaacatggcgaaaccccatctctactaaaaaaaaatacaaaaattagccaggcatagtggtgtgcgcctgtaatcccagctactggagaggcagaggcaggagaatcacttgaacccaagaggcagaggttacaatgagctgacattgtgccactgcactccagcctgggcaacagagtaagactgtttcaaaaaatagttaacatctatgaccgataaagttacttagccttcaaatttgattctaaaatagttttaaatgttcaatatgctactttaggtaaaatactttcatcaattacatattttagtcttatacctacatgtcctaacttgtcctgaaacccaccttaaagtctgataggatggtgggggaaagagagaaacacatttttgtttttgttttgtttgtgtgtgtgtgtgtgtgtgtgtgtgtgtgtgtgtgtgtgtgtgtttgagatgggagtctccgttgcccaggctagagtggagcggtgtgatcttggctcactgcaacctccaccttccaggttcaagcagttctcctgtctcagcctcccgagtagttgggattacaggtgtgcaccaccacgcctggctaatttttgtatttttagtagagacagggtttcaccatgttggccaggctggtcttgaactcctgacctcaggtgatccacccgcctcagcctcccaaagtgctgggattataggcgtgagccacggcactcggccactcctgtttttaatattagatttcttgttggctataatttaaaattgaagcacagtgatgtaattggtttactgaagctttccactggtcccatcaataagtctttgccaagacattccatcttgtattacaacacctatctttaagctgtacatttatttacatgacatttcggaacacagatttgaagtatttattgttgagccatgtcctgtaaagcagcaggagactgtaatgatttcccaagttcccttaacttagttgaaatcagtaaaagaagttacagatctaaagatgaattttttgaaggaaatactagaaaggatagtgcttcccttagtccactcaggctgttagaacaaagaaccagaaactaggtgacttataaacaacagttatttctcacagttcttgaggctagaaatctgagatccaggtgctggaatggtcagttctggtgagcactgtctttacagcttgtcagacctaggtttgggtccttaggcaggttacctaatcttctgagtggctccctaacctataacatgtctgttccttaaagtaaaattaactattgatatatggtaagtgctaaatcaaaggttactatggctattctttttagttcatttcttgataatttctacttatataaacacatggatacaattgtacctcataacatctttatttgagctcctggcactgattcactctagaggcttcctactcaaattcatgagggaga

SEQ ID NO: 130032 - DNA, 1056 bp, Homo sapiens
agtcctgccaccgtggcctctcaaagtgctgggattacaggtgtgagacactgcatcaggcctatagctccacttaaatacgacctatattactggaatatttttttctaaaaaattttaggaaacagttaaatatttaaaagattacttttttaaaaagcaagtaaatattacagaacagaatgcaaaatttattttacatgggagactaaaaattttcacacacatggccaccctttgggcctcttggctcaacatttcaggggctgagggagtctctgctctaggagtaaaaggtccttggagagaaaattttgacaagtcctaactttaaaaaagaaaaattggttcctggtcaatatttgtactcactgtaaatgtgatggttggtaatgatactctgtataaaagtaaaaatcatattttatgtcctttgcaaacaaatatatttgtacctgaggtacagattagaggtgctagtaattccttgaagattctgaaaatgatctttttttccaaaatgctttcttggtttttattaaactttctattttcttaaaactctcacatcaggtatttccagtgttttcaagcatgtataaatattttaatgtataaatgttgtttaaaatcccctcaatcggtatctcctgattgagaaaatacacagtgaccaatagctaataggaattcagtattgctttcaaagaaatgtgcatattaatcactgtagcatctgcatacatttgaaacacggagtaatacaggtctgtgcaagaattagcagcttgttccttgctaataatgacttgtgtcatctggaaggcccccaagagcccatggtctacaggtggaatgaccaccacttgggagtgagctgatggagagcacccagcaggtctcctccatcttcctggttcctgtgctcaccatagggctggtgtacattgggccattaataaacgtttgttgaacaaattaatttggaattaatgtgttccctttttagctatcgatttattactaagagattatattgaaactcttccgtctata

SEQ ID NO: 130033 - DNA, 2546 bp, Homo sapiens
aaggagtaacaaaggaagttttgatatgtgccacgactttttcaaagcatctaatcttcaaaacgtgaaacttgaattgttcagcaacaatctcttggaatttaaccagtctgatgcaacaatgtgtatcttgtaccttccactaagttctctctgagaaaatggaaatgtgaagtgcccagcctctgctgcctctggcaagacaatgtttacaaatcaactctgaaaatattggttctaaattgccttggagcatgattgtgaaggaaccactcaaacaaatttaaagatcaaactttagactgcagctctttccccctggtttgcctttttcttctttggatgccaccaaagcctcccatttgctatagttttatttcatgcactggaaactgagcatttatcgtagagtaccgccaagctttcactccagtgccgtttggcaatgcaattttttttagcaattagtttttaatttggggtgggaggggaagaacaccaatgtcctagctgtattatgattctgcagtgaagacattgcatgttgttttcactactgtacacttgacctgcacatgcgagaaaaaggtggaatgtttaaaacaccataatcagctcagggtatttgccaatctgaaataaaagtgggatgggagagtgtgtccttcagatcaagggtactaaagtccctttcgctgcagtgagtgagaggtatgttgtgtgtgaatgtacggatgtgtgtttgcgtgcatgtttgtgcatgtgtgactgtgcatgttatgtttctccatgtgggcaaagatttgaaatgtaagcttttatttattattttagaatgtgacataatgagcagccacactcgggggaggggaaggttggtaggtaagctgtaacagattgctccagttgccttaaactatgcacatagctaagtgaccaaacttcttgttttgatttgaaaaaagtgcattgttttcttgtccctccctttgatgaaacgttaccctttgacgggccttttgatgtgaacagatgttttctaggacaaactataaggactaattttaaacttcaaacattccacttttgtaatttgttttaaattgttttatgtatagtaagcacaactgtaatctagttttaagagaaaccggtgctttcttttagttcatttgtatttcccttgttactgtaaaagactgtttattaattgtttacagtttgttgcaacagccattttcttgggagaaagcttgagtgtaaagccatttgtaaaaggctttgccatactcattttaatatgtgcctgttgctgttaacttttgatgaataaaaacctatcttttcatatttttatctttgacatttaccttataactcaatcttttggaaaacacaatgctaaattacaaggaaatcaaagttagcttcttggctcttgtaattcatccctcagatgtttactcagtccgagcttatctactaatgactcaccttgcaagtgagtaagcagaagcccagttagggctgttggagtcctgactaacacaggggagaggtcagctttgagccaggccttttgttcctacagtggtgaactgcataagacatcagcaagtcttgcaagtactaaaatactagttgtatttatttctatcaatcattggcctttttaaagtgataagaaaaggccactccactctacttgattgatatcagttgtaaacaaggtaccactgtgccattccctatatcttcccaggtccaactcattagaagggatatggtgcaaacttctaaatcaaacacattaacatattatttgtacagaagagtgttgatgtccaatagaaacagaatccaagccacataattttcggttttctagtagccacatttagaaaacatggaattaattttagtaacatctattccaatacgtccaaaatattgtatcactttaaaatgtcaatataaaaacaattagatgtttttacattcttttggggggtactaagtctttgaaatccagtgtatattgtgtacttacagcacatctcaatttggactagtcatatctcaggcacccaatatccacatgtggctagtggctaccatattggacagtgtgggtatagaggtctgagggtagtagaggaatatggtcagctggtcactctcgtgagatggccataccttggcctatatttaatgtgtacagaaagtctgataactcagatccttaaaaattcaggcccactgtttcagtacatagagagtggaactatcatggcaaacccacattaaccaagctcacagtaactatttttttaaaacactatcaatattttaatttacagtgagaaatgtaactatcaattattctctccctttaggcaaatcttcctgggaagccaaattatgagcagctggtgagcatggattctgagcaagggaagcaagttgcctcgtgcacccatgtccctttgggtgcacagaagacccatgtcttctgtgatattcatgtttgtggaccagggtaccct

SEQ ID NO: 130034 - DNA, 1038 bp, Homo sapiens
cagattggcaaataccctgagctgattatggtgttttaaacattccacctttttctcgcatgtgcaggtcaagtgtacagtagtgaaaacaacatgcaatgtcttcactgcagaatcataatacagctaggacattggtgttcttcccctcccaccccaaattaaaaactaattgctaaaaaaaattgcattgccaaacggcactggagtgaaagcttggcggtactctacgataaatgctcagtttccagtgcatgaaataaaactatagcaaatgggaggctttggtggcatccaaagaagaaaaaggcaaaccagggggaaagagctgcagtctaaagtttgatctttaaatttgtttgagtggttccttcacaatcatgctccaaggcaatttagaaccaatattttcagagttgatttgtaaacattgtcttgccagaggcagcagaggctgggcacttcacatttccattttctcagagagaacttagtggaaggtacaagatacacattgttgcatcagactggttaaattccaagagattgttgctgaacaattcaagtttcacgttttgaagattagatgctttgaaaaagtcgtggcacatatcaaaacttcctttgttactcctttcggattctctcctgctgggctttgcatattcaaggtttcacatgaaagccaaattcatattgctgtatgttcgggtcttgcaattaacaagtgggttcaaatgatccaacagaggaaatcttggaaataaataatgctggctggcatcactcacttggaaaccttggcagtcaagagttaagttctctcacctcaagaccccatttcacatttctaaaaacctccaggaggcagtttgtcccactggttctgggggttatgataaccgattttcctgaggtaataactgtgagttcaactcaaatgcagcatcagtgtcctcactgctcgactgttctctctgcagtcccttccagctggctttattcagccccacgtgtccaagcattgtctgggatagc

SEQ ID NO: 130035 - DNA, 1057 bp, Homo sapiens
aaaatgtcaagactctactgctagacccatataaattattgagttattttattcttacgatgttaaaaaaaaatgaactggatagattaattatcactcaatactgtaacttgccttgatggaagaattcctccgttactttttcactccactgcttgcttaattcccacgtccgacatgggttacaaatatcagcacatttcaaagccatctagcaaacaaaacattaatattgttttaagatatatacacacttgacaataataccaaagaaccaagtgcaaggactggattaaccataaatataaataaataagccagaaatataattctcctatttttagatgtaagaatttatgagaataaaatgctatttcttaattggtaccctaatcttgtaaaaattgttttcatcagaaatcttgagtatgaaaaacacgtaagcaatgatgccttcctaggtagcagattcaccagtgatctccttttggaaggagtgtgcgctaattgaaggaaattctttagcttgccctcaagatttaaccattctgaaaaactacactagaatattcattttttagtttgacagtcacataatttatcctagaaatagaatgtttccaagccccattttacctgtaaaaccaaatgtctgtgtctggtgtcttctaggcataaatcacctctatccaaatgggacctaaacaaagacagatactcattctggcgactgatgtctgtggctagtatcagagcacctatctgtgtctccatttgttgcctggaaatagagaaatataaagagaaaatataagactttcaattaactatttattgattttttttcttaaccataataatcggaaggctttatagaaccctaaaatatccaactatcattcaatttaaaatttatcacacaaaaaatgagttttatagaatgcttcaaaaaaagccattaaaataaccaaaactaaaaccaagagtttgtaggaaaataccaatatgcaaacattccaaaaggagagcctttattttgccagccaaggtggtatta

SEQ ID NO: 130036 - DNA, 1012 bp, Homo sapiens
gccaaggaagtgtgctctggggcagtcagtttcagtgaaagcaagatggcagaggcaatgtcaggagggaggtcaggtgcagccacactgagttaggttactatgtgggacaatttttaaagttttctattgtctattctcattattttggtgtctttaaaaaattaatctatttgaaaatgtctagttttcagttctttggttgtggaaaagtaaaacaacaaaaattaaatttttcttataatgaaacaagatgtgacatataaagttcataactggtaagaagatgcatatttttgatagacaaaaagtgggaattattactctttccatgttttatattcaaaatctgtatttcaaagcataatataattgtgttgacttgtatttcctactaatgtaatgtctcttctttctttttaggaaatagtctagtaagcttaacctttcatttatttagtcttcatggattaattgagtacttccatttagatatgatgaaacttcgtagatttttaggtaagtgattctaacccattaacagtaacaagatttacatttatacaagaacctgtttaagttttatctcagttatatcggttagctattgctctataacaaaccagccaaaattagtggcttaaaacaacacacagttatttagctcttgcatctgtggggctgttaaatgcttcttttggtctggtctgggtgagctcatttgtgcacctgcagacagcaacaggtgggctgcatgttggttttgtagagacctcagctaggataccaggcctgacccatctcggctctacatagtcttctgttaaatttaaaagaagcagaggagtttggcaccataatagatttacattaaaaacaaaaaagaattatttattttacaattagccgagctggttcaaacagtagtggcaggtttccgagagagctgatatccccaggccgctggagccctgggctcagaatcggcccaccttcacttctgcatgcagca

SEQ ID NO: 130037 - DNA, 1051 bp, Homo sapiens
gacttgtgttcttactcactggtattataatcctcagttggtatcttgcatgcagcttttcaattacatatgggtagtacactttaagagactgattcttgtcagattcctttggtggggacattacatgtgtttcttcactgcactttgcctgaattccaaaagagggtattttcccattagattgtagctttcttaaaacttattctacatcctagaaatgggtaatttgttttgttacatttgaaaaacaatttggagaaccttatgataatctaaatatacagagaatgaataaacattctaaaatatttatatactcgaagatggttgttacagcaatagcaacagacacgttgttcacttcttcagaaatggctccacaccacatggactcgtgtttgtaccaatagagcatatcaggacctgaacacattttaacatttaatttatttaaaatgtaagatttgaaatgcttttttctttccacatgaaggtgatacgtcaggtagtttttaaaaatagtctcttttggcctgccacatcttttctgtcattgcttatgcaaataatgctccaattaatgtactttttcatcagctgtggtcttttgttggcagttggttaggcagttttagataacaaggttaaccaaacagtcctttattatccttcataaatattattattataaattttcaatttgggactagtatgtcttttatacatttttgtaagagtcatcatagacgagagaatactagaatcgtgtattttattgcattatctgaatgttggcagtaatttatgagtctatgtgaaggatgtagtctacttaaaatagactttttaatatgtagcctatttaaaacgtggtctatttaattgttaaaataatatagtatatgtgtcctatggaagtttacaaaactgagaagtataataggaggtataaaaaatggagagttacaccatggaagggaaaacgaaacatcataaaaatggtagtttttccaaatttaatttctattcttggtgtgactccacttgt

SEQ ID NO: 130038 - DNA, 1080 bp, Homo sapiens
ggaggctgaggcaggagaattgcttgaatctgggaagcaaaggttgcagtgagctgagatcgcgccattgcactccagcctgggcaatagagcgagactgtctcaaaaaaaaaaaaagcaattcagctaatgttttgccccagagctgaaagtacactgagaggaagtcagtgctgactttagaataatgaaatcactgctgtactttgaaatcacctgctttttcttattgctttggaatgaagctcctttgataaggatgccaaatatgtaaaatgaacaaataaattacctttatttttcttgagaatcaatgtgggtcttttagtatcactccattattctctgtaagctgtatggcaatgcctagtggaaatacctttgtctataccttctgtttgcttatgcagtgttgacagaaaataaactggactgatcctaggcaaaattgtgaagacagtgaagtttgtctttatcagcagagccaccctcctgcctccctgcctttttattcctccccttcgctatctctcttctacttttcctttgcccttggtgattaagtgttctgttcttctccctgcccccaccttggcccgtacacacaggaaaggctctgatatcatttacacagttagccttcccttggcccttctcctttttgaaaatacaggtagtgaaatatcaagtggcccaccttcttcttgctcagggaaattcccctttcctaacttaacacaaatattattttaggtattatctcaaggcaaatatagatgaaacaatgccactcttaacattttcaaggtttagccttacataaactctcacagctcatagcctattattagtctactgggacacttgtcactcattgaaatagttgattgttcttctccaaattttatttttaaaaagtacatactctgctagttgggggcatggtgatgaaagcggcgtgagctcagcagtgcactggatgggcagaagaaatagccagcagtccacagtagttaactaagcacttcgctttccttttgatcacctcactctttgaatgggatttgtggacagggtggc

SEQ ID NO: 130039 - DNA, 1029 bp, Homo sapiens
gagaccctgtctcaaagaaaaaagaaaacaacatctgatagtgttgttcttagtaataaaagagtgagtaacttataacagtacctggaatacagtaaatactcagtagtgtcacttatttttattagattgtttgcaatttagtttctaaaccatacaacatttgaaccacacttctgtgatgttaagtgatactagaattcttaaaggtttgcaagactgtagcaataagctgggaaacataaccttcctgtgcattcattaattgaaaaacaaaataatgtttcatttttcaaatggagtttatccctttggcatttttttggagccagttgaaaaagtcatgattaaaagaaaaatgatacttgtattttttaaagtaaatcaatcactttacattttctttaacttctctatggaatatctccaaaagacaatgttattgaaattaaattacagtagaaatgtttggttttcatttcagtgtatgctggaaaaagttggaaattggaattttgatatctttctatttgatagactaacaaatggtaagtgaagaatttgacttgctcaagttaatgtagtctagattactgcattgatggtgcagccgctggtgcgttgctttcatttactgtactaaggttgttagccctctgctggaagagagtgtattagtccattttcacactgctgataaagacatacccgagactgggtaattgagaaaaagaggtttaatggactcatagttccatgtggctggggaggcctcacaatcatggtggaaggtgaaaggcacatcttacatgttggcaggcaagagagaaatgagagccaagcaaaaggggaaaccccttatgaaatcatcagatctcgttagacttatccactaccacaagaacagtgtgggggaaagcacctccatgattcaattgtctcccaccgggtccctcccacaacacatgggaattatgggaactacaattcaaggtgagatttggctggggacacagccaaaccatatca

SEQ ID NO: 130040 - DNA, 1035 bp, Homo sapiens
tgaacatcagggttaaatgagcttgtttttaaccaaatgaggattttaaataatattaaatttccaatgtattttaagttatatttgacttaatatttacagaccagattcttgagtttgtgtagataagtttttaagttgtgtaggtaaagctggggtgtcttctttacaattacatgaaagtgaagaaaattacttccctgtttagtaaaagaaatcagtggaaagcgttcatgcctgctttaaatgttaaaatgtttacaagttctgccttttagaatgagaatattgatctctatgtcatttgttgttattagtactgttataattaatgatttctactagtagtatcttagtgttgctcatgtcagtgtattcataaatgtatacaacagtgaacttttggatataaaatataagtttttttctagaaaaagtccacaaaaggttcaggttaagaatgtatggtataaaaatatttggtttttagggcctttgtgggatttatttgcttggctgaagtacacattatcctaaaagttaatgtagtaaattgtgttattttataagcatatttagataatataaatacatatccataagttagaagtgtttttttaaaaactgaataacaaataatttaagcatggtgtggtatcagtgtcagatgcctaggttctagaaacagactacctaatttaagatcccagctctatcactttatagctgagcaagttagttattttttgcttgtttctacgtccctaaaatgagaattgaaaacaatgcctgggctgggtgcagtggctcatgcctgtaatcctagcacgttcggaggccaaggtgggagaatcacttgagtccaggagtttgaaaccagccctgggcagcatggtgagaccttgtctctacaaaaaaaaaaaaaaaattagccaggtatggtaacacatgcttgtagtcccagcttctcgggaggctgagacaggaggattgctcgagcccaggaggtcatggctgcagtgagccgtcttgttt

SEQ ID NO: 130041 - DNA, 1048 bp, Homo sapiens
tgaacccaggaggcgaaggttgaggtgagccgagatcatgccattgcactacaacctgggcaacaagagtgaaactccgtctcaaaaaaaaaaagattgattactcttattgttatgggttaggcatatttttactcttcagagctgggatgtgggatatgctggatccctcttatgctgaaactcagacgctgaacatagcatagctcctcagtcattaaattcttaattcccttattaaagtaagctgagaaagaaagatgaaaagcaaagtacacaaagtcttaatgcagttccttcaaaacttaacatacaaaataaagctgaatttccaatgtcaccaacttgccaaagcacaagtaaaattaaactaccattaaactgtattaagattaaggtccaatacgtatcggtcaatttcctaatttatgctatcgagttaaggaagatatttagaagacagaacattctgttctttcaactttaggacaaacaagaaacaaagattagtggttcttaaatgtaggcacttatgaatcacctggaaactaggtgaaagtttttttaaaaactgcacatacatggggcagaatgctctgtgtcctaatgcaattcagtacagcagtgctaatctctacaagcaccactttgtaaggaattacaatagaaaagagataggagcatgggtgatagaaaagacaggaaaaagggacatgggattattgtttcctgggatatcgccataaactattaaagaaatgtttgctctgaaacaacctgatatgacttcaagagaaatgaacgactgggaagaaattaaaatttaatagacactccagacaaataagatcttagtctacaataccataactacaagcacaggctggcaaactcgagtctgaatgagagactaaattacaaatgatggatagctgctttcgcagaccaaacagataatggttggaaaaaagtatgcttgtgaataggaaactaatgaccatgcagtacagtatgaaagttagataagagaaaaatactataatgaaga

SEQ ID NO: 130042 - DNA, 1045 bp, Homo sapiens
ctacgcccggctaattttttgtatttttagtagagacggggtttcaccgttttagccgggatggtctcgatctcctgacctcgtgatccgcccgcctcggcctcccaaagtgctgggattacaggcgtgagccaccgcgcccggctcgcccattatcttgagctctgtattcattttaacagttaacttcatcccatgctagggcagcagggggacctttcaggatatttacattgtagcctataagctcttcactttaggcttttagttttattcatctttttatttctggtctctggcagcttctggctcatagtagagactgagtatatttttattgcattgaattgactatggctgtgtatctcctacagttagattttacaggggcctgtttgtagttctctccatataatctgtattaactgttaaccaagttcaggctggttgctgcctttctgttgaatcatgtgtctcatattgtctttattacaatgactgtatgaaagcatacagaattttccctaaatttcgcttagttcctcatgtgtatttgatttggagttgtttcctgtttttctgataagactgtgttagactttgattatttgtttcatacttagttgtattatgacatgaaagaagatgtttcttaaaagctcatatcgtactgattatattgtcttagtttatctcagtctttaatatctagtaactcccatacaagggtagattctgttatatttggaagcttttagtgcttttccccttttctttaggtgtacaaatagtttgctcagcatttccctcagccatgcagctttcttcattatagtatttttctcttatctaactttcatactgtactgcatggtcattagtttcctattcacaagcatacttttttccaaccattatctgtttggtctgcgaaagcagctatccatcatttgtaatttagtctctcattcagactcgagtttgccagcctgtgcttgtagttatggtattgtagactaagatcttatttgtctggagtgtctat

SEQ ID NO: 130043 - DNA, 1174 bp, Homo sapiens
gaggttctcacccatatattgattttcgtattttccactgtaagtgttggtagacatgaagtttctcggattttcactacaaattttaataaaattacacagttttccaagggaaaaagaataccagaaaaaaaactctattatgtttggaatgtttttaaaacctaggtcatgtaaatgacactatttctaggtaatcttagtaaatacttagagacaattagaagaggaagatactaaaatatgaaagttgatatagcttttctcttctcctctaatttattacttttttttctttaaaaagatttttttaagttgttttattccaaatggttagtcttcactacttcaactgaaatgtttttgtgcaaatgatattttataaaggtatttcagtagtttaacttatcttttaggtttatttgaaaatgtatatcacctttaaagatgcttggtagaatgcctatttcaaaaacaagcattctttgtggatttggcctatagtggagggaaaggggaaaaaacagaacttctaaacaccttaaatattaaacatattaaatctgtttctggaggagttccactttcagtaatgttagctaaagtaatttggattgatgctctaaaaaatgagaaaactattcaaaatgtaaaagacatgtatgtattcaaatgtatctgaatgctattgaggcagagagataagtccagaacttcaggccacttttcttcttaatagcatgtactgattctgggaaaggtggattagaagatgggcagagctttttatggacacttagggatagagaaacaaaaacaggtgtttagagcccagcaaggctggaaggttggtgctggtaaaccattcaggcttcggttggaatcctaaagtgctatgtcttagaaataaatcccaactttgaaatatctcactcaccgaatacattaatgtgatctgtgactcatgtttcttgccacctgcaggacagagatgttactcatcccttaagtttgctagctgcaaacagagccctgggacatgtcctaggcagagagtagtcagggctttgtattcttgagacatcagtaagaatgtgtagggacactcggggcctcggaggaggattacctctcccagtaacaaatgaccccaaaacttattggcataaaataa

SEQ ID NO: 130044 - DNA, 1036 bp, Homo sapiens
agcacagcaagtgttagttaatatattatcactcttaccgtgtaatggaaatggcacttgcttttgctaataaatcatttagtggaaaacttggaacaaaataaaaacaatgacacttaaaatatctttgctgggttttaaaacatgtctgtctttaaaagttatgtattaactaatattgggaacaacttttacaccttttatcatttaccttcaagtcaaatcttttgtggaagaatgattcaccctaattcaaggtgagtcttaccagggcactcagaactcctgttagtgaggcagtgggtcctttggtgctttacagtttaacttgtttgtgctactgctgacagtttctgattagctcagcctcgcccatgttttgacctatactagttcgctttacaagctgttcccaggatggctaaattagaaaagtcacgagtagaagcctctcagttatttccattcactggtgaagtgaggtgggaatgtgggtgatagctctgagagttttatgactgacagtgtgacacaggattttgatgaaatttgttttactgttattaaaaagaaaattctagtagtatatggtttttaaaatgataatctttaaagaaatcttttttacatttgcagcagtcttatataaaagtagatataattatttttaaaacaacatgattctaacacggaggtcaaatttttattgttagaactcataatttatagtgttttttccaaaatgagttactgtagattattctaccttcctactttagattattctacctagtgagagaacttaatattcattttaattttaattcttaagtgggtaggtgaatgaattatcactcaggatgtatttgttgatgggttcagatatttattttaaagtccattctttaaaaacagttttggtctcatttggatttatttcataaaagctatgtcttgtggttcagtatagcatttaagctaagtatttgtagactagccttacttaaattagtaccttataatgaatagaataact

SEQ ID NO: 130045 - DNA, 1026 bp, Homo sapiens
ctacattttgttagactgttaggtcagcgctcactaaagtcttttccctcccctcttccaacattacttaggcagttctaccccaaccctgcggttgtggcatgaagcatgcgctgggtaagaaggctggctgggtagtgcattcccagaggagtcaggtgatcactgttggaaggcagctgcttgaggtccaaggcagtcagtgtcccctctcttttgcctcgggacagctggtatttatcagactcctaagaagttttccttgctccctagtagaagagagagattatgcagcgggcttttgattgatccaatgggaattacattgatctggtgtctggccttggttcttatcaagtggatcacctctaaggtaggccatctttatttttaggatggtgacattcatcattagtttacatatttgataggaattaaatagctcgattttctcctccttttgcctcagtttttattctctgattaaaagagctgtgagtttcatctgtcgaccaaagggcttaaatttactatttgtagtttttgttcttatcccacattatttcttcttaagggctttttataatatctttcctcagtatcaaagcagcattcctcagtatcactgccttaaagaagtttttatgactaaagaagtttaacttttaagattataaaattaagttatacttttggtgtatatattttaaacattctctcggagaaaatgtaataacacttgtgtatttaaagtataatgttgaggatttctaaacaattataaactttttaaaaacgaaaaaccaccgtctatcatgttttctcctaaggtcttgctactgctaaaatacgtgccttagctataatataatgacataaatgtaggattacatatatgttgtttttgaagttgaattctaaatgtcaggcttgagaaattcttgatagaatgctagctagccatttgccatctggagaagggtctaaaactaaagtaaaacatatttaaaattatactctttgaaa

SEQ ID NO: 130046 - DNA, 1006 bp, Homo sapiens
tttctctttatacctatgttttagagatgttaaagttgacacgactttcttgggatggagggaattcattctaaaatgaggaaataaattgggtaaaagtatgacagtggtaatgccccagccatgttcaggaaatcatgagtaactatttggcttgaattagggtaggtatagggttaaaaaatgaaatattagaattaaatttgtgccatgagagagactttaaaaatgatattctgtctttgtaatacaaaatatcatgctgttggctagagaaggatgtgtgataaagtgctggtgtatgcagtttgataagagggttacatattgtatgttctttgctgtgtccccttttaaacctttgtcatatagatttttcttaccatattagtttgaattatatcagcatattaaaagagatatgttggtatactgaatgatgcatattttttctagaatgtgtatgtgtgtctgtgtgtaggagaggtgcaaggagagatgcatatacacacaccttgcctctgctggtttgttctcccaatcgtatcctctgtcctatggttcccaactgctggtggcaaatcccaagagaatttgggaattgacaggagcttcatgaattcatgtatatttcagaaagtaaacttaaaaactctcatacatatatataagcatatttcaaatataaatactgttgtgatgaattaaatccatttaaacataaattcacaataatgttatgctattttgtacttttctcagtggataccagaagaaaaaggcctatcttgtgggtgtgtgcaaactattttgccattaaaaggggtttgtcattcttcaaaagattaaacaccacctattccagccatgtcttgtctcctgaaagtaaatttgtgatttagactgtcaaacacttgggaaaatttctgactggtttaacattgttaaatgcacacctgattactgatgcagctgactgaaaattgactattacgttgagtaccaa

SEQ ID NO: 130047 - DNA, 1042 bp, Homo sapiens
actgaatgggggtggggaagacatgtacagaactggctttcctgaaacagtgtgagcaggctccagtatgacactcgttgtatcagccagaatttctttagtggcaagtaacaaaaaacttgttccaaattcttgtatacaataagatttacctagaagacccagggtttagtggctccagatatggttaattcagcagctcagaatcatcatcactgacccatgttctgtctcttttgctactgatgtaatacaacatgtcagtagaataaaaaaagccatgtgctcatcccagtagatgcaggaaaagcatttaacagaatctaacaccattttatgataaaaccatccagaaaactaggaatagaagggaacttcctcaacctgataaagggcatctacaagaaacccacagctaatattgtgcttactggtaaagactgggtgttttccctgtaggaccaggaacaaggtaagcatgtctgcttgtgttacttgtattcagcattgaactaaaggttctagccaagtcagttaggcaagaaaaataaaaaaaacatccagattggaaaggaaaaagtaaaactatctctagtcatagatgatatgattatctacatagaagatactaaggaatctactaaagaaattttagcactaataaatgagtttagcaaagttgcaggatgcaagatcaacatacagaaatcacttgtatttctgtacccttaaagtgaataacctgaaaatgaaatggaaacaactcaatttttaatagcatgaaaaagcataaaatacttaggaataaatttaacaaagggagtgcaaagtgtattgtctgaaaactacaaaacaatgttgaaagaaattgaagatctaaataaatggaagaatgtcccatgttcatggattggaaaacttaatattgttaaaatggcagtactccccaaattgatctacagattcagtatagtccctttcagaatcccagctgattgctgtagaaattgacaaagtgatttgaaaaaatatatggaattgc

SEQ ID NO: 130048 - DNA, 1185 bp, Homo sapiens
cataacaaatacaataattaaaaagtttgaaatattgtgacagttatcaaaatgtgacatagagataagaagtgagcagatgcagttgggaaaatggtgccagtagacttgctaggtgcagttgccacagaccttcattttgtaaaaaaaatgcagtgtctgaaaagcacaataaagcaaggcattcctgtatcttctgtgagttgtttctattggctcttgtttttgttgtcaacttagtatttttatatcaatttttgaattattttgtattgagaaagaacattttgtcatatttgtgggaaactttccctttttttgccttatttttaatgtcctacttgtactgccagatcttaactagtaagtctttagttgctgtaatgatgtaataatagcagtacgtttattattaataaaagtttttagtattttataaatctcgcacatgtaaactttttgtcttcaatatactagtttgataaagattttaatatattgcattggctaattgtcagtaattaatgactagttatctcttcatgtttttaatatatggtaaaggtgacaagataaatatttttctagacctgagaatgtggaatgggagggaaaaatttttatgcgtgtaactgaatgtactacagaagcactcagtgttaaagaaattgccacacataatctccccctaaatcaagtatttttaattttgtgatgttatagtaagaaaaatagaaaataagacccatttagacagattagttttctgaaacttttaagtttttaaggagaatttatatcttgcaaacatttaaagggatttttaaataataataacatacaagaggacaatttgaaggtaaaagcagaacatagattacctgcaatctgtagaaacatcattattcagtttaatgttttctttgtctcacaatgaaaattctccaaattcatttttggagaaaaactttgtggaagtgactttaaggattttggtggttggcctcagctcatttctatttgaggtgtggtttttcaaactttttagaggttttccaccctcttctccccatcagtggtatttttaaatgtctttattttaatgttaggacaccttagagcaggattcaagtgggctgtgcaagaagaaccactggaaatagaaaaataaaacttgaagatttt

SEQ ID NO: 130049 - DNA, 1034 bp, Homo sapiens
tctcagaatgtgaccttatttggagtaagggtctttgcaaatgtagttaagatgagaatatatgggattaagacagaccctcgattcaatgagtggtatctctggagtcccagaaactcagacacactcaaggaagaaaatcatgtgaagatggaggcagagattggagtgatgcagccaccagccaagaacaccaaggattgctgggagacatcagaaactagaaaggggcaaggacgattctcctctaaagccttcaaagggagcatggtcctgctgactccttgattttggaccttcagcctccagaactatgagagaatatatttctgttgttttaagccacccgatttgtggtactgtgttaatagccctaggaaactattacagatggttttgattatttcaaatttatttgttcattctttcaatcaaatttactgagcacttacatgccaggcactctgctaggtattacagagataaataagacattgttcctgccttcattcttggggtttgactcagtagaaaaagcagctttgtaaatagacagttgcaatacattttgatacatgttttcactagaatgttatatgaagttaagtgatggcacctgaagctaggagaacctgggatgttttacgaagtgagatctttgtgtttggtttcaaagatagagttgaaaccagcctccataggaattctgttttattctgccactgcagtgctatcagtcctacctagttcaaagcatatttagccggctgcaatagcctcctgtcactagaattctacctccacaatttggttgaagtaatttttaagatgcagtaagattgtgtcagtctattgaaaacatcagtgtgttctcatcacagtaaaacacaattcaaactccttttcatgatatggccccatgtgatctggttcctgctacctcttcaatctcttggcctttcacagtggtcttcctgctgtttgtgaatatgccagctttgttctggtctttgtctttgcattggctgttttgt

SEQ ID NO: 130050 - DNA, 1136 bp, Homo sapiens
gaagcttacagaattgtgatagagaaaatggtatgattatatgtggtgtaattattatactggagttatcaaagtgttatgagatgataaggcatgtatgcctaaatttctggtttaaatcaggattagccttatgtaatcgttgaggctttcttaggccaaggactgaaggtgaagcagttgtttctagacaaatgggtgaatgtagggggaggaggaaggaggatggcccacgtggatatgatcagagatgtccagtagaactttctgtgatgatggaaatgtttttgcactatctgatgatagtcactagccttatgtggctagtgggcacttgaaatgtggctagtatgactgaggaaatgaatttttacttcagttttatttaaatagctacatatggctagcagcttttcaattggcagagcagaggtattgtcaataaactagagtgaagtcatgttaatctatgagcaacacattctctgaatgttgaacatttttgtttttaggttttcgttgatgtatgcaaaacttcatttaataaataccttcatgcatgcttgataaagtctttaaaatcactaggttgggtcaaaaggtaagaacatcttttgaaattcacaaaaggatctatcctttgatattaccaaaataggtgatcctgtctgtttcatctccaatcatatattattagacattttataaacattttgctactatagtagatgcagtgtggtacactgagtttgttttaaattgcagtaagcaagagtgtgctttctgaagtattgcttgtgctatttgtatttgctcttttgtgaaattttatttgcatatcccgtgcttgtttataagggctcttgtgtacccaacatcagtatataaatgtgcattattccaaattactgttagcataatagttgcctctttgcaaacttagatacagaagctgatacagggactagtgtggccagtgagtgggataccccaagggaagtggttatatttatgagaccttcctacctgtgtattctcaaaacacctgttttgttgggaccttggcttcatttctgttttcagaaatgcttcatactttgatttaaatttaatactaccatactttagctttcact

SEQ ID NO: 130051 - DNA, 1821 bp, Homo sapiens
ggagcgcctccccaaggagaaggtgccccggggctccggcaagaaaaggaagtttcaaccccttttcggggactttgcagccgagaaaaagaaccagttggagctgcttcgtgtcatgaacagcaagaagcctcagctggatgtgactagggccaccaataagcagatgagggaggaggaccaggaggaggccgccaagaggaggaaaatgagccagaagggcaagagaaagggaggccggcaggggcctgggggcaagaggaaagggggcccgcccagccagggagggaagaggaaagggggcttgggaggcaagatgaattctgggccgcctggcttgggtggcaagagaaaaggaggacagcgcccaggaggaaagaggaggaagtaatagtttctaactgtcggacccgtctgtaaaccaaggactatgaatactaaatgttaagttctaggcaattatacggggactcagaaggacctggccgctgccttcattgagtttaaagggacaggattgcccttccgtcaagaaagtatgtaagtgttggactgcacaaattaatgtttttcccacaaccgagactttggagattaagaacttatttgaggatttaagaattagggaaataatttggtggaaaccgggaatgagttctattcttaaacagcctttttttttctttttaatgttggatatacggcgaggtagagttggccatatttcagagacttagattgacgtatatgtttctgcattatttttacaacaagtttgtgtatcagagcgggagtgcgggggagggaaagaaaacaaacagtttcagaattgaataggcaagtgactgttttaaagattaagtaataaagatgtcttatctagtgtgacttttaactttctgactactgggtagaaattgtacttgaagccggttacctggatacctggtacagattatttttgtttactttctgaaaaacacaaagcaggccgtgcgcagtggctcactcctgtagagtcccagtactttgggaggccggggcgggcggatcacctgaggtcaggagttcgcgaccagcctggccaacacagtgaaaccccatctctactaaaaataaaaaaattagccagacacggtggctggtacctgtagtcccagctacttgggaggctgaggcaggagtatcgtttgaacctgggaggcggaggttgcagtgagcccagatcacgccactgcactccactccagcctgggcaacagaggaaggggccatctcaaaaaaaaaaagcagttcaattataatggtttcagtgataccacttctaaacttatacttcttttggtatcaaatataatattcaaagtagtaaaactgatgtctgttttttaaaaagattttatgcctttcaacactgaacacatggatttcctgtaaatgatcaatttgggcttcattgactaatggtaataatcctcattaatccagaaaacacttaaatctttctctacgtttatatccccagttgtttgtgtgtgtgtgtttgtttttaagcttgacgtcaggtatagttttgtttgggggaagaaagaaacagacccataagatccttaattaggacattattatctttttttaagttccggagtagatgtgcaggatgtgcatgtttgttacataggtaaacgtgtgctgtggtggcttgctgcacctatcaacccatcacctaagtattaagtccctctgcccccttctatcccctgcccccaggccccaatgtgtgttgttcccctccctgtgtacatgtgttctcatagaaca

SEQ ID NO: 130052 - DNA, 1033 bp, Homo sapiens
agagaagtcgaccgagaagtgagatgcggtggcgacctcggagcgcaccgggtgtgcgcgcagctggggcctctggggagcggcgcggcggggacggaggagagctcggagcccggggctgcaactgggcagagaaagatggggaccagggaggtctttgggtccaggaagttctcctggaggctcaggtctagagcctgcctgaagaaaaattagacatcttgaagacactgggaaatatataaggcaagttcccagcatagggtagtaagtaagaagaggcacacagagttaaccttgggccgatttggtcaacgctcctaacccagtaagagctggggcttcatggagaccagagacccccatcttaaacttgcatgtacccccagagcgtttatctcagctgcccgcaggcatttgataggaattgctagagtaaatgaattcgtgaaagaatgatgctacagcgctgggaagacgctgagtcaactttttgtccatcgtgatttctgggtctatatatattttttctattgtacagtgtctgccaagaactaccaatttgatagcatcttagcactagactgcaatgtgagttagcttaaggcttttcattttttggtctctattttcaccttaggttttttttgctgtcgtttttattttccctaggtgccagtgcccaactcattctcatacttactcccaaggtaatacttctgtatttttaaactagccacaattttggtttctgcatttggcattataatacatttgggtagtgtatgtaaagaaaaccaaggcatgtgagagcaaggtccatgaaaacagttaccatttcactgtgaaattgataacacgtaactctatacaaagttagctgaatgtatactactaatcacgtgtttgtttgtctcaaatatctatttaatgctacttacaacgcttttctcttttaattacttgccaagtctaaaaatgcacagataggattttaagaatgtctgagtttgtcaaacagaattaatcaaga

SEQ ID NO: 130053 - DNA, 1098 bp, Homo sapiens
aggtaggcatttgaagctaagggaacagttgagagtttatgatgtgtttgggaaaagacaagtcattcaaatgacaggagctgaagtttgcttaaggaagtgtggtgcgtccacacttctttaagtgagaccaggtgggagatgacctggaagaccatgctaaggagtgtatactttatgctctaggcaacaagaaaccatttcaggtttttagaaatggactggccaactctcaaatactccctacacctaaacctttttatttttttcagatggctgtttcaaatattagatatggagcagcagttacaaaggaagtaggaatggcaagtattcgagatgtctacggtctcctactgtaaatgttacatatctcacaagaccatgctaaatgacaacaatcacatcctctatttttaaaaatgtacaacgtgagtttgccagaagagtctattgcagttctagtggagttgaacctaacttataggttttcttgtaggacctaaaaaacatgggtgctaaaaatgtgtgcttgatgacagacaagaacctctccaagctccctcctgtgcaagtagctatggattccctagtgaagaatggcatcccctttacggtttatgataatgtgagagtggaaccaacggattcaaggtattcttgtattgttgttattgtttctttactttaagcagaagctaactgttgattaaaacttgcccccaaccaggcgtggtggctcacgcctgtaatcccagcactttgggaggctgaggcaggcagattgcttgaggtcaggagttcgagaccagtatggccaacatggtgaaacactgtctctactaaaaatacaaaaattagccagtcatggtggcaggcacctgtaatcccagctacttgggaagctgaggtgggagaatcgcttgaacccaagagacataggttgcagtgagcggagatcgtgctactgcactgcagcctgggcaacagaatgagactccgtctcaaaaaaaaaacaaaaacaaaaaaaaccccacaaaacttaccccaagccttagttaatggcatggcaatttatttctgaaaaatataacatac

SEQ ID NO: 130054 - DNA, 1781 bp, Homo sapiens
aagagtttaccccagagaatttgagagttcattgagtaggaaattttcttctttatgccacagtgactgcagcactagtattcctgatattgaagcataccttgaaaacgtctttggcaattacatatgaccaccttacatctgttttcagccactgctttctaagagccatgtagcacattctcttaatccatgtaaaatgatttgagttcctggcgtttaattaacatagaacttttggggaaagttattatatagaagatcacatctataacatagtaatctttaaaataagggaaggaaaaaaacataagcttgattttttgttatgaatatatttcctaatttgtaaataaagcattcttggctcattttttgacattacatcctctctttaaatcttttgcaaaattttgaagcaataaagactaacatttatttccatgttaagactcatttgatttggggggaattattggggacaagacttttaaactgcctccataggcctgtaagcaatatagatagctaaaataattgactttttaaaaacttgataaaaaatatttcagtatatattttaaaacattattattaaaaaaatacagtgccattgttaaaacatttttataattattgtttataaaatatctaatcagttaaaataactgactttaagagtctaattgtgatatagatagctattttaataattttcatgtcactattaatatttcctttctagtcaaattgtgaatgggaaacagtggtttatgggaagacagaagaccaacttattatgactgaacaagcaagaagatatctgagtacttacacagctaccagtagtacttcaagagctctcatactgtaattgttattaaaattgatgaaatgccccactcccttactgcagtctctactaaattaggttgcagtgaaatttttctcaattagttgtttttaaagttgtaagatagcccttttaatacagcatcttttttctattctatatagtaggcagaaagctagtaagtcacttaaggggtagatagtttcatagtttattttttaagagatgagatttttaaaaattgtttttaaagaacaagatgggaaaataatagaatgttcatggatttctaaaagtaaattctcatatattttcttcacaagatatatgttgctactctcttgatgctgcagttttgttatagataggtgtatgagtatatatgatttctgaaattagtctatgtatggaaagcacacatgattttatgaagtacttttgcccatgtgctgatttacttaggctaccatttacaaagaaacacattgaaaaggaatttaaaggaaggatagaaagttgcactactaattttttgttttttttttcagaagcagtaaaattaactacagtgttaaatgtatttatttgagcatagtactgaaaacaaaaagcattcaaaaaagagttttttctttattagtaaatagtattttcttaatctcagaggagctgagagttttgttgaatgtattgtacagtatgtaggagcaggagaactttgtaaattggaaagaagtctgtttttataatttatttttatttttaaagcttaaatgtagatatttatacgtatacagggtgcctagaagccaatgttgtttcctgttattacagctaacacagtaaagaataattttgactttaagtatgaaacagtagtaagttatagctgcaaagaatacaatatctatactgtatgtcacatcta

SEQ ID NO: 130055 - DNA, 1421 bp, Homo sapiens
aggacagtgaaaaccaactgaaatatagtgtcaaactttgatttcaatcatttctagtactttttcaaacatttctagtacttttttctatattaattctttttttctattttaagatgattgattgaaatcagaattaccataggtgggcatactttaaaatagtcttagaatgtttaaatgaagcatatatatatgtgtaagaaaatttagcgtgtgcttaaattgctttgctttcattaacttgtatgaaatcagatcgtgactataacataaatatctaaatgactggataggtttagaacacctactattagaagatctatactgggtaccacaccaagaactcctactccttttaagaatgcgcttgctgctcaggagaaaaaatatggacctcttaaaattgtggtatgtatattcattttatttttaataattttcctaattttaataaaacacaaattatgatttttatcactttgatttttaacatttaaaaaaagatatttactgaaacagatacaaagctttatcttttgattttcaaggttttttttttgttttttttttgagacggagtcttactttgtcgcccaggctagagtgaagtggcgcgatctcagctcactgtaacctccaccccctgggttcaagtgatcctcatgcctcagcctccttagtagctggtattacaggtgcccgccaccacacccagctaatttttgtatttttagtagagatggggtttcaccacattggccagcctggtcttgaactcctgacctcaggtgatccacccccctcccccccacctcggcctcccaaagtgctaggattacaagcgtgagccaccacacctggcctaattttcaagtttgaatttgtgttcacctttttctttaacttgtaaataaacccttgcttggcttgttttgaattcttaactttatagcatctagagaaaacatcaggtgtcagtggaactcttttcctttttccttttttttttttttgagacgcagtcttgctctgtcaccaggatggagtgcagtggctcattcttggctcactgcaacctccgcctcctgggttcaggtgattctcccccagcctcctgagtagcttggactacaggcttgcgccaccacgcccagctaatttttgtatttttagtagaaatggggtttcaccatgttggccaggatggtctcgatctcctgacctcgtgatccacccaccttcggcctcccaaagtgctgggattacaggagtgagccactgcgccctgtcggaacacttttcttaatactgaaatatacattttagtagtttcagtcatggttacatgtattagaataaaataattttaatattttgatatactgaagcactttcatgataatatttaggaaactaat

SEQ ID NO: 130056 - DNA, 1015 bp, Homo sapiens
ttttgctcttgttgcccaggctggggtgcaatggcaccatctcggctcaccgcaacctccgcctcccgggttcaagtgattctcctggctcagcctcccgagtagctgggattacaggcatgtgccaccacgcccggctaattttgtatttttagtaaagacagagtttctccatgttggtcaggctggtcttgaactcccaaccttaggtgatctgcccgcctcggcctcccaaagtgctgggattacaggcgtgagccactgctcccagcctccaaacaatcttcttatagcatctcagttaatgctctttcaaaaggagttaggtggaataaaattctgaagttgagccacttgtcaaaggcaacagttagtaagagatgaagctgatgttttctgaaagtgtttggcagaggctacaaagtttaaggaggaagaagggagtttaatggtcaaacaaacatggagaatgctgggatattattggaggtatattttgaggctggggagataagcaggatctggcagaacacagatctctaaaaattgtgcacccatgcttcaggggatgccatttctgtagactacaatgtgaatagtctgttcactcccagccctgctctcagagttaaaaagcactggagaaagtgaagtaggcttgggcatactagcagttttctattctggagttttgcatgctagcaatttttgttgaagtgtgaattctaaggtagaagtggctgaaagatgcttatttcccatggcaaactgcttggattttatcgtgtaaaagagggtttgattactaatcttagggtaaaataaattcaagtattcagagccagaagtgacagagctagacttcattctagttataagtagctttgaagccatttctatggcttcatatcactgtttctaatcttttgactgcaaaaataaattagtatttcacaattgtaaattatataatttagaaaatggactctgttatgccagttttgactgcttagag

SEQ ID NO: 130057 - DNA, 1050 bp, Homo sapiens
actacagataacatataaagctttgtgcaaaatcatgattatgtctttaggttaaattgaatttctggatcaaagtatatcaccatttttaacacgttccatacacattaccaaatgattatgcagaatttgatggtgtcttcctgatgtgcagtagaatgtgaagttttatgacgaaatatactttttgataataacttaatttttgataataacttatcatttgttcttaaagtactttgacagtaagcttcaactactgaattagatgaactattatgtattttggaatcataggaaagccataatctgttcctcttaaatggtcttgcttaaaaaaaatgtccaaggaaagcatttttactgataaaatgagttgttaattaactctgtggaaatcatcatcctgtgttcaagagcagatttaactaggttacagcattaactttattaacagtttaatttattgcaggatcctgtagcatggagtgacgttaccagttttgatatttctgatgctgctgcttctcctatcaaatccaccccagttaaattaatgagaattcagcacaatgaaggagccatggaatgccaatttaacgtcagtcttgtacttgaagggaaaaaaaacacttgtaatggtggcaacagtgaagctgttcctttaacatccccaaatatagccaagtttagcactccaccagccatcctcagaaagaagagaaaaatgcgagtgggtcattccccaggcagcgaacttagggatggctcattgaacgatggtggtaatatggcgctaaaacatacaccactgaaaacactaccattttctccttcacaggtagtggtgttcattttgtttatgtttctaaatgtcaatgagttacattaaattagatctttaacatccttactagcagttggtagctttgataacatataaaaataatgtgtttaaatgtatacttgagaatactgaactctgagagaatagaaagtatctcacaaaatgtagtagctgcaaatatttatttatttatttatttattt

SEQ ID NO: 130058 - DNA, 1568 bp, Homo sapiens
ttcattaacaataggaaaacatgtgaagacagtataattatctgctgatactcaataccttaaggtttttattatgtttcttcacatttttctttagagtctagatttcagcagcataaactgaaacattctgcttctgtcttagaaagtttatcatttaaatttatttttttaactcgtagaaagataatacatggggccaacagagtatttaacagtcttaatctaaatatgttggaaagatgaggatatttcttatactgtaagaattgtttcccttttaatttagatatattcattattcaattaatttaaactaataaaataattttattatatgtgtgacttgataaaagaatagatgggtttaaaatactgtcacagattttcatgaaaagtttgggaaagatacgtttctaattcattagagttaccaagttgagcaataagtggtactaatcgagtattctaaaagttaagctctatgttagaagttatacataatgattctgcattatatagtgatttaggtagaccattacggaaagcagacaatttcatatttatggtttttgattttaaggctttttttttttctttttgagacagaatctctttctgttaccaggctggaatgcagtggtgcgcacacagctcgctgcagcctcaaccttctgggctcatgtgatcctcctgcttcggcctcctgagtagctgggactacaggcgtgctccactacacctggctaatttttttattttttgtaaaaacagggtcttgccatgttgcccaggctggtcttggactcctgggctcaagcgaccataccccctcagcctcccaaagtgctggaattacaggggtgggccactgtacccggccccgattttaaggcttttaaaaacacctcctctcatatttctttccactactgcttactaaatttatatgtatcttgaaaattcttattacagatgttttagaaaagaagcagaatgatacttagcctatcatcagtatatctattaaaagtatgtgagtgattctgattgtttttctaagacaagtaatagaagaagactttggcatggggtggtgataaaagtaggagatatgaacattgaaaaacttgcttcaggtctctgtccttgtgagtgcttcattcatatggacacataggaacacaattactttgttttctttaggagatagagcaacccttctaatagtagatgtttaaatatatttggtgaatgtcagatttaataaactggctgataaatctaggctaagtaattctcatatttcatctgaaaaaaagtcttttctaagtgttacgacttttaatcatagattctaggagtggagctgtagttatttaatagataagaaagtattataggtataacatttcaaaattaatacaggtactttctaagttttttatattgatactgtgtcaaaagtttttgtcatttgcttcagattttcaacatttatagcattatatgtatgataataatgcattaattactttttagatccctgggtatcagtatgtgtcacc

SEQ ID NO: 130059 - DNA, 1091 bp, Homo sapiens
ttatctggaatgctctttttttctttctgttctcgtatagctggtttgttctaaccaaaccaaaattactccgttacccacttttcttatcctactttatttgcattgtagtgaattttttattcatttatttgtttttctattcttccttccttcccactcccacacttccaaggagagtgtaagctccacgagagcagtgacctactttgccttactcactgcaatatttctggtgcttagaactatgcctgacatatgcacatacagtttatcttttgaatttttaaaaaatacctatcttcctgagtagaaactccaaaagaaaaattaagaaaaaagtatctaatttcatcagtgtaaaaatttgttttaagcactttgtacaagttaacacagtgttgaaatctgtggaatccttttttctttttaaatcatacctttcctttcttaggactgataattctatcaaaaatcattggaattctactatgcgaagaaaagtggaacaggagggctatttacaagatggaataaaatcagaacgatcttcatctaaacttcaacacaaaccttgtgcagctatggatcatatgcaaacccagaatcagttttacatacctgttcaggcacatacttttaatacctttattatttaaaaaattttcttaagttgctatatgggaagatgtttggtttcttaataggacaaatacaatgcgtattaaggggtaaatagacaaactgaaaaaaatgtgtaactttgatttataaatattttgagaacaaatttattaaaatgtttccttttatatgtaatttttacatcaagaaactatgtacatttcctaatactctgattctttgaatcttcatttatgattcaaagctaatggtcatctgtgctttaacattctattgtactttccatttaaacaattttggcgtaattatagtattgcttatctctaagaggtaggtatatataaaatggcttaaaagagaaagtagcaaaaataagtaattgttttgggggtgtggtaattaattggattttgctggcattcaactttgcttttccccctaataac

SEQ ID NO: 130060 - DNA, 1805 bp, Homo sapiens
cctgtaatcccagcacattgggaggccgagtcgggcagatcacaaggtcaggagatcgagaccatcctggttaacacggtgaaaccctgcctctactaaaaatacaaaaaattagctgggcgtagtggtgggcgcccgtagtcccagctactcgagaggctgaggcaggagaatggcgtgaacctgggaggcggagcttgcagtgagccgagatcatgccactgcactccagcctgggcgacagagcgagactccgtctcagaaaaaaaaaaaaaaaaaaaaaaaaaaaatatatatatatatatatatatatatatatatatagctccaccccaccccgctgtctgactcttaattttttgtactttgaataatttcattgtgaatatgacttgtagtctgtatgatttcttcagtcatacctgcacacacaagttcagtgtttgaatttacaaatttaaataaaattcttgatatcacaaattgtgttttttttgtagtgaggatgaggatgatgaccttcagtatgccgatcatgattatgaagtaccacaacaaaaaggactgaagaaactctggaacagagtaaaatggacaagggacgaggtaattatctgacaaggtttcatagtttcttacatgtatttattggttaatactgctatagttatacggccaggtgtggtggctcacgcctgtaatcccagccctttgggaggccgagatgggcggatcacttgaggttaggagttcaagaccagcctggccaacatgatgaaaccccgtctctactaaaatacaaaaattagcctggtatggtggcgcatgtctgtaatcctaatcctacttgggaggctgaggcaggaggatcacttgaacctgggaggcagagggttgcagtgagccgagattgcaccactgcactccagcctgggtgacagagcgagactccatctcaaaaacaaaaaaaaaatgctgctatagttatgaaagatatttaaaaacaaaatatgagaaaagatatgcatcaaattaactgtacgttctttttcttcaaccagagacatgaataactgatgacattggaacttagagaaacagtataataaatggaagaatttgtattatagtgggtggctttagttattctatggttaccagatattccttaatagaattggagagttatctatatttaggggtagaggaaaaggacggggggaaagctttctaatttttgtactgttttaataggatgataaattaaagaagttggttgaacaacatggaactgatgattggactctaattgctagtcatcttcaagtaagtgaaatattaaattatatttctaacatggctggtttaaggcattgggttaaatttgctatttttcaaaaatgtgtctacatattttaattttaggtttccttcctaaaaacatccctgttggtttggtctgcctctagttggttgctaatggcttggagagtctggtttagagtctggttttctagtaatgcgtttatccaggggcctaaaaagattattaacttaaaacaaaaatgataataaatgtatgtgggaccttataaatatttgctaatacacgttaaaacattctgtgagaaatatattgagatatttgatagctaaccaaaaaatccagaaaagccctattaaaaaaagcttatcatctgaggcttaccttttaaaatgttgattttaaaaactattatgcctattgtttaccatactactattcacctgctgttcgttatataactttataatttatgaagtat

SEQ ID NO: 130061 - DNA, 1019 bp, Homo sapiens
gcggcccccacagccaatgaggttcagggccgcgtgcgcagattcaaacggcggctcttgagggaggctgggcgcgagattcggcggtgcggacaaaaccctgcaggagactgcgagccctgcagaactgctagctgcgggggagagggcaggggtcgggcgcctgtggcggagccgggctggggccagggcagggaggctgacaagcggcgggagaagccggcggagggcgggatcgcgcctcctgacatgttgggggtatccctggccgggccgggccggggctaagagcggcgctgcgggccggggtcggggtcgggtcgcggtccgcccccgctgtccctccgtcctgccctgtcgaggacgtgcgttccgcactcggccgcctccagagggagcgagggaagcggctagaggatcggggagaaggagcattcgccggaggctggaggaggctgacccgcgtccccgcccagcctgctcctatgcggtacttgaaggatggcgaagaggtcgcgcaggtgggtggcacccctttcgcccaggcctgtcggcgccgtctcggctcagattctctttcctatcccgctgccccctcccgccataaggccctccctggcgagggcagaggtttttcttcccgcgtccccgcggccgcttggcctcgatgaccggagggcagctgcgacgtgtggagagttggggaccagggtgtttgaggcgcgggacgtaagagatgcccaggtttctcggtgactctccccgtaatgcgcgtccagatttctgacctcatgctgccacttcttcgaggcaggtttcttgccaggtaagtcgagcgcttttagggagtccgctacgcagagaaaactgactgtgtcctgccgggaggacttgaaaatggtgttcgggcgactcttttctgaatgacggtacagtcaaaataggaactccgcggtgaacctgggcggccacccctctgccaacttggctatcttgaaacgttgtggaaaatcctctgg

SEQ ID NO: 130062 - DNA, 1049 bp, Homo sapiens
tcaattctgataagtgatcaaatttcttgaaattctttcaaatcagctgaaaatttggttggggtgaattgatggtttttgagaagtaggccaggtatcctcacaaagaagttttagaatagggtttcttttaagtttttaaatatcatcctttgtctttccatatggttttcataaccaaatacatgactatagcatggttatttttctagtactgccatttgtgatatagccacatcttggcgtgcaagctagacatctcaggtaaatttgtttttttttttttttttagccctagaggtaacattataactaaaatgcattcctgcaattctgtttgcagtgcttcactaaacattgaaataaagttgtaaattttttcttcagtaatccattttatagttaatcataccaaatttaagttgatgacctaaagtccaggtagtgttgaagatagtatgtatctagaatactggtaatgagaaattgttgtaaattgaagaaaacaagatgctgccatatattaagatagaatataattaactccatgagaatggttactcaggaactagttaaagagcaaacccatttctcccgcttcactctgtttcagatatttttattggaaaatgttagggtagaggcctgagaaagttagcaaatgctattgactgatactggctctgtgtcttccagtgatttttagtttggtttttacagtcaagcctactgcttgcaattaagatatcaatctgaaatgcatctgtaattcctggccacaggtccttattgccattatttttaagtatcttcattggagatgaacactgacttttgcatatggtctcttacctcagggaagatcacttgctagcaactcatactactaatgacaggtttttgagaattgtactgacatcacatgttagctactaaatgcaaaatgtataaaagtattgttttatgtagttacctaccaatactatctgctactgaataactctctaaatatgtagacctcactaataactaacctttaggtaaaaaat

SEQ ID NO: 130063 - DNA, 2623 bp, Homo sapiens
cctttcagggaaaagggcattctttaggaactgcatctggtaacccacaccttgatccaagagctagggaaacttcagttgtaagaaagcataatacagggacagactttagtaatagttccactaaaacagagccttctgtattcacagcttcttctagtaatagtgagcttattcgaatagctcctggagtagtaacaatgagagacggcaggcagcttgatcctgatttggttgaggcccagcgaaaaaaattgcaggaaatggtttcttctattcaggcttcaatggacaggcaccttcgggatcaaagtacagagcagtcaccatctgatcttcctcaaaggaaaacagaagttgtgagttcttctgcaaagtctgggagtcttcagactggtttgcctgaatcttttcctttaactggtggtactgaaaatttgaatacagaaacaactgatggctgtgtagcagatgcactgggagcagcctttgccacaaggtcaaaagcacaaaggggaaattccgtggaggagcttgaagagatggatagtcaagatgctgagatgactaacacaactgagccaatggatcactcttgatttaattagaggctaataaaggcagaatgtttattgtgaatatgtaatatttgttggctgggccacgtaacttgattagtcattaaaaatcttgtacgtatataattcaaagattatatcttgttattcagtgcatgatagcaagtgtgtgattggccatagcttttaatatactgctgcccaggctggctctgaatttctataaattagctgttagatctgctgagatgactttcttccatatatgtggttcattggaagttctttgtaattttaattccatgaaagtcttaatgtttccaacatgaaaattctcttacttaaatacgtttgatttctgaaaagcctacaaatggaggggaaatgagattgtgctaatgttgatgtcatcaaggtaaccatctcatatactagtgtcaaaaggtttatgtaaacttgaattttatctgaactaaattgtatcttaaaattcatacaattatttattagacagtggaatgcaaatgtttctatgaacgtaaacacattcatagagatttcttggcgaaaatatcttgagaatagaatgtaacgatataacattttgctgatttgtgcaagattggggaaaaatttcttctagattgatgaggtcaatgtgattcagttgtgttgctgtctgagccacagccaattgtgtgtgctctattaatatgttaccattatttttgattcctggcttggtcaagaacaacctgatttttttttttttaatcttgcagaaaagttgattgcaaagtgtggtagaaaaagaaataatggtagcagtagagaatttataaataagagtttatctttatgaatgagttaattgttctacaattttgatcagtggtatttaagcctgtatatgctaagtgtatttatgcccctttgagccaaaatttttttttttttttcagaatccataagagtttatttgttggcttcacttgggtttagatgcaaattttactgcatcacaccctgatcagctgggtatttgcttagtgtattcatcaaatcttcagtgccagtttccttgagaagcagctttcatgcttattccttaaaaacaacagaagagtgtttatcctgagattggtattgcactattttattttattctgcaaatctgtatcctgaagtgtacatttcaacccatattcttctctgttcactgaaattaagttgaatttgaatggctgaaagacaaaatatatgttaatacaatctcttacctagagcattcaaagcctggctgtctctgtttgcacatgtaacagatgcagaactgtgtttgtaattctaagaaaatgtatgtcagaaagtattttatcagatgtttaaaaatctctgcctgttgattcataagggatatagacagtactttaacttgtgtttccagataaggcagattttggtcatctttctgtgaaagtatctctaactgaatccacttcttaaacaaactactctattttaaataaggaaagaatggagaatctagacattttacaggtgtatctgagcaaaatatatatttgggttagtttttatcacattatcacgtttgtctttatattttatcttcatcctaaattttctccctatcaaaacagcaggaaatttttaaacttttatattgtacactatttttgcataaaataagagctgtagctaccaaatactatttactacttagtaaaggtggcttctgtgtattaaactacgaattacaaatatcacttcactaaccactataattatttttggctttttcagccactggaactttttttggggggatttaaatacaggaaaactgtttaagcaaaaaatgcactgctttcatgtaaaatgatataatcttctttaacaaatattttcttcattgataactgacagatatctcatagcattaacataaaataccagaaacaaactttatctccctattcttacatttagtgcaaattggaatgcgtatgtgaatgttagaagat

SEQ ID NO: 130064 - DNA, 1685 bp, Homo sapiens
acctggcaaaaagtactcatggacagctgaggactgacaaaaattacagctttcccttgaacaatttggtttgctcatatgattcagtgaaagatgttctggtaccagactatggaatgagtaacctaacagcttgtaattggtgccatggcacatctgtgcgaaaggtcagaggagatgggtctattgtgtatttggatggagacagaactaattctaggtccactggtggcaaatgtggttgtggattcaaacacttttgggatggtaaggagtatgacaatctaccagaagctttccctattactttagaatggggtggaagagtggtcagagaaacagtatattggttccagtatgaaagtgattcatctttgaatagtaatgtttacgatgttgcaatgaaacttgttaccaagcactttccaggtgaatttgggagtgaaatcctagttcagaaagttgtccacactatattgcatcagactgccaaaaagaatcccgatgattatactcctgtaaatatagatggtgctcacgcccaaagagttggagatgttcaaggacaagaatcagagtctcagctcccaactaaaattattcttactggacagaaaacaaaaactttgcacaaggaggagttaaacatgagtaaaactgaaagaactattcaacagaatattacggaacaggcttctgtaatgcagaaacggaaaacagagaagttaaaacaagaacaaaaagggcaacccaggactgtttctcccagtaccattcgtgatggtccatcctctgcacctgctacacctaccaaggctccctattcaccgacaacttctaaggagaagaagatccgaatcacaactaatgatggacgacagtccatggttacccttaagtcttcaacaaccttttttgaacttcaggaaagtatagccagagaattcaacattcctccatatttacagtgtattcgatacgggtttcctcctaaagagttaatgccaccacaggcaggaatggaaaaggaaccagttcctttacagcatggcgacagaattacaatagaaattctaaaaagtaaagctgaaggtggtcagtctgctgcagcacactcagcccacactgtgaaacaagaagatattgctgttactggtaaactgtcatctaaggaacttcaggagcaagctgaaaaagaaatgtactccttgtgtcttttagcaacattaatgggtaagatgaatttaattctgatggtatatcttaattgtaaatataatacactgagttttcctgttatctttgggggaaaagaaatctgtagccattgtaagtttttaattatatatttcaggagagaattatttttagtattttgaacagttgatagatgttaataggattattgagtaactattaggaaaatagaaagttaaggtagtccctcaataatagtcaacagattatttaaatatatcttattcttgcaattgctttttaaaaaacagacttgtatttatttaaagcgttttaaattttttggtaggctctattgatcctgcctaccttgcccctttttcatttatttttaatttttattttcctgtatgtcatgtgatttcagcacttcctgtttgatgaattgcagtttctggtgtttatattctcactgcactcccacctag

SEQ ID NO: 130065 - DNA, 1013 bp, Homo sapiens
tcctaatgacgtctcacgcctggagccctgaattcgtgtgtgactcctaccccgcccgaggaaaatgagattatgccagtgtcttgaatgagcgcggttgttttgagatctacactttagcgggaacctggggagagtgccttctcattccttgcccccgcccaaggctctcttcaccttccccgcgggggtcctctcgttttctgtctcccaaatgctggcttcccgcctttcctcccccgcttatttacttaattaaggccctggggctgcaccccaccggcagctccttcgggggtgtggccgaagagctccgagggcggggctgaccgagccatattcgggcgtggccggtggtgattggtgagggcggggcctgccgcagggggcggggcctgcaggtttggcccccgcagggagcgcagctggcgccgctgggagctggtggcgcggcgcaggtcccggccgagtgtggcgcagcagtggcggcgcttcccattcgccatgcgccgggggtgggtgcccgaaggtaagcgtgtggctcatcgagcttgcgcgaggaacccttggcggagaacagccccggcactgcgcgggccaggtggagggaccccgggggcgcgggaggcaggtgtggtgtgacgggccccggtgccatttccgcgcccatcacgagcgcggggcggggcgcgcgggcggcccctcctgtgaacccctgagaggagaggcgggctccacacccgggcgtgctgcgacttcgcggcactcattcactgcacttggtccgagacagaaaacgtttgagttgttccacacacaccccctctaaatgtcgagaagccccaggtactgtcaagtttgtatatcctttaaaatatagtttgtggttcaggacaggaggagaaacccgatagtgagcttgcggtggggctttacttttactttgtgttattcagtttgtaagaaaggtgtagtagaaacgggactgttacttaaacatggacagcaggggt

SEQ ID NO: 130066 - DNA, 1018 bp, Homo sapiens
gtaatctgaattgttcagcacacttgaccagttcatcctgatacaagaagtctgaaaaccacactttggttacctccaactagatcttttctaggtgagagttagtccctagcctacgtgaactgaggtgtgtaagttcctagaatttcctaatagtaagaaaggtagatgggctgcagatatttgtggcttgtagtaggaacataacaaactaaatctctaacctgggctgagactgatgagcaaaagtaggttcctatcagaataaacgaaaattagtcccatgcttaaagaatgacagtcatagtattttaaagttgttttgctaatcacttttttttttttctgttggttaaggttgcatgatggaatttgaacattacttcaagaggttttgtattttggattagttaattgggtttgtcctctgctgactgtttcttcggatgcattttttggtgtgctcttgagggattaaatgcaaagagatcacaccatggactacaaggaaagctgcccaagtgtaagcattcccagctccgatgaacacagagagaaaaagaagaggtttactgtaagtatttaacataaagcatgtgggaaaaaagttgaatgtagagaatattttcatttctgcttttcttctccaacctagaacacccccttccccatctccacatacctagattttacttctttcacatgatctgttctccacaaagtcttctgtggctaccgtaatggaataaattttccttttttagtgtctctttacttatcttcttggagaattgtatgaaactatctaattaatcttcttaacagaaaatgtgcatgtgcatacacatggatctatgcacacacttataattttgtgtgcactgtcaggaattaatggactcctgaagtcatcgattccatattaagaactactgtcctgaaatgtttatagtatctctcagttttaaaatatttaattcagtattttatttttttcaccttaaaggctaagccattt

SEQ ID NO: 130067 - DNA, 1047 bp, Homo sapiens
tccccagtagctgggactacaggtgtccgccaccacgcccggctattttttttttttttttttttgtatttttactggagacggggtttcaccatgttagccaggatggtctcgatctcctgacctcgtgatccgcccgcctctgcttcccaaagtgctgggattacaggcgtgagccactgtgcctggccagcagcacataattttttctatggtttaccccaaaaattagaatttctgggcccagggaaaatacatacacagttttaccaagtattgccagattgcttttcagaaaagttgcttcattctgaattgtcaccaacaatatttgaacatttctctttccctattttttttttttttaccaacttttggtattatctgtctttctaacttttgccaggtaacggacataacgtgatatctcattatcattttaacttatatttctctgattattagtgaagttagccatcttcacaaatttgctgccatttgggttttcttttccatgaactgcctgtttatatgtttgcccatttgtctattggtttctctattaaaaaaaaaattaatttgcgtattacatttataataatgaatattaatggattctgttttactttcttactgtaaatactaatatagttatttctattttgattttcattttaaaagggagaaaggctgtagaaatgcttttgaagttataataaagttaatttttgtttttagtccagatgtcagagcattccttcaaatggacagtccaaaacaccagtcagatccatctgaagatgaggatgaaagaagttctcagaaggtagtaagaggaattgcctttcttaatagaaaaaatactattccaaaggtgaaattagtggctttaggacacttacttcaaatgaagtaatttcatccatagtagagtttctactatgtagaacacataaaaacaaatgcatatacctcttacagatcactatttcttttttcttttgagatggagtctcactctgtcacccaggctggagtgcagtggca

SEQ ID NO: 130068 - DNA, 1046 bp, Homo sapiens
tcccagcactttgggaggctgaggcaggtgaatcacaaggtcaggagttcgagaccagcctggccaacatgatgaaaccctgtctgtactaaaaatacaaaaagttagctgggcgtggtaggtgggcgcctgtaatcccagctactcgggagggtgaggcaggagaattgcttgaacccaggaggcggaggttgcagtgagccaagatcgcgccactggcatgccagcccaggtggcagtgtgagactctgtctcaaataaataaataaataaaggattaaattaatgaaagaaaagctaaggtgaataatactgtgcttttgatgttttaggctggaccagatgatatcagaaactttgacacagcatttacagaagaaacagttccatattctgtgtgtgtatcttctgactattctatagtgaatgccagtgtattggaggcagatgatgcattcgttggtttctcttatgcacctccttcagaagacttatttttgtgagcagtttgccattcagaaaccattgagcaaaataagtctatagatgggactgaaacttctatttgtgtgaatatattcaaatatgtataactagtgcctcatttttatatgtaatgatgaaaactatgaaaaaatgtattttcttctatgtgcaagaaaaatagggcatttcaaagagctgttttgattaaaatttatattcttgtttaataagcttatttttaaacaatttaaaagctattattcttagcattaacctatttttaaagaaaccttttttgctattgactgttttttccctctaagtttacactaacatctacccaagatagactgttttttaacagtcaatttcagttcagctaacatatattaatacctttgtaactctttgctatggcttttgttatcacaccaaaactatgcaattggtacatggttgtttaagaagaaaccgtatttttccatgataaatcactgtttgaaatatttggttcatggtatgatcgaaatgtaaaagcataattaacacattggctgcta

SEQ ID NO: 130069 - DNA, 1047 bp, Homo sapiens
actgtatttaacgtgtaaatcaattttgggcagaattaacatcttaataatattgagtcttccaatccatgaatgtggcatatctctccatttatttaggtcttctttaatttctctcagtgatgtttttataaaggtcatgcaaatattttgttaaattggttctaaaaatatttgatatttttgatgctactaaaatggtagtgttttcttaatttcattttcaattgtttgctatgaatatatagaaatacaattgatttttatattttgactttgtattctgtgaccttctgtgtatcagtagttttaaaagttccttagccagttccaatgtgtagccaaatttgaggctcattgttccatatcactaagtgctcagcctagctgcctattagaatcacctgggagaatttttaaaaaatatttatcactgtgtctcacccccagagtttctaatttaagtggtttggggtggcacttggcattggaatttgttaaatctccccaggtaaggttagtgcaggctgtggttgagaaccactccttataggcttgcaaaggtttctttctaaatatcgctctctctctctcattttatatatcttcaaacatccaaattccttagaatagaacatgcgctagatatattttataccatctacctatccacatctcactcttttgcactgcatgtctatgcctacttttgtatcacccccttttgtgtcacatgtctatgtctactcatcataggtgattgcactaggaagctgtaatttctgtggcaaggatttgaaagctaagctaaggtaatcatattcctttttcagaatttaaatttgggatatgaagagactgaggcaattagcaaagaggttagaaaccaaaatgacatatcagcaaatgccatgagacaggcaggtgcctcatgcctgtagttccagctacttgggagactgagcaggcaggattgcatgagtccaggagtttgaggctgtgtgtgctatgactgcatcattgcattccagcttgtacgacagagcg

SEQ ID NO: 130070 - DNA, 1049 bp, Homo sapiens
atagtaaaggaactagaaatatttaacttggaggagagaaaacacggagcaatcaaaaagttatctttgcatatctgaagagcatcatattaagaggtctcagaagacagaacaagagacctgtgggtagaaattgcagtgaaactaattttagcttagattgatagaatcttggttatagttagttatggttatagttagttgcaaaactttcaaatgcctttacttatctgccttttacagctgagtttcaaaaaatctcatacattaaatgatttatacaaagtaatacagctagtaaattctagagactcagcctaggttttctgattcccaagttcagcagtcattcagatacatcacttttgcttgaaggagatctttcaagtaatggaagctggttaaaaaattaaaaataaaggaacggattgcctcatgaagccatgaatgctaggagaggtccaaaagagactggaaaatgaatagcccaggatgttgtagaggaaatttagttttctgatgaaagtttgaactttgaattccaagatctcttccaatgctgaaattgcaaacaaaaatcttgcaaatctatgaggattttagataaatgaaggactaaaagaaaaagtcaaggatttgtctgtaaaagatatttagttagattaattttcccaactgtgtatttatctgaacaaaacttcgggaggggagtgtggaatgataaataaaagccaggatggaaaccaaaaggatactggcttgttctggaacagtctatttaagtcggtggggaaaaaaaatcctttgaaaagaaactaaaaatttttttaaagtaagaatatgctttaggtgtggctaaggttcatatatatctcgatttgttcctgccaaaatatatattatttttataatatcaacatattttctttggcaactattttcttttttagcgttttcctatctgaagcccatgcacgactgaacttaaggaacaaagtgcttaaagaagatgtgctgattgcagccttactatttgaaacatccctcac

SEQ ID NO: 130071 - DNA, 1369 bp, Homo sapiens
atgaaatgtttccaccattttcctgccagtgctaatggctcctgtttccagtttggaataagctcatttgtggaaatactaggtactaatgagacaaacatactcagttacagaggtttgggtttgtcagtactgactatcaaaaaagcagaaacaggtaatagaataatagtacttttttattaaaaagtggtttgggagtctgaaaggtaggttgcaagtacagttcctaaaggaatgagattctcttcttggaccattcctacatataagatgcccaacaaaatgcaaataaaaatgggaattcgaaatgtaatatttaatttccaggtgcaagaaagcctttgaggtgaaggtgtatgaaagtcatcataacagatgttttccaaaaacttgtagaaggttgtgaaaaaactactaggatcacgcggcatgtattgaggtacctaaatttaattaatgttagttatgtgatgtattcttgacagataggtttaatagctggcacaatgatgacttaaattactttttgccgtttacccagctgaggttgtctttgaagaaataattttaagactgagatgccagtactgtacattgattaattactgacatgtatgtaaggcaataatttaattaagggtgaatattctttgtttttagcatataggttgctgtagatgaatgttcttagctgtcatgtttaaaaatacttctgcttcgttacctcaagtaagtgatttgtcaagcaactatgtctgctgacagttcagaaagtatctgataaacttaagggtgggggcagattcttgttgaagttgcttttgcatgtgtggtattctcaacattagttttttgaggggcacttgtgaatattgaggttatatgagaactttgagtatggaatgattttcactgtggtttctgactttgttttggaggtgtggcatgcagcattttggaaggaaaattgaagacgtgttcaagaaaacatgaacagaagcaaatgatgaaaatgagcattttacttgatgttgataacatcacaataaattatggagaaaaatacatatttggctaacttttaattgctgaacaataaagtgttttcttttaaatcaactctaaatagctccattctcatagtcactagtcagacctgttttgaacatattcgaaagattataatcttgtcaataattagcttatttatgggtggtgattctcattgaggctgacagctggggagacattgcttgtacctctaggttccctgtctggcttccccttcagagcctgctgttgtaccaggtggttgaatcttaaaactctttaataccaaatagcaatcaaattcccccttacagat

SEQ ID NO: 130072 - DNA, 1050 bp, Homo sapiens
cttcttcctcccaaccagagcaacttccaattggccacactattcagccctcccagggtgccactttcatgaatgatgccattgagaaggcaaggaaaacagctgaactacaagctcgaatccaagccgggctggcactgaagccaggactcatcagcaatgccaacatggtgggcccgtctaatctccatgacatgggcattgcttccccaaagggggagttaaaagaccaaattaaacctacaccactgatcctagatgagcaagggtgcattgtagatgcaacaggcaaggagattgagctgacacactgcatgtctactcctgccaatattcgtgctgttccctcttcggagggaaccattcaagcaacagctaaaagaaaagccatcagaagacatggagtccaataccttttttgaccccgagtctccactgtcgcttcccagcgccagaaacgcacttttaaattccatgacaagggcaaatttgagaagactgctcagcgattaaggacaaaggctcaactggagaagcttcaggcagagatttcacaagcagctcaaaaaacagacatccatactttgactaggcttgcccttattgctcctaggaaggagctaaaggaaggagatatccctgaaattgagtggtgggactcttacataatccccaatggctttaaccttagagaggaaaatcccaagagagaagattattttggaatcacaaatcttgttgaacatccagcccagctcaatgctccagttgacaatgacacaccagttactttgggagtgtatcttaccaagaaggaacagaaaaaacttcagagacagacaaggagggaagcacagaaggaactactagaaaaagtcaggctgggcctgatgcctcctccagaacccaaagtgagaatttctaatttgatgcgagtattaggaacagaagctgttcaagaccccacgaaggtagaagcccatgtcacagctcagatggcaaaaagacagaaattgcatgaagaggccaactctgcctgaaaactcacag

SEQ ID NO: 130073 - DNA, 1050 bp, Homo sapiens
agtttgttcccgtggtgcggagggtcaaggcccacacccggaaacctagcgaggtaaagttgcgtcttggttgtagagacgacaacttctccgcttcctcggcgatggcggcgtccgggagcggtatggcccagaaaacctgggaactggccaacaacatgcaggaagctcagagtatcgatgaaatctacaaatacgacaagaaacagcagcaagaaatcctggcggcgaagccctggactaaggagtgaggaggtccctggcgagacgcaggggagggaaagggtggcggagtttaagagacccagagggagagggaggtgaaaggggtgaagagctttcaccgactgggagggggacagaatatgcgtcttggatctgcaagtagagcctaagccctccgctggggctttcactcccctttctgtcgctttaatccatttgcccccgggtgatgtaaggggagaacaacaagcggtgatttaagttgtcacttctgaacatccgtattgtcatatatgccacacaccctaccttgagcccagtgtcgacatgcaccttgtttgggtcttcaactaatcccaaactggggattgcagctgttttcagaaatcgagtcagcagcccaaggtctcaaaaatagctatgagctattttcttttcttttttttttaatagaaatgggtcctcgctgtgttgctcaggctgatctcgagcttctgccttcaagcgatcctcccgccttcgccttccaaagtgctgggattacaggcgtgaggcctgggcctataatagttttttgattgctggtaattatttcggaggcacacggaggctctactacctggtctctaaaatgttactccaccagttcccataagccagaaattataaaaatagagcttaagaccttttgcccttcaacaatatccatttttccctgggagtggtgacaagtcgagggatctttacccataatatttatcttttcctgagagcatctcctgagagatttcctgctatcaggaaaagataattattacgggttat

SEQ ID NO: 130074 - DNA, 2464 bp, Homo sapiens
acctccgcctcccaggctcaagtgattcttctgcctcagcctcatgagtagctgggactacaggtgcccgccactatgcctggctaatttttgtatttttagtagagttgagatttcactatgttggccaggctggtcttgaactcctgaccttgagatccacccacctcggcctcccaaaatgctgagattacaggcatgagccagtgtgcccggcctaaaataattgtttcttaaagcaatgtcttaaaggctttcttaaagctttccttgtttaggtgaaactgatttatccatttagcaaatacttactgagattgtgttaggtattatgctaagctctgagaatgcagcactgattagagtgttgtggcaccttctcagggctcagtgtatgtaataagatacagcatgtagtttaatctgtgccatatggttcatcataatgacagtaaccatatatattggtttgttcaagatgatcctggtttacctgttgtccagtgtttttttctggtttagcatttgtcctggacaaaggtaccttggctgagatgataaataatatagataccctgattacaattttactcacatggctaacatttattgagtactagctatggacaaggcatattcttaagaggttatatttcacagtaatctatgaggtaagtgctgttattgtaattttccagatgagtaaactgaggcaagttaagtaatgagactaaggcagtagagttggtggaactaggctttgacccctggcagcctggcttcagtgcttgtcctcggaaccaacataataggttgcctttcttccagataacctgtcatgtaccaggaatgccaaggactttatatgtatcattttatttaatcataatatccctgttaagcaggtgaattttttttgttttatggattaagaaagtgaagctcacaggagttaagtaatttgtccaggtccacacagtggtggattcaggagtggaacctttatgcagctccagagtctatctcttaaccactctccagtagttaggaccagcttacggctttggagttacatgatttggagtacatagctttaaagacagttttgttataatttctaacattaatttgtacataaataattttaagtcttagttcaagtatcacctgctcagtgaggccttatagtcccccagcatttctgggcctccttactttaatctgcttttttttttttccataaccacttcctgccactatctacatatcacataatctaatcatgtgttgagttcattatgtgtccccccaatagtttataagcttcatgatggcagaaattcttctattttttaaaactcttatactttcaatgcttgacaaaatgtttggcacttaatgggaactcagtaaatatttgttggtaagtgaatgagttaaatattagaatatctattataaaattaaaatacctttggctaattcctcaaaccttacacttaatttcttctatgatgtactgtgtaatttcatcaagctgtttaattaaaatttgagatgagttgtatatttcatggttttttttttcctcttgcttttgtaaacattatgtctctttcagggaaagttgtcagcgaagctttctgaaaacagtaagatactgatctctatggctaaggaaaacataccaccaaatagtcaacagaccaggggttccttaggtatgtcattagatgtgctaaacttattttaagatatccttagtgggctcttctgaaagaggtttgtcttgtcagaaaaaaagatttatttggaatcctagtagtttttctttctggaatcttacgtaagtcaatatggtctacatatgaaatagaactcatactgaaaactttgtacttgttttatgtgatactgcattggttatgatttatggaacttatagaagaaggtgtgtataacataacttaaaaattgaaaactttgaaaggaatttgtgtgtgtgagagagagagagaagagaaacttttatttgttgattgaaaatggtgaacttgcttatttaaaaattaaagaaatatgcttaaagggtacaaaatgctgtttggtgaaagactattttaattattgatgatcatgttggaattgtaaagaagttaatactgtagccatactaatgctttgattatggtatggtatgaaaatatttggaaactttttaccacattttggcttgttggtaggtatacattttaaaaaaagaaaatgtatgaatatgtaaaaatttttgtttatttattaaagacagggtctctctctctctctctctgtcactcaggctggagtgcagtggcatgatcatagttcagtgttatcttgaactcctgggttcaagcaatcctcctgccttggcctcccaaagtactacaattacaggcctgagccaccatgcccagtctgtatg

SEQ ID NO: 130075 - DNA, 1048 bp, Homo sapiens
ttttcatggatgtaggtatactcctaaattgtttttgtgtgccagtggatacaaggggatgccggccaagaaactggatagtcagtaagctttgtctctgcattagacaaatagctcaaagtgagtgccctacttttaatatcagatagataactctttccattttgaatctcttataaattattaatatacagcattagtgaactaaagtattatatattggtaaaattttttaatctctaaggctctcaattttttttctgtgaaataagtttgattatcttccagccctacgtttttatgaatctaaattttaattattccaagagataatttttaaaaagtttaatagtaggttatctcaagcactaaggtcgctaaggttagacagaatcccttttaaattctagggttacagcttgctttggattgggctgtgatgcctttatgacctgtcaggagctacactttgtttccttatcttatgacatctatctcaaaaagtcgttatgggcgaaagttaaatacgtgaaaagatggctggcacgtaattggtacacaataaatattaatttctttttctccttaacatcttttttttttgagacaggatcttactttgtcgcccaggctggagtgcagtggcataatcttggctcactgcaacctccactgtccaggcttaagtgattcatcctccctcctcagcctccaagtagctgagaccacaggtgagcaccaccatgctggctaacttttttttatatacatatattttctgtagaggtggtgtttcgctatgttgcccaggctggtctggtctcgaactcgctagctcaagccatccgcctgcctcggcctcccaaagttctgggattacaggtgtgagccacttgtgcctggccttccatctttttaaaagtagtttttcgggctgggcgtggtggctcacacctgtaatcccaacactttgggaggctgaggccagcagatcacttgagatcaggagttcaagaccagcctggccaacatggtaaaaccccatctc

SEQ ID NO: 130076 - DNA, 2781 bp, Homo sapiens
aatgatgcattaaaattgttgttggtatttatttttatagaaattagtgtataattaagtgaagatgtaaagataattagtttttctttaattttgctgttcttgagaaagcaagatgccaaacaatgctggactacttgtcttaactggaggaaaaagtgaatataatgcacacatgcatataaatatgtatatgataatataaaagtatctgtttataggtgcattaaaaaattatctgcatggagacaagaaataacaatgtttgttgttctggacaggagaacagggtggctagggctcatggatgagaatgatatttttgataatatttttgattatctgaatgtattatctattgagacattttaagtaaaaaacttaccctaatcctactcttggaataagcataattctgttccttcttactgtgctttgttacaggaagtagaactttgagattggtttgaaaatgaattatactaagaagttgttttttttctaggaattgattatggattaagtttaccacttggagaagactatgaacggaagaaacataaattaaaagaagaattgcggcaagattacagacgttatcttactcaggtaatgagttctattaatgagttgggtttaatgtttcagaattcagctcctaaatttgttttcataaggtattagtcatatgtgttaatttttaggttttcagtggtactagcaaagtagtagtatagtcaaagttaagtggcatatatgacattggtagagaaaaaaatattgctgagaaccggtgccatagaatgatacagacttttgaccttttgactaaggcagtggattctaattttaagtgagatcgttaattatggtttttcatgttttctgtaaagttgtcatggtttgaagtagtccaatcatggtttcccactcttctacaccccccaactatgtattaaaatgacatatggagttctagttgctaattattttcctatgagccaagcttataaaattacatttaattatttagccactaaagcttttgttttatgatctcatgttttacttagcagaactcttgagtatttttgttaaattatataatggccaaagtaaggtttattgtaagttttaaatttaggttataaaattattttaaacaattatgatatttgttgtcatctcaaaatattctttagttttttactgctttatgtttgttccaagtgtacaaatgtctcttattctgatttacacatggagagaatgaactttgacttaatacactttgtcaatggtttgtttcccttgactttagggcattacacaagggaaaagaaaggtagggttgtctgcaatacgtcctccttcagttttttctttctttttttttttttttacgatctagaaggttgcaatcatttgcatttatgagattcaaaccaattaggaaaacgggttcatttgtgattttgagatgtttgaatggcaccattttgtattcttgcttttagcagatgacagcatacacattataattttccgttaatatagtcattacttttgattcctgctttgcatttgtgtttattgctttcttatgcattctttttgaatattctgcagttaagtctgttttcagcatgcaattttttatttctcaaattacactaatcacagtaagattaatagagtagtagaatatccaagatatttgaactacatgttgtgagaatttggattactctgtttttccaccaaaatctatagattgcattgtccatttatattggaaaacaaagagaaacagtttatggttttacaaaactggttttaaaaggaatctcacagattcaccattcaactaacatattttaaacacttattatgaagatatatcaggtatgcatcctgtcttcaagaggcttagaatttagttgtagagatagcattcatacgattcagaaagtggtaactacaagaaggatataatgatcaagatagtcctcatagtgggaatttctattttgtgaggcaatctagatttgggtgatctggagagagaatcgaagcgagaaagcttttcagatggaaagcatagagtaaaggaggacctagagggtagactttagctttgtatgaatgaggcatattaggtttaccagcctgactgggtcagagtatcattctttttgagagtagtaagaaataatgatgtatataggataggatcaaattagaaggcagtggatttttaacttgttatatgtaatagtcagtgatgagcatcatactttcttaaatagcttgtgaagagcatggtaactgtgttttaggacagttagttctgcatgtagagactctcattgtgttaaattgctgcccaacttcttaactgatttcctcgcgctaattttcacttcaccctccaagctattttccagaatgattcagtccctaacttatttaaatatgtcagtatcctctaactgcctccaggataaaaattcaaattccttagcatggcacatgtctttcgtgttccagcctgactccctgggcttatacctcattatcttccccttccctactttttcttattgggtggagttttcctctggtatcagatatctaccattttctcttgtaggttttgcattactccctaggtaagatttttaaaaaggatagtggtgggggacatgagaagaaattgccgtcatgaaagtacaaatctttaaattcaaagggatgtgaaggagttttttaagatttttt

SEQ ID NO: 130077 - DNA, 1037 bp, Homo sapiens
agagcaggtactattctcattttgcagaagaagaaagtgtctgtcagaaaagttaagtgacttccccattgttacacaactgataagtgcttgggctagttgtagatcctaggtcttttgactgctagtctaatgctgcctctactacactgcattacttaaatgcttaatgaacaagattggaggaacacataaacaacattcatagtttatatctattggcatttcagtagatattcactcacataattataggaaaaatagaaaaaaaacttgtggcatgcattaagatatttgtgaggaagtttaaatttgccttgagaacaaaaagacagtagagcactgataatgaagagtacatgcttagaagacgaaattgggaaattttttttcatgcttctaatcatcttgaatcaatagacgtatatattgcacatgaaaattaaggcctgattttccctttcagggagttgttgattggaagaaaattctcttttttccaaatgcttttggtatggtctatatagatttgtagtttctgtcttcattccatttcattcatttgctctgcataatataatactagtttagaatatagaatgcaaagacacatttatgcaacatattttataaaggcaattaggtaatatatttttttaatgtgtatatatacagaaaaattttctatctacgagtgaaacagatccatctactttgggagtttctcttcctattggtgagaggttatctgctaaggtaggtggataggagtagttattgtgggtaccagttttccgaggcatcaaaatcattaaagaacatactgctgatttaaatgcaaatggaagatcacatcatttccccacacttgaatatatttctatttcaaaaatccgtggagtcatatttatgctgtttaaaaaaattttcttgaacacaacatttgtaaccatataattttatatttctttaatatgttgattcttttgctgtattcagttatacttaactgaatattcagaattcatttttttcag

SEQ ID NO: 130078 - DNA, 1683 bp, Homo sapiens
tttttgagacgaagtatcaccccgttgcccaggctggagggcagtggcggggtcttggctcactgcaacctccacctccccagttcaagcgattctcctgcatcagcctcctgagtagctggaggcaggattacaggcccctgccaccaagccccgctaattttttgtgtttttagtagagatggtgtttcacaatgtaggccaggctggtctcgagctcctgacctcgtgatccacccgcctcagcctcccaaagtactggcattacaggcgtgagccaccgctcccagctgacctagtttctttagtacttttttagattgtgttgttttagcgacacgggagtattaaaatttaagaacattttttaatcatatatttatgttttaacagaacatttcattataatattttataatctgtgataatttttctttttaagtttaaaatataaaggatcattttttaaccttggaaagcaaatggttagcagcaggtgcttcaggggagtgggttgggcattaggagagggaggtgtccctgagaaggaaagaaggaaggtaaccccatcatatctctttggaaacatgctaatgacagatctcctggcaaacacaatcatcatatttactagtgggagagatttatctctgaatgcttttggcagaatacacctggtttgtctaggattgctgttgggaatcaaacctggaatctatggatttatgtggcatggctctttggaaaatgtcatctaagctctgttaactattggagtgtaaaatggagatgtttcatgaacgaagcaactcccttctgttagagacctcatgtattaatggaccaaagcatgtagtcatgcatattctcatgtgacaagaaagacctggggagctgtatgtgtgtcctcaaacctcttccgacttctcccatgcctttcagtgacatctgtccttgaaattattagtaaagcttgattctgggtaagagttctgatatgtatgattcagatttgacattctgataggacattgagggatttttttttcctgaagttgaattttaacattgccttttgatttttattttaaggaaaggttgaaacttgaacgtaacaaagaatacaatcagtttctcaggggtaaggaagaatccagtgaaaagttcaggcaggtggaaaagagtactgaggtaggttttgcttttgaattaaatctgtactactactaccacaggttgaatattttgtacttgaaaagctttttctattttagacattttacttttttttgtaaatacttgcaaaattaagccaaattaaaccaaacacaggacatttaaatatttagttttggaagttattttatctcatattgaagaacttttaacatttaattggggagatttaattttagagatcagttttgttaagtgattttcatttatttttaaaaatttaaatgagtttttatgatgacaattcctagctatgtttgtttttttcaaaatttaaggatcaattagccggacatggtggcaggtgcctgtaatcccaactacttgggaggctgaggcaggagaatcgcttgaacctgggaggcagaggttgcagtgagccaagattgcctcactgcactccagcctgggtgacagagcgagacctggtctgaaaaaaaaaaaaaa

SEQ ID NO: 130079 - DNA, 1306 bp, Homo sapiens
actagtttacatttgatcatttactataaatggatcatacaggatatactagttttggagatatggcttctttcactcggtatgattattttgaggttcatttgtgttgttgaatgtatggatgattcattccgttttgttgcatagtaatgttccattgcatggctgtatcagcttgtttatccattcccctgttgatggacatttgagttatttctggtttttgctattacaagtaaagctcatgtgaacattaatgtaaaaacgtatatatatataaatatatgggtgattaaataaacatcagagttgaaatgatagactaagtataaattgagggtttaattaccttataagagatagtttcttgtcaagttttgtttcttttttcttttttaattgaacagcccaagagtcagagaaataaaaaacctattggtcaagttaagcctgatctaacttcacaaatacagacatcttgtgaaaattcagagggtcctagaaaagatgtcttaactccttcagaggcatatgaagaacttctgaaccaaagacgactagaggaggacagataccgacaactagatgatgaaatcgaattaaggaatagaagaattattaaaaaagcaaatgaagaagtgggcatttccaacctaaaacatcaaaggtttgcaagcaaggctggcattccagatagaagatttcacagatttaatgaggatcgtgtttttgatagacggtatcatagaccagaccaagatcctgaagtaagtgaagaaatggatgagaggtttagatatgaaagtgattttgatagaagactttcgagagtgtatacaaatgacaggtatttacaacttcatttttattttatttgcttaatatagcaaattaattgttaatatttgctgttgttactttttatcattatactagggagaagcagttttgatttatcataattaattctaagatgctgtcagttttaagatgcatcattattttatgtcccactgaggggaaaaagaaaacactcaaggtgggggccctgttgtaaagttggaaaactgaaaggctacaccctttatgtaaaagtatgtgaattggaagtagtcattcccacagaaagggacagagaggaaatgtccacatcccaaccttggcagtgagtagagagtaaagatacaaacaaccttccttgagaatttgaagtgtaaattagtaatgattcaagttcacagtccgaattcatactgccagtagcgtccaaagaaaccttgaggcaagaattcagagttttctcaat

SEQ ID NO: 130080 - DNA, 1414 bp, Homo sapiens
agtgagcagagatcacgccactgcgctccagcctgggcggtaaggtgagactctgtctccaaaaaaaaaaaaagtgtggctgggggttgtgcctcacgcttgtaatccctgcagtttgggaggccaaggcaggcagatcacttgaggtcaggagtttgagaccaaactgaccaacatggtgaaaccccatctctactaaaaatacaaaaattagccaggcgtggtgggacgtgcctgtaatcccagctactcgggaggctgaggcaggagaatcgcttgaacctgggaggcagaggttgcagtgagccgagattgtgccactgaactccagcctgggcgacagagcgagactctgtctcaacaacaacaataaaaataaatgaataaaataaaacgtgtgaaaaaaggataccttaaaatagatgaaatacaatttattcctgtagtcataagttttttcagtcagattttcagatggttttcagttcctttgaatgtttttgtgacactatttataatttcttaactgctacaatgaggttttattgttgtatttatcatacattgatacttgccatagtttaacctaacttgttttggagataggaatacctcagggtctcatatttgtcattgacttgtttacttgacaagtgttaatacattttgagtagcttttgggacctgctttatttgctagtccaaatagattagtttttaagtattttagaaaatgttttcggggtagtgctgtacattcaatattctaactattaattacaatacaaagcttttacagttctttgtcttctacattctgtagctgttatgtcctcacacaatatttttaatatttaccttgatttaggtaatttgaatgaaggattagaatttggaaatggcaattatagtttctctgatctgaatctaattgtttatacttcagaaaattctccaaatcctataatgttatatttgaaaatgcttatatgtaaggtaattaaaggctgactaaactaaaataattcagttggggaactgcaagtaatctttgactcttggtgataatgtctcctttgtacatgagaacttcttttccctttatggtgtttgtttacgtttagggtgaatgtaatgcatacccttttaagtttggaattttaagaaacataatggttgcttctttgtttttttttaatctattacttttataattatatcctgtgataattttatacatgaactaacaaatgaatatcattctatttgagaactctcatatcttcttatgtatcccaaaataaaatgaactccttcaatataaacttttccaaatactatttaagaatagattaaacatgaggttgagtgagaataattcttgttaaatactttaaagtgtttcttcaatata

SEQ ID NO: 130081 - DNA, 1962 bp, Homo sapiens
aaactctgacatctccaagtgttttttcttatgtgtctctttaacaatttaatttaaaatgggatttctttatttcagatttatagattccttatttccagcaaaaaaaaaaaaaagaccagtcattcagtagtttataaatagactggtttaggagaaatgactgtatttgtgaaaattttgagactaaagaaatgtggaactgagtttcatctcttgctccaagcatttattcttaacatactatgcaatcttgatcagaagttcttgacaaaaaataattataatgtattatgagaagtgcacagttaattttccttcattcttctaagttttctttggtcttttttttttttttcctttcctaaaagtcagcatctggtaaattctagttttggtttataataattttttatttttggtttcaatttttctctaccctataaacgtttacttttttttcatataccataattattaatgaaatatttccccatacttaaatatgggaaagctaaaacttttctcagaaaatgatgttgccttcctaaactcatatcatgaaatcactgacagcattcttaattaacaaggtggttaacactgtaattgatagttgcattctgtgtgtgtatgtgtgttgtttatttatgcatatttaccaattcaagtaaaatttatcatgttttaggagctttctaaagtagaatgtaatagcatgtcttaagatactttgaaatttataagctctatttaaatatagtaatcctagtcttatttattaacttgaactgtagaagttaatattttactttattatcttttactttaaccaatgttaatgaataaaagaagttttacttcttaatacccaaagaaaccaggtacagagtagatggggttgataatagaaaacactgctaccaaagtaaatataaaaattgggaaagaatggaaaacaaagagaaaaatgattgtccacagttaacatctcagagtgtttcattagcttctttttttttttttaaagattaacatgtgttcatttttaggataaacttggcctgtaccctatacctggtttctttgggtattacgatttttacctgatcaactagagttgttgactcttgtcttcaaggaaatagggagaaaaatatttttttcatttaaaataccttttttttttagttagtaggatggtgaaaccattttgcagttattttattccctcaatcatatctgatttgcatttcaaagttatgagttctgtccctttgtgacaaaacccaacatgttaaggtgtggtaagtgaacttatatattaaaagccatagaatatttagatagattttctatggctataccaccctggaatgtgcctgatcttgtttgatgttggaaactaagtaggcttggacctggttagtaatttggtgggagagtatttagatagattacttttgggtcacaaggatagtcttaatctggtactctcacagtgaaacataaaggggttccagggacaaactgaacctaaacagaactcctgaactttgattagaatcaaatggttcttagacatttagtgagtgcattacttttggatattatcatctgtctgttttcctttaatgttgagatgattgaatagagatgtagccgtggtaaaaccactgctgattcttactagttgctttcttcagagaggactttttttgttcagaaaaggttacaacaataaattgtaagaccataaaagctgttttaagtgaactaacagagctagttctgggtgattaaatgctaaatttattagaaatataaaggccaatttagtaaatgaaggaaatgccataaaaattgtagggatattttaatagagaataaggtggctaacttaccaaactatagtttgtcttttcagcttaatttcccttcaaggtttcttttttttaggtc

SEQ ID NO: 130082 - DNA, 1483 bp, Homo sapiens
taagctagaattattaatctaaatattatcttcagaaaacttaactaataattaaggaagccacaagccctatgttaattttagaaaaagcttttgtatatttaactggcctttaattctgggaccccaagttatgcttttaagaatttgtaactttaaatttctatttaatttttttcttttttttttgagacagggtcttactctgttgctcaggctggagtgcagtggtacagtcttggctcactgcaacctctgccttccaggctcaaacagtcctcccactttagcctcccaagtagctgggactataggcatgagccgccgtgcccggcctctgttaaaaaaatttgtaataaagatttctttattattaaagaatatatatatatatataaataaagattatttttatatgtaatttttttttggcctagatacctctttactacaccagtgaatttactttttgtgttgtgtcatgggttctcaagaaaacctctaggttgggtgatttgctaggaggatccataaggactttgggtatagttgtagtcacagttataatttattacagcaaaatgatacaatgcaaaatcagcaaaggtaaaaggcacatggaacaaagtttgaaggaaaccaggcacaagcttccaaggggtctctcccagtggtgtcacacaggagatgcttaattcctccagcattgaattgtaacaatataaggaaatgtctgccaggaaagcgattagacacttggtgcccaaggtttttattgtgggatggttacgtaggcaccctgtacctggcatgtaccaaaattccagacttcctgaagaaaagcaaatgtttagcataaactatagtttgtgtaaacagtttaagcacagtgagctgctcttatcagttctgccagtggttgtaactctcccaaaatctatattcccaggtgccagccaagggtcaactgtacagtcaggattttctgaggataggcagtctcaggcctgctctgttaacgcttttctgcattatatataaatatccagtataattaaatctggttgcctggcagtgttaattacaaatttgaatttgagtttgtatttacctgtttgttaagtggtagaagtagggaatgacactaaactgatgtgtcattcacacatcagaatgtgtgtatgtgatctgtgatcgattaaaaaatggaagccattcatgcgttatgccatgtcatagttactaagattaaaattccaaatagtgttttctccacagatgatattgacagtggcttgtatgatggaaacaagggaagaaagaattttatatgctggttctgtggagagtgagaagtttctttttttttccggaaaattgccatttttcttaatccaataatgaaattcacctaaaatactgaatactgctttaacaaccatatttctttgtaatagtcctcttgagaaagacaatatagttg

SEQ ID NO: 130083 - DNA, 1045 bp, Homo sapiens
agctaatttttttgtattttttattagagacggggtttcaccatattggccaggctggtttccaactcctgacctcaggcaatccacccacgtaggcctcccaaagtgctggaattacaggtgtgagccaccatgcctggccaaattattattaattttttaagcctgaatacattggagttgcactgtataaagagatagaatgccatgattttaccttaaccttaaaaatttgtaaatattttaatgtccatagtactttgaaaggctaataattcatagctacattttactctgaaattttgcttcctgaaaattatctggattttaatttactctttttctctgtctttttttctttagtgctccagacaatgaaacatccaaatctgctaatcaagatacctgtagtccttttgcagggatgctctttggtaggcacaaaacttccaactagttgcgcttgtatagagtgtcttataatccttttttaagtgagaactcagtgttgtaattaatactatttttactaatagtagaaaatatttgtaagtgcttactttacactaggtactattctaatcatttaacatatatagctctgtataattttattttgtatttttaaaattttatgtatcttcttatttttactcatgatgttcatgaacacatctatgtataattttaaagctaaattatttagtgatgtgctttccgtaggtgataatgaaattattagtttcagtaatcttttttttttgcaaaatggattgatcattaccaatcagtaatgagcttttaattccatattttattagcactctgttgcagtgtggctgtttcttttctgcttttaaaaagtattttgttttatttatgatagttttttccttaattcttctttctagtttctttagctagtacaaaactgctgtgtattttagtttcttttctccaaattaaacctttctttcctttgttcttttcatgtagtttctgagaaggtgttttgttcaaatcgtgatgatggtctaaattttct

SEQ ID NO: 130084 - DNA, 1052 bp, Homo sapiens
aattgaccagtttaatcagtaccatgtaaaggctatattctttttgttttgtttttatttatttattttattttaaatggctatattcttatgttttgttttttttttttaattttgaaattgagtttcgctctatcactgaggctggagtgcaggggcacgatcttggctcactgcaacctccacctcctgggttcaagcgattcttgtgcctcagtctcctgagtagttggaattacaggcatgtgccaccatgcctggctaatttttgtatttttagttgagacggggtttcaccatgttggccaggctggtctcaaactcctgacctcaagtgatgtgcctgccttggcctcccaaagtgctgggattataggcgtgagccactgttcccggccgatgtagtttataaaacatggtaaaataagagaaatgtctttctgagctgagagcctactgataaataattttatcaataaaaggattattgtaccctgaccttttaaagatgaatggcatgagtttatcactaatgcaatccaggatttatagatgaatatttggtaagacaatggactctaacatttgaaactgttaaagtcatttaattcaatgacttacctcctggttgatcttttccccccaaaactatgtttgtacatacctataggaaacttacgatttccagagacaggacattccatcttcagatggctgtgattgttatgatactcttatttcaattgaactgaaatttatcttcctataattttgccccaaggatgtcacttgggaccttttgctttatttaaaaagtgagatcattgatttagtttagagctaaataggaaatgtattgtggggtttataagagaaccataggtaatttagaagtatgttttaaaatttccaagcatttggggattttccttctatcttttttgttattgactgctcgtttaagcctcttatgatccaagaatataattagattaatttcagttatttcaagtttgttaatttctttgacaaagtttttttttttttttttt

SEQ ID NO: 130085 - DNA, 1002 bp, Homo sapiens
aggacaagcagtccaagttatagtgagattttgaggctccagtattgggccattagtagaaaatgaagaggggcagttggttttgagatgctcgtttgcgattgaaatgttaaatttgtaagacttatggaagatattaatggaaatattatttagattgttagaaaaatggggttgggataagaacattctgttatttaggaaaatttttgactaatggtagaggcatgggcatgattactgtatcttgtgtttgacgcatagtaggtacccattaattacaaaagaaattgaagaaggactgattcatgtgatttttttccttctgtatttcttgcatattagtaattatatgatacaattaagatggagtttttaaggacttaactttctaattgcatacgatgcttaagagttaagattgtatttttctcataccactatctaggaggtgaagatcgagaacttattcagagaaggaaagagaaatacagactagaactgttggaacaaatggctgagcaacagaggaacaagagacggtaatgaaaggtttgcatttaaaagagatattttgagtttaaagtgcatttgtgtaaaatgacatggttaaataaggggttgtcgttctaatatgatgtttgatttgtaaatcacttatattttcatctctacatgctaaatcaacaaggaaaataaatactaagagagttttttttttttttttttggtcataagtagcaagtgagagtatttatatattctgtaatagcccttttacttccctcattgatttcttcagtttttgatttaaggtagcatttaatgttatagatatgcccattggattatcccatatatagtaacaaatataaaagtattttttgccatatgaaatggtatgcacacacacatacatgcaaaaaaaattgtatcctataaatttaacatttccatcccaaatgagcatctcaaaaccaactgtccctcttcattttctat

SEQ ID NO: 130086 - DNA, 1050 bp, Homo sapiens
gcaggagaattgcttgaattcgggaagtggaagttgttgtgacctgagatcatgccactgcattccagcctgggcgacacagtgagactctgcctcaaaaataaataaataaataaataagatagatagatagatattcagagtcttttatagctgtaaaattctgttattcagtaaataaataaataaaaatagatattcagagtcttttatagctgtaaaattctgttattctgtgactgtcttaagtgcctgctgggataggaggtcttttgaggtcccttccacctttaaacttatgattatatgtaacaaacagattttttttctttattttagcctgatagactaaagcagtttagtgtggcaccaagacactttgaagagatgataccacctgaaagacccagaatagctttccagacacctctccctcctttatctgccccatctgtcccacccatcccatcagttcatcctgttccttctcaaaatgaagatttgcgcagtggactcagcagcgcccttggtgaaatggtgtctcccaggtgcttgtttaaatgttttgtgtttgggaattaggtaaggtattgctatattttatgtttagaaggatatactgaagcggatgacgttattcttcagagattttgtacagttaacagttttgtgaaataaattctcttgaaatttgtttttttctctgctattataaaaaaagggaaattcttaaaacattttattgtttaaagatgattttgtatctttagaatgaattactaagtacattttagtatttatttagttttgggttgtattttgggatgtttttgatatcttttaacatataaaagttgtacatttttttcaattttgttctttccacttggcaaacattgaattcttcaatttgtgcagaaaaagtttctaatgtggctcttttacacatataattttattttagcttctgtttcttcagctcattctctgtgattacttatgggctgtgtaactcaaatacctgaaataaaaagtgttgagattataaaa

SEQ ID NO: 130087 - DNA, 1050 bp, Homo sapiens
tgtgaatttttcaaaaatattaattttatttgagacagtcagactttttcctgtaattacattgttttattcttgaaatagctaagaagtaattttattagtaaatcatttaaaaataaatcattagttattgtgttacttgagggactttggctgtgttattatttctgtttgttcaggaagccgcctaagtcatatgtgtactgttcaatgaattaccacaaacttttttcactcctgtgtaactatcacctagcttaagaaatagatacagtgaatttgaaagttgcaaggattgtcaaagcaaaggcaggaaggagctaaggaaggggtcacttaaggattcctctttggcctatagagaaatatccttctgtatttttaaatgtatttatatgccatgctatttcaaaaaactgttgtattttcttcttgctttgtcgtcaatggatttaaattatttattgtgtatttgatgtaggaatacggttggacagaatgaactgaagattacaagtgatcaagtgataaattcaggattgatttttgaagataaaccgaaaccttccaaacagtcacttcagtcttaccaagaggctttgcagcagcaggtattgattcatttactcatttactgttgaacctcttaagtgtaagcatggtggtcccttagagctcagagtgtggccggggaggggaaaaaaaacagttaattataattcaaaatgctgagttttgaagtggatacagtaaaacgctgttggaagcataagatagggaaaataattgcctggggcagttgggagagcttcacacagtagttgatatttaagctgcatgttgtgcaatgactacgttacaagttgctggtgtatacagagaatggaattggggtggaagaaggggctggagagttagttaggttgttctagcagattgtgaaggactagctaataaggggttttcagtttcatctggttatgggcagctgaaggaaggaaattttaggccaagaaaagtatgaaaggattgtttgctttaagcagattt

SEQ ID NO: 130088 - DNA, 1172 bp, Homo sapiens
tatttttagtagagatggggttttgcatgttggccaggctggtcttgaactcttgaccttaagtgatctgcccaccttggcctccataggcatgagccacgacacctgacctaaagtatttttacattgagtattacatatatttgtgattttaacctttgtaggggggtacactggggaaaaaaaaaaaagcaaatttttttgcttgttttctaatacaaaaaataacatctggtattactaacttcttgtatcagaatacttgtcagcgtttattttaaatatatcttatgttgtcaagattcgggaaagagaagaaagaaggaagaaagaacgtgaagaaaaagaagaatatgaagctaaattagaagctgaaatgagaacatataatccctggggaaaaggtggaggtggtgctcctctcagggatgcaaaaggaaatctgataagtacgttatttctactgacttgtttttaaaataagctaaattatttttaactttttaaaagattggggagtagaaaaaagtaggaatcatagcctctatagcaacgcatgtatgtaacttaatgcatatgaggtattttaagagtaaatataataacagaggctagaaagcatttcttcttcagaatactatccatttgtttttattataaatatttcatcctccgatgttgataacccagttgcagagaaaagctcatgttagttgataagtttttactgaaactggtacttagaatattttgttccctcataaaaatgataaaacccatattacaatttaaaaaaaataaactagtaagatgtcttagaaataaaggatgtaaaacagttttgggaggggattttgtgtttaatttatctatgcaatatacctgctaattgcaagaattcctttgggaaaaagaagacatgatcatagaaactttctagcaagtttcataatttgttgatttatctttcaattatgtactctcaaaaatgtttgatctagtaatcacacaacaaatacttcgaaagagtggctttatacaacttgttatatacagttgtctgttggtaaccatgggacattggttccatgatctcctgtgaatacccaaatccatggatgctcaagttcctgatataaaattggtaaagtgttcgcatataacctacacac

SEQ ID NO: 130089 - DNA, 1032 bp, Homo sapiens
aggtgtgagccaccacgcccggccagactaatatattaatcccacttctgtaacaaccacaactgcctccattaccttctacagaacaaaattgagagccattgacatgtgttttaggatattgaagaataggtatccattctatggtttccagtcttatttgccattgctctattacatgtgctttatgctctagtctagctggactactttaatgttgccagaacactcatcatgctttacccacttggagtgctttctcacattgttctatttctctattatgctttcctacttatcttcatctgtgaagctcctatacattttccaagtccaagctgccctaaatattgtaacagaatgtgaaccttcctgattctgaactcccattctcttttgtagcatttatgtattacttgccatgttctatctggaattctaattgtgattcatgttcaaaatacattcttgaacataacaggcttcctgataaatacttcttatatccaggtttaagttcactttcagtgctgccatactgttgcagttttttggtttgtttgttttatggaaaacaggtactttttattttattaaagctttaagttctgtaatcattcagttctgtttttgagattggttgtttgacccaattctaggtgctcagatttttgctgtgtgtattagatatctattctatgtaatgaattaacccaaaacttggtgttttagcatgataaacagttattatcttgcggttctgagggttagaaatttgtgagtggtttagttgggtggttctgtctcaggctccctcataatgttggagtccaagatgttgaccatggcagtagtcatctgaggcttgatggggactgtaagattcattttcaatatggctccctcacatggctcaggaggccttagttccttgtcatatgggcctctccatagggctcccttagtgtccttatggtatggcagttggctttcttcagagtgaatgatccatagataagcaaggtggaaata

SEQ ID NO: 130090 - DNA, 1048 bp, Homo sapiens
ttgagtaaaaaaaaaaccataaaatgtttaaaacttccttttttttgtgaattgaaattcccaaattagacttttcttccctaagaatgaattaattggctgggtgcagtggctcacgcctgtaatcccagcactttgggaggctgaggcaggcggatcatgaggccaggagatcgagaccatcctggcctacatggtgaaaccccgtctctactaaaaatacaaaaattagctgggcgtggtggcatgtgcctgtagtcccagctacttgggaggctgaggcaggagaattgcttgaacccgggaataggaggttgcagtgagctgagatcacgccactgcactccagcctggtgacagagtgagactccatctcaaaaaaaaaaaaaaaaaaaagaattaattaatctaaaataaactttctcaatacaagaaatgattcaaagccacctaattttgtgctatgccatatatatgtgtatgagtgcatgtatgtgtatgtatgtacacacagacacacatatctttgcatatatgtagcatttgatattttaaaagcctgaaggaacttgaatatagctgaaaattgaatgttacaacatgtgtttaagtttccttatcctctaatattttatcttcattaggtttgtttctgatgccctttataatgttcattattttttcttttattttatggtttttagatgagctatggcttatgaagtctaatacgaatttggcttaaatttatttttttggcttattatcatgccaagatacatttctgctttctttgtatatagcaagtgtttccctatgattttccttttatagtttattcatttctaaaaggacttctcttgtctgtctctaataatatttcttctctaattgccccaaaggtttagaataggagtgagcatcacggtgaaacatgctactcaagtttgttttgctaatcagcttttccaccacagcataaaatttaaaagagccttcaaggtgtatatttagtttgttttcagtgggaaaattttctagagggaaa

SEQ ID NO: 130091 - DNA, 1193 bp, Homo sapiens
gccaagatatgccactttattcttgcctgggtgacagagtgaaaaaaggatgattgatgtgacatcactgtttaagatacaataatagaggattaaaaagagtggaagcagggatattttactagtgtgggtgacagtggaaatgggtggaaagtgctttttaaggttcagcagaaacaatatagatattaaatgtgagaaactggtatcagaggtcccaatattgtgcactcaagtcaggtagcagcaagttgagggttcagagtccctgttgaacgtaaaggaccgtgtggtatattgaccatgacagcaggtcataatttaagtacctcctctaatgcttagcagttcttatcatggtctaaggtagaattcagccaaaaaacaatcttacaattgtatagacttttattgtttttgagatacttttacatatagtgtctcatcaaacctcagatttctctgagagaggttttattatctctgtttaataacatacaactaatacacagactaacaggcttgcccagggtgtcacagctagcaaattgtgaggccattgcttgaacccaagtctccagacttcaagtgtaatatctatggatatcagacttctatttataggattcactaggaagtctttacctctagaaaaagtatggtaatgggggaagctttaactattttagtttcaaccttcagttcttccaccctgtcaaccctcaatttatctgtgaatggattgctttcagatgatgattttttaatttttctttcagcagcctcttcaaaatctcttctcccacctcaaacaaaacctaatatgtaattctaagaaaatgtaaaatagatcaatggtatttattattactgtcaacaatataatgtcagataaaaagtatccaaaacttttgttaaaaaaaatattatgaaatgttcaaatctgtgcacaaagatggtaagaaattagcctgaggtctgtacaagtaagttccacagttagctcaagttaatgcatcagaagtcttcatgctgttaaaatttggtgaatattaataacacttgtgaatgtttgacatttttaaccacagctttaaaaatagttaacaaataaaatatttttaagaactctgaagcatttttgtgttatgtaattggaaaaccatgacaggaagatagctttccctgctttc

SEQ ID NO: 130092 - DNA, 1911 bp, Homo sapiens
tcagatctgaaatataggtgatatctacagtaatttgcctgctgcttcgattgtaactgatagtgcttggtgccctaaagtttcttttgacaaaccataatttagcccctcaagctaggtagctgtagatatgctcattgagtctgttatactttagattgaactacaaggaaaagagaacatggaaaatgttctaagattgatcctcaaggtgatgcttgaagaatatgcaggaatttgccttgaagaggagggtgagggattatcagcttgtggaaagtcgtggagagcaatgtaagctcatggcacatgtggagaatcttccatggtgtggtctggcctgatgatgcttgtgcattaaggcagcagaggaggtggaggtcagaacatgtgtggcatgctgtacggagtgctaagagctttgattttgttccataggctggtagattccagacaggctaattagcagaaggtaaagaaatgtgtcagaagaacatgtttctgaattccaccctttgagattctgatttagtaggtctgtggtagataatgcataggaattcattgtaatatttaagtaggggaatgacatggccacttttgtataatgtttttttaggcaatggtgtggagataagttttggaggtggggcaagactaaacatggagataagatgcttttgcacaagtccagatgtgagactgaggacccaaacaaaggcagtgacaccaagaactgtgaaggtgtgacagctttatgatacatttaagagacatagtagtactatttgttgagtgtgtggtgggtaggagtctatgataactttcaagtttttggtgagggttacatagagtaggcagttgaaaatatgaattgtggcagcagaatgagttctggactcgatttgtagttctggacgccatcaacatattggtgcttgttaaattagtgccattgtctacgatgagtgtctacaagagaagtaaaggaggctgagaatagaatactgggaaattaccaacatttgagaagcagtgaaaggaatggacagagggtgagagaggatggcagtgacggcagttgcgactggccaagtaaaatgcccactgaatgtgtcacttgggggtcacttgatgactttggtgaaggcagtattgttggagtgatgggtgtgaaagcaaaggccatagctgtgtgttgagaagtgaatgagagtaggcagtagacccaaaagtactgcatttactgttctttaaggaagctcagctgtgaagggaaggacagaatggacaggagacagtgagcaatgaaggatgaggtaaaatttttttttaagaaagggagaggtttttacacataggctgagaggaaggtgcttggagagaggaagttggaaaaaagaataatcggaggagaatgggagtcaattatcagatacagagtacaggtgaagggattctgtttgggtagaggcaaggacacttccatcgtgatgagaaggaagaatagatttacatggtagatacactctagaatagatataaaaggtggatatactctaccttgggtagagtatagctgggtaagttttggaggtaggatagtgtggagtttggtttcctttacatataaatacttcaaaaaattactcccttcaagcttctgtgtagggaagacatactgaacatgtctttgtcattattgttgaacaggaaagttccatgtccagggcacagtcacccccggtacctgccaggaaaaatcagctccgtgcagaaggtagagttaactactaaacctgttacctagagtatttctctttttaacttttcattttgaaataattataaactcatagaaaattgcagaaacagtatagagcggttaggtgctgtgtacccattctccaa

SEQ ID NO: 130093 - DNA, 1050 bp, Homo sapiens
ctgcaacctccacctcttgggttcaagtgattctgctgcctcagcctcccgagtagctgggactacaggtgtgcgccatcacacccagctaatttttgtatttttagtagacatggggtttctccacgttggcccagtctggtctcgaactcctgacctcaggtgatccacctgtcttggcctcccaaagtgctgggattataggcatgagacaccatgcctggcctcataattttttttttttttttttttttgtagcgagggggtcttgctttataggccaggctggtattgaactcctgatttcaagcagtcctcctgtctgcctcccaaagtgctgggattacaagtgtgagccacagcacctgtcctagagtaattttttaataatatgatgtggtgaaaaagaccaaatttcttttacagtgaattagatgtgaactcacctatttttcctgtgaagcacatattatgatttgtcatttatctataggaaaaaggaaaggaatcccatggatatatttgatatggctagacatcggttgcaagctcctgtcagaagacagtcccctaagggcttagacgctgccacttttcagaatgttcatgattttaatgagctgaaagatagaggtgagtagattgctgctcttttaaagatgtagcagaagtgttctacccatatttaaatatctataaagatctttgtaccctttttctaaagtggaattttatctatggtatgtattttagttaaaatgaaatgaaacttatgtattctctaggtcttcagttaaccagtctggtagatgaagctttagtttgactaactgctttcttttggagagcatacagtgttaaagtctggaatggatgagatcgcatagactagtacgaagaatggaacttggcatttaatggaggatggacagacaaagatgagctcatgaaaaatactgaggagaagccagagagactggaggagaagcaggagaatgtaggatcctgaaacctgaggggaaggagtatcaaggagacaggatcatgtaa

SEQ ID NO: 130094 - DNA, 1022 bp, Homo sapiens
cagcagtaaaatgtaataaacaacttaaacatggcacagcatagatgaatctcaaacaccttattgctaagtgaaaagacaaaagattaagttgtagaattccatttatgtttggtgttaggtaaggtaaatctgttgaaacagagccgtgtttgcccggggccagcaggtggggagtgattgccagtgtgcacaaaggagctgtttaaggtgatgaaaatgttctactttaaagtgatgattgtacaactctgtaaatttactaaaaaaatcaccgaactgtgtatgtacatacattgagtgtgtttcatggtattgtaagcaaaatcttagtaattaaaaggctcttggtttagctctgggtaagatttgaagcagtattaagactccttctgcttttcggggtcctcttaggggcttacggtgagacatatcctgccattgaagatgacgtcctccctccaccatcacagttgccctctgcacgggagcgcaggaggaacaaatggaaaggactagacattgtatgtatgagacttttctcccccttttcaacttagaagaatgagaggtctgggttctgacctgtgctaaatctgtgtggcccaataaagagcacttgcttgaaattcagacatgggtctgaatctaggctctgccttgactggatgaccttgggtagctattgaattctgctgctttggcttcttccagataataatagtattttcttgtctcctggggtggctgtaagtagctcctcatcccaaccttccttcttctcctgcagaatatatggatttcagagaggcacaagaaggaactgatgtcatttattgaaaagcttcataataacctaattctgtgatataggcatcaccttcatttcggtcaaatgacttgccaaggtcacatgggcaagaaggctgagattcaaacccatgttctcctcactctgctccccagctttacaatatagccagtaaaaagtagaggctttggagtttatgtcccagcaatgt

SEQ ID NO: 130095 - DNA, 1043 bp, Homo sapiens
ttatgacaaaactgtgcaaaaataatctatacaattctattatataaatcaataatcatggccttttatttatgtacataatatacatcatgataaaaataattttatatacagatgatggaaaaaaagtaactttcaggtaggggccaaaagtaggacatattaaaggtacagatttaccattcctttcaccttaaaaggcactactgggtccagtacaggtttattttaaccatgtgcagtcgacaggccctgccaagtgaaagtgcctggttttccaggaatctgctgctgctcctggttcagctgctctgccatgaaacgtttcagcgtttctgaagtgccagggcggagccagggctcagttgctacagagtttgatccgtcatcccctatgtgtttcatgatgtcatcagggtcaaccagtgaactctcatcatctacaggaggcaagggacacgtggctcaggtaacacaggtggcaggcaggagacataagcgcaggtctcttgtagtccaactcattacaactcagcatttccccacagtctcatatcctgaactctactgtttgtttgttttggttagactcaccccaccccaccctattttagagggaggagagtgggcccacaaaggccaattttgtaaaacaaaaaatgatcaactgagtaagctgactccatggcactagcaaccagagggattctaagcatatcaaaggcacctctccataaaacaaagtcaacaggaggaatgtaggtagtcttattttgtaactgttacctcaggagaagcctaatggctacacataaaatttctttcttttttctttttattttttttaaagcaaggtttggggaatactcttcaacctacaacactgctataaggaaattattaagttattttgggaaaacactagttggcatgagattacttccattcttaaaacacctaatctaacaaggccgtgtccagtcaatgaagaggtagctcttgcttcattctttaattgaatctgattgattgtacgcaacttc

SEQ ID NO: 130096 - DNA, 2115 bp, Homo sapiens
aaatttcagtaacccatagcttataaaatctcaactctagtttgtactcacttgcctgctgcttattacccaggaaaaacagtgctaaattactaaaagtttgtcaaagatatacagacaaatgtttttcaaaataaggatatgtaagtgaatagtgtttgtatgaagtgagtttttctaacacttctgtctctcagttccacaaaccagagtcactgcctgctgtggaccctgctttcctggctcctgtgatggagccccagagtagtttgactctaggcagtttaaggctctgcagtttgcaatcactactaatggagaaattcattttccctgcagtttaaagctcatgcatcattctactaccctctcttatgtgaaattatgcaatttgacttgattcctgaacttcgtgctgttcttagaagattttttctgcgaatcggagtagtttttcagatatcacaaccacctgaacaggaacttggaataaacaagcaatgatgggaacttaatatttttgttggcatttacatccctctgctctttaaaaggacgctggagctgaggtttcctacctgaaaaatgatttctctggattgcagtgtctgagttactggtaaagatgcttagaagtcttactcaaacttgcaacactccagtcccttttagtgctggtggattttgtgtgttatattggcctcatgttgagcagaaagcctgtttaaacagtgtcagctcatgctcacgggtccttccctgtcttccacggcaggaaaagccccacgtttttggcaggtgtggaagtgaaacttacccaaagaactatagatgtaaagattgaacttctacaagaagtacaactcaggagagctgtattttgaaggataaaatgtttataattggggagtggggagagaagaagaaattattgttcatggtaaaagatatttagcaactatggtattcttattctgaagatttttgcacactcaggctatctgagatactggtaatcatcctgtgaaaaatgtacagagatgcaggtctgtaatataaaaatcttaaaacattatatagttcttcctgcactgttttctttattttcttattcatttgctaaatacccataatattttgtcaaatgcactaaacatttgggtggaactttcttttttattttatagggatttttagttttgccctttttggtaggtggtgattttgaggctgtaacatgcccagaagctgttgtggccgacacttcaacaatagggaaaaaaaggtagaaaatatccctactgacagtaactacctgtcacatatttctcttaggacttttaaagatgagccattaaaatagaatgatcctttatggaccaaaacttgaatcactgcaaaatgaatccagattgctgtcattttcttttcttttgggtggtggggcttgatgtagattttactctatgtacagaatttaacgttgaatatattaaaataacaaatctggcatggtttgcggaggttagatttactggaaatgtattcatactgtgaattgtgctctgatggttaaaagacaagattgtcaagcattccgtattaacagtggatgtagaaaattttttcagatggacaaaatgtatatggtacagatgtaaagttttctatgtaaaaaattctgtacaactttctgtacaatattgattcccatctggcatattctaatcaggttataggtcaataaagtttttgaattatttcatcagtgcaatcaaaacctgtataacccacccccatgtttcattgattctggtctattaaggctgaacaactatggaaaagacattttcagccagaactacaaattcaatattgtttggttctggtattttctttccagcttctagcattagatcctccttacactgtacttaccataggatacttatttttaaggcaatttttaaaatttttatttatcttttagagaccggatctcactctgttgtccaggctggagtgcagtggtatgagcacagctcactgtagcctcaaactgggctcacgattctcacactccaccctccccagtagtgaggactgtaggcacac

SEQ ID NO: 130097 - DNA, 1049 bp, Homo sapiens
acttacggaatagatgttctgaggccaattaaatacattttagaattttaagggatcacctagtctctgttatcccatttgattgacaagactgattgattaaggccccacagggccttgtgatctagggcctcacaagggtcagtgaagagaggagtcgcctcagattccagtccaggtctcttgaaactaagctttgcatgtgccacctgccacacggcagctttgcattgaaagaaacttagaaaattaggaaaatgtgggtttcctggtaagttacaatggcttcttttaacatgtttggttttcttcccaatttgaaaagcatgtttatgttgacactccagctaatgtaaacagatgggatctaacatgttcttgaatagttcatattcactactatgttcatgattgctctttctcggtgaatatggggaccagtagatacgcaagtaacattaaaggaaaccttttcttttgcagtgtctgcagtgaagcactaagttacttcctcactctaacatcagaaagtcatcgagaagcctggactaacttactgcttttgtttctaactaaagttctaaagataagtgataatagggtaagtatgaggcttcgaatccagccccacatttctagcccaattcgcattgggatgcggggtcccagagccgccgtgcaagagctctcagagatgaatcaagcagtgcccaggctgcactgctgcttgtgcaaagccaccagtggccttgctgtatcttcctcagtccttgcttttctccccccttacccagctttgttcactaattagcagttctctaggggattcagtaggcgagggatcagaatcccttgggataccttgacaagttcccattatgaccccaggaatctccccctttgccccattttgaaaactgctgtccaaccacctcatggccttgtactctgcctactactcaagactacatctggttcctgggcctgtgctctgggctgcagctgttcctttggcatatttagtggttccaggtaacccagagtcccta

SEQ ID NO: 130098 - DNA, 1120 bp, Homo sapiens
tttgtttgcatgtgcattggggggggtttcctcacagaatttccagaacaaaaattgtttgctgccctgttgattaaatgtgttgtgcagctggaactcatccagactatcgacaacattgtcttcttcccagccacaagtaagaaagaagatgcagaaaacttagctgcagcacaggtaaggagataggaggacagctgctttttttgtgtaagtaggaagttaggtatagcagtctgggctgtagagttaggctagagaattagtttgtggggccttcatcatacagatgtccttttaaaccatgagactggatcccatcacaaggtaataaggttagctagagcagggaggagggtcagcaactgattactagggacctcatcctctacagctcctggagatgaggcagctagcagagactgaagacgagaatccatgaggcatggggaggcacggggaagcaggtgtcagttgtcggggaagtcagatgaagaaaatgttttaagaagaagcatgtgatcagtcgcttgttaaatgctctggataggtcaagtgatattacacctgagaattgccctctaactgtttggacgactttggaaccttaacagtgtgttaaatgttaaattgaggacaaaagcataattataatggggagagagagagagaagagagaatgtggactcagccagtactctgttaagaagttttgctgtaaaggcacagagaaatgtgatagctggattgtgaggggttcaagagaggggtttgctatgttttgttctccagattggtgatatggcagcgtgttcactggtaagagctttccagtagggagagaaaaactgactgtaggcaagagaggggcaatttctagggccatgtttttgagtgagtggagatagtacctcatacagagtgggaatcacctggggtagaagcccagacagttcccatgtggcggcagggggagggctgggggatgggttgtggatgcaggaagtctggtacgtttggggtaggagcttgtgagagacctcctctgccagcttctggtttctcactgagatgggaagaaaagtcatctaccatgtgagatttggaagaatgttttagc

SEQ ID NO: 130099 - DNA, 1069 bp, Homo sapiens
cccttttctccacactgcaccccaaccttagtcggcctgtgcccatttccctcactgctgcccacacccctgtctccatacagggatccacaggtcacctgtattcctcccctcaccttttcacaaaaaagaggaaccctttacttttttactggatcaattcagttccatttgctgaaggaaaattacaacacctagaaaagaccacagcctccttagaggagaacaggacagctttgagaactttttaaaacctgaggtgaaatttacataacagaaataacaatatgcaagtgaataataattcagtggcatttagtacattcacagccaccacctctatctagatccaaagcattttcatcactcctaaagggagccccccagccccataactgttatacagccacttcttcttctcctcttccccagcccctggcagccactaattagctgtgtttgtgaattgcctattctgcatatttcatataaatggaatcatacaaaatacaaccttttgtgtctgtcttctctcacagtgttttcaagacgcatcatgttgtagcataatcagtaattcattcctttttattactaatagtccactgaatgtatagaccacattttgtttatccatttgtctgatgatggacgtttgtatttgtttcacctgtagttgtcatgaatagttctgctacaaactgttgtgtacaaatatcatttgaatacctgttttcagttcttttgcattatctacctaggagtggaattgctagctcatagggtaattctatgtttaacttcttgaggaaccaccaagcaattttctatagccagtggctgcaccattttacattcccaccagcaattccagtttttccacatctttgccagcgccttttttgttgttgttaaatgataaccattctagtgggtgagaagtttacctcattgtggttttgactggcacttccataatgattagtgttgttaaccatcttttcatatgcttgttgaccatttgtatatcttatttggagaaatttgtgttcatgtcctttgcctgttt

SEQ ID NO: 130100 - DNA, 1050 bp, Homo sapiens
ttttttttgtaaatccttttgtttagggatgttgcatgaataaggcttctagtattgggtaaaaatccccatttgaaaaagattttccaaaatctaacttttgttttgttcttagactgctgtatatgtattttcttttttggctacagtgccacaaaattaatattcactcaaacggttatccttttcaatttgtaattccatttacagttttttaaatgctgcattggtgaggtaagagtaaaggaaaagtaaaataaaaaagtttacagccaagacctttggagattttttttcccgaatgatgtatcctaaaggaacctgttgttcttacaacttaaattttttaaaacccagtgtcatgtgttaatttcagactagttttaagctttctgtttttaactgctttgtgaactctaaaaactattttaggagaagtatgcttttttgtattacagctttctaattgtgttttgtcattttaggggtttaacagtaatgtttgaaataatgaaaacatatggccacacttatgagaaacactggtggcaggatttatttagaattgttttcagaatctttgacaatatgaaattgccagaacaacagacagaggtaagaggatacacaattttcatttagcttagtcaagttaaaagattctcagtattataatcaatacattttagtgtttcaaattaagtacagaaaagaattcctagaaaatttttctttaaggcatgagaatgtaatactatgtctttataaataagaacactggctgggcgcagtggctcacgcctgtaatcccagcactttgggaggccaaggcgggtggatcatctcaggtcaggggtttgagaccagcctggccaacatggtgaaaccccatctctactaaaaatacaaaaattatccgggtgtggtggcaggtacctgtagtcccagctacttgggaggctgaggcaggagaattgtttgaacccgggaggtggaggttgctgtgagctgagatcgcgccactgcactgcagcctgggcgacgagcaaa

SEQ ID NO: 130101 - DNA, 1039 bp, Homo sapiens
aactagtgatggagatggtcttgagacccatggagtattaaagcaaagcctttatttttgaccagtaagtacattgcacagccttcttcaaggaggagtccccttaagttcaagggggactgactgaaatactaagattataagttaagcctatatggaagatgacaatgatgaccatcaacatcaagaatcatggcatcatcatagctatcatttattgcgtgcttgcttaagtattacactaagcacttcacttatattattttacgtagtgcttacagctatctgtgtatattattattatttccattttatatcaagaaaccgagatacagagaggttaagtaattttgtatattcattcaaccaaagttgaatcagtacctaccgtgtaccagtcactgtattaggtgctatgtttataatgtaaacaaaacagacaagttttactattctcaccactcagggcagtcagttaagtggtaaagatagtcttgaacttcgtatctgttggatgtcagaacctgtaacaacctttaagaggaagtgcattacatctagatgttggtgtatttttggtacagctaagaataattgaaaaattatagtaatatatatttttctctattttagcccttgtatttgaaaaacactttccagcgaccattgattctttccaggatgcagtgaagtgtttgtctgaatttgcgtgcaatgcagctttcccagacacaagtatggaagcaattcgacttattcgccattgtgcaaaatatgtgtctgatagacctcaggtatagcgtcatttagtaaacaaaattttgcagagtattctttccaatttgaaatcttaagtttgtttgggaattgagggtatatgaagcatttatttttcagtaatttgaaaaataatctgagcagcctgattccaagttaggatggttagtgattataactaaccattattgaaagtgtcaggtatttttctgagtgtttttcattaacttgtattaacttgtttaatcttctaatggcttta

SEQ ID NO: 130102 - DNA, 1738 bp, Homo sapiens
agtatgaaacctctccccatggctccccatgcgctcaatatgaccaggaacttccacatttaaaccagtagaacaaaagaaaacattagcaaaaatgggtagagaagaatgaaaagcaatacattttttagtcataaatggaaggagttccaccagggaagaaacagagcttattagactttgaccttaagtatttctgggtttgaattcttctgtattttttccttattatgtgtaagttactttagttcgccgagattcaatttctgcttttgcaaacaaagtaatatctaatcataggattgttaggattaaataagaatatatatgactggacttagcataatggctggtatattcgaagtttctagatattctctgtccatccctccccaaccccccacctccaaccaatctggacgcattacttagagcaggaatcttctatcttttagtgattcctctgttgctgctagcagtgaaaattcttagaaaccccaaaagaatttcaaactttataaaggatccataggaaaagaattaaaaaccaggaccatgatatggcttcaagttggactggggaaaactaattcccagtggtaatcaactgaagcagctagcaatgcagtctgtccctccatgatagcatagatgctatagtattgtaaggtctgggaggtgcaggtgtagacttgataccttggtgatctagcagtaagatttagaactacctgagcacctgcacaatgattagaagcccaactttatacattagaactgtaattactccatggggtaacatgagatgcagatgaaaactattttcaggcaagggaagtgaatgtgcactgattggctcagtaactttgaaaaggcctagagagtgtgggaatgccaaaataatgacaggtgttaattgctgggcctgagttttggcaagtaggactacagaattaggttacactaaaaataaaacaccagtgggatatcttctagaagttttagtcaaacgagaaataatgatacttgctgataatatttactggtatacttgaaaatgaattaaaattaattcatgtactgtgctacttaggttgcaaggatatgagatgaactgtcttctcccttcagaaaaagggaatttacagaaagatacacacattgaggcctagaaatgaaaaacagttcaggcttccagaccattctcaagaccagtaacacttattttatgccttatttaggttttctctgttatgtacttctctttttggtctgcaccattctctgctcagtcctgactccatgctccattttgaatccacatcctagaaggagctagtctgtggacttggcccctgttgggcagagccctcccgttgggccgtcccgttggataaccagccaacccatgtggcaaatggctacccttgtccccctgtgcctaccaaggtcagacagcagatgctttctggagcagaatgttgtcatcagaatttaagctagaagaagatgtggtacagtcaagccagtttagtctgcatatacagtggatacatatatatatatatatatatatatatatatatatatatatatatatttttttttttttttttaactaatatcttttttttttttttttttttttgagtcacagtctcactctgtcacccaggctggagtgcggtggtgcgatctcaactcactgcaacctctgcttcctgggttcaagtgattc

SEQ ID NO: 130103 - DNA, 1873 bp, Homo sapiens
taactattgcctggatattatttagttgtaatttgataggaggaatcattgtctttgattcctaaaggagttaaacattttttttttcactgccttaagaaccgtttgtatctcttcttgtataaaatataacacaggcttccaaatagatacactgtttctccacagaatgtgtaagttattgctgtcatatggtactttgtagtttagaagtacggcacttatgtttctctcagcttctctctgtagtggcagttcaaatataatagatgaagaaaagtgaggttcagagagattaaataagtggcggagctgagactagaacctaggttctatgacttatgttttttttgtttagagattataaatgtttacttctcaactttctgaagtttagaaacaaagctctgggtaattgttttccttagtaatgctaaatgctttatagatcttttagaaattcgattgtaatttctatagcgcactgatagaaacatttttcatctttatggctatatggctatatagtttttctttatgatgaccacttaaaagcagttgaatactttcacatgagacatttcaaggttatgtattttattagaattttcagtggccaaaaagtagcgtcttttttgctttatattgtaacttcattcaggattcaaagttttgatagtaaaatttcagtaagtatttgttgtcttccacagtgtataatgaggaagtattttatttaactactttttaaatattgtccaactggaaaccagaaatatcactgatgtctcaatgtaaaatatttaactattttttaaaaattaggctaaatgatgttcagggaatgggcttaaagaaaagataataatgttgtttgttgcaagtaggaaaatgattaacaggatcttactggaaatagtgtgaaatattgcaagagacaaagcttacaaagagagaggagttctgaagtcgggtaaaactaatatttttatgaatattgattatttccatttttaaattgatgtgaataatttataggtacagttcttaaaatatgcctaaggtcctctattgaatgtattattttgctctcccatttattcaagcccaggcagcattatatagttttccccctttgtttaagaaagctttctagataactgccaagaatttcatttctttttttcagaacttgtattgtctaaaagatttgagaaattttaatgtgttatcataatctttaattaaaatacaatttttaatttttgtagttggcttggacgccttttctggctgcattcagtgtgggtctacaagattgtgatgatactgaagtagcctctctttgcctggaaggtataagatgtgcaatcagaattgcatgcattttcagcattcaggtaacagagaattttgtctttgtagccagtttggaacattaattacctatgccattacaatagtttaaattacaataattgtttatgtgtgacattaaaaactaatttcaagtttatgatggaatttaaatgaatcttaatgtttaagcttctgagaagctgttatagaaggggtagttctatactgatctgtctaagtttatcattataactttggttacagttttttttctctattgaagactatacagaaagttttcaagactttgaattcctatgttaatttgaacatcttgtttaaacgaataaaatatcttgttgaatcatagtttatatacaaggttgtatatattttatatgatttcataacttaagcctaagaacaggttatctttaagacatgtaaatattgaatacataattttcatgaaagaagtcctttctagtaatttatatgctttgaggaactttta

SEQ ID NO: 130104 - DNA, 1057 bp, Homo sapiens
gtttccctgataattgtattctgaaagtggtacctactcgtttcccttttcataggtttccacttcctgactcccagtctaggaatttttttttttgaggtgaaattcatagaacataaaattagccatttaaaaatgaacaattcagtggcatttagtacattcataacgttgtgcaactaccacctctaattccaaaagatttcattatcccaaaatgaaactccaaactcatcaagcaattactccttattctgtctccccccagcccctggaaaataccagtctactttctatttctatggattttacctattctggatttttcatataagtgtaatcatataatatgggatctcttgtgtcttgcttcttaggattacttttaattactggtggtgtttattatttgatagtaaaatatcaaaatagaattcttaaatgttttatatttaaaatgctgatagtgtttattgtttcagatgtagccagtgaaaaacaaagaagacttctgtataacttagaaatggagcagatggccaagacagctaaagcactcatggaggccgtgagccatgttcaggcaccctttacaagtgcaacacatttggagcatgtgaggcccatgtttaaggttagaattttcaagtaatgtttgattgcagtgtacatttatatataactacatttataatatttttaagttaaggaagcgatacagtgatataacacattagtgtagacatattgaggtgaaattcatataacatgttatttaggacatagtagatacaaattttctattacttaaagagaacaagaggagttactcactataagtaattaatagttgtgtaatcttaggaattaagcaaagaaaagtattggagaatgatcattaatccttggcctgattttctctaaatgagttatgcttaagcctttggagttaactcacatttcaaatgatcatgaggctcttgttttctttaagtgttttgggcccaggaacttatatcaggcttctgaatatgcctggggcccagaaagtagggta

SEQ ID NO: 130105 - DNA, 1003 bp, Homo sapiens
ctgccttccacagttatcaacttatggccggtcttgttctatctatatctctttcctcccctagataattttgaagcagatctcagatatcataccatttcatctgcatttatctcagtgtgtttctctaaaagagaagtactctagttaaacataaccataccagcatacctaaaaagttaacaataatttaaaaatacctgatatctagaaatgttcttttgcctcatgaaattcatatttacttcttaaatattgaagaactgtcacttgatttctgatacctacttaaaaagtttgatttaaagttttagtattttttgcttagtttctaaaaacacacattgacatccttgggtaaaattacatttataaattatttgcaaggatttcttagtacttctaggggtaggtatctgatgatatttgttatgcttaggttgtaaaataaattacctactttctaatctgagatgtattggaaaaattaaaattcatttgaattttgagattaacctttgcagtatagggattttttgtgtctgttttgagatgtttaaagcagagtagataaggaaagtatataccaaacctaaagtaagaatatatacgattatatacatatgtatatacatatgattatatgtgaagttactcctgttttaaacacaatattgagcaactatgcatttaccacaaatttacttgattttatataggactttaaaaatttattaaagaatttaataattcaagatttgcctctggcatatttttggcagtatagtcaaagcagctcaccttcagggcttttattatcgagcatgatgacttctattctacggctttataaggtagttcacagttgggatttgtttagatatttttacaccagaattttcagtctaattttttcatttgatttttcaatctacactagagtattttgacctgggtttacatatgtttggttttaaaaagctatgctttaaaagacatttgg

SEQ ID NO: 130106 - DNA, 1662 bp, Homo sapiens
tgggctacagagtgagagtctgtctcaaaaacaaacagaaagatgtcttggttataatataatcatctctaattggtcctccgtagccatgagttctgtatccatggattctacatctgtggattcaaccaaccacaaattgaaaatattcaggggaaataatgggtaattgcatctgtactgaacatgtacgaactttttttcttgtagttatttcctaagcaatacagaaaacctatttacattgtattacctattataagtaatctagatatgggagtagagtatatgggaggacgtgtgtaggttatatgcaaatactgtgccattttttataaggaacttgagcatccatggattttggtgtccatgcagggtcctggaaccaatcccccactgatactgagtgatgactggtgtgtgtgtgtgtgtgtgtgtgtgtgtgtgtgtgtaaaatctgctttttaaattttctaaactgaaaagaatatcctgatatatttatgaaggcatttagtgtgtttaacttttagctttgtgtttgaaattgttaactctataatcaaaagtctgcggatcttaacaaaattttctgctttttaagtggctgtgtggtgaatgtaaacatctcatgaaaatctcaatttctggccgggcacagtggctcatgcctgtaatcccagcactttgggaggctgaggcgggtagattacctgaggtcaggagaccagcctggccaagatggtgaaaccctgtctctattgaaaatacaaaaaaaattagctgggcgcagtagcaggcgcctttaatcccagctactcgggaggccgaggcaggagaatcgcttgaacctgggggcagaggttgcagtgagccgagatcgtgccactgcaccccagcctgggcaacagagcaagactctgtctcaaaaaaaaaaaaaagaaagaaaatatcaatttctatctctgtttttactttagactcaagtgggtgagttcctgggagataatgataaatttaacaaagaagtcatgtatgcatatgtggaccaacatgacttttcaggaaaagacttcgtttcagcccttcgtatgtttctagaaggatttcgtcttccaggggaagctcagaaaatcgatcgattaatggaaaaatttgctgcaagatacctagaatgcaaccaagggtaaataaggttcaaatgctcattgattgtctgttatatccaaaccactgtgctaggtagcatccagggatttacagataataggacctaatcccctgtttagagaatttagattgtctacaatctggaagtcgtaaaacaaatccataaaaaattgtaatgtgagatacttagagaaataaaagtgctatgggatttgaggtgacttatttaaatgaaactatataaaacagtagaagtttataacatgatacatttatttttccagacaaactctctttgctagtgcggatacagcttatgttttggcttattcaattatcatgttgaccacagaccttcacagtccacaggtatgttttcttttaagtcagttttacaataagcggtacaaaataagtacattattctgaattcagtaagtaatagttgaaattttagttttattcagttaaaccagtcaccatatttgggta

SEQ ID NO: 130107 - DNA, 1036 bp, Homo sapiens
agatgtgcgagtcttccttccacttgaacacttattgtagggttcttaactggcctaatttcagtatttttttgtctcagaatagggaagcccaaggaaaggaagagagatgagccagtcagtggagcagtcagaacacacacaagtattgattaagtttaccatcttatatggacgtggtttgtgtcaccccaaaacaattacaatagcaacatcaaaggtcactgatcacaggtcacagtatcagatataatagtgaaaaagtgtgaactattgtgagaattaccaaaatgtgacacagatacaaagagagcatatggttttggaaaaatggtactgatagaccctcaatgcagggttgccacaaaccatgaacctgtaaaaaacacgtatctgtgaagtgcaataaaatgaagtatgcctgtatgaaatatttagtattactcaaagttcgtctactacatggcattctctctaatagtctctcatagtctaatttcccactgtggatatggataaaaaaatacttcatactgtaaaaaagtaagtaaacaagtcagtgaaatgatagtaataaagatggccttccatatgagacttatttctaaaaagaaaagaataaagaaaacttggcacaatgtaattattttgtacattcatgtactgatgtgtattaaataagctactattttctgggtgctattagaaaatttactgtggtttaagatcttttcagggactacgaatggttttctatttttaatgttcttatttaacatcatctagatttaataagaaaccaaagagaggaatacagtacctccaagaacaagggatgcttggcaccacacctgaagatattgcccaattcttacatcaagaggaaagattagactctgtaagaataccattttcattctaaccttttctgtaaaattcttgggatttttttttctttttattagagacagggtctcgctatattgcccaggctagttttgaactcctgggctcaggcaatcctcctgcctcagcc

SEQ ID NO: 130108 - DNA, 1063 bp, Homo sapiens
acctttcccaggaaatatattatgaccatctaagttagttacttctactgtgttattttcttaccttgtgaatacatctatttgtcacagttttagtattataattctttaaaattgtgtttcttccattacagtgagagcttctaggggtagggggattatgtttagcttagtgaaaagtgtttcattttatgaatgttaagtggttatggttggatgagaacttgacaagggaacctttaggaagagcatcccagactaagagaatggcatgtgcagcagcagaggaaagggaggacatctgagcacttgttcagcatggcaggctagagtggagggggaataacaggaggtaagattagagcattgggttggatctaaattacagaaggccttattctccatgtaaaggactttttgttgtcttgttcctcttggcgctagcgtgctagtgaaggactttaagcagaggagtagcatcatcagatttctgttttgtaataggactttgctggcagcctgaagggtgcattagaatatgggcaacatgagctagagggagaccatttaagaactcttgcaatagcccaaatgacaggtgttggagcaccaaagtaacaaaagtaggaagtaaatgatctgtaaacagagaggtaacatttgaattggatctttaagcctgagggagactcccctgtgaatggagcaggtaaaagacatgcagaggaaatagactctaaaaatagatttagggaatgggatatgatatatgggagcagaggaaggagaagggagtgagagagaatctggagctgtattgagaaaggttttgtgtggtctaattaatttggacaaatgagccaagattacttgaagattaagtagaatgtatattcggagtaccttagggatattgtgggttcagttccataccacagcagtgaagtaaatattgcaatatagtgagtcacaccatttttttgatttctcagtgcattaaagttatgtttatactgtaccatagtctattaacctataacccccttatgtctaaaaaacaatg

SEQ ID NO: 130109 - DNA, 1050 bp, Homo sapiens
cagctgtgttgagaacaaaacacatcaatgtgaattgcagtactgataactagaagggcaagtttaagtcacttacccaagatattttagtcctgaggattcagagatggaactcaaaaggagttgaactccataagagcctgggtcctaatacctgctctatagctctgggatgtttaaaaagtgatcacacatatgaattctaaacaatattttaaacagaagttttctcctaatcacaggtgttctttaaagaaattttcttatacattttggaaacttctaccagctcatttgatcacaaatggatggttattcagacactgacgaggatttgtgcaggtattttaaattatcctttttattatctctttcttattattagatatttaaaaggccaaatgtactcatatcctagatgtactttgttgaaattaatgttatattgttacagatgctcagagtgtagtggatatttatgtaaactatgactgtgacttaaatgcagccaatatatttgaaagactagtaaatgatctatcaaaaattgctcaaggaaggggcagtcaagaacttggtatgagtaatgttcaggtaagaactataaaaacattttcaaatttaaactttaccaggaaagagtcatgtgttttccttaaaagacctttaaaaaaaattttgtttttgaattactttgtaggaattgagcctgaggaaaaaaggtttagaatgcttagtgtcgattttgaagtgtatggttgaatggagtaaggatcagtatgtgaatcccaactcccagacaactcttggtaaggtgatattttgagctgtaattctttgtcattttaagtgaataatactttggaggatagttgcagctgctgttaaaccaatttcatgacatatttattcatttaactgatgaggaaacattctctgtgagttaaatgtctagctttaaaattgtgagatttttaacttagttatccaaactatttttttctaaatcttcttagaaatattttgattatgtaaaatgaagcatattta

SEQ ID NO: 130110 - DNA, 1103 bp, Homo sapiens
ggggcttatggtacaataaattttggaaacacaacatactgtatatccttggagagttttgtacatattagcaacttaaaggctacaataaagaaacctatttcccagcatttcctgaactaatttgacaatgagatattttttcgaggaatttgtcttcacatctcaagtcattagcattcatcaaaacccagttcagtaaatgctaatatagactaaaagtaagcttctgttttggcacatcctggttagcctttcatcagctaagtgtgtttcattgccagagcaacttaaggattgtatttggaagtatgccagatgcatacttatttagtagtaagtatgctaacctttaaatggtgccaatacatattttacttcacattgctttcctgccactgtttcattttaaatactctgtgctttttaaatacacttcggttaagtcagatatatttgcatggtttttattcttatcattttagatatgggagaagggactactataaatgcaagtgcagatggcaacattggaactatagaggatggtagtgacagtgaaaatattcaagcaaatggaattccaggaacaccaatttctgttgcatatacaccatccttacctgatgatagattgtcagtctcttccaatgatactcaggtataaatggaggggtggggagggggagaaatcctgttaatcttacaaatttataggctaccaccaccttgtcatgagtattttcagctgatgatgctgcctgatttttatttagtttggggaaataagaaacttggggttttttttccttcatttatataaattacagcgattttttccccttcatattttgatagttacatttccaactttaaggtaggtctcatctatgtttacatcttctccacacccatctaccaattgaattaacatttaataagaacattcttattacatattcacaagataattctggtatgggctgaatatttctaatctgaaattcaaaatgctccaaatccaaaactttttgagtgccaagatgacgctcagaggtcatacacaaaggaaatgctcattggagaattccacattttggatt

SEQ ID NO: 130111 - DNA, 1009 bp, Homo sapiens
acaggcatgagccactgcacccagcctacttacattcagtatatttgataagggatagtgtaatgtgtgtactaagtataagtaagcatctgtaggacatgttagaaatgtttcatttaaaatagtttttgaagttttggtacttaaaggactaatctagaaaattcagttaagtgtaataatgtaatagcttgtcaaaggaatcattgaaattgacttgaatttggaaaatatttaagttttggtatacattttgaaggtttagcatataattgcttctaatttcatgttatctatttgattttttttcttttattcctcatgatttaggagttttttcatcataaatgtttagtaaaaagcttccaaaaagttaaaataatgttctgttgaatttttcttcttttaaagcattatctaaaaatgaagtgttatatgacggagaaaaccatgattgtgaggaaaagccacaagacattgtacagaacattgtagaagaaatggtgaacattgttgttggaggtagtatacttcattcaaaattattttactctgtctatgggatttcatctgactgtggagactttgtaatgtctggaatagaaagggcaaaattaaaacgtttggagccaaccaatggaaagttacaaattccacatttaggattttggccttgattctagaacaaatgggttaatatggaagattttagcactgagaaatgaaatgaccagaactatgctttaagaagctaagtctggaaataagaattcccagtaggataccagcacagtattcaaagcctggataggacagaaaccgtctaaatggagacaaaaatatggataagtgatataatgtatattgaatcaagaagactttgtaactgattaagtaggtaaggaaaagagaataaagtgtgtcggaggccttcaagattaccccaaggtttggtgatttcactggaagccgtcacaggacccagcatatagttgtactcactgcatga

SEQ ID NO: 130112 - DNA, 1028 bp, Homo sapiens
gagaaaataaggggaaatgggatacagacgacttaacttccacatttgctaaaatcttctaagccagatgttgaattctttgatattagctactggtaaccttaattttccccttcccccacaaaataaaactccttacaaagcaaatcttgtcagactttattattaaaatcctttaattcaagcttattttataaattcgtgtaattctggcatttccacctaacctggaatattactggagaatatgaaatgttcatatttactactgtataagatttatcttggtggaaattaattctgtgagactcattcttatcaggtcttgaggaccaaaagagatgtgtgaaagcaataaagtgctaaaaaatgaaatcttgtgatcccagttaatgtttctaacattttgtgagccagttttacagatagtattatatacataataatgacagtttttctaaaataaaattcagacatttgtagatatagtttttttcataattattagatggctaggcagagtgatttaagccttcattgtaattctattaaatgtaattttaatttttttattaaaagatatttgacaaggtgacataagaacatgctccagaaggataaacactgaaaagttgcctcccactcttgttttccattttatttcctaatctctaccctctataggtaattgttagtactagcttcttatgtatttttatagactttctgtatgtataagcaaaagtgaatgtgtgtgcgtgtgtttcatccacacaaacaccaaatacagtgaaaatgctatatagtgaaagtctttcatctctgttcttatgtgccaatttccagccacctaagaagtaaacattgttcattgtttttagtatagtttatgttctccatttctgataaactttaatttccaagcgtagagagaatggcaccttatagaaaggattgttggaggtaacattatccttccaaattttaaacaacttattttactaatattggaaattttatttatttcc

SEQ ID NO: 130113 - DNA, 1036 bp, Homo sapiens
gatgatttaggtcagtcaacacagcatttcctccttatccatacatttattttattttatttatttttgacacagagtctcattctgtcacccaggctggagcgcagtggcgcaatctcagctcactgcagcttccgcttcctgggttcaagcgattcctgtgcctcagcctcccaagtagctgggactacaggcatgcaccgccatgcccggctaatatttgtatttcatggggtttcaccatgttggccaggctggtctcaaattcctgacctcaagtgatcgatgtgcctcggcttcccaaggtgctgggattataggtgtgagccactgcgcccagcccacacatatattttcaagtgataaagattatttttgattgtatctgttggtgagccgtgcaattttagtaactgatatacagatcttaaatatcattgtgaacctttattaaagtggtattttaaatagctgcagataatatttttatactatctgccttctagttctaccagtaataaaatggaaaggggtttggttcacagaaaactaaactgaaatactgaacatcagatgcctggcacacagtaggcaatgagtaaatttgtatgtattgtatgaataagttgtatggattgtgcgaatgaattgtagaaattgtatagcaaggtgatttgtcaaagtcgctttttaaagggtttaatacagtatctggtacgtgaaagatgctcagttagtgatagtgttaaaaatgtataggccagtagttgtttatcataccccaatttagcacagtttgttcagtttctcagatacacctatatggtagaacggttaataaaccagaatctgtagttagattacctaatattgaaacctgattagccatacgtccaagccatgcagcctttggacaagttgttcaacctctcttcctcaattttccagtctttaaaatgaagatataatagtacacacctcataggattgttgtcaaacataaatacattagttgcatgtaaagtgtaatagtcta

SEQ ID NO: 130114 - DNA, 1038 bp, Homo sapiens
ctgatgctaatgagcaaaaagtatttttttctccaaatcacctgggcttcatagtttgtttcttctaaccagttaaattgtttaaaaacttatgaatctaagtagaggttacactttgtataaactcaaaacagatggctttaggaacagtgtcactttctgcccctgatgttatatgtaataatcataagtagggaaggtatgcgaaggaaaaggaaagaaaatagcaaagaagaacaagatggtattttttctttctcttttagttctccagaatatggtagcatttattaaatgtctgcatactatgtaactcacactgtgctggatgctaggaatgcaaagaagaatgaaaaatgtccctgttctatgtaacagatcactaaagcttattcttctggtctagctgaaattttgtatcctttgatcgctatctctcttttccccatttatgtacctcctctaacttctggtaaccctcattctactctacttctatgagtttgacttttttagattccacatacaagtaaaatcatgtgtctttctgtgcctgacttttttcacttagcgtagtatcttccattttttcacttagtgtaatatcttgcctatgttgtcgcaaatgacaggatttccttctttttaaggcagaatggtattccattgtgtatattttattagattgtctttatccattcatctgatgatggacacctaggttgcctccatatcttcgctactgtgactgtaataaataataatgcattatatatttcagaattactaaaggtagattttaaatatttttacaattaaaaaagtatgtgagttggatttgttaattagcttggtcattccatatagtaaaaacataccaaaacacctcattgtaccccataaatatataatatatacaattaatatgtgtccattaaaataataaaattaaaaaataaaaaaatttccttgcattcaagtagctcagaatcaaaggtaagcaaataatctcagtgctttataaataagtgccttata

SEQ ID NO: 130115 - DNA, 1019 bp, Homo sapiens
ttctttgatatctaaagtaaaaggtgttttcagtaagccaggctacctgaatttttgagatgggtagaagaaaagagtataattaatgacataaccgaaagattgatcctatttgtatttgttcttttctttcacatttcagatttgtttttaggacacttgctctagaatagtgttgactgaaataaatgttgcagagtacaagttcttagagaagctctttgaagaaaataagtttgggttgaaaaaataagtttggattatagtgtgtaatctgtttccatttgggaaatttataatgcacatgaacatagttaagattctgaaaagtcctccaagaaagacacctgctcaattttgtttaatgaagttcttcctgaatttatgtgatcctttttcattgtttgctaactcagttaactcccctaggatatgttgttccttggaacttactttgggacactggggaaagaaagacaagtacaataaccctaactactggtgagaccatcttctagaagaggtttggggaaatcagtgcacaaacctgtgtttctctaaacacaggtttggggaaagtagtagatgtgttaatagtgtgggaaggagaagaaagtccgaaataaggagcagtagaaatatcgagatcagaggactgtttgctgactagctttctttcccaccccatctaggggcaggtaactcatttgtgtctcttggtaaggtttaacttagagagaaaattgtgaatgggaaataatttggggaaatatttgtcataatattcctcacataatggaggaaggaagatatttgaaaaggaaaaatacatgagtaagttattgttgccattccgaactaggtatatatttcaatcagatatttgttgaactcctcatatgttccagatactacttcattgctgggtatacagcagtgaaccaaacatgctttcatagaacacacattctagtggggtgagggtgatagtaacaaccttatatcatcagaagaaagag

SEQ ID NO: 130116 - DNA, 1053 bp, Homo sapiens
tggccgacaaggaagtgaagaaggcgcatcactcccagctgcgcaaagcttgcgaggtggcgttaggtgagcggggaggaggcccgggggatggggtgcttgttgtggggcggggaggggggcgcctgtgggggggtggggtcgcccggggcttgcccgaggcccgcgcctctgacctcgggaagccctcgcggagccctctgttccctgtctggagttgacaggaactcggctggatgtggggcagaggcggggtagaggaggaagggcagtgagctgggctcgggaaacgcggcagggcttaggatcgcggggcacctgggttcgagggatcgacttgagagtgagaggattttgttggtggtccgtgaggtgcggactggataccaccctttgtgatgaagcagaagatgagctgttgtttattagcttggaaattgaggtggggctggtatgtcaagattgggtgtgggaaaggttccgtatcataattaacaataactttttcgtttggcgaggtactttggggagataggctgctgaagttgtttccttgttgacagtcttgagaaggggtttgcaagaggtgcagcccgttctgacatctctccgcctccgccacaggaaaaacatagagtaatattgtatctgactgggctgacctggaagaacaagaccggtggttaaggggtgagggtgggggtggcggcatgaaagcagggaagcaaagaacctttagataaaatggctttaggtgacaagggaagggagggtttgaaatgaggaaaatgaaaaagacaatgacacccaccagccacatgtctggacagtggcagctgctctcaagcttgaattgtgatttatagttcagatggaagagatctagtgtaatgaagcccgcagcagggaaaatccaaacaatacctcctacctatgaggttaggcagatgaggagttgttaaagggggaacattgttagatctattgcatccatcaaagttgaaatcgtttgagagaccagaacatttaacacaaagatacattcctaatgtt

SEQ ID NO: 130117 - DNA, 1001 bp, Homo sapiens
tttctacatgaaacaggatctaataacccttcaggggtttcatcagaccctgacaaaataactttccaccccactacacaaccaaagatgttttaggtttaatttttctcctgctccttctaataactctagtactatttttgcttgacctcctgaacaacccagataactacactttagccaaccccctcaacaccccaccccacattaaaccagactggtactttttgtttgcttatgcaatcttacgatccttccctaataaactaggagacatactggcccttatgttctccattctcattctggcagttattcctgtacttcacatgtccaaacaacaaagcataatattttgaccattgagtaaagtcctattctgaatcttagtggctgacctatttacactcacatgagttgggggacagccagtccaatacccttttatcaccatcgaacagacagcatctcttgtgtatttctctatcatccttacccttatgccactctctggcctaattgaaaataaactgcttaaatgaagatgctcttgtagtataattcaatactctggtcttgtaaaccagaaatggaggatccttccccaggacaactcagggaaaaaatatcctgcttcaccgttaacacccaaagctgaaattctaattaaacaattccctgaattctttctcagcatatactttgactaccatgtcagtattaatcaactagcactattgtaatagtgcctttatgtactttgtacattacggctagtccccatgaatgagtaatatatagtatataaatgcttaacagtacatagtacattcatgtttaacaatacattaaaaatccagtccacatgcatataagcatgtactaataatcccttaatcaactgtcgcacatccactgtcattaaccgtacattaccccacatggatattgaccagtactgtaaatcttacattacttaatattacttaatattacatagt

SEQ ID NO: 130118 - DNA, 1049 bp, Homo sapiens
tacaggcacaagccaccatgcccagctaagttttgtatttttagtaaagaaggggtttcaccatattgaccatgttggtctcgaactcctgacctcaagtgatccacctgccttggcctcccaaagtgctgggattacaggcatgagccaccgtgcccgaccagtatttctattttaacaaatctaagactgactctacatatcacagatctaattgtttatcatatgtatttgaaaatactggggagaacaattgatagattataaataaaacacaacattgtttctggaatagcaaaatctctcggggttacctaatttctttcaggaacataagagcccttatgaatcaggagaccacttggacaaggttggtcaagaaaaatgatatatattcaacgttgactttcacaggacataggatattgcttagcataatttattatttaataacttgtacaaataagatctatatcacacaaccataagtgaattcagtttcaggtcaggaatataagaaacatgagccataaaagttaattctcctaccagtaatatttagcctctttttcatcatcaaatccttgaataatgttctctacaggagatccatgaagtgggaaggtggcatcaatggatattaagagagtagttatttgagggtgttgtaatcaggattccaggtaactttaataaaacagtagaaggttcagaaacacagaaaataaggttctctcaaggacagatgcaaagtgatgcttgcaaacatttagactacaagcctcacagaagggaagaatcaaaggacgttgtgcaatgtgagtctaggatgaacagataccatagagtgacacatgtacaagctggcatacccattgggatgggaggactctgggctttcagagcttcttcaaatggtctttgtatggcagactataagtaactcaacaaaattctgtcttctcctccacatgggtgctgtatttcacaaccttccctacaattagttaagtgtggccatacaactgatcatgaccagtggaactgag

SEQ ID NO: 130119 - DNA, 1065 bp, Homo sapiens
tgggcatctggacaacggacgctcgccagcagtctcctgagctatctggccttcagtctcaaactgaaagttacatcattggcttctctggttctgaggccttggaacttggactgagcaatactgagggctttcctggttttccaacttgcaggaagactatcatgggacttcttagcctccataatcatgtgagccaattcccctaatgaatctcctctcatctatctatatctatgtatatctgtctgtctatccatctatctatctatctatctatctatctatctatctatctatctatctatctgtctatctatctatctatccatccatctatctatctatcctattggtctgcctctctggagaacccttactaatacaccatgtaatgctttttgctacagaaaaagagtcatgaaatccaaagttatatttcatttatgtatttattgttttatttattttagaatgaagcaaacctttacttttacacactttgacaaataagttttcattaaacagtctttccagtggagaatagagaacatgaaatttagcctccagacatcagcagtggctctgctcagggcctaggatcccccttacccaagcagtgaggtggaagggtgtacttcccttccattattagcttatcccgcaacttcttgatggctctcacaagtcccattgttttctgctgaagcatgcactctatgaaatcatcagattctgtcttgcactctttctcttcccagatactacctattccatgttcacattctatcaatttttttcccaaaaacgtggcactgagcaggaatcttgcagggttttggattttcacccatggatctatgttaaggcctggccttttttgcacatcaaagaaagggatggtgttccaccgcagtgcccttaattcttctctggttgccacttcaggatgactccaaagttacattttagaatcttctgtttctttgtttaaaaaaaatgagtattttatactttagtttttttccccagaaattccaaacttttaacatagtaaacctttat

SEQ ID NO: 130120 - DNA, 1072 bp, Homo sapiens
tcagtgactgcaacaaattaacataccactttcttgcaacaactctattcactcttcagtttatttaaatgccattagttttagactgaagttgatctgtggaaaatatatgtgtataataccaattcaaaaaaatatataaattgttttgtttgttaaatgtattggaaatatttaaggcttagtttccaagtgagaaaaggcaataaactttaactttaaaatcaagaatgttctgtgtgtctatcttcaaaaatctaagattatttccgttatctatctagctttctatcttctgatgagcattcaacaacagctttatcttttcaattagtgacaccgtcttaaatcacagcagctcttagaaacaaaactggcacaaataccctcgcctctcaatggatttacatactatcttgatgttgaaaaaagttgtagacatggaaaacagcacagtacaagggtgatgcttattttatctggggtttattgcatgggcagaggctgtcattttcccatagtgtcttcatttattatgctaattgactttccaagctcagactggagggtgtctgccctgtgaactattctcagttggagggttttaaaagcaaacctgttttgtgcctgaatgaaacaaaaaatcaatgtgtttcttttcaaagagggagggtcaataccgtggttgtttttgttcccatccagttatgtaaccgtggggacttgtttctttgctttcaggatttgtacgaaacacattaaagttaaacaatagcggaggcttaggagtaaccctcgagctgcgccttggagtgtgtgtccctgggattgggaacctcctgtgagttccatatcaagtgctgctgtgtgtgtgtgtgtgtgtgtgtgtgcgtgtgtgtgtgtgtgtgcgcgcgcgcgcgtgtgtgtgattagccagtacgcagtacttccccagggttgtgtttcctttttcctgagatttggcgaagggtaaagggtcggagtcacatggatacaaagcttttgattaatgtccaagtcactgctgtggctgccgaagccgcttcccctc

SEQ ID NO: 130121 - DNA, 1102 bp, Homo sapiens
tgagataacactcaaaagttgaatttttcctattcattgctgaaaagacaaagaatttgagccttggcttctttccacccagattcctgggagagcatcattcaaagaaccaggagctttagtttttgtgatctcatccaaatccttctccttccaacaaccaattccatgcccccttggtctgaaggaaaatatttcaggtgccaaacttcctgcttagtgttctgaaatctgtcaactttctgcttataatcatgacagataaaattcacttcttggctgtggcaagaaggaaagaaaaatgtctcaagtgatgtaaaatgtacaggctgcgttatggttgacttctcaaaatcaatatacttgacttccaggggccacattctctgcaaatatacaggtatttgagaatatcctggtaactggtggtttatagaattattatatacttccttgtaacaaagattgtcaaaaaagtatgtttttaagatttgatttttaatagctttaaatttggctttcatgaaacttttttggtaacaaagttctttgtcttttgaagaatctgagtcatttcttacataattactctttctgaagatctgtgaacaaagtactgtgcagaatgctaatttgcagagacagttaatctaattatattaaaaaccaatttgttgatctttatttaaaatatcagtttttcttctaatcttaaacctgatcattacaacagaaaacttactgttagtatatagagttaggtaagaaagtgtggaaagtataaaataaattttccccttttataaggagaacatcatttcatgatttctttttatctctttcagaatttatgggctcttccacttttcattttctttgtgcatcatttgtgcctgtttatgtttatatgcacaaatgcactaattagtctgaatgccatcctaaataaaagtttactctggcttacaaagcctaagatctatttataatagattattagattttctttttagggtgttatttatagcaacatttactccccatggagttttcttggttacctgaagttgatgtagtcactctggttttgatattagactat

SEQ ID NO: 130122 - DNA, 4046 bp, Homo sapiens
gcatcttcccccactgccatccccaagacagcccatgagcattgcctttcttctctaagctaaggtatgggtctatctgcatcttctctgtagttgcccccaggcacacaccgctgtttgaacaaagctctgtgtcttcagctggctactctttccatggtgggctgtgcttcctcaggcctctgcctttgttcttcctggggccttccttttgtacctggtggattcctactgggctttcaaggctcagttagccccttcttcccaggtgctccttgctttgtatccactctaccctgcatttccttcttccatagtacccaaagtagttgatgtgtgcatttgtttactttggtcctcattctgttagacctccttgaggacagggacataccaccttgtgtgcctgtgctttccataattgtgtgcagtgcttgtgacattgtaggtcctcaataaatgcttgctgagtgcatgcatgaatcaatgagttgacccatcttctatcctcccactccatttttaaggatagtgcctcaatcatcctgaacattttgatttcctgttttcttccatttggtcaaaatagatagtagaattttcagttttgctcaggcacatatgaatttatgcagtcaaaaatttcaaattaaacatgtggtacctgcctttaaaacagaaacatgatttaaatcaggtattgaggtattaaagactttgcatgcactattgtttcatatattttaaatttttgtttgagatcatggataggttacactatctagattaattatttttaggtcacagataaaatggtagagagtgacataatttgcttgaatttatgttcttgttttgcttgggaaatgaaattttgtgctttattaaaatattttcaaacatttcttctaaataaatgattacatgaacctgacatccagtatttaacatccaaagtctggacaatagtaagttacaacctgtttcctgtttgcaaacctgtgacagagcctgccgagatgacagactcatgtgagtggacagagaaaaggaagacccagggctggcttcatggatgcacatcctgtgcagtggcccagggttctgagctgagaaggatgcccagcttgttttaatgctctgctattgccatcttgaaattcttgccaattttatctttgaccttgtgttttgcaaatgaagtctgatgggacggtggacatgagcagagcagatacatgaaagaaaaaagctttatatttcagtacctttaatagcattcccccacagccccctgctttttgaacaagaaacctcacatttttattttgcactgggcctggaaaattgtgtaggccatttaactgtgggtcagtggcaatgaggcaggatgaccatataatttactgtctaaactgggacacttctgagggtgaaagggagtgctattaataatgacactgggaaacagatggaaactgggattgttcctggcaaaccagaatgcatggctagtccacattgtgggcatattaaaacaatgacttcaagctatgtgtcttgtcataaaccaaatattttcaagtttgttgcctgtccaggctttgatcttggataccttggtatttgagtcccatctctaatttgctttgtgattttaaacacattcctaacttttcatgcccctttttcttcattcgtagaagggagaacaatagcatttctcaggggtattgtaaggatgatgagatatatgcattgggcttggcccatctggctcataagagggtcctataagtagttactgttattttgctgatgctacagttgttataaagagccatgcctatgatcatcattagatagaatttttgtttctgttatattccttttctaccctttctgtatgtccccacttctcttcgtttcctccttctttgttttccttttgttagtgtagtcttcttaatgatattcttataaatgctcattagttgattttaagacagtgagaaaactttatattccaggtaacaaccacagttagtatggcgccttggagtttaaacaattgcatcctcactctattattcagcttaatatatgcatgtctcttagctctttcaaattgtgctccctggagctccagaggcccttgcaagggctgctggagagctagattttatggcttcaggattgtcaccctggcttctctgtgcatggctcaacctttctcagatttgagctttcgtaaaagcagttagaaaaaacatttgtctacatggcaaattcccagagaaaagggggtttgcatttacttcctatgtatgcttttcttggcctaaacacagggctttgtaaatagcaggtgctcaagaaaacagacaaacaggcaaacaaagcaaaagcaaacaaagcagaatttgaatgcatctgaaatcaaactctttaagtcatgacctgactcttccaggcaaagatgattgattcagcacattatgcttaaggtttatgttatggactgaattgtttccctcctcaggagtcatatgttgaagtcctaatccccaatacttaagaataggactgtatttgtagatagggcctttaaataggtgatagagttaaaatgaggtcatagggtagaccttaattcagtttgactaaagtccttcaaagaagaggagatttggacacacagagagatactgtggtgtacagaggaaaggccttgggaggacatggggaaaaggcagccctctgcaagctaaggagggaagcttcaggagaaaccaaacctactgacaccttgatcttagatttctaagctttcagagttgtgagaaaatcaatttctgcttaagccatcaatctgtggtattttattatggcagcctgtgcagacaaacgcagcttatattaggtgctgggtcatcacaatactctatgggagctgcgacactagagccataagcaaagtcacgtggaggcagtagagattctttcagttggggagtcaaggaaagttttggaaagaggtgatgatagagctggctcctaaaggaggaggaggaatgtgctatactgggagaattatccatccccaaagtgctgcatgtgttatgtgacctcagcgtggcagatcctcacatttaggggtctgaaacagtcttgtaattataccctattataataccaattactttaatataaaaatagtagctattgcgattagatttgtttcttagcaagagaattctgttgacaaggttgaggaacaaagattgaagtctagttacccattaagagtctgtcattgcattagtccaggtaagaaatgtggaaagtctgatctggggtagaagcattggaaaatataaaagaacagtaacagcagaaaacccaaaccaaaccacaaacaaatcaaacgcccaactatgagggcttttttgggtagaagctttaatattttgtatactctcagaagtggaggtttaagtagaatggagaacataggatggggctaagtctctagttttgaagactagatgggtagtgtcattgactgagaattggaatgcaggggacagaacagcactaggaggaaaaggaaaatgaatttgcttttggacatgttgagctgagccacaaatactactatgatttttgaagataagaatgtggaacttgagaaataatttgggccaaaagtgagagatctaaaaattaactaatcatgtattttgaaaccatcaattgagtgagatggcataaggagagcaattagaggaagaaaatacacaaacaaaaggtaggatgttggagagtcaatgtttaaaggatagaggaagagtagagtgtgcaggtgactttgagctatcaaaggctgaaacaaagaactaggagaagttgatactttgaaagccaaggaaggatctagttttcaaagaaaggtctctttaaagtggcaggacttgagggaagtggggtgtgtgaagactgaagaggtcgctggatctggcagttagaatgtcattggggtttta

SEQ ID NO: 130123 - DNA, 1053 bp, Homo sapiens
tcgaactcctgacctcaggtgatccacctgtctcggcctcccaaagtgctgggattacaggtgtgaactaccatgcctggccaattttatatattttatatatttacaaaatgtattttgaatattctagacacaactttatctcaagttttcttgtaccacttcataatgaaacctctggcagagacttctaagtgtccccagtacccaatgttcttttcttctatagtgataaaagttttaggtccagcttaagactacatttctcagcctcccatgcagataagtgtgggcctatgtaaaggttctgggtagtggggtgtgagcagaagtggcctgggtaacttctgcagtgtgcccttattgtgaagagtgtgcattctcttttctcctttccctcttctccctggctggtatgaggatgtgatggcaggtgatggggcagcaattttagaacatgaaatggaaggtacatgttcagggtgacagagcaacaaaatagaaggagactatatctttattatttcttattaagaccatgtcttaaagcaggctaacctatgtcctgtcaaaaatgggcctataagagaaatcaatatttatttaactctgtcctaaaatcatcacattttgataccaaggcctcattgacttatgcaaatcattaatgaattggccaactttagtatcttttttctgtctttgtctaatatttttagtttattttttgttttttctttaataaatctctagttcagccataatttccccagattacgctaaaactgcacttttttgttttcaataattatactttagtttttcctttagaaaaagaatagtattttttttttacctgtacttaacatattctttttttcctgaaggccagaattttgtgtttattcgtaaggatatttgttcagctgccttaactgagaccaaataacaatagtttgaacaatgcagaaggattgtttgtggctaggaaagccatatgtaatcaacatggccttttttgcattctctcttagaactctggttatttaattt

SEQ ID NO: 130124 - DNA, 1055 bp, Homo sapiens
agcattgaacaagtggggcaggggtgggaattggagatcttgaatgtgcagcaggctctaaaagccattttatgaccattgccttagataatcccagacgtgagttaaaagctaaggtatgaggtgctttcatacatttttcttatttaaggcctttccctgaaaggggatgggaaggatcaagagtaccttgcattctgagcaaactgttgcaaggacagaaaaccaaacaccacatgttctcactcataggtgggaattgaacaatgagaacacttggacacagggtggggaacatcacacacctgagcctgtcgtggggttgggggagggatagcattaggagatatacctaatgtaaatgacgagttaatggatgcagcacaccaacacggcacaggtatgcatatgtaacaaacctgcatgttgtgcacatgtaccctagaacttaaagtataaaaaaaaaaaaaagagtaccttgcaaaccctccccggctttcttcctgtggtattgtctctctgattgccctatagaaatgactcccttgaggcttgtggacagctggaagaggcccctatgtggcctgtaaagtgctattggaagcatctgccagcgactggggaggggaaaggtcacttgaggactgtggaaaatattccctttctccttagcatcctggaacgtcggctcttgactaaattgttaatagaatctgggagctcggattctggtgctgacatttttttcagggttagttctagaaatgatatttcttaagcagccttttgcggagcttcattctttggttcactgaattcgcagcacaaagaaaaggaaatagctttattaccatcatcattaccaacttcagaataggaatgggtgaataattatattgggcttttaaaaagtataaccaaagggaaggaatttagctgtctgtatttttttgataaggttatgtgctttcttcttcctgtttctctttaaggagacctttctgtggctcatacatcataaaagttaaaaggaagtgcaaacacaattaccacag

SEQ ID NO: 130125 - DNA, 1540 bp, Homo sapiens
gctacagactcatgttttcttgatcaagaggtaatcctctttcaacttcagagtaagaaatatgaaataaatcaggagaaaatcattttcctcttctgtgattgtgaaacaactgattatcatacaggagcctattccaagtgcatgtcaggaggcttgagggtcaggacagagactggggatgcagggctcacttcatccacctgctaacatagcagcagaaaggtgctatgtgcagctgttttgcaattattattcttatatttatttacccaatgcaaacagattccctttcatctgtcgttctagtaacaaagagtaaatgcctgaggcttttggctagattttacttttcacaggaactgttgaaaaggttgtcccatttcatggtgttgcttttgtggaacagtgattaaagtggtcccattgaagagtaggtgcaggggtgtagagtggtatagggggtgataaaggtagcttggggccagatggtgaataacagtagaggtagtttaggactaattagtagacagtgtgggagctaggggagatttttgagcaaggaagtcaaaacaatgggccttggttcagaaagcgtcgtctgggaggccggcttctagccagagtgcaggaatggctctgttgggcacaggtgagacctgagagagatcaattcattaagctcaacaaaagtcagaaagactaaatcggtgaggaatattgctgatgcttggacctcggtccagaccagcttaattagaatctcagggtgcggggagagagggtggaagtcaagaattgctatttttaaaaagctccccaggtgattctaatgtgggagtagggttcagaaatacaaggaaatgaatacatgacattaatatatatattaatcaaggattgagatacatgctttccaaactgcccctaaaaaataggtaatatcataatagaatgaatgatgagaagagatgcactgacaaaatccacttataaaactaagaagtaactcaacatcgaagaggaaactaaaaagaaatgaaattagctaggaggctgcatttattggagatatagttatccattaatactttgcaatagtaatgagaaatactgttagtggaaaagatatagttaaagttttgatttaacttaggtagaaagcagtcaacaaatcattttccatgtgtctgagcaaggcaataagacaacagtgattagtgggaagtactcctgacgtgggaaaggaagtatgctactttgggaaataaggatgttgtagaaattaatattttaaagtctttggagaattcccatggaggactgatgtattttccaaagttctttgttgtgatgagatatggagaattattttctaagtgccaatttgtgaacataagcatatgcatgccaagggagatttgaagtgcaagaaactgatttctgtaaagccacttgtttgatgtgatgtccttaatggttttgttttgttttcatattttcccttatgtctaaagatataattaaagttcactgccgt

SEQ ID NO: 130126 - DNA, 1550 bp, Homo sapiens
cagacttcatgaaatttttgctccagaattgagtgtttagttttcttcatttattgaccactctttgattctccattagctattgttattattgagtgcttccttagtagtgattagggttgtgagctcttcgtgagctctgggtccacatggctgggatcaaagctgtgtgatcctagaagttcttaatctctgtctccttccattttcacatctgtaagatggggatgatattggtcccagcatcatagggttgctgtgaagattgaggtgatacctgtaaagagtgtaggacagtgcctggcacatagtagtgcacatcaatctaatgccgtgcttggtactgctctgggaatttgtattctcatgcctctgatcctgctattctccctatgttgagtgttccccgcatttcctccccaacttgaatttctgtccattctttagaatcgttctaaggtgtcagcttcttagtaaagcttttccacatcaccctttccaccttcagaaagaactgatcactccatcttctcttctacttctgaaccttgaaaataaatatttgtgcagcacactttcatgcaagtattcatatacacatccgtgtcccctactggatcatgaactcattaagaacgaagagtatgatttattcaacattgatttcttagaagctagctcagtgcctggcacatagtattcaataaataattgttgaactgtgctttttgaattgaacaggaaagcactttatcacttaatgttttaggcatgaaatccagagtatgttatcgcagtgtcatggtgatgtgcatacatacatgcatgtgtatgtatgtgtctgtggtttgattagtacatgcctgattaaggaaaataattactgtgagttgttcatttatttaactacttctggtagtttataagaaaggaatttcttcaacttcctaggtagaaatgcaagccaggacttgtggcaattcagtgccaaagatctgttactgttagcctggaagactgcaggtctgccggttccagctgtgctttaataaacaggagctcaaacacttcatgatgggaagtacagctgaggactctcgaatgcacaagctgatcatgctgaatgcttttctgggtcatgttcatttcataaaaacagccaattcccagccttcccagaagaggaaatgctgaaggtcctagctgcgatgtggggtgaggaggaaaccaggacggagagggagagggggcctcaccacctcccctttccttggcaaggaagccagcccaggcacccagcccagtcgcacgggtccctgttaggactttgggctgtgcttaagtacacaagttttttttttttttcttgccttttgtagcgactacgttgttccagtgaccagagcaacatgacatagaagcagagaaaacataccaagttcttgccagttgctaggcagagaaaaacgcttttggatgtttgaagtatgcttcctatgttgatttcctaaccatgacttgttttgaaagccaaacacaatagcatcgtg

SEQ ID NO: 130127 - DNA, 3551 bp, Homo sapiens
ccctttaattctattatcagaccatgtggtttctagcagggaacacagatctaattgaagctttaaggaaactttatgaataggaagccacacatagttgtagaaagatctcaggccagctgtcacttgggagatggaagttcaaggttaatttcacttgactggcaaaagcgttttgagagaaaagttggttttcgtaatctttcttttggttggagacaggaaaaatgggggaaaaattaatatgcctttctactatctcttttgggataaccaggttatattgatgaaaatgattttatgtacaaggcacagtgtgtgtatataaattcttttaatctccaccgtaatcccagagagtaggcactcttatagatggggaactcaggtacagagaaattagagaaattcccagaatcacccagctcggaagtagcagagcttggatttgaactgaagaagtcttgtgatggagttcctgctcttggccagtacactacattgcctgggcatgccgggagcgtagggctgctccatccatgcaggcatcctgtctacaggcatcctgtctgcaggtggcttgactacaggtggcttgtctacgtgcaaatgacgtgcttgcttgctacatgtagacatcttagctggattggcctctgagtcctctgtaatactttcatggagatttatctcattgggtttaagtcatagatttacatgtgtatcacttctatcatatagtgaacttctaatggcaggggcttgattatgagttgctggcacccagcatggtgcctttctttcgagaaccttatggagttgaagaacacagtgccaacaacctggggcagagagtaacagtaaggccaagagcttcaagtgatctctaggactctttttggctcttgtcagtactaatagagataatgtcttgtgttgcaatttggaattcacgaaaaccaaacttaaagatgttttaaaaaagaacatcactggccagggatggtggctcacagctgtaatcctagcacttcgggagactgaggtgggtggatcatgaggtcaagagatggagaccatggtgaaaccctgtctgtactaaaaatacaaaaaattagccgggcacggtgtcaggtgcctgtagtcccagctacttgggaagctgaggcaggagaatggtgtgaacctgggaggcggagcttgcagtgagcagagatcacgccactgcactccagcctgggcgacagagtgagacttcatctcaaaaaaaaaaaaaaaaaaaaaaaaaagaacaccactaactaatttctgatgtatttctttgctcctttttcaagtcattgttttcatttttttggagctatataaggccagtcaactcttttttaaagttaagctagcaaggtatttggctatcaacgctaaataaatcaattcagaaccactattagcaccataaagcttaattctttttctttgtactgtctggtcacctttagaataattcttattcctcttcaatcggctggatttctgcacaggtccaggggttgtctttctgtggggagattgatgtgcactggggcaaaatttcagttaccaagtgtgtccagcatgaagttgcagctggcattgaaaggcatccaccattcctctccaggtacatttcagattcatctcctaccttgttcccccatgtccccatcacgtgcgctggactgatcatctgtcctcacacagatctggtagcttctgcctctggatctggcctcaagtggttccctttgctagaagcgccttttcccctgcaacctcgcctgcctgctgaagccgttctcggtctgtaatgctcacactccatcttctctaagcatctgtctaggataccctccagttccatttaatatcttccttctctgtgctctgtaaattcccatttctagactttcacttgctaagacaagccccacatcaggtatttgtggatgtgtctgtcttcctcaggaattgtggcagccagggagtgtgtgtgtgtgtgtgtgtgtgtgaacacacatgcaatacacgcagtgtctttgcagtccccataggtagaagagcaggtatgcaaagatagtttttcagtgtgaataacccgtttcatttttgttccctcgcaaaatgaatgcctcatccttgtaccatagaaaatatctgaacacctctaccttctagtcatagacttttggattgcctctcttcctattcttttagtttttaaaatatgccagagcccacagttaccttactatctgcctctcctaaattctggtcagcctcttccctcactctggcatggaaccaggcttagaacagtagaattgatagtggtaagaagttgagtgtgactgcacaccacggctgaagctctgctgaaacctttatgaactggactttgaaaccaatttctctaaccaaagtccctattgctccctgagtcaggtgagctctgccatgtgcctggcacaatgcatccatcactttacttagtcctcctcacagtcctcaccagagatgaatgaaagtgccattgttcacagggaagccaggcatccaccgaggtcctacaactgagagtcccatggctgagcccctgatggaagctcaggtctacctgactcttctctttcataatagaacactggctcctgaatgcctgaaatggacacaggagacttttcccatcttctctgtttcccaaggctggtgcccactgctcactttcaccttgcaggcccccaccctacctgtggagtcttgggcgtaagttaggggccttctccttgaccagctcagccttttgtgagaaagttgggaagctcccagaagcttgacaggtcacgcgtacatgacaagaaggtggtggggaaggtgacaaggtggagagagcctgtgccccaccccatggactgtgagactcagctccagccaactatcgccaagaggcagcatggccgtagtgatcctagaacacctgattttccagagtaagttggaattctatattttcatcagagttttctaaatgtttttaaaagcaaaccaagcacgtgtattggccagattcacaggccactgttttgtgacctctgcctggggacatgagtacctgctgtcactttgctcattgtgtctgtctgctctggagccatctgagtatgtgacccccagtttaggagaaggagagaaaaattaatgaggaatggatgtgaaaaaaaagataggaaaagaaagctaatatttaatagaaaaaagtgatgctaaaataagtagaaaaagttccaaatttatatttaaatacaaaagacattataatttagtgactagaaagaataatagatttccttataatagttttttcgaattaaatagttctttttttctacctaaattttgcttaagaatggttttaaatgtatttttaaaacttctaaatcttaactattctaagaatttaaaattttcagatctggttaaatgaaatattaggttactaaataataataccattt

SEQ ID NO: 130128 - DNA, 1017 bp, Homo sapiens
cggggtgccagcatccccaagtggttgggtgagagggtgttgtatagaaacaaccactgtttaacactgaattgaaagtcaaagtgaaataagtaaactcgattttcctgttaagactcatttatttctcaaagtctgctttttgttttagtctttgaaagaataaacataaagaattgttcatcagaagatgatctctggaccaactacatcagaatcgcatagaggtcctgctcaaaatgtagatttctgggtcctaaattaatctgctgagtcagacctctggggataggaatctgcatttggaagtaactctccaagtcttaaacacaagaaaaagtttgaaacccactagcataaaaaagctattttccactgcttgatttcaaatatatgtgtgtcaagatgaagattatctgattctgatgaaattttggacaagtgggaatgaatacagagataaaacaatgtgtagaatccttcatgtatttttgtgactaggctactaatgcttccttgattgatataagaaggattaaatatgacaacagagtctgaaaggacactatagatgctggttgttaaaggatgattttgaaattacctatttattcctagctttaggaaggaagatttaaacctctcataaaaaatgtcaaatcgttttcacgattttgcgttctcagcaaacatctaaaatctgccttcactgttgtataaaatgaggaccttgggaaaaagaaatgcttggtcagaaatgctaacaagttccagatttcctttcatatacaattaaacaaaaagttccatattgtcacggaggataagaagataaaaagtcagataaagacatggtttactttcttagtttgtatgttccattctaactcatattttgatgcattgttactacttcctcactttaatttatccatttcagaatgtgactgagttcagtttatgaagaaaaggtttataaatgtagaggtgaagtttaagctttgcttgcacgagagg

SEQ ID NO: 130129 - DNA, 1134 bp, Homo sapiens
tactttgtttatgacatagttttatagtttctcaaaaatattagaaaataggatttctaaattatttttgaaattatgacatacttaaagatttgttattctgttaaagaccctagaaaaatgaaattaacatataaagatgtgcttctgttagaacaaaagtcaaattattaaaaacataaaaatttatcctcccagtaagatatttgaccattcgaaaggaggaacctaacttaatttttaaaaacaaagtaagtttgaggaaaaattaaagtgactgcaaaaatgtgcatttgggttatacttactcattgattcaaacttttatttttgatcttagaggaatttgtgatgtcacttatggaagtggctctcatgatctttgcagttttcatttcctggtcagtctgaacctgctgtaccagaaagctgaagatcaaagggcgatttgtttttttgtgtataaacaggagttgctgaagcggactccacggaaacacagtgactatgcagcagtgatggaagccctccaagccatgaaagctgtctgttccaacataaacgaggccaagagacagatggagaagttagaagttttagaggaatggcagtctcacattgaaggctgggaggtacattcactttgcttgacaatcgagcttaagatagttttatgttgcaggcctcgtgcagaattactggcgttggatggaaccataaatggtcattttctcagatattacttgaggactgtagtcaattctgaaaagtgctcactttcatcattattttaaagtatctttaaggtggtggttaattgagttaaccttgacccaataagtttgtgatggagccaatagatactatgtgggctataagctttaatattttagcatttatgcatcatgatgatcctgttcctctctcaactttggccataagtacatagcctgaatcctgggagagtgaagaagggaaggaaagttcagtaggtgtgctgtgatattactttcagactctaaattaggtgttcacttaacctctttgttttgatttcttcatttataaactgaaggaactggctatgatcttatttttaaggtttattcaagatgaaaatgttatggcttcctg

SEQ ID NO: 130130 - DNA, 1051 bp, Homo sapiens
ttaacctacacgagttcttataaataacaggtgacaacatttagctgaaaacatttagctgaaaacaggcagcttgattctaaagcttatattccttactacgtgctattatatccactcagatacaaatttggcaaattctttggattaagtttgttttcctgcttgtgttttaaaagtaagttgattatcgaaattaggtttttgtcagcatttatgtggtaactgccaccacagaaaatctatagtgtatgttttatttgttcatttttgaagttatgccttttattagtataatttattatatctcggtcatataagttatgcaacattcagaacattctacaagatagtctactgaaggtaattgtggagcactgattaatatgccttggaagagaagtttattagctgtttaatcagagtcactgattcatttcatagaacaggatcatgctctgtctgtgtgttggctgattgattatgttgtaatgataactgtagcctttggagctatactgaagtattttgaaaagggagtatcaataaacattacgttgtcattaattcagctttaagtccttgatacgcttgtttggaattgatctctcaaatatggaaaacactattacgataaaagataagagaaggaattattaatatatgaaggtgttgggataaatgagattcaagataagcattgtgttttagaaagtaaagagacacagaaagaaattggacatttctttactacctttttacatggaaaaatacagtgctacgggaccatttaaaaattacttcttgttggttttggaatctgtttgctgcttccatttgattgagtttgtgcctgacagtgtattgacttcaagtcatgtttcttgttatttcatggatgtgagtcttccagagcttagtgctgggacttgtttctttttgtcctctgtacgaggtgatttggcagatacaaattcatcttctaccttgagatagaattgatttatatatagtcatatagtctttgttatttgaggataagtggttctgg

SEQ ID NO: 130131 - DNA, 1005 bp, Homo sapiens
gaaagataaaataaataagacatcttgaatgtttgagaagaaaacaccttgcatgttattcttttattgctttagaaactttgacaatatttttgtgcatagagcatgtaagtgttaattagtttgtagtgtttagtttcatgtaatgtattaacactctgagctagaaatgtccattattgagcactgacagcatccaatatgaaagcattcttaaagtttttaaatgtttatgtttttcaatatacatatgtaaagcaaagagatgttgaacaattcagtggttttggaacttttgtgtattgaatgatagtgtggatataataatattgtgtattacattttgttcatttgcctttacccattaatttacagctgatttccatagcagtggacacattgttgttaatggatggaagatacataacacagcaaaaaataaatggtttgtttgtatggcaaaaacacctgaagagaagcatgaatggtttgaagctattttgaaagaaagagaacggcggaaaggtgggtgtatgaattgggcgctgttacactttgtgaagactctaacttagcataggagcagataatgggaaaacatgagaaaatggaaaggtatatgatggtcacttgatttattaggttggtgcaaaagttattgcagttttgacattgaaagcaattacttctccaccaacctaatactatgtgacgtgagcctcatactaaaagacttatttgatacttacaaaattgttatgtaatacttatatagttagcaaaataattatgttatggctggtagtgtcttttaaataatttttttaaatagaaaatttgttcaattttctttgcattttattcttgctatttctaaagcagcattgccaaatttttctttaagtgacaagcttcaataacataatgcagtgttgtaaagcctccaattgttctcagtatacttaacagaacactaaaatttcttagacccaatatgttagcttc

SEQ ID NO: 130132 - DNA, 1365 bp, Homo sapiens
ggaggatcagggttgaaagagaagatgcaggctttgctgtggaccgtgtaggccagccagtggggagtggccagcaagcggttgagagtttggggtgaagctcaggatagaaataaggtgagaaacacatttggaatcatttcaagggagtactagactcctgggaacactgacaatgaacagacagacaaaaaccaagaaagcagtgttaatgggactcaggacaaaggtttaaagaatttctatggtaaattgtgggggaggagaaaaagccagggaattattaataaatatggatgtttggctatggtattttgatgttcatttcctttcttagatactgtgcaaacaaaccagatatttcccatcttttcttatcacactgggtgttgcctacgtgatggtaccaccatccacccagctaggaatcatctttaattcctttctctccctcatgccgtcaagccctgtgagctctaccaccaaattaagtccctaaacaatgaattctgtccctttcagcatccttaccttttttctagtcgccgtcatctcctcctttgcttccacttttgttctccactcctgtagtacactctccgggtcacagctaaagagaccttttaaaacggggatatgatcaaagcatccttctgtttataaccatctaattgcttacaatcaaacttaaagaaaagttcagacctattacatgccctaaacttcttaccatgacctacaacatccgatgagataaggcccctgacttcctctcagagcctgacacctcgcattgtacctaacttgttgcactgtggccaccctgaccatctgtctctttcttcaacgctccaagatgacttcctatttaggaccttagcttttgctcttctcattcaacagttatttattaatccctaatacatgccaggagcctttctaagtggtagagacagagctgtgaatgaaaagacaaaaatctttgtattcattactcatgtcttccatgaccctttgacttttagaagcccatcctgtcctgtgattccaatgtcctattttttttttttactttgaaatctttcttcatgtatttatcactctgaaattattatgttgttttacttgtgtctttgtttattacctctttatctccctatcccttccctggcctccaataaaaatataagcaccatccaaacaagagcctcacttgttattatatagcaaatgcctggcattcccatcccatacaggtgctcaataaatatttgctgaatgaatgaataattatattttgagtgaacagatgatacttataaattgtatatgattttgcgcttgtttcattagcatcattaaaac

SEQ ID NO: 130133 - DNA, 1035 bp, Homo sapiens
cgagaatcaaatcacaatgcactagtttgagtatctgctctttgaggggcactttttgctcagctttgtagcattgtgaagaaacagaaaacacaaaatcatatatttatataaatgtacacattgtgtatacctttatacatactatatactcatgtacatatataaatacatatattatgctagctgaatgttgcaaacgtcagtttatttctcaaatcgttatatggaaactgtaatatttttaaataaaatattatcatgaatcttgctgttaaaatactcaattggtattgctgtgttagaaaagcaaatgccttttgtaaaactaaaagttttagtatttgggaataagtatttaataaatttatttgctgtttatctgcccccttttagagtatcgttattttaatatagtatttctatgttcttagttactgataaacatcaattcaaaccagaacagatgttatatagatttcgctatgatgatggaacattttatccaagaaatgagatgcaggacgtgatttcaaaggtaacgacctctcccacaacctctccaatagtagaatgcatgttgtcattcttcagaagataaaaggtagttgagaaacataaaagatttttctagtttagaaaattcttcgactatatatacaagcaagcctctttatttatttttggtatttcaagaattctaacgttcaattgttttctcattctcttacctaattctaaatggtagtagtactgctgcatcactcaccaggttatatccatggaaaacccttttacatgtagcaacatgttgtcaaaatacttgaattaaaaaaaatacaaatgtgtaaaataaatgtaatgtcagattttgtacagttgacaatactttgttgatatatgatgaacaagtattatagatgtattactgtattggtatattttgtttaatttacgttagaaattttatattttaagaaacataatttagaaaaatctttgtatgtgtgtatgtcatatatgaggaatttatag

SEQ ID NO: 130134 - DNA, 1930 bp, Homo sapiens
agggcagagctgtgagaataatactgtagtgcaaatccagccttcctggagcattcaggagcaggaataaaaggcatttctttactctacagattttgagatttttagtataatctattgtgatttaaagagaagaaattctattttattattttattaatacgatgtacagtaagttctcacttaatgtcatcaataggttcctggaacctgcaactttaaatgaaatgacatataatgaaaccaattttgccataggctaattgacataaataagagttaagttccaacagcatccagtatttcatttcacttaaagtcgcagtttccaagaacctatccacaatgttaagtgtggacttactatatttccagctaatatagcagtaataatctatttggatataagacaatgtgaaagaagagatgtcctgttttggtaacattgtgagtctcttcccttggtataagctggtggaggatttttcaggtgttttacatgcataataaacttctcttatttgcatgtaatttgggcaactaactcaggttacagtggtaaacttctctgttgcatattgatactaaatgaaaatattttcttgtgcttacctaccctcttgcttaatttttgttttttgtttgtttgtttttattttttcctttatagagataaagattaccatttaaggacctacaaatctgtggtcatggccaacaaactgatagactggttaattgcacaggtaaatagacaaatagaagttgctgagtttcacttgctgctgctttaaactctgagtgtgtgaattaggacctttattctttttcatctgtagcaggcatttaaaaaaagaagtacatacaactaataggaagcagagttaggatttgaacctagatgatcaattttagagtcctcaaacttcacttttgtgttatcctgtttctcaaaaggaagatgttcctatttttaaaatatcagatgatccatcaaaaaacactaatttgagaatctgaagaatagctatgctcatttactaaaatatttttatgttttttacactttgttttaaagtatctgtttattaatgctagcaagttattctaatctccctgtgcctttttcccttttagaaaataattgtgttttgataatgagctttaatgtctgcctgtgtccattttaaaaaagaaaggaatttattgttgttattgttgacctgcttctcaagatttagatgctgactgctagaattgagaaaatgtcattcgcttataagtaaaaaaaattagggcatcctttccatcataagagacattcaaccataaattattccaatattcaaaagtttaagtattggtattcaaatatttaaatgttttatcatactagatcaactagtaaatgataaaatgtgtttcactgattaaagaaaagatgaagaaaactgatacccactgtaactgaacttactattttgggggaggggatattgcttggttgaaatgcaagtcactatgtttagctatgtgagtcaatttcatacacacctttactttttcttaagggtggcttgctttctttgtttcaagtagataatagttgatagtttgtcataaaatgtttattttttgtttcagttgttaatacttaatccacatttggttcatctgtacacacatattttgataatttatattagttaatattatttttaggctgttcaagaacacctatttttatatttcatagcacttacatttattacatttagaagtttttagatgaaactaaacaattacctttagataaaacatcaatttatattttcagtggcttttctagcatcagagcctttcataacactgtgggcaatgtgtgtcattcgagctgatttctatgttcattattggagttggactttca

SEQ ID NO: 130135 - DNA, 1047 bp, Homo sapiens
gaggtttttgtttgtttgtttgttttttgtttttcatgtaagggtctctttcttccaagactctgaaatgataatattgaatgtccagtatggactgagacactgaattgatttggacggttttagaacacagagtaaaaaaactggctctactatgattggagtatattctagagcctatagtttttctcttattctgcaatatattgtgcgatgtcatcttggaagacaaaatgagtgttgtgttcttctgagtacatttttcattcactgttgttgtgctgcttctattatagtataatggtttgtaataaaataccctgtttcacaaagttaaattcttatttggcatgtgcagtaatatacctttaaaacatcattcaattcctgtacgttgtgatttgggtatggatcactcatagttcataattaaataatgccttgcttcttcacatccatgcggtcttactgtgctttttctaaatgctcaccaggtgcatatggcacaaggaggattttaaaagagcataggaaacccagaacatgttaggctatgttttttacaccattatgttcaataatattagtctggccagtgtttcatttgaataatcaatcaaataaagcaatcaaatgtcagtgattattaaacaagcttttcttgtaagcttaatgttcaagcaagtgctttgatgatagaatacacaaacaaagcaggaagcaatcatgatttctgccttgaagtgatgttggtcaattgggctaattttcatgtaccctctaaagctctgctgcagcgtcatcacccccaggaagcctcgccagatcctctagcctaggctcagggtcaccttctgtggtcccagatccccaggtatatctgcctcattgggaatatggattaaattggttattggtaaagtacttaccttttaatgaccaaatcctaccctagatttgcattacctcagagcagggaattattttgtgcttgagtggtttaatatattttttctatcacttggcacaatatgtagaaaaaataag

SEQ ID NO: 130136 - DNA, 1054 bp, Homo sapiens
taccccagatctactgagtcagaattctcattttaactagatttgatttgtatgcatattaaaattcgagaagccctgctctagaagattcttttttacttttactgtattctaacattgacagtaaggaaaggagcaaactagtagtgtgaaaatgagagagaaacagagagagagggagagagagatcttttgataaggacggttatcatttctgtttcctcaatggagtaaaccagcaaatggctctgttcagtggcttctttgccaagggcgacagaggcaattacatttatgtctgcaattgacaaataccttaaattattgtttcaaaacgttttcacagaagcccatgaatcacctcttatattttcttggtgtctttccactcatattattggtggatgtctctggatatctttgttacactattaggttcctcccaaccagcacagctggagaataattccctattctgaggtgttttcattcaaaacccttctgacatcctgtatgtgtggggttttcccccataccaaccaattccccaaatctcctaacaccaactgggtgtcctacaattcaatttagttgtaaagccaggtgttagcacagacacacaggttaggggatcagccccacaaggttgcccccatttcaggcgcctgtcacatgtcccaggctttcacctgtatttctgaccaactggctatatattcagcgggttcccacatcccttccttgggttcagttatttgctagaacagctcagggaacccagaaacttacaatcactggtttattataaaggataagaagtgaaaagcctgatgaagagataaatagggcgatgtctggaagagtgctgagcaccgagctgtgtagtgggaagctctgtgaggggttggggtgtgccaccctccagacacgtgggtgtgttcactcactcagaagctctccaattcctgtcatttagggatttttatggaggttccattccttagacgtgattcattaaatcatcagccattggtgactaaacttgaactctagc

SEQ ID NO: 130137 - DNA, 1008 bp, Homo sapiens
aacatacttgttaaatgagtaaatgcaaaattatgtatctctaggacgaatttttttttctgttctgattgaattgacagcctgctaagcaataacccaaatacctgtgccagtatttttaaccaagagaaggtggaggcagttaatgagcacttttccaaataaatcagttctaattcttatgtaagaatatgatggttggagaattgcctgagcttggtaggatggtttgtcatatcatggtataggacgatgcttcacatctagtccagacagctctgtatagtcagaacagcatggggtttgaggtagctcagtttctcatctacagaagtgactgagtaataataatgaattacaagtttgtggtcatgaaaattatacaaattaatatagaaagtaatcagcacactgcctaatatagtgcttgctcatccattcaagggatggaaattattgaatatatcccaaattggcagattctgaaaataatagaaatactgttatcttctttttattgtactctcttcgtgaagttgttgatttaaatggctacggatgtgaactcttttaacttcacacacacacctatcatcctgtacttcatggataattcagttttgacacaaaatatttagaacttattccaagcctttgttgtaattagacattatacggatgaagtcataattgacacgatctctcattttacacatttttgaaatttagagatcaaaatcacattagatgcatcatattttaaaaattatcctcaatatttagtatttactttgctaattttctgaagttttatgagtgatttagaattaagattttgtttttctatttctaatatgctagttttgtatattatactgtgacttttcccatttacagatgaattaaaccgttcaagattgctaagagaaaaggagagtatttttttaagcaattgcatgacatctttgaattgtgttggaatccttgtgacagcagtttatattttag

SEQ ID NO: 130138 - DNA, 1068 bp, Homo sapiens
gaagctgaagcccagagggctgatatcatttacctatgagaccaggtggtctggcttcccagtttgtctcttaaccactctactattccaatttctatgtttccaaaaaggatcttaatgaacacataagaattattctagagatttaataatagatcagacagattaaccacttttatcacttcatttacttttcacttctaagcatcccaacctgctctttaataggaatctgtagagtttttcccagtgggaaattacatgtctaaaaatactttcttacctcaagttctagttatcagataattaaaattaccctgacagtttccctctaggctaagatagaaattttaaatgtaaatttaaagttaaggacgtcctttttacttattctgagaggaaagaaaatactttatctcctgcactatttctgaaatttgtccctgttcacacacaaacatattgaacctttctttccttgggcattcatcattatcaagcacttccctgtgctaaaagctctgaggtggagacagacaagtttcctgtcctccctaaggaagctcagagtgtaaccaataagttatgatttaagccaccagaaagggacagaaatcacagaacagtattttgtctctattagcaagttatctaattactggcatgtatcatgaaacagattataaagaattttaagtttggcatgactcctagttttatagctaactgcccttaaaaaatcatttaggattagattatatgatacaagaaaatttgaaatataattgaatcaaaaatatgccatctttggccgggcgtggtggctcacgcctgtaatcccagcactttgggaggccgaggtgggcggatcacaaggtcaggagatggagaccatcctggctaacatggtgaaaccctgtctctactaaaaatacaaaaaattagcctggtgtggtggcgggcgcctgtagtcccagctactcgggaggctgaggcaggagaatggcgtgaaccctgcaggcggagcttgcagtgagccgagatcgcaccactgcactccagtctggg

SEQ ID NO: 130139 - DNA, 1033 bp, Homo sapiens
cccaaagtgctgggattacaggcatgagccaccacgcccggccccctctgctttcttttaagctactcggaaacccttgtcttccagctctcgggctatgactcatagaaacccagtatggtcataggaagatttcaccagggctgtccttttaacaagagtcaaatgatcaatcatattgaaagtatcaataaatattgggaggttatttctataaattatactaaaaacttgcctgagtaactactggcttttgaattgcagttgttagcctgtcattcaaagtttcctaaaaagagagtatcaatatttaataatttagataagagaacttgttgctgaaacaaatagtctgtttgtcctttttttctccacataaaagtatttatgtgtttcatttaaaagctgcttctgtcctacaggaaaataataacttaagtgtttgggtttttcacattctcactgacttgtagcaattttctcaagactttcgcttgtcaccaaagccttgctcagggtgaataaggtgggaaagtcaataggtcagctgcaggcttttccgtatttattttgcagtctctgcctatgtagaaccgtaccagcaacgtggggattgatcactatttaacagactgcattagtcctcagatgtacaattcttcctccatggaaggtaatgaaagggatcagggaaaatataactgcaaaaccttagagaattagtttcttcaatcaggtgcttcattctagctgtcaatagacttttcacagtcgtgctctgtaaaagtaattagaagccagaataaatgtgatcattacaggaatgaacacactttacacagaacggtgcattttatgcagaaaaacgcaaatctttagtcaagaaggaacacattctcccttcaatttatttttactacttgatcactttacaatcaatatacttacttagcatgcttcaaacctagtttctttttaatcatgaactcattttagtatgatgaagtctacattcacagtgaagtaatttgga

SEQ ID NO: 130140 - DNA, 1034 bp, Homo sapiens
ataaagaaaaaaatattagagatttaaaaattaaccaccatgcctcctctcccattcattaaaatggttttattatgcttgttttcatctttcccaagtggacacatgtaataatggagagttcctcttgaagaaggccattattgaagaaacctggcgacatcttgcaaatcatcatgagaaatgttaaggacaatatagactgtgtgctatacattttcagtcccccatttgcaagagagaaagtcattaatgtgtaaaaggtggaaaagcatgctttactctttctcctaagggcttatttcttattagaggagaagaaagctgactaaggcctccagcaggactcactttcttctagctgcctttgggcatcctttattcttgtggacagctctagcaaatcaatgctatttttggtgtctgcaatgggcatggcttccttgggccatgaatactgggtgctgtgccataatggccctggggatcagggaagtgccctggggatcagggaggggaaccaggatgaagaaggggactgtaagcctattttaaaactaaacctttaagttagatacctaaaactcttaattttatgaaggctctcatatgagaggtcagactcttcaaagaatacaccatcatgagaatttttctgttaagatatatgtataagatatgaaaataaggctttatttgtactttaaaaggaccattaggggacttgtaatttatggatgcacaaggtgtattctatccttattctaaagtatatgtaatgtttatcatttctacattgatgcaataacattgtttttagcatagtaaatacagtaatatttattttaaatccataattttcaaacaaaacactcatgattgtgataattatatgggtttacactaatttagtatgtgaaatgcttttcatatctaaattatgtgcaaactattattaattttttttttattttttgaaactgagtctcactctgttacccagactggagtgcggtggtgcaatcttggctcac

SEQ ID NO: 130141 - DNA, 1030 bp, Homo sapiens
attaatttaaattttgggatcattacattcagaatgaaatgaaattgaccttgatactaactttgagagccaaaaaaatgaatgggtaaacaaagcctaagggtcatgttaattaatttaacaaaacacactattttcagtcctttgggcttgtacattttatagacaaaattagcatttattgatttggaagtgttcaattgagagtaaatgactctgtgttttgaaactaatacctttgcatttaaaatactgaagtattattttgttagttgaagtagatcttttcctgtgtagcatgatttaatgcagagcagttattcacttatacttctgaaaagccataatattgaaatttaaaatgaatagtcttactttaaggtcacttttactttacattttactttaaaggtcgtttttagactttatgcactagtggtattgaaactaacctttaatatttgactaaattgcttgtgaatttttggaaactatgtttaatttttaaagacattgttatgtgaattatcttactaaattatcacttaagaactctctcatagcagtaatttcattaacacatatatatactaaccaatttgctaaatgaattgtcggttgtcctgcttaagtactagggccaagctttgaaatgacttaaagtgatctgaattttgattgagaaaaataatctgtcttctatcgaatgtttgaacttttagtgatgagcctcagcaaagtttcaccctgcatgaagcagaacaggtgggggaaaattacaagaggggtctgtaccaaaaatggccccaggatattccattgaacaaatattgaccattatcttcctaggtgctacaactccatactagtcattacagttagtctttggtttcacaaaaatgttactgcttcaaaggcttggcattaacagtgatgtcagcattcatactgccaacagtctgctggtcatacatggaagactgttaaagtgtggtctgtgcatcattgagcaattgttatgtagacacaa

SEQ ID NO: 130142 - DNA, 1074 bp, Homo sapiens
ttaaaattgcatttctactagaaatagctttggagagttaattttaggtgcgaataacaggataaatgctatctgatcaagcattcatccgaaaaatgtttttgagaattcactttgtgcaaggcacagctgttggggctggtatatgtgtggacatgtttgatttgaaaaccttcgtggtgtctctgtgtgttattgatcatctgtgtcttttgcttaaaatggcattatttgtaacacaaacctaatatcatatatacaaatatactgtatgtagccaagaacactaaattggtaagacgctttagaaaatatgcatttgaatttgaatatctaatgcctcaagcaaatttattagagtttcagatgaatatatatttttgtaactggcaagtaaatgagtagaacagagctttttgcctaaaaatatttttataagtactcatttacatagtattcattattttaaatgacaaaatatcaaattggttctataaatagtaattgttttgaatatatccatacttaacatcatatgaaatccaaaatttaatgataaatttcatctggatgtgttattataaaagtcatctttttttcctttgtaaaatatccatgtaacatagcttccattactccatattttatgtatggttaaaattatcaaagtgcattatgtattttatattgtttatttttgtctgcatgaaagattggaatagtaaccgtgtatgataaatgttaataataataaagtgaaatgtagtatgaccaattcagcttctttccatttaaacttaattcctattatgttcttacctatttggaggacaaaaaccgttaaacacagattttcacccttcaagcattcacaagctcgatagaagaaacttgacacacgtatgaaacaaattctacaaatatgagctggagggacagtaactgctaggaaggaatgagagagaagcttaatatgggccacagcataggaaaacttcacgagagaaaagagacttacactgtcccctgaattaactagccaacctatcaaggtttatttagtacttattatgt

SEQ ID NO: 130143 - DNA, 1033 bp, Homo sapiens
agcctcctgagtagctgggattacaggcatgcaccaccacacccagctaatttttgtatttttagtagagaggtgatttcaccatgttggtcaggctggtctcgaactcctgacctcatgatcagcctgcctcagcctcccaaagtgctgggattacaggcaccacttatttctataagctaccctacctcacagtctttatggtcaccaatgctacagtaatggtcaaatgtaacagccacttggttctccaaaatactggcttctgtaagaacttcatcacaatcaaacacaggctataatatttttaatgaagaagcctctgcatgtcacataattgttagtattataatttccactggcaaagagtttcacattgtgattcaaggccaaacatggccaagctaatcatgaagttccatctctgaggttcttgatcctaaatactttatcaatcaggagtcagttagaaaacggaaaccacatttggtagttcaaaagacataattcattacagagaattgatggcataggagttggaagactgaaaaagcaaacagggaaaaactgggataacatgaggttattaataacttcaggaagcagctacccctaaagcccagggaaacacaggaaagaaactgaggttgtcagaacttaaatctcagagacccagtccctcctgctgagaagaaagcttagcctagatgttgctggtccctctgaggacttgtaatgagaatggttctccaatgccaaagaagctagagatggttctctggtgggccaaggggttatattaataggaatagcaagcaatcaagagggagtaagtccctcctctcctcttcctgttttcccatttttgcaactctccctaggagcataacttactattattatactttaagttctgggatacatgtgcagaatgtgcaggtttgttacataggtatacacgtgctgtggtggtttgctgcacccatcaacccgtcatctacattaagtatttctcctaatgctgtccctcccc

SEQ ID NO: 130144 - DNA, 1042 bp, Homo sapiens
cagtctcgctatttttcccaggatggtcttgcgctactggcctcaagtaattcttccacctcgacctcccaaagtgctaggattgcaggcacgagccaccacacctggcctataattctttcttactatgattgtactttagaattttttttaatgtgaagcttatattaaaatatgtttgtatcccgtatggtgtgttttggatacatctacagctaaggtaagatgggagcttttaacccttcatattcagcttctcctctcattaaatccagtttaaagttttccccaatgctgactagggcacagtaggtgcaaattaattttattatttgcatttgacaggattcattgtagttcaaacttaccagacacagatattgtttgaggtttcagctgttcaccaaacacaaatgaaaatatttgaacttcattgtaattattcaacgcaagctttgaaattaggagagtgaacccttgtggataccatatagctcctaaaacattaacgtatttctcccagtgctacagagtctctaagtaaaatatactaaccaaccagaaagtagttattattatcatttcctttcaaaaaataaaaaaatgtaaacagtttaaataattggcccaaggttgcatccaagtactaaaattattattttgtcttaggggaaaatgcttggaatatgcaattaaaaattattcaaataccagtttctctttttattagaagtgtaacattagggagttctataactctctgaactttgatttactcaatgataaagtaaggtaaatattctctaccttaatgtgttgttgtgaagattaaatagggatttatgttttgacatagcaactactgcaaaataagatggcaataaatggtagtttttacttctttcttcatgtaggaaaagatgtgatagaatcaacattaataatattctctgagatgttttcctaattctttagcagagatggatctgtgattacttatccacatcctcttattggactagctcaattttatgccctatat

SEQ ID NO: 130145 - DNA, 1104 bp, Homo sapiens
cagcacagtggtgtgtcaagacgggctgcccaatccaattgctggggctgggtgtctcttacggattggaggctgagggcagggctgaaactggaggtctgagaactcccagtcaagtaacctgagattttcagagagaaaggactgctataaaaagaggagaagtgggaggtgctacagagaaggtggagggaatgaattattctgatgaccagttgtgcgttacttttcacaactcctcgtgctccccctgagatgatggggaccctcagtgggatgcacagaaaccctaaacatttttactgcccgtctatggaagggccatctcagcaagacgttttcccttccataggagataaaaggttcatcttgacttgctgataaagggttaatgtaggagtagttggcactgaaatgtgacatctacattttgaaatctaaactcctacctttctttgattagatcgtggctgcctccaacattcttggcaaggagggggtgggggcgcagctaagagcagaaacttctctattcccacacacagctcttcactgtttgccacaggctgaacttcagaaatagtcaatgaaaatcattttcgtttctactcatgtaaaatagcacgcgctcccatagataaaggtggcttttttaatcacttgctgctttcacagacatctctttgtaaaagcactttggtaccagagggctgcactctgtcattgattatttttattggcttctagttaattgcacttataatgtccatatagctcaaacagctcattaacaattttgctttgaaatgttttcaatttttggtcatttcaataccttcttcttaggggcattttttttttttttttggttttctgaactgtttaatgaaagtaagtactttgacagcagtctgaaccagaaaatggctatacttgttacagtactttaagaagatatctggaaatcaattaattgccacaaatctcacaatttcaaaaattccatcagatatctaaggaattttgataaactgaaagagaaaataggaattttaaacactaccaacttcctgacagtgtctgtgggaagccaacattttaagt

SEQ ID NO: 130146 - DNA, 1113 bp, Homo sapiens
cctctctgaccgctacctcttccagcaatgcttttcttcccttcatgttgaccactggttatctatggattgcacttaaaacaattgctttattttttattctgctctatagtttgcttctttattccttgacttctcaggtggagtgacagggactggcctggtccactttaatgacccacagaagaccctaataagtgtgcttactaaactcaccaggacattcgaacactcaagacactttcctctctagagttaccccaatttagagccattcactggctccggtagcttcctccccacccaggacaggaaacgaaaaaaaaaaaaatgaaactcagtgggttttatttgggggaaacttaaggaaaatgcccctaaggcagaaagtgaaataattgccccagattaagcttgagtattatatgaaaaatccctatgaagttcagctttaactgtagtagaaattacatgtattggctgctgctctatcataaaatcccaaatatggctttggagcaggagagtacaggctctgggttcaaacagacctgtgttctaatccagggaccacctctctagctgtgtggccttggacagcgaactgacccattctgagattcagctccttcctctgtaaaatacagataggagtacttatcttgggaacattttaaagaaaacacataaatcacctagctcagtgcatatccaatattgtatgttcaataaatggaagtgagagagggttgattggtgcatatgtagatccagacctaggatgcaggaatgacaaacgttcagctatgtcagtcattaatcctatgtatctatgatgtgccttcctttagcattttcttctgccaccaaaggcaggggaataaggaaaggagggagagagcaagggagagaaagtgagagagagagagagagagaaggagggaggtgctcttggcatttagggatttggagcaactgagctaatggctctgtagggacagtagtgacagttaaatacacgttgagggagaaatgaagcatgaagccctgggtcctgcaccaaggataataaagagcaggccctgggccactgtgctatgctgttggggaaca

SEQ ID NO: 130147 - DNA, 1822 bp, Homo sapiens
ggctcaagtgatcctcctgcctcagtctcatgagtagctaggattgccagcatgcaccaccatacccagctattttttatttttaattttttagagactgggtctcactatggtacccaggctggtctcaaactcttagcctcaagtggtcctcccagttcagcctcccaaagtgctggtattacaggtgtgagcaaccacaccggccctaagccacttttaattaaaaaaaaaaatgtagctcttcgctttaccttcaaaggttaaatttttcttttgctgttttatttttgtttttgtttactacacaggtacaaacctgtaggaaactatgtctacgttttctaaaatatgaatctaagggacttggacatgctactgtttaactgctgtcggtgagattaatactaaatctctgtgcggaataaatgaacagacagattgtgtttctcaatcaaaagttttaattgtaaaaggtagactctctcaaaataaatctataaattttgggtcgtactaatcaaattctaaaataaagttagaaggcttgtgatgggagtggagtttgggaactggcaagagtccacatggctcttgttgaatataaactaaaaaacattctaaagctggatggacaatcaattcatgagcaagcctagacattttcataaaacagtatccttgtaagatggggatttgtcttattacatatccaatcacattataccataacaattgaattgtctgttcttaagcaatggactctgatgtagatttcatctactgtcatgtagttttcctcttgctcttctttgttttgctctattcttttgttggcattgaccaaatcttcagctgagcaacaaactgctgtaaccagatgctagttctgttgctagaattaatggaaactctgaactaatttttttattttgtcctatgatctttccaatcagtaaatagtgttactaatacatgcaactttttccacttcatagtacgcaaataatttctgagacaggtttgtttcaagaactcaggaaaatctccttgtattcctttgatgacagaggctcaaagattattcagtctaagtgtcttcccattttcctgaacaacactggcacatttagcccattcttaaaaaccaaaatggaaatctgaaatacaaagagttctgtttattgtccagtttttttggtatgatgttacaggcataatctgctatattaatttaaagtaaaactaaaggttacacaattaaaagatattagctataccagaattatggtgggaaaagactaattgcattccaatgtacatttattgatcagttactttagaagtgtgcacctctagatattatcttcaaactcctatcacaaatatgcctttgcttcccaatcacctttctgtcatataacatgtgttctgaatagacttcttgccaatttaaagtttcacccttaaccttcacctgccaataatcaatcttctcctgaatagaatgtccctgtaaacagatgtgctttaccgtgcatccagaaattcttgaaaccagcttttaactttcatcttataaaaagtgcatcccacaaaagacaggccccctacaaatcatgttctctttttttcttctgagaactttatgctggtaaaagaaaagaaagttttccgaatataacagataaataaaagcataggacatgtaatattttttacttgggatgcctagaggctttacatgtgttatcacattctttttcatatgtgatattgagatttagtaaaggagatttatgatatggacccaatatcaaac

SEQ ID NO: 130148 - DNA, 1019 bp, Homo sapiens
ctttggggaagttacggatattcgagtcaaaatactcaactacatctgcataacacctatataattctcttcttttgactaagagactgttagtggagcggaacatgaaatttaaaaagtctagaggcaagaagagatgaaatatttaagttgcctatgctcacaaaccttcatattctaccttggaggaggctgattgacatcctttcacagaatgtaccaatgacttattcacaaatgaaatacacgttcccttcttcactacaaagacaaatcatccttaattttatgatttgggaatggtttccccattcccctgcttttctttctatccccttttgttttgtccttttttgttttatttgtttcaaccatttcctattcaaaataagagggccattctctagtcaagtcttcctactaaatcaatgggcagttttcagaactaggtatagatttcttagaagtagaagattgtgtttgccttttcaaactcgtgcattatatgttggaggcagcatgactgaaagaatacagagcttgagtcagcaaaatctggaactgaaatgtagccctgttactgaaaatttgtgggaatagcattgaccatggagacttgacagcattttcgttcctcaaaagagacttgggtcccattcaagtttttaatgaagactttggcctgttctatgttacccaactgggttttctgaaccatattccctagttcccctggaagaaacgccagcctaagtatcagcacctgtaatctatttctcactcagggttgccagacatgagggattaattgacatgagccagtttatatttggaagccattaatggctagcaactgaattgttgagacatccagtgcaacgaaccagagaggaaagaataacacacaagtgccatagttagatcaataaacatcatcttcggcaagcacaaacgttgggtttagctgccaaacttaaaactaggtctcttcatctagtacccacttaggtcaatgggcc

SEQ ID NO: 130149 - DNA, 1022 bp, Homo sapiens
gtactccttatggaaaatctgttctaattgagatcaccaagcaccgttgctatggatgatctgtgcaaacatgcagctttatcatagagaaacttctttgtaaaagcattttttaacatacacttaaagaacacactatccactgttgatgatgacaatattaaccattacgacttcaaaacaattttcacttgcactaaaccactggaacttgtaatatttgagtaaggaaagcagtgtgtcatttctgtacaccagaaaactgaagctgagggacagcatgccatttgcctgagtctaaacacctgagtgaggtaattagtgttagaactcatgtcttctggatcccacttcactgcctaatacttcaaatgatttcaaatataccatatttggtcaatattagggatacctattgcattagaacagttgaactgtccccttagtaatgtcaccttactgggaaataaacatttgaatacttcctcaagtactggaactttcccaagagaagtatatgagcaatattcttcatagcttaataaattacatgattgtatatacaattatgcatctatataatttgcatttgaagctgatttatttgtaaaagaagtagcagtattcattattagattataaatgtatttcctagtcataacttccatttgttattttgtactataaggaataacaatttaataactcaaaataaaaagattaatttagaatatcctaagtatgattctgactttttaaaaaagttttgtttttcactgcatgttctcactcataggtgggaattgaacaatgagaacacatggacacaggaaggggaacatcacactctggggactgttgtgggatgggggaggggggagggatagcattaggagatatacctaatgctaaatgatgagttaatgggtgcagcacaccagcatggcacatgtatacatatgtaacaaacctgcacattgtgcacatgtaccctaaaacttaaagtataataataataaaat

SEQ ID NO: 130150 - DNA, 1710 bp, Homo sapiens
tactttaaaaagaaagaagacaaactttccttcctgtccctgtccttttcgtattatttattcattattcatcatattattattcattatattctcagatgatggaaagtatgtttctggccaaagtcttccacccaaatttggtcccttgtaatgataataagaggggaaagaggtttctgttgataattaattcacttaacaaaatagtacccaggcgaggtactgaaattggccactttcacagcattctggtgatgtctggctgttgatacacaccacacacacacacacacaacactacacacacacacacacacacacacacacacacacacacacactcctttttgcccttaagaggagccctagtcacctggcttgttagacaaggagaaatgatgccactttggtcttcagtttctctgccttgggtactcacaatttcaatcagttgtaattgttgaaagtttcttttcacactacgaaataaatcccatctttcagtgcaggcttgaaacttgcactggcttgggtaaactgtacaaaacactgtagctatagtggacatgtgaatttttattaaatttttcactgcataaccgaaggttctaatattaaagaaacatggacactaactttttaagcacaggcaaaactcaaagccctgttatcaaactatgtgtcttaaagagtgctgaattaacagagtactcttctcagagattatgctcactgctttgagaaactgcttttcaacaagaggtgaatttaaaactctagaataacatgaagaaagacacaacttctgaatacttagcaactctgacttgctatttgaacaagccaaaaaacaaagggtctattttgggcaattgtacaatttgcatttataaaaccgtgattataacttggtatgctatgagatacagagatttattgttttaataagatttcaggtaagaaaactaagaactataaattggtaataatgtagaaaagcaaggcctctcacttttaatgctgtaagtgctgtgattcatttgtaaggctttatcatctttacctctagatgaatagatgtgaaaaccatgtatagtatgtatgtatatgttagtgtgtatatgtgtctttatcttaaattcttacatttgttgtatctatctagtgctcagtatgttatatgatagtacaacatccaaaatggatcaagtggagaaatttatttcacatcaactttcagattgcaatgtttattcagtatttattaacacacatgggaaatattataaaattatgtctttttttagattctctttaaatgatattttcccttagaattctctgtggctcccatgaaattctaaggtataattaaagtcaaaaataagattggattctagttgcttttacccctaaatttaaaagtgatatttcaacactaaattctatactttacctaatttgattacaaagatgaaccacataatctcagcattagcctcaaaggcaaactcaatcataatagaaggaacacaagctttgatgagatctggatttcaggcttagtttggtcaaactgaattaactgagccttgtgacacacacctgtagtcttagctactccggtgactgaggcaagaggatcgcttgagcctagaaggtggagactagagtgagttgcgtttgtgccactgcacctcagcctgg

SEQ ID NO: 130151 - DNA, 2273 bp, Homo sapiens
tataagcaaatctcagaagctgcccaagcatttcctgtctttcagattgccagattgtcccttgttccaaggagagataggttgtattcacatatgagaagacaccaaaaggacaattaaatttcacagcttgggggagattttgagggttctcatcaaaaatgtttacacctatggaacagattgcttttgtgtatgtgtgtgaagcctggttttcagcttaaaatacacctgccaaaatatgaatggcctttattgtaccttctggacactaatattgcactgttggacaaggtttggtgcgcacagatgggataacttagaacagcaactatgttgtttttgagaaaattaagatttttcctagccttgttaatacctatttgggatggaaaattttattataaggatggcttagctgtgcctggcactttatttttaatattattttaattattaagttaaatttagtatattaatctaaatgtaggtggtttttaaaattgcccgtagactgtaacagtaaactaaaccttttcaaggaatcaatatcagatgtggaccctaaaacttatccttgtcttgctttaagtgcatattggataccaagacaatgataatttgtcttgctgcagaatatagagacctatatttgggggtgctaaaaagtagactcttttcctttgtgattccccttacatattttgaaacatttctcattgaagaggacaatttattacacagaatatcaactcatttaaaattaggtatttgttgtaaaaaccatataacagtcgcttaagagttttttttttttaaatcacacacttaacccaaatcagttggtcttttctttataagtatatactaagtagaatcatagaaaattgcttctatttaactattgttggcctacaaaagcagtgatttcatagggtattatctaatattttataaaattggaaacatggagaatgtacaatgtttattgttttgttttcacctacctttgtgtcaaaacggttcatacaatttctgcattgtctttttagttcttttaaatttgtgcattgtgttccattacatggatgtgggacatataagttgctcatgctttttctttataagagagataacactaaacatacacacacacacacacacacacacaatcaatacctcccttcacgtagccattctgtttagttgcattttaatgatggtttttaaattgtcttctcctgcaccatcctcttatccctttgagactaatcactttcacatgtgagacttcaatgcaaatctaagtgataagcaaatgttagtatgtacaagcacacagatttgcacccatgtatgtacatagctaaatggatctgcttagaccacagtcctcaaagccagtgagcttatgtttaaagaaaatgccaaactccaattggatgagaaacattgtgcccatcaggctgtgccatcttttgcaggctcctctctcctcccatctgactgagacctgtcccagcaggtggctctgtcagtatgcttcggctgccagtaaaattgtgctttgcctgataatggtgaggaagcaaactccagagatgttgaccaacccaaggaaaactctttgctcttgccataatgatacattcaggcaggaagttaagagaaaaatagctcttcccctggcaaggaaaggagtttaattacgatgagggtggggactgggggacattcacaagtggatattaaggaaaaagaatgggatgatgtcattctttactgaggcagtcactaaaatgaaatcagctcacacaacaatggtcttgttctatgctcaaaagcgcaagttggtatgagacattactttgcggtgatgctctcaggaagggcctaaggggccgtgctcacatgaaactatttccccaaacatcttgaagacaggtcaagaagtgcagaatcattccatccagtgctgaaatggcccacactggaccatcatttgtttcagatcaccatgccacagtttaggatagaaaaagtgtctggattcttacaacaccatgaattcaaagaggcagaatatagtggttcaatctggtatcaggccagatgttttaaattggttccttttttgcaggataattttaaatggcatactgaaattaacatggaatatattcctcagtggaaggtttcaggaagtcacttcccaagaagaaatactgccttgtatcgtgctagagaatttgtagggctgattaattccactt

SEQ ID NO: 130152 - DNA, 1002 bp, Homo sapiens
cccttctcttggggatcacagcctgttcaatgtctgagagttgcttcatatgtcatttgtccagttttctggctgtttatggcaggaggaccagtctggtaccagttatactatcataactggaaaaataagtcccaccacattcatattcaaactttgtttctgtttcttttctccccgcaaggcagtgagacccttcaaggcagtgacagggactcattcatctctgcattctcagtatctaacatatgaagcatagcatatatcaggcataataaatattattgaataaaagaataattgaccattgttaaaccaatccataatacttatggtatctatatttaagtaatttacatgaatatctaagtgcttctgtaacatgtggggtttttttaagcaactgagaataatctattaaattactgaatatatgtaagctagagatcaatgctagagtcaggttagttctatgctaaccttacataacattccttgtagctgtaagatgccagtgtccagaagcaaatatcatatgtgttcaggtatctctaggacaataatgacacgttattctagaataaaaagtagcagggctgttttcagcattcagtctatgaagttgacaaatagagtatctaccttcagagatttctgcctctatgcaagcaaaagggttaaaaactttcagactatagtttcatttatgttagtcttctaaaggactacggtggcttttaatttaaatagcaagatgcattgagttggtcttttaaaagtctatgcagctatcttctaataattaaaaagtagactcacaaaataagaattacagtcagactgctgtaaactacagaaattgggaaggaaagaagtcttgcattttcacattaaaggtttctttctgaaatcttaatacaacatctgtacaagaggtttcgtataagaaatatctgcatctggaaggatgaagtcttaaaaatctatgacgcttaaaatctg

SEQ ID NO: 130153 - DNA, 1953 bp, Homo sapiens
agcataatgtcaacaagtatgtgagtatagacagggaaaagcactaaagtctaaccgccgaaatactccagcattcaaaagtcaaagagaagaggagagaagagctccagtaaagtaggatgaagacaaatgggtggaggagttttgggtgccttggaagccgaatgaagacagtgtttcaaggaggagaatgttatcaactgcatgtggcagtatgatgaggattgaaaactgatcattggatttatccattggaggtcatcggtgacatgtataaaagcaacaatggtgaagtagagagagagaaagcctgattatttaggcaaagataaaatggaagaagaaaaaaacaagaaatatgacaactctttcagggagtttgctgcaaatggagcagagagaaggacagtagctgataagagaagcacagtaaaatatgtgtttaaataatggaagacataaccacctgtttatatggtaacacgagtgatataattttgaggagaagcatgatcatctgggtaaaaaagaagagtattgctggagctgtggttctgaatagatgagaagaggtagaatctggcccatgggtagaagaatcagcttcagacagagagaatatgcagaacctatctactccgatagaagaacatacgtgtagtggagtagatgctggcgggtgaacaagttgaggagttggggagacctgtggaagttctcctccagttgcttctatttccccagtgaagtataaaccaaggttatgagtgaaggtcagggaagagtatgaggagggatgaggtggtgtgaaacagatatttgagagaatggaagagtcgtgggattagggcaataaagtatgtttgcgaggcagtattaggacctctttgaagttcatggcactgaacataacatgagaccatttaggggattctatgttcttctccaggcacatagagttgcacaggtgcagatacggagcagccagagagctggatttaactcaagtttggggaaaccaagcaaggatggtgaagtgagagagggggaaggaggttgagaatgtttacaaaggactgatgataatgactgtcggtggaattataattcactaccctcccctgataaggaggggaattaagacatcaggggccggtgaaggagtgggaggatcaaggattgaagagccctgccttgtcaaaggattgttggggttggcatactaagagcaatgatcagagagtgggatgcatggaaccaagatgatggagcgggcagttaccagtactcataagggctagggttgattagattggccagggagtggcttggggagaggaggggtgatccagaaaggaagaggcaattgtgttcatgagctcacatccaagagctttgaaatcttcaaaaattcagacaggaagaaatgacagcgaagcaggagctgaaatcatttagaaattaggaacaacgtcctagggtcagtcaataactagggaagtagtaggctatgtaatatgataagattagagataagaaagctaagagatttgaggtggacaatagagagcatggagggagggagaaagggacagagaagaaaagcaggccggcaggctttaagaaagattttggcatgacactgattcaacggtatgttcatccattcttgccttgctataaagaaatacctgaggctgggtaagttataaagtaaagaggttcaattggcttacatttcctcaagcagtacaggaaacatggtgctggcatatacttctggtgaggcttacagtcatggcggaaagcaaagagggagcaagcagttcacatggtgagagaggaagcaagagagtgagcggtgaggtgccgtgctcttttcaatgaccaggtcttgcatgaactcaaagcaagaactcactcattcccatgaggatggcaccaagtattcat

SEQ ID NO: 130154 - DNA, 1050 bp, Homo sapiens
aaacgaaagacgtctgcttctaacagtgacatttttaaagcaagcacagtaatctctgaacatgtatttgaaagtacagatttcttgttcaaatagggtaccacagaaacacagaaccctaaaatgctcacaggtagaaaagctcaggaagaatgtctttgttttcaaatatttgttagggacaggaagccattaaataagatatgtgggtattgttagtgtatgacatatgggtaaataatgatgtttgttttctagagtggttactacaaaacttaacttcttaattaaaaaaaggaataaagatggaaatggtttaagctcagaactgtgaaggcaccaatttgtagatcactgaaaatatttgatcttccattctttctcaacacttcatccaagctattgatgggaaggaactggagagggagtggaagaggaatatgaggaaggtgtgtccttacttaaacttgaggcttactgacctggaattatacattttctttacagcgctgtcattcatttaaaggtctggaggataggcatgtcccctaacaccttcttcccagagagctggtgacatacagttatattccattcttcttcccataccttcctcattgacataacttctggaggtcactactgtaagaccttgagagttctgcatatgctgaagaatattggggagggcttcacagtgtttaaatatgtggttatgatggaagcagaagacatttcttcacaacatatgcaacttactcatctgagaaaattccttaacccgagacagaactggcttcagtgaaaatattcacagaacatgaaggaaactgctttgcatcaagtgcaatgtgtgtccccagtgtggtcatgatggagtgttctgtggtgtagcagaaaggtacgagatatggcttccttctccactttgagaaacagtgatttgggcttagccatttcacctctccgaatctgttttgacccccgagaaatggggataccaacagtgctgccgagagttactggaggatccaaattagaacaagtatg

SEQ ID NO: 130155 - DNA, 1082 bp, Homo sapiens
tgcattggctattttccctaatgctctccccaacccccaccctcccctcacagaccttagtgtgtgctgtttccctccctgtatccatgtgttctcattgctcagctcccacttataagtgagaacatgcagtgttttgttttctgttcctgcattagtttgctgaggataatggtttccagcttcatccatgtccctgcaaaggacatgatcttgttcttttttatggctgcgtagtattccacaatgtatatgtaccacatttcctttatccagtctatcactgatgggcatttgggttgattccatgtctttagaagcccctgatttttttaatcatctgtgttcaatacctttacatcttttttttgacaaatagccacatcatttaggaatccttatagcccaattgattctctagactgtagcatcctagcatcactctgtgttggcagtgggccacaaatggatgacagatgtgtcaagatgtgaactacaggtgtaccaagatatctacctgctcagcctcaggatggctgggcagttctgggatggccagagccccttggactgtgagtggcctcatctgcttatcccagtgtgctgtatataatcaatgtcagtattttccatgacaggaaacactttgaggatcatagtctaaactaatcaagtttatcaaattatattcatttcatggtagttatgcataaatcaaattggctaaggtgtttcgatttacacattcatgtttctctttctaaactttgctagtttattaataactttagagtttagtaattactataaaatcagtttcacaagtctaagaatagtgtgttgtaatgtattaatttgagtttttggaatcctaatttgaggtataactgagacatttatacaaaacaaatgtttttttttgtttgtttttttgtttgtttttttttgagatggagtctcgttctgtcacccaggttggagtacagtgccacgatctcggctcactacaacctctacctcccgggttcaggcgattctcctacctcagcctcctgagtagctgggattacaggcatgcgcca

SEQ ID NO: 130156 - DNA, 1049 bp, Homo sapiens
ttttcctctttccccacctggagaaaccctacctgttcttcataacccagttcatgtcatgcgcttggtgttcccaaaacaaaaccaccctcccctccagcagcattgatggaactttcctttgcaccccgagaacacgactccagcatggtgctcattccaccatagccttccatgcctgtcccttccacttgaccaagatcaaccagagagcaagggtgtgttttatgttgcactcctcatgcactcctagtgcctgggaatatagtgggcactaaactaacttgaaatggacccataaggctctaaacaagctaaaattcccagaaataaatataagtattcatcatcatctacctcttcaatatacagcactgtctttaaaatatattaagaaattgctcataactttcttttttaacagaattcaaattttcagccttgtcctatagttcatttattcatccagtaaatattttctgagcagttaccaagtattgccttctgttggaggcatgtgactatcatggtgaagggttatagaccaggctcagccaacccagatatttcctacatatttgcctttaactccttccttgattttctagccagataacatgctaagaactagctcattggctgggtgtggtcattctcgcctataatcccagcacttcgggaggctgaggcaggcggatcacctgaggtcaggagttcaagaccagcctggccaacatagtgaaaccccgtctgtactaacagtacaaaaattagccaggcatggtggcaggcacctgtaatcccagctactctggaggctgaggcaggagaattgcttgacccgtgaggcagaggttgcagtgagccgagatcacaccattgcactccagcctgggctacagagcgagactccatttcaaaacaaaaaaagaactagcttgtttaactctcacagtaactctaggaagtagttactattctctctttaatttaggtatgagaaaaatgaggctcagagaagtcatgtagcttgtggtgagcaagtaaat

SEQ ID NO: 130157 - DNA, 1105 bp, Homo sapiens
ttctactttctgtctctgtggatttgactactctaggtatcttatatgggtgaaatcatacagcatttatctttttatgactggcttattttacttaccctcatgtcctcaaggctcatccatgttgtaacatgtgtcagagtgtccttcctttttaatgctgaataacttttcattgcatatatgtaccacatttttttaacccattcatccactgttggaaatttgagttgcttcctccttttccctattgtggataatgctgctgtgaacatgggtgtacaaagagctcttcgagaccttgcttttagttattttggagctatacccagaagtggaattgctggatcatatgatactcttatttttattattttgaggaaccaccttactgttctccatagcaactcaccttgttacgttccctccaactgagcacaagtgtcataatttttccacatccatgcccacacttgttattttctggttttgtttttaatagtagccatcctaatgggcatgaagtgttatctcattgtcactttgatatggttaggttttgttttgttttttactccagtgcaattttctttgccaagtgctttaataaatcttcacctaatgcaaacctttttgcacctgtaatgctgtaggcaattttggctactgtgcctccaaaaagaaagtaacagacttagtaaagacttagaagaacaattatgaaaattctaatagaatacttttctcactgggaaagcataaaacaatcctatctgtttatctagaaagatgaaggctgagaagggctataatcaaagtttataaaatcgagccagggaggaaagtactagttcattatgagcaggagcccttcccttcactttcaggacaaataaactattactctgtaaagggagtaagacacataaggaattcattaataaaagtactagaaccttgcatatggataacactttatcttttcccaaagaacattttgttcacattattgtgaatgaatattgccatctcacatgagttgggtgggtaggacaaagatcatcatcccaggaggaaacagcctgtggaaagatgaaatggctta

SEQ ID NO: 130158 - DNA, 1071 bp, Homo sapiens
tacagaagtgaagagcttcagcttaaaacaaaactgagcccttccacttatcggacagacattgtcctgtccactgctctcaacagctgtgaataaataactatgagttttattacagaatcatttttagtaaggtttgccaataaaaaaatcaatggcacaatcacagtgggaatatatacagggtaaggcagtgttattgactgacattaatcattgcacagccattaaaaggtgctcgatgctttccttactggtacacactaacacagtggagtgaagagattcagattcctgcacaccgtcatctgtctctacccagagaatccatagagatcagaggcaacaattaacgccaccatggcagtcagcagctaaagacagacagatccacagcccactcatgcctcatctgtgcctgagccactgagaccatttcagccttgaggggagggtaggagacaggtgttaatgtcagtcagtatctcctctaagaggcgagaagaatcaaaagatgagagtgcagaaagagagacctatcgcgactgcaagcagacgtcaattctgtttctcatcttgaaaatgtcaatgtcacagccagcattcagcctagatagagctcaagagcatggtctctgggaagactgcctgcatttacttctgggttctgctactgagggtctgtgtggccctaggcacagcatgatttagccttctgcacctccatttcattatctgtgatataggaataatagctactagcacccaccacaaaggattattgtctggatcaaattaattgctcatgtgaagcacttagaagagaacctggctgagagtaagtagaaaatcgatgtttctttttcctgtctacaatataccttatagtcttggcagtgatctaagccacctagatcactcaaaattaggcacccactacagtctcttccagctctaggcttccctgattctgtgtccaacctagaatactttttcaggtgagattcactgagaggcagcttcggcttcacccaggtttcattagaaacacaaattctcaggccccatcct

SEQ ID NO: 130159 - DNA, 2187 bp, Homo sapiens
ccacctccagagcatcacacatgtcactcgctgcaatcccccaatgatatacttcacccatccgacatttacttcctcctttttttccatctgtcctcatctctcatttcagaactcttattaagccatcaatccaagttccctctatttttatatgccctgctactgctgtattcacattgttacgtgtgcattgctttgcaaatatccccaagtgatttttctatgtaggttctcctctagagaatttattactgaagaccagaggcagaaaatttcccatttcttttgtttatgctacacttgggagatcagcccggaatgctgaggttgatagaatgttttgcatgaagtaggcactcaagacatgttattcattgactacaaaaggttgcttgatgccctgaagacaaccagaagagaaagagcagttaggattgctcctagccgaggcatattttagggagctctaatgagacccaattagaaaccctcctcctgttctcatatgcgtcatgtgaacggtaaaagctagtatatgaagacacggggctaactgtggctttttggactgttgcatgcttctcttctgccctgaatgcttgcctggtttgcattacgatttccttccttgctggaaaacatagactttcttcctttctttggaagaagtgggacctgttggaaatctgaggctccaagattcaaatgcaatgggcttggctgtagtgctctgtagtacacttcttgacaagtcctgaaaagactattgaattctggcctgtgcttttctgcagtgtttggatgtgtttcagctgcagtgtttggctggacagagtaatcgaaatagtttttttttttttttccttcctcagcaatcttacgttaccagttgatccttaaagttaaaatggaatattttacaaccctgcaaatactttcgagtgcaatcgaattatagctctttcacaagcaaacagcctatctttaaaaaattgtgcataaataggtcaaaatataaattgatgttgttatcctaatagaaaaactggcaaacatttggtgagcttgctagaggataccaacttgcattgaagatcttttttaattattattaaacaaacacaggcattttgatgggacttaatatggaagaaatttttttctcttttctttcatacgattaaaatgctatagtagtaatctacactagtaatctagtagcaatgtcactagtagattgcatttgtgctgggctgggggttttgatgctctgtgtatcaggctattgttctctggtaatcttcaaagggctgctggcctttgaatctgctccatatctaaaattctagctttaattatcagattagcctgcatttttttttcttcgtgattacagggaggagaagtgtatgtttattattctgcaaaatacttgagatggtaggatctcaaatgcttaattttgttgtagaaatgagagctgatcaaattatagactcctttaagctaaggaaaggaaatgaataagtcagggaaacagaggcactgaggggcacaatcgaaataggcattcatgtgctgcactttgctaaacaatgctggcactgtgcctttcagggtccctgcaagtcatgaacaaaacgagaaagattatggaacatgggggggccaccttcatcaatgcctttgtgactacacccatgtgctgcccgtcacggtcctccatgctcaccgggaagtatgtgcacaatcacaatgtctacaccaacaacgagaactgctcttccccctcgtggcaggccatgcatgagcctcggacttttgctgtatatcttaacaacactggctacagaacaggtaagggatgacgtttctagcccatgaacgtcttgtaatatgtcttagactcaggaagaagtgtcatgtaatgaaatgcatgaagttccaacaaatacctaaaaaaggatcaagtgtttttaaactgcttgacatctaccccagggtctgggacacagtaaatgatcaaaattatttattatttattaattaatgaaaaactgatgggtaaatcaatcatgtgtaccttgttgattcatgtatttgttcattcataattaataggatttggaaagtttctttagcttgtggttgtttttaggtctcaaatgttcacttctaccttcc

SEQ ID NO: 130160 - DNA, 1791 bp, Homo sapiens
gacatgccaaagttataaatgtgaaggccttccagtggcttttttagtgaactgtggtgtctttgtgacacatacacttctactatactataattgtatgaaaattagtaatctatgtagtaactctatgttgacagaatttttattatcgataatagatgtatacattcataaaatacacataacataaacacccattacatactatacatgtgatataaaccctgaccatatcccataaaaatggagtttaccatggttccctggtttggaaaatttgtactctctggatatgtaaaaacgaaaataagcttttcaatagtgtttttataattcacaattctcaaatagtaagttagaaaacttatcacaaagactgaactttcagttctccaacacctgcccggtggttgcattccaaatctcacgctacttctctgattgttccatcaacttaacaaaagagcatagcctgattttactccagtaggaccataagaaatgaatgcacccagagtgctgtgatcattatgatggtttcattgagctgtaatccatgtacttggatactacttctatttattttttaaaaatgtgtttgtgtcactttgccaaaggattggagtattacactaatgtcattttggcattcactattacctagggcaacttttgttttaccgtctctttttcaagtcataattttatacttatccatttatttatgattaatcattttacgtgaaaaaaataattcttttttcccactgcagccttttttggaaaatacctcaatgaatataatggcagctacatcccccctgggtggcgagaatggcttggattaatcaagaattctcgcttctataattacactgtttgtcgcaatggcatcaaagaaaagcatggatttgattatgcaaaggtaattttcaggcacttttacactgcatcaatttactttgtgcataatggggaaaagccattttcagtgagttaaactatccacaagattggctttctatgttctcacaatgttagcatgagaaatgttaaggtaattttaaactctaggcaaggaaaagactctcaaggaacgctgcctttgtgtagtgatttccctcattaggatgaaaggcaatcaggctttgatgaaagtatcatcaagaaaatcagaattctctgctctcttatgataatttttgtcctcccagttcccccggacccaaccaaggacttgtccacataatcaaatgttcatcttgtactgttttacttttcactgggacaaaagtatattttgtctgtggcttcagatttaggcacaagcataagagcaaataaatatgataattaaagtttgaaaaaccacattccttgcttttactcctgtctgaccaagcttagtatacgtgacaaggacaccttccctatcacggcaagcatccacaaaagtctctaatgctatcaattctaggattttcaaatcagttcagagaaactgaaatcaacatgtcccatagttctttgaccagtgggttctagttttgacttaaaaattcacaaagattttgtgatagctgacttaagtttaaatttttttcaaatcataagaatgaaggggaaaatatcttcgaatttagcatgcttatttgccaaaatatccccttcccttccagccatacccatctcttcttcatttatctagaagaagccgagaatctgctctatctagcaacctctcccaacaggctagatcacttggtagaaatcggaaggagagaacttgat

SEQ ID NO: 130161 - DNA, 1671 bp, Homo sapiens
atgcggcacacaccatccctctgatactgcttttgcagctgttctggtccttaaatccacaacatgtgattagccatgcctggaagccttcaacatttgcaaatattgcctaaacactttctgaataaagtttatactggagctccaagccaatgacacacacttaaaagaagcaggtggtttaagttttcatcttttctttccttttcattccatttcctccctccctcttacagacctgcatcagccccccctgactgtgggttaagtcattttattagcaagtcaggctctaatcccagcagctgtattgctttagttgtgcaattaacacagtataatctgcaggaaatcaactgctccctattcaagtgtttcaagtaaattaactgatcaaatgttgcagcttttccctgtgctcctggattttggccatggctttgattactgattattgtaattcccacaggtggatttttcgtttgaagaaaatatcttttcttgtgtttatgtattcatgggcgtgtgtgtgtgagcgtgtgtgtatgtatgtgtgtgtgttctgcaactgtaaatttgaagtgggcgtgggtgtttcctgcccttaaagtaattaaattttttgccaaggaattacatcaatgaaacctgagactgaaatatgtatccggtgtttcatgtgttctagtacttttatcgccagattaatcattatcttgggcaaacacgacttgactttttttttccccattgctaagttgtgtattacttaaaatccatttttcgtatgttaccaagctagcaaccctagaaaacaactggcagctgattttctctattatcgaaaatgttcggctgccttgggaggtgcagccttccttcctgctgtagaccttgccacttcgtgcagtgaattgcttctgaggaaagcagttattcaaatgcgatctgatgaatgtcaccttttgtaatttttgttttgtgtcaaatgtatgtttcaggactacttcacagacttaatcactaacgagagcattaattacttcaaaatgtctaagagaatgtatccccataggcccgttatgatggtgatcagccacgctgcgccccacggccccgaggactcagccccacagttttctaaactgtaccccaatgcttcccaacacatgtaagtaacaaactcaactctgcgacctgccgaacatgcctttcccttttctcctcatcccactcctctcctttaccccgtttccttccaccctgcgtatccacaaggctttcttcatgaaaggataacttaagagcagaccacggaacaggcagagccgctgagcctgaaagaaagcgccttatctgggtggtttgaggaggaatcaaatttccagcatttacaagtagctaaatagaaaggaagagatgcacatagagtgaatgggggcaagttttacaagagtttcctttcgttgtcttaaataatattcgtgtgtctgatctaataatgatgatgatcaaatagtatgcttttcatagctgcacagtggggacctctggtctggttatagaaacatggatttattttccaggcgaataccgtagcagctttgctgcagacgtgcaattagaattcctgcagaaggcagcttgagtggcttgcccaagagggcttct

SEQ ID NO: 130162 - DNA, 1050 bp, Homo sapiens
gaaaatataatagcaggtggcatttatatgacccagtgtgcatggcagtgtcccagggtatcaccgtgaatctcagaaactccaggctttccccatgggaaatccacaccaccacagatccagtggaggactcggtcaagactcctgaaatcaaagaactcacagtgactgattctttccctagttttataatataaataatggcatggggtcacattcagccgtcattatccacatcatttcactgatgggatcctcctcagacagagattgggaatcagatttctcggtcacataaactgttgctcattctgtgaggctgcctatttgtaaagttgtggttcttattaaaagcaatctcagacgtagcaagcacccctcacttcccttctcattcattttgttaaagcaaatgggctttggaattcaggcctgtttctaccacttactaatgttgttaatttggaggagttcctcaactttgccaaggcttgattttctctgctgtaaagagggaataataaacctattttacagagcagctgagacaattaggtgagttaatgtatataaaatggtttgcataatacccaacacatattaaactctcactcggtttttaatattaacctctatgtgcttaataacattgaagaagaagattcaagtagattatagtctgttaaagagttcaaatataaataaataattctcagggtgagaattgccatagcatagatatgttacgtacccatggcagagcgtgaggtggcagcatctaatggttgagggagttgggtgagacatcaagagaaggtgacatatttttttgagtacccagtggaaggcatgggataccatgtggatctctgcagtagattaaatatagacttgaactaacctatcctggaacaataggacaatatccttgtggcttacagaaattattccctgcacctatattgatttgtttattaaacgaatagctttattggtaaacatgtatattgcggaagtagacttggttatcattcccacaagtccagttaa

SEQ ID NO: 130163 - DNA, 1028 bp, Homo sapiens
taagtaatcaataaaatactcttctcaagtattcaggagaaaaaatgtgttgaaatgatgattcatcattccacataacgtatttgtgactacatttaatagcctcattagcaataaaatttttatgagttaacatcatatgaggatattcccttgtaccttaccgagactttatctgtagatttgtaacataaccataatcatcttggtatgtttcttacacattttattcagtgaacccaaatgaacttctaattacatgttcagctgccagtcatggttttatatgtttgaatatatataccttcagaggatatttgctctttggggtggtgaagacttcatcttcttataaatgcaaacagaagatagttggaagaggaaaatgttttagcagtgtctcaattatctctccttaatgattatttcacaacctcgagatattttcctaaaagactaagtaagaaatatatagtaagattcctttctggatattttcagaactcctagttataactatgcaccaaatatggataaacactggattatgcagtacacaggaccaatgctgcccatccacatggaatttacaaacattctacagcgcaaaaggctccagactttgatgtcagtggatgattctgtggagagggtaagcacatgaacctacctcagtgatagtttttggcccagcttcctttgtgtagacttattcttgccaatcctgtttggttttttccccttcattttccagcatcattttgagagagaaagaaagagagagagtatgtgtttagtggcttaatcatccctcccttatcttgtcctcattccatctacctctccagggttggtttcttatggagccagtaaaaaagaggagagaaaaatcaaatcagcgtagatcaggggccacatcctcaaaggcaataaagaattgatggagcttgtgctgaacttgaactttaagttaagggccccatctaaaggaacagcaattactcagctccagctaaattttgccatgt

SEQ ID NO: 130164 - DNA, 1020 bp, Homo sapiens
gatatgtgatgataattttaacaatggattttcaaagtacaacctataaagtttgatggtagaggttgttgtgcggggtgtttttgtttttgttctaccaaacaagcaaacaaaaagcctaaaagtagaatgtgctagattccaaaaagttacatttcacctttaccattggacctttccctcccagactgtaagcaaatagaaaatgtggataatgttattaaagcaactcttgccttttaaaaataacaggaaaaagatttgggggcaatcgtggcaacactattgagcatcatcttataccagcacaattgattctgacttgttcctttgctgtatttcagctgtataacatgctcgtggagacgggggagctggagaatacttacatcatttacaccgccgaccatggttaccatattgggcagtttggactggtcaaggggaaatccatgccatatgactttgatattcgtgtgcctttttttattcgtggtccaagtgtagaaccaggatcaatgtacgtatttctctgtttgcaacattcaactgtcgtacctcaagtgtgtctaagataattcaattaccagtctcagtatctggtttcctttcatccaaaacaaaaaaggatgtgtgtaggctggttaatttcgaagatgaaaaccttttcctccctgccacatcttaaattagctcaagtatactacttaaagagaaaggaaaaataagtgtatcaatgactaattctctcaaattgactggaatctatgtctttttggtctgtgtgcacagacaggatgtgatcttctgggatatcacccttctttgaatcagagatacgctgtcatttaaaaaaaaaacctgacaccatccttttagtgtttaacttttaaaaattattccgaaagaaatgtttttaaaagataaattttgaaaagctggcttttcttttaaaggaaaaagagctaaaggactaggctgctatttctgtcactgtaggcaggtcactgcttctctttg

SEQ ID NO: 130165 - DNA, 1027 bp, Homo sapiens
tctttgaagaatgttattgtgcttcctaagattattagaaacaccctgagaattgtcagatctatatctagaaggctttatgttttaaggactagatagcatagattgaattcaactgtaaaaactgtacatccttttttaaaatattgattttaaagctcttgttcaacggaaaagttatggactattgggttttaagcaaaagtatgcttgctgcaaaaaccatgtatcaggctgcatcttgcctggtgatgtggtcagaatacaggggtgcaggcatctctccagcctgaccctggcaagagtcagttaatcttgctcagtgccattgctgtgatcacacacccacccttgccacacaactacccatgcctaggagaccagatgagagggtgagaagagttgaaggccaatgagtcactgctgtagaaaaagcagccctaagtgccaccttcccctggcattggatctcagccatcaccgtgtgcccctttacagagtcccacagatcgttctcaacattgacttggcccccacgatcctggatattgctgggctcgacacacctcctgatgtggacggcaagtctgtcctcaaacttctggacccagaaaagccaggtaacaggtgtgtcattgttcctcctctcagccagccccaaatacactgagctccagctggtgcccagagccagccagcagctgaagacatggaggcagaatatgccttgcccacaaggatcaccccaagctgagcatttctcagctgcttgtgaatagcatattgatggagatgcactcatggtctgtgggaagtgagaggtgtttctttaaataagctgttagcacagatccatttggaaaaacgtccagatgccaaaagtaaatattatcattttgctttcaggtttcgaacaaacaagaaggccaaaatttggcgtgatacattcctagtggaaagagggtaattattggttcctggggtgcttctgggaaccagtcctagtgggcagctttccctgctgagt

SEQ ID NO: 130166 - DNA, 1050 bp, Homo sapiens
atgtatgccattgtaattatttccattgtcacttctgggtttccccttttggttcattaatacccattgccttgtttttctctgtacataaattaggagagagaaaatatttgtataatttttttaacaaaaggaactttgagcatgtaaaatgaaacatgtatgcccaaattttgaaattaatgcttttgggaagaacgaatcttttcctgacctctcatcttcatcctacccagtttgtcattttcataaaggacccatcaaatgttgaactcctgtagacagagctttaacatctatttcttgctgtttaaagaatgtggagtcatgtgacagggtaaaaaaaaaaagggggcaggactcagggaccgtaattcagatcacttctcatgtacgaagcttttccctttttgtcgaagcaaatttctacgtaagaaggaagaatccagcaagaatatccaacagtcaaatcacttgcccaaatatgaacgggtcaaagaactatgccagcaggccaggtaccagacagcctgtgaacaaccggggcaggtgagtgacgcaggctttctttaccaccactcatgtgcttctccatctctaatttagaaaattgtccacatataaaagaatgtacatttgtgtataaataagcttttcctagtggccttgagggcaagctcactgagacacctctccgcggacagaattacgtaactggttcaggctgggcctccccattactacttgggctccctccagttaaaaaagatgatgatctcagagaaagttctatgccaaaagacactggtttcctctgaggagaagattcctgttatagtccctgttaactagtcactgaagagttgccaaaaggctacttagtcaaagcacaggtacgtgctgagcctcttggcagtgaaccaccccaagagacatgatagggccttcaccctaggctaaagtcagaatgtcatcttacccccagtagaggacagagcctgtgaccaagcttgaggaatgagaagagaaaccatattctgtttgtttatt

SEQ ID NO: 130167 - DNA, 1154 bp, Homo sapiens
tggctcgccccatgatgggctccaattaaattcatctctgtcttcctcatgtgccattcttccctggctcacattagaaattcaggagcggagaacaaagcagccaagtttgtttttccagagcaagaggggtctggtgaaagcagtcctgacagctgcaccgtgtgtcttggtgaactaacggcttttacgtgtttcattcaagactgtttagtctgcgtgctaaggattcatatatcagtttttggctctagtgacattgaggtagtttgatttccaatgatttcgttgtcatctgtatttgcctacagtgaaagaaataactgagagtcgagttagtgcagggtcacttaaaagcttgcctttcttcattcactctccttaatgatattgccagtgcttctaaaaaaaagaaaaaagaaaaaaactaaggcagcagctcttaataaataacacctggagcagaatcggtaaactgctttcacgttggcttttgcagaagtggcaatgcattgaggatacatctggcaagcttcgaattcacaagtgtaaaggacccagtgacctgctcacagtccggcagagcacgcggaacctctacgctcgcggcttccatgacaaagacaaagagtgcagttgtagggagtctggttaccgtgccagcagaagccaaagaaagagtcaacggcaattcttgagaaaccaggggactccaagtaagccacgcttttgtgaccatctcaatggtggcctaggcctgtgggaataaacaatagagagacgaaagggttgctccttctacattttagatattatcaatgcatcattttcaggctaaaagcacatcattgctctatttaaaataagaaagctaagactaatgtgacattttgctttgtaaacattttcacttaagcatagaatgaaaatatagttcataaaagcaccagatgcaaaacatatgcacacataaaagagtttataaaatggttattccaaaaggtaaaggatatggtttaagtccattttattttatcgtaatgccaacatctcctgacttgtctgcctgaagttgcttttaaaaaatagtaaatacaaggtttcagtgtgtatgcatttaattttaagaggaaaagcataaacacttttttaag

SEQ ID NO: 130168 - DNA, 1049 bp, Homo sapiens
tgagcatttccttccaatatctcccacaggtctattctattagtaaaccttgattcctgatagaagcatctgttggaagatgacacgaaagcgttaggtatttgtttgttattgctgtcaacagtctgaagatatactctgagtaaaccaggatattctctttttttaagagaactttgatggaaagacacaatgctctatttctgctgtcccagtttggagttcccccagttggatccctgcctatgacactgaattagatttcttttgccagtatttttcgtctgaaactagagatattggagcagttcattaacttgggatctaaaaatataagaggatctgaatggaatcagccagatgttccttcccagctatgtgtgttaaactggcttatttctcctttgtttcatggagatgcagttcttttcagtgtccgccccagctcttttctggttaatgaaaatactcatttcctcctcatgatgtctgcagaaatgtaaataccagctgtccatacaaggaaggaggaagaactaaagctggcaagggcatggaccttggcatggcatgccaactccagaagggtgaagagctggactcacaggcacttgggtgcagtttgcaggagctttttgtggtgccgctgggttttctctgtgagtctggtgcagagccagtgtcatcaacagtaaaagtgggcagctttctgggtcacatgccttgaaaggggtagggattcccatcccagaatgatcaatatcaccacctgtcatctcctttccactgcagggtcacaaaggcttttgagttctgggagtcccctaagaaaatataaatcctcagttctcaatcaacacctctcaattaacacttagtggaatcagttgtcagtcaagagcagactgtacttgcaaaataggtcttttggtcactgaccccactcggctcaaatcttttcaaatatcctgcttatctgttgaccttttcctcaaatcttacaaaaaaaagagagagagagagggagggagggagagagagagagagga

SEQ ID NO: 130169 - DNA, 1032 bp, Homo sapiens
ataacaactctacttagtgaaatctgatcgagtcccttaatggtgaaatgacacactgggtggagccagttatgctgtttcacttcaagccgtcctctccaccttccagactattcctatgggagatgattattagcccgtttttttccaatgttttgtctaaaaataaccaaaatttaacttttcctgagaattacatggacttctggaagtacttttcccactgcttttaagtgggctctcctccctttaacacccacccatttttttcatatgaactcttatttttttttttatcttaaaccttttcattcatagctttcaatctgcattttgaacctaataggaaatctctgttgggcttcagcactgtctgtatttaacaccatgtgtttctttctaggatttagatgttgtgcatgaaaaactatatagtgaatggttttataagttctaaagctaacagaaattactcttgtattttcctatatcaggaaataaagatggaggaagctatgacctacacaggtattcacacttttttattcttctcaacagcttcttccccaataattgcatgatccagtggtttcaactaatttctgtttcttaccgtgttgcacagagcaaagctgggggtgcatgcttgttctaacagcattctccactatgttttgtcattgatcacagaactgtcattttgcttttaaatcagctcactgtcccatcaagatgttccagagcatttactcactcccatgcttgtttgcttgttggatgatgcttttaagcatggaatgatgtgaaggaaaaaaaacagaatggcctttgggagccccgggaaagggtgggagatttattttctttgtggtacttacacattgatttggtgggggagcttcatgaaaatgggttggagatttttattaaatatagcatcaaaggcacaaaatgactaatgagaattttaagagcactgtaaggccgaagttgaaggaaacaaggaatttctttgttgatgttcattcatta

SEQ ID NO: 130170 - DNA, 1044 bp, Homo sapiens
ggctcaagcgattctcccatctctcaacctcccgaattgctgggattacagtcatgaaccatcgtgcctggctcctcctgcatttcttaggtagtattgtactgtaaagaagagatttcccggccagatatggaggctcacacctgtaatcccagcactttggaaggctgaggtgggaggaatacgtgcttgagctcagaagttcaagaccggcctgagcagcatagcaagaccttatctctactaaaaatacaacattcaaaacattagctgggcttagtcccagcacctgttgtcccagttactcagaggcagagcttgcagtgagctgagatagcaccactacattccaacctggatgacagagccagaccctgtttcaaaaatatgaaagaagagattttcctcctctcctgcgtatttatttctatcagtatggacttagattctcagtttattccatggatattctcttgctatcattatttattttgatgattaaagtgtcttagattggccactggtgtccctgcacctggattccgtgtacttttgaagcatcctcatcattttttgaccacctcgttgctttctggcctaaaagcatgttccaggttcatatggcatttttgccactccacatttggaaacagccatttctccaaagggccccagttccttttaaaggggaatggcatttgaacaccaagatctgggtctgaggtgtataaaattgctgctgaggtgtcttggcatatagatccttttgatggatagagctaagagacacactggcatctatcaacatctattcttttttttcttttctttttttttttttttgagacagagttttgctctgtctcccaagctggagtgcagtggcatgatcttggctcactgtaacctccactttctgggttcaagccattcttcttcctcccctcccgagtagctgggattgcaggcacctgccaccatgcccagctaatttttgtatttttagtagagacagggtttcaccatgttggccaggctggtctt

SEQ ID NO: 130171 - DNA, 1064 bp, Homo sapiens
tttcattcctgaaataaattccactgggtcattgtgtgttgctttcgtaatattgaattctgttcactaatattttatttaagatttttgtatcatatttttaaatgataccaatctgtgatttcctttttgtttttaccagcattatctcttagatatattagtttcttattactgctgtaataaattaccactgtgcctttaaaacaacacaaatttattctcttgtgtttctaggggtcagaaattcgaaatgaatcttactgggctgaaatcttctgggggctcgaggcaagaatgtccttgcttttccagtttctagaggctgcctgcattcctcattcatggtctcttctgccatcttcaaatacaaaaatgtagccaatcttcaaatcagtctctcccccaacccccaccttcctctgttttctggggtcacatctcgttctctacccctccttcctaccacctccctttccctttataaggactcttgagatcccactggccccacctggatgctccaggatactcccccaccccaatctcaggatccatgacttagtcacatttgcagagtccctttggccaggtaaaggaacttgtccatagtttccaggaatttggatgtggacatctttgccgggtggagtccactattctgcctatcacagctatcaatgttatccttgcttcgtgaaaagagtttggaagttttcttgagttatctgctctagaacagtctattagtattctcttttcattgaagatttgttaaacttctcctgtgaaagtccacagacctgatgcatctttgcacagtggttctttgggcttgctttttcttctatggaaactgttctatttaagctttctatctatattgggttgttaaatcaagtttagcctaaatctgcctcctcacatattttaagttcagcctaaaggtttctctgtatatcgtgaactataacctaaatagagttgtatacagactgtagcctactcttgtgcccatcactgagttttggcccttcaaaggtggccaactgctcaaactctgt

SEQ ID NO: 130172 - DNA, 1313 bp, Homo sapiens
aagactcagagggactcactcacatgctcttctggttgcaaagttgatttgagtggggccaggagtgaaacccaaatcccctggctgaaaggaccgtgccattttcagcactaaccatgcttagtcatagatgttttcacgaatgtgatcttttttttccccaattttctgttgtttaatcacctgtaacctaaggccactctgtgataacaaatgactaggggaaaatgcttttgagtgtcatacttctcattgattaactctgtaaaaacaatgtaagttgcttgtccaggtaagtagaaagccttttctccactaatgattcaccttcttctctcttttcacagaggacagttatgggatggatgggaaggttaatcagccccgtctcactgcagacatcaactggcaaggcctagaggagctacacagtgtgaatgaaaacatctatgagtacagacaaaactacagacttagtctggtggactggactaattacttgaaggatttagatagagtatttgcactgctgaagagtcactatgagcaaaataaaacaaataagactcaaactgctcaaagtgacgggttcttggttgtctctgctgagcacgctgtgtcaatggagatggcctctgctgactcagatgaagacccaaggcataaggttgggaaaacacctcatttgaccttgccagctgaccttcaaaccctgcatttgaaccgaccaacattaagtccagagagtaaacttgaatggaataacgacattccagaagttaatcatttgaattctgaacactggagaaaaaccgaaaaatggacggggcatgaagagactaatcatctggaaaccgatttcagtggcgatggcatgacagagctagagctcgggcccagccccaggctgcagcccattcgcaggcacccgaaagaacttccccagtatggtggtcctggaaaggacatttttgaagatcaactatatcttcctgtgcattccgatggaatttcagttcatcagatgttcaccatggccaccgcagaacaccgaagtaattccagcatagcggggaagatgttgaccaaggtggagaagaatcacgaaaaggagaagtcacagcacctagaaggcagcgcctcctcttcactctcctctgattagatgaaactgttaccttaccctaaacacagtatttctttttaacttttttatttgtaaactaataaaggtaatcacagccaccaacattccaagctaccctgggtacctttgtgcagtagaagctagtgagcatgtgagcaagcggtgt

SEQ ID NO: 130173 - DNA, 1029 bp, Homo sapiens
tgttggtggtgaaaataaataaataagtaaacaaaatgaagattgcctgctctctctgtgcctagcctcaaagcgttcatcatacatcatacctttaagattgctatattttgggttattttcttgacaggagaaaaagatctaaagatcttttattttcatcttttttggttttcttggcatgactaagaagcttaaatgttgataaaatatgactagttttgaatttacaccaagaacttctcaataaaagaaaatcatgaatgctccacaatttcaacataccacaagagaagttaatttcttaacattgtgttctatgattatttgtaagaccttcaccaagttctgatatcttttaaagacatagttcaaaattgcttttgaaaatctgtattcttgaaaatatccttgttgtgtattaggtttttaaataccagctaaaggattacctcactgagtcatcagtaccctcctattcagctccccaagatgatgtgtttttgcttaccctaagagaggttttcttcttatttttagataattcaagtgcttagataaattatgttttctttaagtgtttatggtaaactcttttaaagaaaatttaatatgttatagctgaatctttttggtaactttaaatctttatcatagactctgtacatatgttcaaattagctgcttgcctgatgtgtgtatcatcggtgggatgacagaacaaacatatttatgatcatgaataatgtgctttgtaaaaagatttcaagttattaggaagcatactctgttttttaatcatgtataatattccatgatacttttatagaacaattctggcttcaggaaagtctagaagcaatatttcttcaaataaaaggtgtttaaacttttttctgtttcagagaaatgaacttaaccaagtttttgtggtacacccatttcttgcaagtaaaattgagtcatgatctctatttacatgattgaatactaaccaaacttataaaatggagctgaagtcaatgtgtt

SEQ ID NO: 130174 - DNA, 1062 bp, Homo sapiens
ccaaaagcctttaaccctctaccagtatttttgtagaaacaattagagatagtcagagtttctttgatgtctacattgggaaaacctttattcagggatttagccaccagcaatcttgtgtggctattgttagtaaataatagtgaattaaatattttggcatggcatctttagtccctggctctgcacaaagccgacttgatttgacattcattttcttggggctactatttaaaatgcatttccttctttcccttcactgtaggtccgtagaagatgaggagagaccttttgcactgggaatgcagtttgttttgttgcgaacacttggtacgtccctgaatttccaagtgtacctcttagttcctctttgcagatggcaaattttcactgtcctttaaaaatggcaagtcatgtcatttattaccatgaataagattttacaggctagtggtgagggtacaacttccttgttttctgatttgaactagaagctgacaggttctgttgtttgatgaaacaaaacaaaaccaacgttaggttagtttctttttcattatgaacataaacttggacaaaattccccagaattttgcacagtaagaaataggaaatcaagcaatttgtgaagaatttgtaatcctagcattttgacccctttatgcctttttactatgaaagcagtagaaattggtctttatttgtgaagttttcaatgcctcacttctttacagtaattttattggactaaacaaagagtatacctatcaagttttctgagaaaaagaaaaaactttaaaaaggaaaagaaaggtctccaaagtgacatatagggactgccttgtaagtatttacttatcaacaagagaagctcagtagtgctgtgtccatgtgataaaccacagagtacatttgtacgggtggaacataggtcttatttttacaaacaccacatccctctgtgagttcttgagacaatgggaaataagcatgtaacatacaacattcctttgatcagtttcaatgtattttaaattgacgtctttgtcatcaagcttattt

SEQ ID NO: 130175 - DNA, 1048 bp, Homo sapiens
tgaaacagttgttatggaggcctgccacgctgatacattcacatcggtgtgttgatatttacagtaaggactgcagtggacaaaggaactgggcagcgtggtgaagccagaagagctcacccatgggtctgggcagcttctgcccagattagggggtgcagtgcagggaaggggattaggggggattagggggtgcagtgcagggaaggaatgaagaaagggagtcagttcttactctttctccaggctcctcagatgccacaatgctgggcaccttgcaggaagcacctgctgagatgtcattgcttagcaagggcagttggctgcaccagatgtattctggcttccttcccacttggtgctgaatcaggcatttcccagcaaagctgttccttgacagccagatagtagtgcatgaaaggcccactggtttgtttactcagttcttccagcagcagatatttatggaataacaacctgtgtgcagcactttgcaaattgctctgagaaataaagaaattggggaaaaggtgacaagggcactggtcttgggaaagttcctattatataccatactctcatgggtatgtgatggagaggttaaggtactgcagcattaaaaagacatgaatcattcataaatttactcaaataatcttattctttgcactttaattcctcaagagatgttaaataacccattggctactttttcttttggtgttcataaatggcaaatcgccagttggcttctaacctaaaatttcagaaaaggagccctttaatctttgctaattacagaaccagttgactccaatcttcctgtcacatgggaataacttggagtataagtttttaaaaaagaaaaaaagatgtggttggagggcttatgcttcctctgatctttgacttgtttcctatacattttttgaatatacttttattctttactcttctttcttcctgttttggaagaattattggagtaattttcaatgtatgcatctaccactctggaagatgcaggcacacaggcaaaaaaacaaaa

SEQ ID NO: 130176 - DNA, 1083 bp, Homo sapiens
tttctctaaaatggacaaattattaatttcaagacctttcctatgagttttattttggtaagtgttgctcatgatctgcttctcttctctcttagaccttctctcaccatgccccataggaatctgacaggaagctgcaacgttaattgtggttgtaaaatacacgagtatgagccagtctgtggatcagatggaattacatactttaacccttgtctggctggctgtgttaatagtggtaatcttagcactggggtgagtatatttcacaagttcctcttctgttagtccaacatcctgtgacaaggatgtgatgaaattcctatgcagctacaatgacttcagtctttcttttcaagaggctccaagtaacctacaaaatacctctgatgaaaacctagaggaaagaaaattatgcattgctattatttttttttccagggatgactggaacatttgggtgcagggattttgttccatatcagccttctcctactttatattctgcgccaagtcagtgaaacttgataaggttgagctctaggcctgccatttgtttctctgacagggcccttgtgatggatttgaaggtcaagatgaccacatttggtgctgataaaaaagtataggaaagcacctcccctgactggagtctgtgaagatgggtgatggccatttttcatagactatatcagttcagttccggcttaaaaaaaaactttcaaagtaaagatatttctgacagttcaagaataggctattttgagaattccctttcctgtaaattataaatgggctgtaatactgtgggagaaggttttcatattctactgtttcttttttttgagatggagttttgctcttgttgcccaggctggagtgcaatggcatgatctcggctcacctcaacctccgcctcccaggttgaagtgattctcctgcctcagcctccctagtagttgggattataggcatgtgccaccatgcctggctaattttgtatttttagtagagacggggtttctccatgttggtcaggctggtttcgaactcccgacctcaggtgatctgcctgccttggcc

SEQ ID NO: 130177 - DNA, 1050 bp, Homo sapiens
gctaacttagtcttctaaattttgtgtttttgaaataattttgaatttacatgaaagctatagaaatagcacagggcaccagtgtaccctacatcctgattccccaattgttaacatttctgagaaattgagggtgtggtactctactgtccctaatacttcagtgtatgtttcctaagtacaagaacactctcctatataaccacaggacagccataagaatcaggcaattcacattgatctggtgctatcatctaaaccataggccccagtcaaattttgctgattatcccaataatgcccatgatgtccaagattcaatccaggatcacatgcgtttagtttttgtgccctttagtctccttcaacctaaatcagttactcatccttttttgtttctcatgaccttggtcttttaaaaaaggtacaagcaagtaactttgtatatccattaactttgaatatccattaactttgaatatccttcaatttggatttggtgatatttcctgatttatgcatgtttgcaggcacaccactgaaatgatgctatgctcagtacataggagcagagacatatagtgttaatttgccctatcactaataggcttttatcactgggataagatagtatttgccaggttccttcattctaaagttaataagtataatgtattattaatcaatgagtaattaaaaagaactttgtggggaaatattttgaggctatgtaaatacatttgacacctattatttgtggcagctatgttctataaagtcactgtgaacactggattagcctggactgaacttcactcctacggagggtacagggttgggttcctattacaacataatcgtcaaccagtcaatcaatacatgacctcgctttatgtatctttctgtttaaagactccttatttaatatatagggttgattcattatcattgaacttatggtcaattgcactgtaactcatgcctgaaggaagcttatctaacatgagtattttctccgtaaggcacatcatagtcttttgcactttagga

SEQ ID NO: 130178 - DNA, 1007 bp, Homo sapiens
atttatcataaaatacacattgtagaaggttagcaatgctagcagaactaactcattggtgctcaaaaatacttgaatgaaattcgaatcaggttgctgattataatattcagtataacactggtataattattgagtagatttctcatttatatcacagaaagagagaattccttcattttcttagtttgctcaacttcctactgctttacagttgattacaaaaagttttcttcaaaattttttcaccacaaacttctgctttactaatttgttctcactcacaaaagaaaagacgtaaatgctattcacattttccaattttttaggtggagtggattcctcctttgtgccattgcaatgtttcttgtgatattcccaatgtttactttcccaaaaaagcttccacctcgacacaagaaaaagaaaaagaaaaaattttctgttgatgctgttagtgatgacgatgttctgaaggagaaatcaaacaacagtgaacaagcggacaaaaaagtttcttcgatgggatttggaaaggatgtcagaggtaaagtatacctcttgaataaatacatgcatggcactttgatcagtgctactcatagtgtggtcccaggcccatgctgtctacccactgtctgtggccagataagtactaagattgagagtaagtgttgcaaaactcttagaaacttgacagagtaatttttttgcctgttgcatctaagaataatttaaaaattaaggttatattttgtatgttatttaaaaattaatttttaaataattcatcatttgtgtattttgcaaaagtattagtagatgacagactagaaataataatttaaaaaaatggtttttcctcacacacagtttgagaagcactgatttagatcataaagaaacagatgtctatatatgttatttactataattagagatgtctgatttttaaaatattaaaaatcaagtgcattgtgccatggagggtttatttcaggggaata

SEQ ID NO: 130179 - DNA, 1048 bp, Homo sapiens
gctcagtaaatagcacctctttccccaccttgagttctgagttaattgagaaatatgacaaagggagcacatggaggccaaaatatcacttttaaaaaccgatagaagtgaggttgcagaatgtagctcatatctttgtgcaagtggactttctaataaaagcagaaataaataggcttggccatctagccatgggcaatgctggacccaagcagtgtgcctgcctggggtctcccatgtggagtagggggtggcggtggtgtctcggtggtacttatgccaggaatgagcaggactaaagtttcactccctgcgtgcatacttactcccaagaggcaaaaaagaggagctgtgctgagcatgcccggtttattccaaattcatcagtcacattaatccccttcttccttcctgaggaggagcagtggcggcagagagaaggtaagaaaggagacattgagagtgggaatacacattgcctcctaagacttgtaacccattttaaaatgctgctttaattttgcttgtcttgtttacaatgtgtttacctctgtaaaccacaaaaaatcctttttggaagtagtgtctgtgcaaatcatgaataaataaaaaataatctccactgaaaactaacatgaggctgaatgatgattgagggatttgaggggttgattccaggacacacagatcacattgaatgatgtggcgccatgagtggaagaccacagagcatcagcttcttgttaggatgctcatgagttttgtgtgtgtttgagacagttaatttgtgccacagatatgtcttctgtacaacagtaatgattgaattttgatcagctgtgtggtggtcatttttggcctctaagacaaattcatctaccaggctgggaaacaaacccattttgggtctaactgcaaaacaaagggttttagtgcctcactgtggaaaagacagtgggtgcatattgatttattcagcccacccacaaataacagagatcagcctttttagtagcatttatggtagagttttcaaatagggttttat

SEQ ID NO: 130180 - DNA, 1001 bp, Homo sapiens
ccaggtgggcaagactgactgggcccggcttcggcccctcgtgccggtggatgaaacgtgccggagtgcttgggtgccatcagctatcaaatctgaattctaagcgccatggacgaaggcactggactgcagcccggggcgggagagcagctggaggcgccggccactgcagaagctgtccaagagaggtgcgagccggagaccctcaggtctaagagtttaccggtcctcagcagcgcctcctgccggccaagcctcagtcccactagtggagacgccaacccggcctttggctgtgtggattcttcgggccaccaggagttgaagcaaggcccgaacccgttggcccccagtccctctgccccgtccacttcggcggggctcggggactgtaaccacagggtggacctcagcaaaaccttctcggtgtcctccgccttggccatgctccaggagagaaggtgcctctacgtggtcctcacggattcccgttgcttcctggtgtgcatgtgctttctgaccttcatccaggcgttaatggtctctgggtacctgagcagcgtaattaccaccattgaaaggcgctacagtctgaagagttccgagtcggggctgctggtcagctgctttgacatcgggaacctggtggtggtggtgttcgtcagctacttcggcggccggggtcggcggcccctgtggctggccgtgggtggactcctcatcgccttcggggcagccctcttcgccttacctcacttcatctcgcccccctaccagatccaagagttgaacgcctcggcccccaacgacggcctgtgtcagggtggcaactccaccgccactttggagcctccggcctgtccgaaggactcgggaggaaataatcactgggtctacgtggctttattcatttgcgcgcagattctcattggaatgggctccacacctatttataccctgggaccaacctacttagatgacaatgtcaagaaagaaaactc

SEQ ID NO: 130181 - DNA, 1062 bp, Homo sapiens
ttacataaagtaacagaaagataaattgtggatgactatactatatctggtacactgtaattatgttcagaaaatagaaaaataattgatgtatgactatctaaaaaggaatacactatctaagtgtttcacttaactcagtttacctgctcccaatcaaactagcaagtggtacaattctgtgtttcacccagtgctttttatttatttttctctcccctcccctcatgcagtgctttttaaactaaagaatatattgcaactcaataaatacacatttacaaccccacatacacttctatttttttctcgatggctttattacttgaatgactagtaatgtaagttaaagattttttaattgcttctttttcttgcatatttatttgcattcctaaatttacttaacaaaaggttttcttatttacatagatcaatcttgagtgcaaagcctatagaatatacttgcaagaagacaatggctctgcagggttaaggtattagagcctaagtacctttcattgtttaaaacatgggctaagtgcttcgttttaacctaaatagagaccccttttagcacaaagagccaaagtgagtcatgggtccctgcctcatctttgcacgattacaatgaggcataaaactctgaaaacctttaaaggttttaaaagcttgctccctccacgcccccaaccccccatcatcacttcccaaatcatcagtgtcactcactgctaacctcatcgcagcaactgcaattattttaacacgtactaattaggtttattaggtcttggagtttgggccaggtctttcctaaaggggaagacaagtccagtctgtagattattaactagctgggtctatatgccataaagtccattctgacctttttattttttcatgagacattgatcaatgaatggattgataggaccacaaggaaacgtgaagcatttgtgtgtgcaatactttttcctctaaaagaatgattacctgacagattctattgaatgccaaaatctaacataaattttattcttaaacaggtgcagcttaata

SEQ ID NO: 130182 - DNA, 1025 bp, Homo sapiens
gggcgagagagcaagactccgtctcaaaaaaaaaaaaaaaaaaaaaaaccagtttgtgtttctttcttaaaagaaggaaaatataaagaaacatatgcctggcagctttgaaagaaagagaatattcttctcttaacaaggcattccaaggcctggatgtggctctgttaatacagagaagtaacaccttgaggaaacaaagcgtgctacttcacccccaaatcacagcggtaattaccttcccgatgttcatttgggtaaaaatcatccttcattagatttacgttttctgatgttggaatactaaattaggtagttgtcttcctaataagtcaccttgggtattacctgtgcattctctattcagatcagtggtctgggaataaaacgtaggagggagaaggggggaattcgggaagttagatagcgttggtggcaagatggaggagccacaggactgttctgaatgatgccaccaaaatgttggtttcataaaaaacaggctaataaatcctcttaacaagaatttaccaacactgaagttcagctttactatgctctgcaagacgactgcgttaatttcctgaggctgccgtaacaaagttctacaaagtgggtggtttaaaataacagaaatgtattctctcacagttccagaggccagaagtccaaaacgaaggtgttaacagggctgtactccctcaaaaggtgctagggaagaatgcttctttgcctctttcagcctctagcagctcccggcattccttggtttgtggctgcaggattctaatctctgcctccatcttcacatgactttctcctggtctgggtcctcctcttctttctcttataaacacttgtcattgggcttagggcgcagctggataatgcaggatgatctcatctccagatccctaacttgactacatctgcaaagacccccctctggcacccaaactggagtgcagtggtgccatcacagctcactgcagcctcaccctccccggctcaagtgatcctcccat

SEQ ID NO: 130183 - DNA, 1035 bp, Homo sapiens
cccgcctcggcctcccaaagtgctgggattacaggtgtgagccaccgcgcctggcctgatagctattagttttaaacagccaaagcctggcgtggtggctcacacctgtaatccctgcactttgggaggccaaggcaggcagatcacttgaggtcaggaattctagaccagcctggccatcatggtgaaaccctgtctctgccaaaaatacaaaaattagcccggcgtgttggcgcatgtctgtaatcccagctagtcagaaggctgaggcaggataatcgcttgaattcaggaggtggaggctgcagtgagctgagatcacaccacttcattccagcctgggcaacagagtgatactctgtgtcaataaattaataaataaataaatagccaaaataatagatgtctgtgaacctggttagttcttctggagtcatacattcaagcaccagttggtctgcagaaatgccaggctcttacacatttggatttctggtgcaattcatctgtcactttttgacatgtggtcaattttatgataattgaagtttaagaggaatttgtagaaaataggtctttgtacttaaggtgtaaggaaataacacacaaatgaattttcccagttccagaagcttttatcatcaaaatttctggttattttagatggaaatttttctatatgtgtgtctcataactgttttccaagagagaccaagtctctcttttagggagtttcatttcacatcctgaaaaaatatgcatactagtgggtacagtgtgttggacttccaggcaaaagaaggcagagtgctgtacctaccaactgcatgccaagaatgaatgccttcctccttgacagacatgactgcctttgtttcagtcccagtcagggaaggagtctctggaatcagcacctcacagattccctcttcatggtattctggcctgacagctttgtcctcttctatacggtgacttctgacagatgcaatccactttcacagcacatgactgagcatacccaagcctgggcac

SEQ ID NO: 130184 - DNA, 1072 bp, Homo sapiens
ttcaagaaattctcccatctcagcctcctgagaagctgggattaaaggtgcacgatagcatgcctgactaatttttgtatttttagtagagatggggtttcaccatgttggccaggctggtctcgaactcctgacctcaggtgatccacctgccttggcctcccaaagtgctgggattacaggtgtgaaccactgcgcccagcctgcaatctgcttttttacaaactggacctccagataatctagccattgaagaaccactgttctaacatccagtgcttctcaaaactagccagaaggacacatcagtggagtcctttcggattaaggctactgatgatgaccaggagtgctctatggccttaaaacccaaggttcgtccataaggatgagcaacagtgaaatttaccccttagtttaattggttgtccagctcgtggaagttgactttttcttgtgttctgtatttctgttctctgcagaggttcacagcctccagcatactccgcacacacatcaggcagcactccggggagaagcccttcaaatgcaagtactgtggtaaatcttttgcatcccatgctgcccatgacagccatgtccggcgttcacacaaggaggatgatggctgctcatgcagcatctgtgggaaaatcttctcagatcaagaaacattctactcccacatgaagtttcatgaagactactagccctgccaggcacaatgactcacgcctgtaatcccagcactttgggaggcagaggtgggtggatcactcaagtccaggagttcgagaccagcctgggcaacatggtgaaatcctgtctctaccaaaaaaatacaaaaatcagctgggggtggtggcacatgcctgtggttccagccactcaggaggtcgaggtggcaggatggtttgagcacaggagacggaggttgctgtgagctgagatcgccccactgcttttcaacctgggtgacagaaccagaccctgtctcaaaacaaaacaaaacaaaaaaaatgagtagccctcaagagtgtggagacaatgtaaaaacaagagattcggattc

SEQ ID NO: 130185 - DNA, 1216 bp, Homo sapiens
gctggagaattgcttgagtccaggaagtggaggttgcagtgagccaagattgcaccactgcacactccagcctgggtgacagagtgagacactgtctcaaaaaaaaaaggagggggtggggaggcgtggtggctcaagcccgtaatcccagcactttgggaggctgaggtgggcaggtgcctggagatagggagttcgagaccatcctggccagcatggtgaaaccccatctctactaaaaatacaaaaattagctgggcatggtggcacgttcctgtaatcccagctacttgggaggctgaggcaggagaatcacttgaacccagaggcagaggttgcagtgagtcaagattgtgccactgcactccagcctgagtggcaaagtgaaactccgtctccaaaaaaaaaaaaaaaaaaaaatcactatttcatagtatttaagaacacaaacatggccaagtttcaaatcctgcctctggtgcttacctagctgtgccaccctgagcaagtccatgaactcctgttagtttccacattgataaactggggagaatagtctttaccaagttgttggataacatcagtaaagtatataaaactcttgtaacagtgcctggcataacataaaagtactactggaatgttaactgctattattactactttaatctgtgaaggatgctactgatgtaattttctataggagcattgcagaagcggcatctagtctatgttacacagaatacagagttgtaaaaacagagatgaatcatgtggttagaggttgctataatagaaacaataggttgaccacgctttagacatattacaccaaaatagctctatgctacccaatgtgcagttcgcggttaatcatatgtggctatttcaattagtaaagacgaagtaaagttgaaaaattccgttccctaggttgcattagccacattttaagtgctcaatggctccatgtggccattgatttccaagatggacagcgtgggtaatgaatattcccattattgcagcaagtcctgttggaaagcactggtatagattatgttttcagtcactgagtcatttacgctttttacagtaaagccgtaaaaggagtagaggctgtcctacagctacttctaagcctctcaaaaggaataaaacattgagtctaccagattagagcaactaatacctccaaagtgtgtgtcaatagaat

SEQ ID NO: 130186 - DNA, 1084 bp, Homo sapiens
aaattctcttgaccaggcacagtggctcacgcatgtaatcctagcactttgggaggccaagaggggctgatcacctgaggtcaggagttctagaccagcctggccaacatgatgaaaccctgtttctactaaaaatacaaaaattagccaggcgtggtagtgggcacctgtaatcccagctacttgggaggctgaggcaggagaatcgcttgaacctgggaggcagaggttgcagtgagccaagatcgtgccactgcactacagactgggcaatacagcaagattctgtctcaaaaaaagaaaattcctcttgaagtagccaaagaattcttggctaaaaataaataaataaataaatatcctcttgaaggaactagggagggaagtaactgaagagacattgtgtttgctgtgtttgacagagtctgcagaaggctacagatgtgaaagatgtgggaaggtatttacctacaaatattacagagataagcacctcaagtacaccccctgtgtggacaagggcgataggaaatttccctgttctctctgcaaacgatcctttgagaagcgggaccggcttcggatccacattcttcatgttcatgagaagcaccggcctcacaaggtgagtattaggaggacacatgacccaccatcacgttctctctcccttcccaagctcctgaacacggggagttgccttgtaggtgctagctgcagggctgtgatgcctgacggacaccctctctgaaggaggagaggatagtattacggaacaggcaggcgtgaataggcacagcgatgcacatgtgttaggatgcaggtacccacagagggaggaacatggaggaaggagtgtccacggccacctggacacgtggattatgaaagatgcacagaggtggccttgagccaagtatagaaggacaaatggggtgtctgatttatactggtggcagggttagttgggcaggaaagagtcgagctgttccagacaggagagagcctggcatgtgctcctggggaactgcgccttgttccaaatctgtgcaggtgtgttgacaggtataggtaagaaggaagt

SEQ ID NO: 130187 - DNA, 1023 bp, Homo sapiens
tataggaatttgggaagcaagaaagtgataaaagtaagaatcttttagaatatgtcacattaggcaggctcagtggcttacacctgtaattctagcactttaggaggccaaggtgggaggatcacttgaacccaggagtttgaggccagcctaggaaagagtgaggccctgtctctacaaaaaatttttttaaaaaaatttgccaggcgtgatggtgcatgcctttagttccagctactcagggggctaaggtgggaggatcatttgagcccaggaattcgaggctactgtgacctgtgattgagccactgcactccagtctgggcaacagagtgagactctgtctctgaaaaaaacaaacaaacccaatatgtgacattacctagagaggtgtccttaaactaacaaatctatgttggcataagtaaatttataaactacttgtaatgacataaaaatcagaatgatagaagtgtatttggtggactcaagtgtgatatttaggttacaagtattaaaaaatttattttatagattagaccaaaaaagaagtacaatacaaacttcatgtcttatttcatttagatctttgaagatggtcatttgagccactttatagatggaaaaggaggtacggggaactggatgtcctatgtcaactgtgcccgcttccccaaggagcagaacctagttgctgtgcagtgtcaagggcatatattttatgagagctgcaaagagatccatcagaaccaagagctccttgtgtggtatggagactgctatgagaaatttctggatattcctgtgagccttcaggtcacagagccggggaagcagccatctgggccctctgaaggtgagtgcacaccctcgccttgcccaatgagggcatcccagtagaaggactgggctcttttccacaaaccctccatgcacagctcctccctcctaaaggctaatgcagaggactaaccgagagtgtctctaaccaggggggaattacccaggtgaaggaaagcatcc

SEQ ID NO: 130188 - DNA, 2003 bp, Homo sapiens
aacgccatcctttcccggcggtgcgggggcgggaggactggcagtcgccgaggctcttcgctcccacctggccagggctcgtccacgcggctcccgaggggctaccccaggccccaatagtcctggtagaatgattggagtttccgaggaacccggggaatgtggcggacgctgcccgcgagggaaaagaggttcaggcggcgcatcctagggcagccaaaagtggcgcgcccctcccctgcgggcagtcaggaccgccaggacccgcggggtcacaccgctgggccagagcaggtcgcggggtccctggacctgcccgggggctctgggagcgcgtctccatctgcgcggtgcgacccagggtcctcggctcttccctcccagccgagggcccaggagcgcctggagctgtcgcttgctccattgccctccgaccgcctgcgctcggctcccggcccagccccgaggttggcagggccccgcggctcccacagaccctaccaacgagttttgtaggactgagaagaaggaaggaaagggaacttcaatgggttttgcaggaaccgggttgggggccgaaagcggagagcgggtgtgggaaggcggccgggcttagggaaggggtgcttggagagggaaggggaaggcaacactaacccggaatttagagtagggcaggatcccggcagatttccgtttggggcttttttgtgtttgcttctattgctgttttttcgttttgtcttaattgtgggagcgggctggcgggatcggactgggggcgtttatcctgttcccttggatctggggctggctggggtggaggaggctggtggggaggcgcgggtcggaccccgggaagctcccgcgcggtgtcctcagcggcgcccgcttttctgcagagccgccgagcgtgcggtcccgggatggctctaccccggccaagtgaggccgtgcctcaggacaaggtgtgctacccgccggagagcagcccgcagaacctggccgcgtactacacgcctttcccgtcctatggacactacagaaacagcctggccaccgtggaggaagacttccaacctttccggcagctggaggccgcagcgtctgctgcccccgccatgccccccttccccttccggatggcgcctcccttgctgagcccgggtctgggcctacagagggagcctctctacgatctgccctggtacagcaagctgccaccgtggtacccaattccccacgtccccagggaagtgccgcccttcctgagcagcagccacgagtacgcgggtgccagcagtgaagatctgggccaccaaatcattggtggcgacaacgagagtggcccgtgttgtggacctgacactttaattccaccgccccctgcggatgcttctctgttacctgaggggctgaggacctcccagttattaccttgctcacccagcaagcagtcagaggatggtcccaaaccctccaaccaagaagggaagtcccctgctcggttccagttcacggaggaggacctgcacttcgttctgtacggggtcactcccagcctggagcacccagccagcctgcaccatgcgatttcaggcctcctggtccccccagacagctctggtaaagggagttcacaccatttgggagtcgaattggacgggaatgcaggcgggaacgggagtgtccgggaagaggcgcttccaggtggagctgaggctgcagagtgcgggaagggggaagtacctccatgagagccagggctgttctaggctcacttctgaggccctgcttgcttaactgcatgactaaggttggttttagtgagagctgaggaccaagagagaaatggttcctgcagcgaactcccaggtaggttcagattctatgctaacatgcaatgacagccttcagcagttcacacctaacagtcccagctcagctagctacgctgaccttagtcaggcattacctctgatcctcaaattccttgaatttgc

SEQ ID NO: 130189 - DNA, 2290 bp, Homo sapiens
tcatccatttgcagacgatggcctgcgagaaatagcatgtaggattcgctgggctcctccttggctcctggaagcgttgtgtggagggaggaatggcgccctctgcctgttcacctccacatcgaatgtactcatccagatgcggcctctgtgatttgctttattgaaaacagtcaggaattttgatgtttttgtggtgggctttatgatgtttttttcaaaacctcaaagatgtttcacaactttttatctgttttcctacagaaatattgctgacactgctgaagccagttgcttcttcagctgaccgggctcacttgctcaaaacacttccagtctggagagctgtgtctatttgtttcaacccaactgacctgccagccggttctgctagagcagacaggcctggccctggttcccagggtggcgtccactcggctgtggcaggaggagctgcctcttctcttgacagtctgaagctcgcatccagacagtcgctcagtctgttcactgcattcaccttagtgcaacttagatctctcctgcaaaagtaaatgttgacaggcaaatttcatacccatgtcagattgaatgtatttaaatgtatgtatttaaggagaaccatgctcttgttctgttcctgttcggttccagacactggtttcttgctttgttttccctggctaacagtctagtgcaaaagattaagattttatctgggggaaagaaaagaattttttaaaaaattaaactaaagatgttttaagctaaagcctgaatttgggatggaagcaggacagacaccgtggacagcgctgtatttacagacacacccagtgcgtgaagaccaacaaagtcacagtcgtatctctagaaagctctaaagaccatgttggaaagagtctccagttactgaacagatgaaaaggagcctgtgagagggctgttaacattagcaaatattttttccttgttttttctttgttaaaaccaaactggttcacctgaatcatgaattgagaagaaataattttcatttctaaattaagtcccttttagtttgatcagacagcttgaatcagcatctcttcttccctgtcagcctgactcttcccttcccctctctcattccccatactccctattttcattccttttttaaaaaataatataagctacagaaaccaggtaagccctttatttccttaaatgttttgccagccacttaccaattgctaagtattgaatttcagaaaaaaaaaatgcatttactggcaaggagaagagcaaagttaaggcttgataccaatcgagctaaggatacctgctttggaagcatgtttattctgttccccagcaactctggcctccaaaatgggagaaaacgccagtgtgtttaaattgatagcagatatcacgacagatttaacctctgccatgtgttttttattttgttttttagcagtgctgactaagccgaagttttgtaaggtacataaaatccaatttatatgtaaacaagcaataatttaagttgagaacttatgtgttttaattgtataatttttgtgaggtatacatattgtggaattgactcaaaaatgaggtacttcagtattaaattagatatcttcatagcaatgtctcctaaaggtgttttgtaaaggatatcaatgccttgattagacctaatttgtagacttaagactttttattttctaaaccttgtgattctgcttataagtcatttatctaatctatatgatatgcagccgctgtaggaaccaattcttgatttttatatgtttatattctttcttaatgaaccttagaaagactacatgttactaagcaggccacttttatggttgtttttcttgcccactctggtaggggaaaaatcttttattaataggtgtcagtttcagacaactccaataccaagaaactgatgaccttttttgagctatttctccttaacccctaatacctttcttacctaaatttcagaatgatatctttttgatgtctaaaaagcaaagcattttataatatctcattagccaggctttttaggaacagagaagtttttccttgaaatttgattgtttgtttatttgtggcagggtgaaaaatgtacaaactacccctatttatacttatatctctctctatatgtacgcattatggaaatataggaagagatatagcccaaagatagatggtaagtagacagtctgaaaatgttgctccatactaaagaacctttctggaaatttgcatttcgcta

SEQ ID NO: 130190 - DNA, 1026 bp, Homo sapiens
ccaatgtgaacttgactctgaggcctggagtaccaacacaggtaaggcaacataccagccattagctttcattgtatgcatgcagctgcttttgtcatttcttcctctctgaagaaagttaacttagtagacgtggatccagatcagcacactagccctgtactgtcatctagttacctactagtgtgttatatttttcccttctaatcactgccatttttattgccaggtacagtcaattcttgttattctaagaagttgtgctacataaagttactgcaaacactgaattagagaacagccaactatcgttcctaggaggaatacagggttgggttcctgcagacctctggtcacaacattgtcatcatccagtcaacacataaccttgttttatgtgtgtttctgtttaaagaactcactgtaactcaggcctgaatggcgcttatctagcacacctgttttctccagaaggcacatcaccgcctcttgcacttaggaacactagagagcactgcagcaccatgcctgggagccagtttaagcagcaaaatcaccaacaggaaaagcaaaaaatgcaaaaatcttggcaccaaatagatcacagaggacactagtttacagtatgagagctgaaaccagaaggcaaagtgttgccttgttcaacctctgctggaagtgtgcacattgcatatctgaaatgttttaccactgtgctcatgtctacgaatgactgtgacagtggcatgtgtattgatttgggggttacaaataaattttactgagtaggcaacttcagaaatgtggaattcataaatgaggatcaacgatatcttagcagcctcatgcctctcactgacagcaagcactgggatcccttcccttcatccatcctgcctttcctccctctccaccctccacctctgactcggtctctgtgcgttcttatcaggcactctcctcgctctccccttttcctcctgcctctgctcagccttttgtgaagtgcaccacgtcaccttttgt

SEQ ID NO: 130191 - DNA, 1068 bp, Homo sapiens
tggaccaaagtcatagtctattcataattaattggaaatatatattcttataattaattgaatgataagcataaaataaaggagaatttataaattgccaataaatcacaatgctggaagagagctttctttcttattcagccatctctttttatagatgaggaaattgaggaccaagagattaaattatttgtcctttgttaacctaattttttaaaagatgatcaattatctgttaggcctgtggtatgcaggaatctacctattttatttggctgtggtgccttatggcagttaggtcagtgattgcaaatgggcttgtggtgtctactcttagagtagactggataaactcttctgtttgtcaactacagcctggcagtgagctggacaacttggaggagattttggatgatttgcagaatagtcaattaccacagcttttcccagacacgaggccaggcgcccctgctggatcagttgacaagcaagccatcatcaatgacctcatgcaactcacagctgaaaacagccctgtcacacctgttggagcccagaaaacagcactgcgaatttcacagagcagtgagtatgagaaatggctggttatgccaagaaatttccatataatcactatcagaaacagggattattgaagtctgatgcaaccagcttagtcactttaaggtttttgtgatcaaatagcaccatctactgtcctggtcttttgaaacagtattcaaaatggatcctcctgagcatggttctctcacattctcttgtgggttaatttaatcagcactggacagggagactgacctacattgatgaagttcttcaactgattgtcatatttcccttcatttcagtgactgccttcagacatggagtttatcctggattttatgtgtttaatagacaatgaaatactgaaatatataacatttgggagctatgctgactttttagggataatacactatttaaaaatattctaccctcccaaactgctcagctggtagtaacaaaaaataaatttaaaaaaaaataataaaatattctactaaa

SEQ ID NO: 130192 - DNA, 1002 bp, Homo sapiens
tgaccctcagtagcaatataaattttcccataaatggcccaaaggaacaaatgggcatgcccatgggcaggtttggtggttctgggggaatgaaccatgtgtcaggcatgcaagcaaccactcctcagggtagtaactatgcactcaaaatgaacagcccctcacaaagcagccctggcatgaatccaggacagcccacctccatgctttcaccaaggcatcgcatgagccctggagtggctggcagccctcgaatcccacccagtcagttttcccctgcaggaagcttgcattcccctgtgggagtttgcagcagcacaggaaatagccatagttataccaacagctccctcaatgcacttcaggccctcagcgaggggcacggggtctcattagggtcatcgttggcttcaccagacctaaaaatgggcaatttgcaaaactccccagttaatatgaatcctcccccactcagcaagatgggaagcttggactcaaaagactgttttggactatatggggagccctctgaaggtacaactggacaagcagagagcagctgccatcctggagagcaaaaggaaacaaatgaccccaacctgcccccggccgtgagcagtgagagagctgacgggcagagcagactgcatgacagcaaagggcagaccaaactcctgcagctgctgaccaccaaatctgatcagatggagccctcgcccttagccagctctttgtcggatacaaacaaagactccacaggtagcttgcctggttctgggtctacacatggaacctcgctcaaggagaagcataaaattttgcacagactcttgcaggacagcagttcccctgtggacttggccaagttaacagcagaagccacaggcaaagacctgagccaggagtccagcagcacagctcctggatcagaagtgactattaaacaagagccggtgagccccaagaagaaagagaatgcactacttcgctatttgctagata

SEQ ID NO: 130193 - DNA, 1063 bp, Homo sapiens
aaaccaattccagtgttgctaagatttgcacttttattgtttcagttttgtttagcctttttttctctgaatagattcttctgattgtttatcttttacttcctgttgtcctaaccacataaataatacttcttacacagtgagaaacaggactgggggagagtagtgtgtgagatgatggattgaacagtacgtaatttctagatgaatattcagagaacatattaaatgtcataaattttattttcatatttgtattagttttacaaggaaattaaagtcatattgtatacgtaagagataccctgtttatacattgtgttgttttctaccattttaagcaaatcattataaagcttgtttgagcagttaaatggtttacactgttttgccataataataaagattttaagaacacagtttgagggtccaggctcttactccttttcataaggaaaacagataattgaggttattggtattttcagtgaaaagtaaatgtgcttttaaaatgttatgtttcaatctcataaagtattacttataactctttacatgctggtgggaaactattatgaaacttaatgaagttgattactcttattatgtcttgtcctccccgacccctcaatttttttttctaaacgtgccttctgtttccttgcttgcctgcagtactgagacaaggattggcattcagtcaaatctatcgtttttccttgtctgatggcactcttgttgctgcacaaacgaagagcaaactcatccgttctcagactactaatgaacctcaacttgtaatatctttacatatgcttcacaggtaatcctagttctaagaagtcattttccatttccaagttaagaggagatattacaaaagcagcaaattattttagagctttgaggatttgttagacatttcttctcatcaatcccagtaatgtaaaatataaaattaaattgttattagctgttggctaaaagacaattcataatataattggccctctgtatccatggcttctgcatcccaggagtcaaccaaccacagatggaaaat

SEQ ID NO: 130194 - DNA, 1268 bp, Homo sapiens
ttttaaatggaaagggctgtgcagagtactctgcatgttacaaagataaataaaacttttccctttcctccagaaatgaaccctgacgcataagacagttgaagcaaggtgaggattaagtgattagaattggctgtgtgagaaaccgtccacagccaagattctgaactataatgcagctgttctggtgcacgctgcattttctaggtattgtgggagtcgttctctgaatctgcgtctagacccagtttatattctttgctttaaattgcatgttgccattgtagtatttacttagtttggcataaggtgtacctagttttcctgaaccctaaaactcaagaagcaaacccttgacaaaacaagagtatcatattttagtttcatcatttttgtacttcattacaaattaacctggttttctatcagccatttaaaaagaaaggatttcatttttttttctactgctggagagagggtttcagattattaacgttttagtgtagtcgatgtatttccatcacatgtatcgcggggacttggcagtttatcctttgctccccagctctccttacacagccaccctccgtctcccttacccacctaccactttcatgaagagaataaaaccagtaggaagctcaggtacatagtgtttcatcactgtctcccttactgcttttttaatgacaggctgtgctgtcataaatacacttgggtttgtttgaatcactagaaaagcccaatatgataaatgtaaacatgtgtggtttaagatttgcagtcctgcttgatttgcgtggcaagaagagttcccatgaaggaaagaccagttcttccctcatcagaaagttttactactcgccaggatctccaaggtaaatttcctctccaaagaagaccaaaggaatcattttagaatacttacatatttgggaatgcaaggactctatttagaagactgtaaggatgctagtactagcaattgctgctgcagtagaaatgtcaaggagttggaggaccggagagagagccactggctctcactgtatacccttttgttccatgtacttatgttacctagtttaaataaatacatttaaatcttgttaaaatttaattgtttctggctgggcacggtggctcacacctgtaaccccaacactttgggtggctgaggcaggaggatcacttgaggtcaggagttcaaagccagcctggccaacatggcaaaacctcatctgtattaaaaatacaaaaattagcca

SEQ ID NO: 130195 - DNA, 1048 bp, Homo sapiens
gagatgaatgaggagagaactagccagatggaaacctggataacttcaaaaaggaagaagatcccataaaagagattgaaaaagaataattatgtaagaggaggacctatagattgttgtgtcatgaaagccacaaaatggagaggttaaaggaggaaccacggaaggggtgtgatttttaactgtggtaaacacagcagaaagtttggtaacaacatacagtatgcccaaattgctgtaggttggcatttgaatgtcatggaagactagggagggcagatttaatggggtaatatgggaagagatacaatatctttgggtcatagagtgagtggaagggaataggagaataatctacatgcctgtattcccttatttgaatctcaaaattcagcacactgaaaatggaaaggtgttttgtaattcatttggcagtaaaacctgacctgaatggatgtgagatgatttataatcatttgtttcatttagtgtgaatattcatacatttcactgcagaaataatactgaatttgattatagaatgcttctgtagacccttctggggttataatgaaatatggtatatgacacgtattatctttttttttttaaacggagtctcactctgtcacccaggctggagtgtagtggtgcgatctcagctcactgcaacctccgcctcctgggttcaagcgattctcctgcctcagcctcctgagtagcttgggagtacaggcggacaccaccatgcccagctaatttttgtatttttagtagagatgggatttcaccatgttggccaggatggtcttgatctcttgaccttgtgatctgcccgccttggcctcccaaagtgctgggattacaggcatgagctaccgcgcctggccgacatgtattatctttctagaatgaaatatatatatatgtatatctacgcacgtgtgtgtgtgtgtgtgtgtgtaaattctaaatcatatggtccccagtgtttggggataaaggaatcccagacctttgtattctttagacaggtctggatgtgaag

SEQ ID NO: 130196 - DNA, 1042 bp, Homo sapiens
cagaaaaggctattatctcaatgaaaaggaaaccgggttttagagcaagcaatagaatagaagcaggaagaattttcgagtgttccaccatgctggattgtcaaagggggatctgtctgatcagcagctaaaaaaggatttgtgtggctagtttgtcagctatcgttagaaacaaatgatagaggagataagcggcggggtgctcagcatgtgcttaggtttacatcaagatgtaatgttggtttgggttaacagaggagatttatctctgaggcaataaatttattgctaattgtgggggtttttgttttgatgagtgatgtatggtatttgtatttacatcactggtgaagataaagagaagctgctgagctctaatatgaactgcagaagctgtggacagttacaaggtgtgtttcagaagtgctctgacttaatatttggtaatgttcttggaattctgtgtgcttgtggattggatgtgcggtgcgttgtagaagggagaactgagcgtgacaaccaggcagtgataatgttctcaggaacacatagatacagtgtgacccaaattgattccgtggtccttatttcttttgtgtttgtgtagtgtttttaaaatattccttgtagtttctttatgtagccaaatacagtgtcacgcttgtttgtaggaaatattttggtaagcattttctaaaattcaggaggagaatcttaattttttagatgcaaatcttaattattaaggaataaatataactataagctttatctttctacctttatactttttatccttttctaatttcaagcttaaaggggagctttgtgataaatttgaaattatttaatttttgattacatgataagtacagcttttatttttggtggaggccttgattcagtgatttttttgttgttgttatatatagtacctaactttctcagattgatcttatgctactgtatgcagagagctaaataacatacagttaatcttcagactgtacttgtctgcttttgctcatgttaatgctattaa

SEQ ID NO: 130197 - DNA, 1038 bp, Homo sapiens
tcttctttccattagcagaggttctactggatcttctttgtgtgtgattcatcgttatgcctaatctgcccccgactctcaccttggtgctggggtggcaagcatgcttcaatctctggtgccagttcctattgattatagtgattgtgtggagtgctgtgttgaggagaattgagaggccacatacaggcttaaaagtgatttaattggcaatgtctgctgtgtgaggggagaggaggtaaccacagcatatgtgttgtgtatgtgccgaacgtgatagattccacgatagggctcacccttgagagattcaaagtcacattttgtgtctgtgtatttttgtctttgaattggtatgtacatattactgtattacacagtaaaatataaataaactgggaattatcggttagcttgggttatatagaattacctatgtatgcttttcatggcttgcttaaagcgtggatctaaattattattctttcatttctgaaataaaattacctatacttttctacactttttgtgagtttctcttgtttagttgatacatgattctgatctcctgttttttaagtttggcaaaaaatacttttaaattcttgggtaatttcacttaccaaactactgacaaattaacatgagttgcttgaaaccttgggcacacaacaggtggttgtgacagactcgggggttccaatcattgtagaacagaccagagatctctttccttaaggaatggtcatgtgtctgttgccacttggcttctctccttatgggtcagaggtaatcctcagtttaaccattgaggtataaaagtattttttaaattttattttgttttccttcttgtgaatcaaagtctttcctaatttggcagctgacaaagaatactctttcattgagttagaatgttgaaagtataagcaaaaatttgagaggcactttttacatttgctaagtaaagaaatatttatattagacttttcaaaaaagtatgataaaatatacataaaattgacccttttaaccatt

SEQ ID NO: 130198 - DNA, 1067 bp, Homo sapiens
cagtgatctgtctgcataaaaatgccaggccaagtcaaagaatactgcacacagtatgagtttggttggaacgtgcaccatacagctaggggaatatttgatggacagagctagggaactgggtagattgcagaggcccctgaatgccaggtcactgttttgatttcacagagagtaagaaaaagagaagtgacatttattgagttcctactatatgttaagaactatgttagatggttaatataatcatgtttaatcctcaaatcagtactgtacagtaatttctatctccatgttacacatgagggaattgtaacctaataacttggtgctaattataggatagattgagtaagggagagacctggcatgagaagaagttattggtggtggggttactgaagagaaagaaatcttgataattgtagagggattggaaagaaggtgatgtgatgaagagaaactgcaaaagtagaatctaaaggtcttggaaattgattggatttgaagattgagagaaaaaaggagttaaaaatatttgctggtgacttatgaaaagtagcagatacagatttcctatctcccctctcctggggaaaaaaaaatagcagataaagaaaaacttcctcagaaaggtgaggagttcaattttgggtacatttagggagatacgtttatgagagcttgaaagttgggcacggtagtagctaaggtgatatcctgaagctacaaatgaaaattgggtctcatttacatgaatatgatctttgatactgcatcagcagacaagatttcaaggagcagctttgtagtgagaagaaagggcaaggatgttattcaagaaatgcccattgggcattacaggtggttcacacctgtaatcccagcactttgggaggccgaggctggcggatcacttgagctcatgagttaaagaccagcctgggcaacatgatgaaatcctatctgtacaaaaaatataaaaaattagccgagcatggtggtgtgcctctgatcccagctactggggagactgaggtgggagggtcacttgagcctagaaggcg

SEQ ID NO: 130199 - DNA, 1017 bp, Homo sapiens
cccaggctggagtgcagtggtgagatcactgctcactgcagcctcgacctccctggctcaagtgattctcccaccgcagcctccccagtagctgggactacaggcatgcgccaggataaaatttaaaaatgagcctggctaatttttaacagttgaggtctatgttgcccaagctggtaattttttaaataaatgaaacatttttactggttgccgttagtcaattaaagtagtatgtgttgaatctggcaaaattcataattaggtttcagtaaatgtgtgttatatgtatttttaaaatctctgataacctaaagtatccttaagctaccagatggaaaatttaagtttcaacataggcacatctatgaatttttcttactgttgatgaatttaggttgacttgccttaagtcggaatgcaaacatgtatattttgtatattgattgaagttgttagtttgtcttagtgaaaaattggaagtgctccttaatgaaaattaacatttaagttgaagccacaactttgttccatattttttcttcctgtatttattagcttagtgctaccatcattgttttgactatactaagcactagaaagatgccagtgtgtgtgctgtagaaaaaagtttgcactcccatgactgtggatcccgactgacattcttttttctttttttaatttaaattaaattttttttagagatagagtctcaccgtgttgcccaggctggtcttgaactcctggtccttatcccagatttgaacccctgaactcttagcctcccaaagcagtgggattataggtgtgagccactgcacctaggccctccatcactattcttttatggcaagtatgcttgcagttgtcacaagaaggtcctgcccacgtttgctttagaatatgtgaattcaacttgaaatattatgctgctattaaaaattatattgtcaaaggctgaaccaacaaggaaaaatacttccatggtactggtaggtagaaatggtaggattt

SEQ ID NO: 130200 - DNA, 1066 bp, Homo sapiens
tttacatctttaaagagaatttttatttaggaaattaacattcagcctaatgttatatctaacatggtgtccttttgtacaattgtatcaaataaagaatagaaactatattatggtttctagtgatgccctaaccactagtgtttcatttttctggtgttccctcttacgtgcacaccccttgctcccctttgggttgacttataatctgacttttgtgacagatgttaggaggtggagcaaaggaatttcagaccaatcagttaagagactgctgtggggtaagaaaaaaaaattagcctcttaaaattactcttatcaaaggaaaaaaagttggaagcacatgatagtataaccagaaacatgacacagaagaattaagggaagagtagaggagacacgtagataagttagatagttactgctgagaaggttttttaggtgggggtaggggtttcatgttgaagcctgtgctttgctttgagtgaatctggcttaatttctgtaaacatccctccttctaggatgaatcaatgcattttagccatgtctatacctgtagcagaatactggtgatgaaagtttacaggcagtttaaaaaaagaagaagaaaaagtgaaaaaccttgatgtttcaaggatcccacagtttctgccaagtttgaacacattccaaaatcctaaaaaagtgtgtacttttgaagctttatttttcaagtgtttgtatgtacatttctgtaagttggaaatcagtcaacaataaatacgtactttaaaatatttcttttactttggtaattacacatgtgtgaagaattcctacaatttttcaatctctttattcaatttactgggatatctgtacagtttttcctatggaaagtaatttcagtggagagatttagctaggaacttcattaggcagcctgtgtgattcaggagcaaaggaatagcctgttagtttaatgtgtagaaggttgtgtttgcaaacatgtgggttgagggcaagtatgtaggcacaagctgtcagaagcaaatgatggatctggtggctctggtttgctaag

SEQ ID NO: 130201 - DNA, 1620 bp, Homo sapiens
tagaggagggcaatactggaggctgaggcgggtttagcctgtggaagtgatccagatgagatgtgaactgaggggtagtggcagaggggatgaagataagcggattctaggaagtgactgacttctaagggaaggaggagtcaccccaggtcttacaaaagacctggtttggtctcctgtggatatccaggctccctatgatccacatcatcccattaccataaactagttagtagactttctatattgatggaacgtgaatatgagaatgttcatagcagcattagtcataatagtcccaaaataaaaacagtccaaacatccatcagctgatgaatggataagtaaaacttgctatatacttcagtggaatattatttggcaataaaaagaagtgaaatactgatacatgctacaaaatggatgagccctgaaagcattaaatttagtgaaagaagccagtcataaaggccatatattgtatgattccatttatatgaaatgtccagaataggcaatgctgtagagatagaaggtagattaatggttgcctagggctgggattggagagtgggagaaaatgggagtgagtgctaatggatatagggtttctttttatagtgttaataatgttctaaaattgattgtggtattggttgcacaactctgaatatactaaaaactattgtacattttatttaaattgatgaattgtatggcatgtaaattatatatcattaaagctattataaagatatgaatatgggagtaaagtctagaaaacagaaaactggctggtagaatcaggcatatggaatacatcaaaaacgacagtggggaaatagcaaaaaactggaaaaaatttaaatgtctaacagaaggatggataaattgtagtgtattcattttttaaaaaatgacagtgagtaccctgataattaagaaattcacataaaagtatgaatagtgtataaacgtgacctaaaaatagcatttgtgggaacatttagtttagaagtaatttttttttactcaactgtctggcccttaatactgctattaacattaccaaagaacaccatttaggaaggtaaagaaaccatgtactttagcaaagattttattttaaaatgtagggattttatttttaaaaaagtttcaggattagtttcatttaaccgaaagatatagctacatctttagaacatctttacagaagaaccagtaaatattttctcatctgaattgtgagtttcttaaggttagggtaaatagagaaaagaagagattattacttggaaaaacagaaaaggcaagagatagtagtaatgtatagtaaagtttcagaaggaaattggacagttaaggatcactcaagctttagtgacttctgtcatttgtgctttattgcagaaatgttatacagaccatttttgggcatttgtctcattttgtttttgcgtaatcactgaagcaattaggaaaaaaaacaaaaacgcctgctttagatgaagaacccgagggaaaaaaaattaaagagcttgcccatggttgggactggggaatgaaggataaaacacaaggtggagaaatctaggttctgcttaaatggggtcttag

SEQ ID NO: 130202 - DNA, 1065 bp, Homo sapiens
agcttccatagccaggatgcagatgtgtacaccacatcttcccagccctctgccttcccctgcagatgcccattatctcgtgtgacatgctctccacagagctcacactggcctcccattcttaagatcgtgtatgagtgggaagccctcaacgatgttatgcaaagtcattcttttggaaaaagagcctggaagtaaggggtagaatggatttctatgaggcataactaactagtaggaaaaagccccaaagctgcttggtgtagatcctatgcttgactccaattttctgattattcttggtcatatcgttctttctactgtactataccagtcactgaggacacagatgatgtctcaatttcagtatcttctcctgtcaccaagaaatctagtttagattaacactcaattttgtaacatttcatgaacactatattcagaaaaactggttctatcctatttactccacccatagggaagtagttggtatattgtgtatgggtcagtatttctatatcttacatgaaatttggaagaattctatacaaccaaacctgacccttcaatttcagcaaattgatttctgagaaaacagatgaattttgatttatcttacgtctctaaggatgaaagcaacagaattgcgatcgcccctcagttggtccaattctgtgctgtcttttatcattttccccattataggttgaaagcttcagatgtcacaatttcccagggtcttaggattctaccctggctctggcagcctaccttcattgttttacccaccaaaggaaatggtagaaactcagctctgaggcaaggggttatggcttctactaaggtatccctaagaatagggcatatgctttgtctgagctttaaactatataaatggtgatgcagaatggcagatgcttgaaaggtaggtatagtctcttaatgcctaaggtagactaacacaagaagatagattcttgatgtgtgtagtcatggactccttggctgcaagtgtagaaatgcaactcaaaccagtataagcaaacctggaacttattacctttt

SEQ ID NO: 130203 - DNA, 1040 bp, Homo sapiens
gccatcaggatttttcatttatagaaggaattaagtctgacctttaagaattattgaaagtaaaattttagggattatacagctgtttctgattcacatctattttacaagtgcaatttgcagagattctactgataatactaataacaactattacttattgctcttttactgtatgctaggcattatgtaagtgccttttggttgtcttcaaaataacagataaggaagttgaagctcagagaggttaaatgacttttccaaggtcatatcaagtaagaggcagtttgccactccaaagaccttgaccttaaccactgagctccattttctgcctaaatacccctagtacaagaatatttgtgacaacaattgtagtacatgaaaatcatattcatatttgaagacttcaaaattaatttaaaagccaaacattatttcacttatatttcattaggagaccttaacttgtaattgttattccaaactgaaacatgacgactcatttgaaatgtaatgattacctaaactatttaagttctactctgagactttgattttatactcacagattatgggtaggggcatgggggacagctattctaattcctttttctgttgtaaacatgatatgctattaatatgaatcagcattctttctctcatgcaatattagaaattttagattgtaagtggcatctgtggttcattggataaatcacttttcttgcaaagaacagattgtttgaaatatagtgactatagaattacttagaacctttatcttgaaaaatttgatagtttgtatctctgggaaaaatactttaactattgaagaaatgaagtttagtatatagccttgcagtatatcaggagttggttcagatagaactttagcttctcttacttagtttattttcaaagctgagtaggacatactatgtaaaaatataattattatattttgggtcttaaatttataaagtggacaaaatgttctgaaggacaactttgttgaatataccttaagattttgattt

SEQ ID NO: 130204 - DNA, 1005 bp, Homo sapiens
attaatgcatattacttgtgtattgatggcaattaacaagtattactttgaaaatcggttataaaaatcacatctgctctaaggaatcttaggattctgcagattttattcacgtttatttgtttgtttatattacagatttctcttggatttggctacacacttatagatcttctgcactgtttacaggcacaggtgagttaacgttgaattcttcatattggatactttgatatttaattaaaattttaaaattctttatatagtttaggaaaatatgtaaataagatgattttaaataaaaacaataaactgtatatttgtctatatttcatttttattatgaaagttccttacaaatgtattggaaataacatttaaaggtaaaatgctcatatctgtttatcagtggttactatatctatttgggatgagtttacattatacccattggatgagttgattacagtttattctaatttcatagcctgacaaaatgtttattatatttatttttatatgtaaaaatttgagtggtggtatttctcatttcttagcaaactagcataaaagaggagaaaagaaaagttactacagattttagcagcaaatctcagacttacaggggtagatgttataaaatgcaatgagccaacctttcttgtccaacctgtgtaaaatagcttctcaagcactccgtatcacacagctgaaattgatttttatcacaatatttatgatcatgtgatatatttttacttactctttacaactttccctgctagcttcatgaacatcgggaccatttctatcttgttcaaaacagcatccctaacacttaggatggtgcctggtatacagtaaagactaaataaacgtttgttaaagtaattatcgggtaataaacattaagaatatatttatattcagagacactgaactttgtaaatacaaatagaaatagtttattaagcttatttcattttttgtttttgagatggaatc

SEQ ID NO: 130205 - DNA, 1045 bp, Homo sapiens
ccacccgcctcagcctcccagagtgctgggattacaggtgtgaaccaccgcgcccggctaacatctttctttagcatgggtgcattgacacttttgcctcatgttatggtagcttattaataaaagcttactgaatagtatagagccaacagtaatcatttaatataattcctactaatatcacaagtttcagctcctgattgttgcataatatgatgtccttgagcaaattagttgttggtatagaattataacgggcttaagtaggccagcataatgaatacatttatcccagtagtgttagaaagagttgatgactcctattacttaagtttattgcacactattcactgactgccacttgagtggaatccattcattttatttactgtgataacttcttatttgcatatagattctttttgtttgtttttcatgaagtatctctgactaatacactagctgcatttcattatatatgatgagttcaagactggccaggtcttggtaaaaatcaaaatgccatctttttctgtttctctcccctgtagaccttttagattatgaaatcagatgtttctagtgtccaagaaaaatagtaattttgatattaaattgatgttaacttgtttgtgctattggattctatttactgttttaacgagtaaagggctcttaaaggaattagtaatgttttaagttttgataatccaaattgtaaattcttactgatggatgtcatttgaaggaagaaaaatctagtagcttagttataaaaacattccttggagctgattaaatctagtagtgtttaatgttttttaaaaattattcttaaaaagagatacattttcagtatcgttactagtagcaatcaagccacttttcttgagtccataaaatatacaaaagcagtaaatattaatatacataaaatgccgtaagcacatacttcttgttttcatattcctcattgtgtttcttgggaacaaacttaattggtgcagtggaaggatcagacgaaaagctgcaggctcatttacag

SEQ ID NO: 130206 - DNA, 1602 bp, Homo sapiens
ccacgtttggaaacagtacctaatatcttgtctcttggaacaagtcccaaggatagcaaaatcttcttggaatgagtaagaaagggttattaattttcttttaaaggttgttgatctatagagtttatcctatatgagtacctttttttttttggggttggacaccatggctcgtgagcttttgggaggccaaggcgggtggattgcttgaggcaggagtttgagaccagccttgacaacatagtgagaaccctgtctttacagaaaataaattaaaaattagctgggtgcagtggcacgtgcctacagtcccagcaacctgggaggctgaggcaggaggatcacttgcgcccaataagtttgagattgcagcgagctttggtcacatcactgcactgcagcctgagtgacagagcgagaccttgtctcaaaaataaacctaaaaaaaacaaagatattaatacaacttttttatatcctctggcacctggtacttgatgagttcatgaggaactagagaatgaatgaatgaaatttgcactgcattttggtcacaaattgacaagatgtctccatatactttagggattagatagcatatattgataagatggagaaaatagagatatttggagtagaataatcaccagcttacttagtatattttatcctaacatgtgtatcctaggcatatacatgtcagtcttgaaaaatgaagtcctttattaagacggattttcagagggagagaaaaactagtagcagaaccagttaaggtggtatgtgggaccagtaatgggtaggggaagggctgggcctgggaaatgggaccccagactgttcagggaagcatgttcatccccactgaagattaggactgtcctggaaataccatgttaacctaccatatggtattggatagttgtgtttgtatatacatattattctttaaattttggatctttttgggagttcattttaaaaactattttttttctagaaaaccagaaaattagcacataggctcataccaggtgtcagaaaggttattggagatagttgggtagatagtatttattgagtgagacaatgttataatcatataatcagtagtctgatttacacatcgtttatggtaataagtatccccaggcaataatctcccccccttcaataattagcaaaggacttaatgtatcaaataattattttttaaaaaaattttgttaaatttccagattaggctgttagcacccttaatatcaatgacctttttgaagtttgctaattttttttcctacctcagataaatctgcttttcactgtcagcattacttatgtttcatcctgtgttcgtgtgctttctcgctgttgctacattcaacatccaaattgtaatttatatttataactgcctctcatctaattatattctttctcgtttttaaaacacagcaaaatcaactttagctagccattatactaaaacatactacattttcttttaaacttcttttagtttgtttcctctagatggtaaactctactcaggcagggattatgtttgattattgatgtgaatgcaactttttagaacatagc

SEQ ID NO: 130207 - DNA, 1079 bp, Homo sapiens
actgcacttcagcctgggtgacagagggaggccttgtctcaaaaaaacaaaaacaaacacatgtttacggatggtttaggtttcttcaaatatcttaaggtggttggttttcctaaagaggtttctttaatggtgatagactgtcactgtgctatgactttaagctagattgcagtagttacttttttaaaaagaaatgtttttaaagtaaaacttgagtttgcattaatagtttggctctaacaacctaatattttcaaattaggaaaaatttgaagctctcacaagtaattcagcattaaatatgagaatgtactaaagcatagggtggattgaggcactgtatgttatgctactactaaggtagtagcaaaataagctcttatgggtgttatctgctgccaggatggccagattgaatcagaaacaaagtcaagatttcagctggtcaacctgttttatttaggacaatgtttggcaaattggagagtgtgacctgtaagtgggttgtaaaattaatttagtggatcacgaccagtgttaagaaaactgtaatagaagagaatagaaaagatgacagtatgttacatgcagtaacggtaattacttgtttgttgcagttgttgtatgtattggttcatggtgtgaaatgtatttcttaactacatggtgtttactatgagcacttagcacagctcatagaacattcaagataataggcagtcaatgaatgttcaactgcactaaatttaatttaaacttatataggaaaaaattgcacaagtaatttcagaaaagttttctaacacaaaatggcattaggaaaattggtagaactttaactgttgtgctggaattatcttgttatatgcctgtgaccttcttgggtctgtggggacttagctttatatcagtgtgcatgatggaagagcctgatttttagagtcagaaagaactgcgttccaattttgtctcttgacccatataaacttctggacattgggcaatttttttcagcactctgagcttcaaattcctcatttaaaaaagacgacataatagcacttacctaacgatta

SEQ ID NO: 130208 - DNA, 1041 bp, Homo sapiens
gcgagatattctggcttgaaggactcgtaactgtgcttcctttgtttcagagtcagaatctgttccccttcaggtggatgtttgtgtgtttttattaacttaggtcagcactgtcttctggttttgaatgttcttctgtgttcttcatactgagcatggctgatctggccatgtgccacacatatggtcaacatagtaatagagatagaagtacaattgataacttgatcagcattcatttcgccatatataatagcttggtttggttgaatttgcgtttaaaatattatacagagtgtgctaattactgcagtgtcaaaatggattagacagctgacaaagcaaacattcgaggaccaacatctgtgccaaaacacctttaattactgtaggctttgatcatcttaatttttcccataaataaattcattatattggtactgttcacatctcagagaataataaactatcagctttttcacagtttatgccatataagaataaatgtcttttcccagtcttgcttaagtgaagttctgccattttttcaagattgttattatgcaaacatatttttcatagaattccttagcattaagtagagcttaagtatcattaatattaaactcttaatattagttcatctaagagatacgagtattttcctagtagataccattgtcaagagacttggagattagaaacatattgttaaatttcttcagagatgaagggccaggtttctctagtccctggcccattgggttaggcctatgtttcaaatttttgtatgagtttcagactgtagaatagttattctgtgttaagaaagcacattttcaaagcatatgttttctagagaatgtttgctactgccttaaagtagaagagtgcatactcctgaaatctaccttagaactatcttcgggggaatcatgtgagaaggtgcagacttttcattgatttgtagttgagtatgaatttttcctctgagataacttaagccacatcaacaaaacatcaaaataaatcgttataaag

SEQ ID NO: 130209 - DNA, 1069 bp, Homo sapiens
ctctgtcacccaggctggagtgcagtggtgtgatcttggctcactgtaatctccttctcccaggttcaagcaattcttctgcctcagcctccctggtagctggaattacaggcatgggctaccacgcctggctcatttttgtatttttagtagagatgtggtttcaccatgttggccaggctggtctctaactgctgacctcaggtgatctgcccacctcagcctcccaaagtgctgggattacaatcatgagccaccgcacccggcctacaaataacattttaaatgacagattatattgcagtcttctgtttatgtggaaatgaatggttttgtgaaaactctggcttttaaacaggtgtattgcaagaaactctcttggtgggatgaaataaccatgaacataaaatcttccaatgacctcttttaaaatctcctgtgctgtaattaactaccctttaaatataagggttctgtttgtactgctaattaaattcatagttaagacttgtagaatagcatttaatttatgtgttgttttgtcttgggacttcactaacttgaaaggtgatgaaggtataaatagtgaattttcattaaaatgtaccagaaaaatatgtgctaaattctcagataatgactagcttgtctgaaaactaaacatatggctaaaagggacaaatcaacggttttcttgctgtatgctacagttttatgttaggctctttcatttgctcattgatcctgatttgattttggaggcatttaaaatgtactaaaatttacctgattacttataaattagcttaattagtgtgggcttctataaataaaaaatactgcatttgttatagttaattcagagtagggataacctcaaaatatttgtgtcaaagtttttgtatctgtttctctttcctaagggattgcagcaaaacttagagcctaggaagagaaagagaaatatcaaagatggaactgggagagatagacactgcagaattaagcaagatgaaatgatccacattcaaagtaaaattttagggcagggtatgtatatttgaaatgc

SEQ ID NO: 130210 - DNA, 1058 bp, Homo sapiens
acaaatgctgttattttgaatttatttaatttcaaaacagtattcagtgtcttttcatgaaatgcaaacttaaacaaggtcagcattatagaaggaaatgagaacagtcttaggagtttgtattaaaggagatagctatggttgaaaggaaaatctgggctactagtaacttgtgtttatttctaaaacaataatttttcctcccccaaggcctggtagggtgttttgaaggttgtatgtaaagtcagacatgatcgggttgctattattgtcctttaggagaactgtagaagatttctgctgtgcagtgtcaggaacaggttgctgtggatgatgagagtatcctcattggccactattattctgtatgaatcttctgcttttatgaacctttagcacatctaggggtaaaaggcgtgttttatttcagagctacgaggtcagagtttggatgatatgctgccaaagtgtgtgaattgtggctactggagttctgagatcccatctttgcctaaaatcagaattctagaacagtaagcattcaataagcactccaagcttccaagtaaccttttttttttttttttaaagccaatggctgcttaattttatacaatggttttcttgcttgttttctgaatgttgtagataaataacttatgccggcaatggatatataattctcaatcagattcttagggaaaaagccaaagtagtaaagaaaaccttttatatcaaaaaatataatttgtaaatttgaggtttagatttaaaaaataacattaatatatacatattaaatatatatatatatgaactcttctccccccgaaagcccctgagtattaaatattttggtcttaccaagtcgtgactaaggcatattaaagccagttcacatggaaacatttaataacctttatattactatttcctagatttataatttgtattagatactgtacagagcctgctagagaagctttgtgaacctgtgctctgtgtatttcccccctcttttaacagttgagaacatactttcatcagtctgtgtcctt

SEQ ID NO: 130211 - DNA, 1748 bp, Homo sapiens
catctaaaaagaatatacactttaagaaaatctaaaatccaaacttagaaagccagattaatcagggatatttattcactttacattggtgtctctcaattttataaaagaaccaattgtactacagccttccttaaatggacatcttccaaatgtttcgtatgtttaaactatttgagttaccaaaattgaatttgtgtggaattttttagactacgtcagtgtgtaaaatgaactgagtttcaagtgaagtctattcattttgataatggatagaaaatcacatagcatttaaaatgttgctcaagtttattattttaggcatactgttaactctaaagaaatgggtaaatgtataatgaagtagttaatgggacagaaatggaattatcccttttttttccttttttttgagactttactgttatttttggaaaacatttaataactcttaatattttagtagccattatatcagagatgctacttttgtttttgtagaatagatttacagagtacataagcagccagactttcccacagggagtgacagaataagttgtgcagttttgggaggggttacattgaccaataaatgatttctgtcagtacccaaagggcacccttacggcccaacagaattaatgaaactgtgcagcagcattaatttccttttgaaaggcttaggaccaataatactgtccttattttctaaattaaagtgaatttttatataaatacagtttgttatgtgacacttaagaaatacagtgaaaggttttaataaacagtctaaactatacttaagctgttttataagaaaaataaagtgaagagttggtgaatttcattgatatagataacgagttactttggtctcagtagcagattttgacttgaaaaactaaataatggctgtatttctctgcctcatttaattgtgcaccattttgcttttttggtcttttatctataatccatccattactcccctttgagattaagttttctaaaactctgctttcattcctccctcaacttttccatgtcttataaattgcctcttggttaaagtcccagcctagtgtattttacagccccatctccaagtatttccctatgcggccttgcacttcagccagatgtctctagccagcacttgtgacactctctttgtctttctttctgtccacgtcctatatatgctttacagcatagaagaataagccacatttaactttccagaccaagccagcacacttgtatgtcaggttttgaaattgttgcagctttgagtataaaagctgttatactttgcattgtcttctaagatttctaaactcttaagttatttctctcatttcctagtcttcatttggaaatttactgagagcagaggcctgcatcttatacttctgagtctatgttgaattcattcctacagtgtctacttctatgtaacagtattttacacatattgaaaccctaaaaaagacacagaattaagtcatagaattttagggctagaaataatttgtaaaaggttgtcatttatagttgagaatactgagtcatagaaatgttgattttgattaatagtatcttgaaatcatggtatggcttggagaagtgttatctgttatttttattttagtagggtctttgtggtggttttcactttgattctttctgaagaaatagctttaaaaatccttagcacttggatatgtaattattttactaagata

SEQ ID NO: 130212 - DNA, 1114 bp, Homo sapiens
gggaattaactgtaaagggtgatgagggcactttttggaatggtagaaatgttcatcatattgtggtaatagtatgcatttgttacctgtgtgttaaaacataccagacttacacatttatacacatcagtatatttcatgaaaaataagttttggtatagctatgctttatttaaatgatggaagggtgcctttgagaagtgtatgaattctgctgttcccctacttcctagccacacaatatgacctaggctgaatcataaaataatttaaaatgagcatttgtggcaattctctgaaaagagtaggattttgggttggtggggttggtttgtacttgttaattgcttctttggaagctggctatgcgtgctcagtttgcataacccccaactaatctcagcacttctgaacatgttaaagcattaaattctaatttctgtactaagagttatattccttttccctcttctccagtaactaagagagctttagtagtgatttttgtatgagtggatgacctttgagcttttttagaattttagaacagaatctggtttccagaaataatgttttaaaacctgcttggaatttttggtttttgtctgtagggtttcaaaataaatgtattttatgtctgggctttttgtgttttattctgggtttctttcttcattaactcggtatccagctcactaacttttccacttttccttgcccaaatccatgtatggttaatatgatttttagcctaataacattttttccctaatactttagaggtaaaaaaattataaagatacacagtgtagatttgtgaatatttgttagtttttaaactaatgagttttacttattagacatcagatgaacgtactttgttatattatctaataatgcacttttaaaaacttacagtttttaaaatagctctcttaagagatccctgtgatgcaggctagaagtgataagaaattttcttagagttttgaggaaactgttgctgtaagtgtattttaaaagctgcagtagtgttcttatgtcctcttgggactgaactgtttgcccacgtgtagtacatttgtgtttatgtggttaaacaacaacaacaaca

SEQ ID NO: 130213 - DNA, 2965 bp, Homo sapiens
ttcaccctttcaggtagatgcctctgcagtgggtatgaaaattgactttctaccattttctgtaatttttcgtatttgtttttaatcttgaaataggaacatttattagtaagtcaaatgagctattcactcagagctgtggaaactgcagagtaccatctgtgtagtttgtgatgtgccatatcaactcatatttgagcttttagcaggaaaagtgacataaaattgcgaagtattattattaacacggctgatcctacagtgaatcagggtgaggaaagaatctctgtggtacagactgcttttccatatcggttgtattaacccttctggaacgcgtgcaagcatttggtaattttaccaattggtacccaccaattgatcatcttggttatgtcaagaaagaaatgcctccatgttctgacttggatcagattcatttttacaaattataattttcattcaaaatagatatctactagcttccctccctggttcttctggaattcctgaacaacaatgcctaatagctgctgtttgtatctagataaaactgttggtggacctggtgcaacagatattcaaactttcccaacatggaatattagtctttcctgactttatcacattggggccaagatttctttgttctctttcttccttgtggaaacgacattttaaatgtaagccttacactatgctaaacaaccctttattctagccagtttatttattattgccagtttctttattgggaaaagtgatcttcgaagtcaaaaagccgtctgcctgcttgtgtcaggtgggcctcctcctggcctcggggcactgacttttcttagaagaagccttttttagcagcttcggccctcagcactctcctctcctgatcctaactggtgcttatttcccagaccatatgttggctgttaaccttacgatagcttattttatattctggctttttctgtatgtatttaggttttatgctgctaacaaaatgataaactccttcagtggcagcagcagcctgggatagtggaaagtgaaaagaatttggatttagaggatgatttggtatcagtctcgctcctctatccctgagttggaagcacaggcaaattctaaaacatattctttaaaagtagtctcatgtaataatacctgactcacaggattttgtgcattttataatctatatagattaaatgctttttacctataaaatgccattacggatattatttattgtggttgtgagcacatgggtaagccacccagtacctggatcagattttacatgagagcttcagaggttcttgggaaatgtcaagtaaaatgtgttatattttcaaaacctattagctttgttccctctgctgcatacttcattatctcaggtttagtcttgtatttctgttatcatctctatataagcttgaataacaaaagaaatattattattttacatttggtaattatatggtgtcactacaacaatcccaattcacctgctaggctggaaaagaaacatacttttccatgattaatattagtgcttatgtagcattagtattataccttcgtagggttccctgtaataacttttatcacagagtcctaatacatttttcattgagagagattagcactactgccttcactttaacaaacgagccatttgaaacaatggaaacttgatatttataatcgagttaagattaggatttaggatcccattgtgtattaaatagaagttacattttaatattctgttgttattacgctgtttttctgtgcggcttcctgaaattcctaaaagttaaagtttttggtattggcaaaatatccctttacaaatggttacaaaaaattactatggaaaagtttaataataataatgtaatgaacgcccatgaaccggtcatctatacctttatctattactcccccatctgttttgaggcaagtcccagatacatcttttcatcctataggcatttttttttttttttgagacagtgtcttgctcagttgcccagggtggagtgcagttgtgccatctccactcactgcaactcaacctcctggactcaggtgatcctcctacctcatcccaagtagtcgggaccacaggcgggcaccaccacacctggttaattttttatattttttgtagaggtgggtttttgccatgttgcccaagctgatcttgaactcctgaactcaagtcatctgcctaacttggcctccgaaagtgctgggattacagacgggagccacggccacaggcctttttttttcttttttaaagaagaaaatttcgtgtggtatatatgaattaacaaatgctcactcgaacaaaattttgggctgtatagtccttgaaaatttttgttccgtggtagcgtaataatagtgcaattaggcttggagaatgagggctgtacagaatgaataccagtaacaggcatatagtctaggggagagaaacattaataaacacacacagttctaagctctgtgacagcagaaatcttttttgccttgcacagtgtctgaaacaacgtaaatgctaagcagtttgttgagtgaatgaaaaaaattagtagaaagtggaattcttgggaacatgagtcttgttatttgtgttcagtgtcatttgggatttaaagtatgtgtgtgtgtgagtgagtgagtgtggcactgtgcgagtgaggagtatgaattaagaatttgccttgacagagaatttaggtttgccctaaaactgagttctgaaacctagtaggatctcatcttacaaaagtattatgaagtgcataggtaaatggaaagtaattcatgcagctctactaaatgaaacagaatgaaatgtaattttagaacttgtacatataattaattattcattctttaggctgaagttgacttatggcattactgatatttattttctttcttt

SEQ ID NO: 130214 - DNA, 1506 bp, Homo sapiens
gcacctgtagttctagctactcaggaggctgaggtgggaagagtgcttgagccaggagttgtggctgcagtgagctatgatgacaccactgcactctaggctgggtgacagagggagactctgtttcaaaaaataaaataaaattggagtttcttgaatacaagagtatttgtttttcagttctgtgaaggcagtttggtgtagcactgtctggattgccatccaactccatcacttaaacaagtgtgaccttgcgccccaatttttgtaaatgttcgctgttgttattgtcactttgaatcacctgcagtgataggtatttgacatacagttggtgttcaataaatcttggttagttatttggtattataattcagagtagattattttaaattcaaatagaggatgtttagaagaactatgaaaaaagttagtcttgaagacaagacccacctgtgcattcaggattatttatggtcaggtttttatggtccttctttatcaattgaagggtgtaacagaaatgcaatgggtgatgcagcactctgtagtccataaggatacattatgaattattttctaattattcactgtttagagtaactgtgtttctactttgtttgtttacagaatgattattattacaatcccttaacattttagcacttggtaggtctgattcaatggttctcaatggatgggagtggggaaggacaaagatgatctgatgtatcatttggcttaccaacattcctgtccctgttacattcctgtggtttcatggtggttgaaggtgaacctgacagtgctgttttacagagaagattgaagggaaggtgttttaagtcaatagagttaaagctctttatgttttggaaaaaatttgggggttattttaaaaactactcagaggtgatagagtattgtaattatcatatggaaaataatccaagaaatatagtatataaaattcacatttcattaacctggaaaattgactgattgtttgatgtatctaagtgttggacttagaagtggacagtattatattctcgacaaagagattatatttagatttctcagagaagtgtgtaatgattaaactcaatgttggaaccatttggttaatttaattataatttaaaataaaaccccttttgagaaaattcctgcataagacttaagtgttatttttgactagttcagactgtggcttaatatacaataattttctcagaaaaatgaagctcttgcgaagaatggttgggcatatttcaccaaaatcaagtatttgtgtgtgtgttttttttttttggagtttgaatataatcctgtaagtagatgcttcaaaaccacttgaatcaccatggaaagcaaatctctttagttattctccatctaagcagcctttgccgtacagtttaattaaatctaatcatcagtaatagttctcttttccatagggataagttggttctttgggtttttcaagatttggcctgtttc

SEQ ID NO: 130215 - DNA, 1034 bp, Homo sapiens
gcattatcttaggtaaccacacacacagtaccattattaaacctaagagaactaatatcatctaatatcagctctatttcagtttttcaagctgtccccaaaatggctgttacagctttgtttttcaaacgaggatctaatcaagtttactcattgcattttgttctctccctttcatctcttttaaggtggaccagttcccgtggtttgttttgtttgtttagactttttagagtctaagccagttgtcctgaagaggatgcaattgttctatcaattttggggtgtcagacttcagtttctccagaactgttaggaaattaagttgttaatgtgttactgagtttgatcagggctgaagaagcacagccaacctttgagagcttattgcttgaaatgatggcatccttggaccttttcatggcatgttccttctgaagtctctaggtctgggcctagacaaactttctactggcagatcataaggagatgcaaatgaagaggtagtatctgaccatgagacatttaccgtctaacaacttgagatattttttccctcctgggaagtagatttctgttttaggctcagattaaggagggggatagaaattgagacacttaattttacagcccccttggctaaatagaaagcttttattcaaacacttatttggagtaacattatggagacgaaaatttcctggagcttttcggagcaatagtaacttcagtttcttgaatacttgactacttcataactttgaatttggaagtttctgtttctctcttctgtttttctttgcaatgtcttcatctgttctccctgttgacttttcctgtcctataattatttccatcttctttactttatacctaaccttaccttttctctttcctactttaggatcttattagaagtgtggtagagccctctcttccctcttggatcacagtgtgcataggggttcattctcactttgagaaatagaccataaatgtaaaaatcattcataggtatgtagtagacaccagag

SEQ ID NO: 130216 - DNA, 1223 bp, Homo sapiens
taggacagaagtgatcttggatctgcacccaagatcagataaagagtaggtagtcctaaggcaagggaaggctttctggggcttgtggttttcagaggctgagttccctgtcttcactgggcttgtgtacctctagggcccttggaaggagtgaggggaggcaatgtcttcccaccgaggggtaaagagagttttccctttcccatctccttcctatttccttttgaggttcaggtatccctgggagcttaatcccacattttctgggactaccacaggttttcatagatgtttactcctttaaggcagtcctctaaccttcaaatcagaaacaataaagaattaaatttttggctttgtcacttcagtaaaattggacatttttcacacctggacttattaaattttcccctgcagaatattttgccactggagtgagaagagggattaatagtatcagtttttagtggatagaggaggaaaaggtaaagaaaaccttggggaaattcagtagttctgaaaaggtaataaaacaaaaccaaatacaaagaaagtataccagggttggcacttaactatttccattgaagaagtgataaaaaaagagaatgaaggcatcacttaagggctgatgtcttaatagataaataatgaaattctacaactatccaaggagcaaagaccttccagttcacacattaatatatacttgtggcaacacttgtaaaaatgttctcaacgttcttcccaaatttctccttttaataataatttcttattttgtgggatgtttttatttgcagaataagtcagaaggctatccatctgtctgtcatttattcattttctgccaccaaccaatgaacgttaaatcgtagaaacactgtgcgactcagatggaaaagtgggcggcgctttgtgcagtgtcctgttgccctcctagctcccctgatcctttaataatgtggtagaatgagaggctaaatactgttatttcagtgtgttcttgttttcagttcctgacaaaaaaacctgctagaaaagtattggggtttagggaggactaaggatttctttggtcccaactttctttatgaaaaatttcctacacacaggttgaaaaatagtacagtgaatccctgtataaattttgctataaatgtttttaatttctcctcctaccctctccacggtgtggttgtgagtatgtatattggataaac

SEQ ID NO: 130217 - DNA, 2453 bp, Homo sapiens
tgataaagcaaatgtttgtgggacattataaggctcagtctacttgttaagtccgtaagaaggatgaatagatttgaatagttccagtcctgcaaattgtatcaggaggcatcttccagactgttgccttaaggagggcttatacctgcacagaggttatttattttaagacccatgaatagtctctagcttttttagtcatcagctcagtttttaactattcttgaaattatagattttttcttttaattttcaggaaataagaattatatgggtgaagtaaaatagttaacatttattgagtgcttactgaaaaccaagtgcagggcaaagatgaccgtacagtactcttgtatgtttcttactgtagcattgagaggtagaaccctgttcttgttagctctcttacccagtgctttattgaagtaacatagatcagtaattctctgctagtgaaaaggaaaagagtagggagtgtattttgcaagagcatattcaggttgcctgttgttctcacaataaaaagctcagaaaataaagctcaagaaaacttgattgtgggggataggtagaacatagattgacagagcactatagaggatataggcttagaaaggatagaatgctgatacaggtatttggcttcttatgcccttaaaacatttaattctagtattgtttaactgttgtgcgcagattgtgtgatgcatgttttgcagatgttttgtaatcatgtagcatggatgactaggtgttgaggtattgtagtcccaaaaagaaggctgataatatattcagtcatctgacttctgctctgctatttgtggaattcttctgtctgctcaattgtttgcacggagcgcggagagctttcagggaactctttcacctgcacatataggatcagcatgcattgcttacagtgttccagctgctgagactgaagacctgttgtcatcgacgagaatataatgcacggtattttctattattcatttagtgtgtccatatgaaatatgacccaaaacctttcaaggcttaacttggagagtgttagttctggtagttcctgttggtgctgactgatctctgcccattgaagtccccgtctaaatgaggattgtctttactagcagatcattcctgcttataaaatcagtacatgatttaaatatgaaacaatttcccttgtctttggtattgtagtagcatttgtcagaatatttaatattaacttatcttaaaatttctaattgtactgttaatatgcttaaaaaggaaaagctttcagttattgtcgaaatgtttttagattcctaaataaggaatacggaaattccgtagtagaattgaatgtcgggagtatatgaatttctacaaatttaacctaatattacagcatttctggaaattacagaagcaggttgtagttatggagacaggcattgggggcttgccggtgcttgaggcggttctgctgtcctgcatctgccatcttgtgccagcagcctgttctggatgtagcatagggtgtgcctggcattaagaccagactccagtagctgaccacttactacgcagtgctttgacatcagggtggaatgataaataatgattcaaacttctgaccacttcactttgggtatgaacctttgcacatctttctcctctacctccttttatctttcttcttccctgactttaattttttcttcaagttgaagattaaatataagtggtagtgaaaagaatacaatcaagattacgggggaagtctgttactatcattaaggatttcatgtatgtagatcatgtctgatcatgatctacagtttcccctttaccaaacagatttactctgccaaaaacacttagtgaagaagtcagctgtttgttaagaaagcagttatgttgtgcctgtgttaagatcgcttaacccaagagtggtgaggtattggctgatttgttgttggagttagttgctggacaacattgtggttcagaagactggggctgagcttctattgtagtaggatcgagtattacattccttagcttttatatctgtattttattttttccctgtttaaggatattgttataaaccctacagtgttagatgtcatgaaaatggtgattaaagccatcaaaatggtgttagctgaaaatattaagacaatttaagattggtgaaaactgtagtcaaattgctaaaacttgaagaatgcctgcctctttggagtttctcaatatattttcaacttccgtaattctattttgagacttattttgtgtggtgttcttgttactgttttaagtaatattaatgttttgattccttaaagctttttcatacaagtgtgatgtaaaaatatttatttcatttcaacatgttattttggccaggcgcggtgactcacgcgtgtaatcccagcactttgggaggccgaggt

SEQ ID NO: 130218 - DNA, 1019 bp, Homo sapiens
tgcaacaatccttgaaaatgtggtaagattcttggtggcagagagaaccaagtctcctaatggctggcttggggggaaaaaaacctctcaagcatatggagacatctagaaaaagatgtgcatcgtcagctgtgattccattgtgtgctctcagactggatctgagcttccttcctcctgggaatttcagtcttaaacagaggagttctttgacttttagatgtcagtatactgaagcaggagggtagaaaaggagctcaccaattacggatttattatgttttgagtagttaatatgttttggattttaacccttcattggttaaatataatttagatgagtggcttagtgttagaagagcattttattggaaatataaaatgtaaggcttggagggggatttgggctgtggataaaggggtaatgctccttagttgtctttatttatagttgtatcttattaaagctttccaagcttcagtaacatcaaggatctgtgagcagtccttccattatatgccctgtatttaaggattcagtaccgtagctgtttcaaattacataaggttgaaatgtgacccataagttgacagcttggatttcttaggaaaaattgtttgtgttgtattgagttgaaaagcaattctttaagcactctttaggatattggatagtaaaggaaaatacaaaaggggatggtctctttaaacaatttttctgaaatgcacagcatgtgccctcatttgatattttggccattattgtgtcatgatcgaagttatatttaaaagccaagttaatgcttatttattgttatgaaaaaactgctatttaagaaattactaactttagtattttgcgtatgtagttttgtttagtaatgtatgttattacatgctttattgattttagattaagagaataggagggagaaaataagtcactgctttaaggtattggtcttttattgcagcaaatcataaaatcagcaacaaatcaggatctttttccatagtat

SEQ ID NO: 130219 - DNA, 2390 bp, Homo sapiens
tcaagactgcattgagccatgatcgtgccactacacagccttggtgacagagtgagaccctgtctcaaaaaacaacagtaacataaataaataaaaagaaggccataatacacgcctccacatagaaattatcctaaacaccaactttactatattgtaaacaaatatccccaaggacttcgctgtcaaatgtgaaaagtttctttatttctacagaaggtatttctcttgaatactatttttaaattcttgtgactttatagttttctgtgctgtcacttttttctgcttttaatagtagttttcttttaatttgctactttcagttcattgtgttaaaaatgttaccaggttttgtgattggttaaatactggtaagtaaatttcacctgagtgaattggattttacattttcttttctgaaggtatctttacatataaagattataacttgcatttatttataaaagagagtaacatggattcttttctttttgcagaaaatggtgtgaatggaacattaacttcaaatgtagcagactctccccggaataaaaaagagaaatcttcataatgaattataaactaattgattaatgtccccaaagaaatctgctttctactatatctttcagcattagagatttttctgttcttgaaaatacagtctgtgctctttgatttttgctattgtacggtttcatgcatttttttaaagggcatttgaggggaggattattgctatgaatgaaaaaaatattttagcttagactaagctacctgccttcaaaatagtttagggaccaccaccatattttattttgtttttatttttgaacatttttctaatgatttggagagaaaactatttacaaaaattccacatatcagtgatacaatttcttgctgtcaccaattttttataatagcagagtggcctgttctaagaaggccatattttttaagttatctttcagggtaacatggaaatactataaagttggatgtcaaactttaatatgttttcagtgttctctaattttttggaatttttgtagactttacacctggaaaaaaagatttgtaaaatcaccggaacaattgtgtgctttattttataggtagtggttattagtattacatccccattttaaaaacaaaaacataataatcgttacaacacgtggagttttactaacatacatattaaatcaaagtatattcttaaaagtacttgtgaagtaaaatctttcttgtgcattttcaatacttgtaaactggaaatcagaaaatatttactatgaacaggaaaatctgacatatagccctttttgatatgtttattaataatgattcttaatggggctcataataagtttaatatgcacagcatcttagaaaagtttaacctgcaaacacttttaaaacataatgcctacttgatttatatctataaaaagactgacaggtaattatatttggaaaacatttaatgcactaactttaaagaaattgaaaattcaggtggataaatagtcttacaaaagacaatgtgctttatgttatacctatagctttggtcccatctttaattgagaaacatttatctgtataaaacatatttttggataaatatatatatatatatttgtatctctacagaaaggctctaaaaagcatttgaggaaaatatttggttcccttttctataatcatcctttaagattcttatagctacatttggtttattcatcatatttacagtatatatattgttcttttcagtgttcacatcttgttccccatttctcacttgtgtcaccagctgtttgtgccatttttagtgtaaaagttgcagacctattagatctgcagtttaagttgccatgctgctaggaaattgtcctttttctttctagctgttaacctacttcctggaaaaagtagtagctctctgtagcattatggagtttcagtggaaccaaatttttgccattaaaaactggcattatactgaactatacattgagaaatcaatcaaaataaaaatttttactttcacaagttgtatcctggatgtttctgtcattgttggtgtttaggctattttggtatataacctcattaaaatgtaccatatttaaaacacttcatagacattcagaataacccttttcaaaattgtgttctgcaaataaacagatttgttccacagaatattggtgaggactactggggggatagatggtcataaccaaataaatctgggaatcactggattaaactaacctaaaggtgtctctttattatgggaccgttcagtccttaatatgcaaacgtgtttcctggtgcaccaagaatgttggatataatatgcagtgtttcccacc

SEQ ID NO: 130220 - DNA, 1124 bp, Homo sapiens
tgaatactagtagttctgaggaatattaatagttcttatacaagaaaagagataagctaaacagaaaattaaacatttatttcctggattgttttagaaatttaaataggctaatatgtgttatatctctctgagtgtgatatatagcctttcccagatatttgactcaaaattcttttttgcagaataagaaatgctattttaataggcttttacttaataggaatctagtttcttctttatttatttatttatttttttgagatggagtttcgctcttgttgcccaggctggagtgcagtggcgcaatctctgctcactgtgacctccaccttctggtttcaagcaattctcctgcctcagcctcccaagtagctgggattacaggcgtctgccaccacgcccaacttaggaatctaatttctaatagaatcttgtttttgagatttcaggaatttgacttacggcctttttcttgcagattttctctgtgggcagttctttttgttttgggaagacttctgactttaattctttcagtactgactgttggttttggccttgcaagagcagaaaatcagaagctggatttcagtactggaaacttcaatgtgttagctgttaggtacgatcaatttaacatttttttcactttatacagctagataatatatattatcagtttctctacattgaatcatctaaaaaaggatgaatatgaggttggggaaaatactcatttgattttatttcatacccgttgctattttacatgtctaaagtgaagtactaaagcatttaacttttaggataaattattaatgcaatgattattaatacaattttctcaactgagtgggaattattactaaatactatgaaagatgatagaatgtattcagtggcattgttttttatacactaactttttatgtcttaatatttcttagaatcgctgttctggcatccatttgcgttactcaggcatttatgatgtggaagttcattaattttcagcttcgaaggtggagggaacattctgcttttcaggcaccagctgtgaagaagaaaccaacagtaactaaaggcagatcttctaaaaaaggaacaggtttgtattcagt

SEQ ID NO: 130221 - DNA, 1011 bp, Homo sapiens
gaagccagcagaggttaagtgacttgctaatgctatatacctaattgaggatgagagattgcggtggggtgggagcagaatagctttcagatctcctacttctacatttttcacttactcttaaagaacagaaatgagccaagcacagtgggtcacgcctgaaatcctaaccctttggaaggccaaggttgggggttctcttgagtccaaggttttgagaccaacctgggcaacatagcaagaccacacctcttaaaaaaagggaaaggaaatgttttagcatgttttaatctataatgtatttttttacaggaagatattcctcgtcagcttgtctacattggtctttacctcttccacattgctggagcttaccttttgaagtgagttgggatatttcatgggtgtgtaagtaggctgggcagatagtatgctgacctgtcttaattgataattaatattcccatttttaatttgctcttttaacagcttgaatcatctaggacttgttcttctggtgctacattattttgttgaatttcttttccacatttcccgcctgttttattttagcaatgaaaagtatcagaaagggtaagttgtttagccattctatttctcgtgtactaggtatttaaagtcagtgcctaacattgccaagatccatgctttaggccattatattaactttttaagcgatcagtagccgctttaaataaaacgaaattatttagcaattcagactttgtattttactctctaaaatggaggctttctcagctagagagatactgtattgtatcttgcaattttgaaggcttcttgggtttacttttctgttataacttttactttgtttgttgcatggtttttcttttggaggagtgatagagaagtgaactctcagaagaaagtgaaacaatagataattagccttatagataactaaaatatattgatggtgaaattgaactgaaaacagaattggagaggtgtaacttgtaaagagtg

SEQ ID NO: 130222 - DNA, 2576 bp, Homo sapiens
gtacagttaccatatttgcctaagaaaaaaaaaaaaaacagaggatatttgaaattgggattattccagtttcaggtgattattaatctatgagcctttgcttttgtgtcagtctttttccccttcttgtcttgatgaaactgtatagacatgtgggttatgttttcagtagctaacatgacatactagtcagtattaatgaactaataggggctctgactcctcccaactggcttacatgtcaatagctttctgcagatagtatctttgcctgctgtttaatccaggggtcttgtccaatggtgggactgtcacagggagatggggaaagaggttgttgaagagttgtttaaaggtgcacagatattgtatggaatgatgacacaaaggtagttacttagtatatcctgatttccagtatttgtttacttttttttaaaaaaattatgctttaaaaggtactcttcattttcttgtgttgtacagatttcaaatgaagtttttctacatatcacagctggcttactggcttcatgcttttcctgaactctacttccagaaaaccaaaaaagtaagctgggattttgtagtgttaaaaaatgtcttgtcatttttttttttgaaaaatttttctaaaattaagtattttcttacatgtttgcccttcctccattcttcttacctcaactcttaccccatcattctcccaccaaccctctttccacaaagcctaaaatccttaagcatttcttgaaaaaaaaaaaaaaaaaaccttcagtcagtattttagcttagattttttacatttgatatgttaatggcttgtcttaaaattatgttagtggtaatgtaaattaaaatttaaactaatttttaaatgtaatatttgttttatcttactgatattcttagcaaattatttcacaagtgagccaaaaaggattagtcacattacaactaacagttctgtgtgtaagtcctaaagcaaaattcagtattggaaaaaaaagtaaaatatatttaaatattcaccagcaaagcctctcttgaaatgggtagagcattccctttttagcatgtggaaaggatatttgtttgttttatttgaacaaataagtaaactgctggagcactgcaaaatcctccttcctagttttaccctcagtgcttctgaagtcgggttccatgctatcacaaaagtcgttttctttaccctctcccttctgaaacctgtattggctccctattactttaaactagagtaatgctgctcaactgtgccctgagagtttctcccatcgccaccatcttttctcggggacctctttctctgcttactccttatgcttcatgcacactgatagtctctagttttgtaatcccagcacatcacttctttttcctggaacacctcttccctcggataaattaatcaagtactttcatttcccttttttctgggagttttttttttttttttaattctcatatatgaaatcctatgtgggattttacttcaaaataataccaggtgaaggaaagtgaagagggatatagatgaaacaagtttgatcgtttattaataatgattgagttacgggtatgtcagaatcttttctgtctgttgtgtatatgtttacatttttccgcatttaaaatttcttttttttttttttaatcccctttgagaaacctggagtgaaagtgtgacagccagtctggtgactagtttatctttgcctactcaaaagccataaaacactatttttatgtgtgctacaaatagttaattcatggactaggcacttgatttcctactgtttcgtgtctgtgttctgtgtatctgtcgttactcatgttgtctgctaggattagaaaacagcaccaaattaaaggccatatgctatggtacttaagttctttttatgctgatttcttttataaagtagattgtttctccagctatattgataaggaataggatgaagaccttttatttttaaacccttgatttagaactgtcttcagataaaattgttaggcccagattccagtagcccttccatgtttagtaagctcctaatgtgaatcatagatattgtggagctgtactgtccaaaatgctaactactagtcacatctacatgaacttaaaaaacaaaaacgaaattgacttttttagccccagtagccacatttcaagtgcttattagctactgtggctagtatgtaccattttgaacagaggagatatggaacatttccatgattgcagaaagttctattggacagcgctactgagagtatcatagtttcttgatgtcttagtagcatggctcagatatttaaagccttcttaaggtatttgtatactcatgaacaaatacctctggatttcattattaatccatgtctatatcttcttcattgactatggtaagtaagaagggacatttcaaagtaattgttcattttagttcctgaagctcttttcttatcagttcctgccagatggcacttctccagaaatgcagtctaatttttatggaataatttgcataactcagaacttaact

SEQ ID NO: 130223 - DNA, 1012 bp, Homo sapiens
taatttagtgtgtagttagaaagtagaagtagaaagtttcaaaagccctttgaaaaaaataggtcagtaggctaagtataactttatcaacctaatttatacccctgggataatatcagtttattgagtgtggcctcctcttccctgttttttggtctttggtggctgtgactaacatgtgtcaagtctttgtaagtaatttctaaagctttagatttctagatagttttgattttcattgcccctctaagactcaagatgtccaagaccacgttatttatgatgttaatatagaacttttttattaggttattcttctttgtttccataactatgttgtacttaatgctgtttttataaccttgtgtatatttttgtgtatttgtgtcctttttggtcttcagaagaacaagctactgaatcagtgtccctttattactatggcatcaaagatttggctactgttttcttctacatgctagtggcgataattattcatgccgtaattcaagagtatatgttggatgtaagtatgcagtcttagaaatctatactttataaagtactagctctccataatctgctagtcatatattaaatataatttataatttattcttaattactaatggctgtttttatttttagaaaattaacaggcgaatgcacttctccaaaacaaaacacagcaagtttaatgaatctggtcagcttagtgcgttctacctttttgcctgtgtttggggcacattcattctcatctctgtaagtatgtcctcttaggttgttgttctccttccttatctaagattagaaactctgctaatgaaatagtattaagttaagagtttcagtgataaatctgttttaggtatttttttatacagcaaaaattctaaactatgtttactgtttcagaaaggcttattcatttttagtcactctgaatgttacttttatatctttcttttttttttttttttttttttttgagacagagtctcgctctgtc

SEQ ID NO: 130224 - DNA, 1029 bp, Homo sapiens
tatttacctgtacttttcacaccacggagctccttgtcattagggattattttatccatcttcatctcgtccttttttgtctagcactttgcctggtgcctgtaaagattgggtaagcattccatttttctgctctgaccagtttacttttaccagtagtcaggtcagttaaacagttattgaccacttaactctgctgggtgtgtgggatactaacacacccacaccacagaccctatatttgatctgcttttctcatgctaactgtgcttctctttattttattaatttacacttgaaatttgtcttaataggaactttttattcattgtatagggctagagtagagaatcatcatttgtcaaataactgttttctggaactgcagaaaatgtcttttgaaatcttaaaattaaggatgaattacacaattttacctaaaccgcagaagagtactctagtgaattacattagctccttggcaatcagtaatttccattgtgtctgtcaggattccacaggaacgaggaggcccttggtgcttcgatttagggacagattttataatgtttttgccccgatctgttatttgggagagggtcacaaattgacttgatctttgtttttccttctttgtagataacggcaaaagcttctatcatttttgttactcttcagtacaatgtcaccctcccagcaacaggtaggtaatttacgctaagaattttctacgtaaatagaagttcagttgaacaaacttggaaattttcatgaatgctaggtcctgcgttaattaatcgtcagagatctcatccatgatgtgactgaatgttattgtgatgattttataatacaagatctgatgtttttgattgactttaccctgtatatgttttctgtttactatatatttttgtgaatggacttgaaattccataaaataattttgttttgctttctctgctttctgattttttcctaagaaaattataagaaaagatctttttaaaattgtttaaatgtcattgt

SEQ ID NO: 130225 - DNA, 1531 bp, Homo sapiens
atacagtgctaggcctggtgctctggcttatgcctgtaaacatcccaacactttgggaggccaaggcaggagaatcactggagcccaggagttcgagaccagcctaggcaacatagggagaccctgtctctacaaatgattttttaaaaattagccaggagtgatagatagcacgcacctgtggtctcagctgggcggctgaggtgggataattacttgagcccaggaggtggaggctgcggtgagccaaggtttcaccactgcactccagcctgaaggacagagcaagaagaccctgtctcaaaaaaaacccaatgttaaacatttgtattcactttctgaatttgatacttgcatgtactttctgctttgaccttaaagtagtactttaatatatgtagtatattcaattttctgtaacttgtcataaaccatctccacatggtaagaattcctgactttaaaaacatattttaggggtactgtgacctgcaaggtatatttgcagtgctttgaatgaaatgaaatataaatcagaaattctgacacatagtataactttgattttatataaactattttacattctcttactatatttctagggaagtccaccacctataccttgcctcacatgttagtgatttttttaaacagtggattttcacctttatataaatttataaaatttgaaaatctaaatagacaaaaatactaaatagaggtttttaagtcaattcaaaagtgagtgttaaagtgatacacaaaagtgaagtttgtgcgagttcttcctttttcttaccatatattaaggtgttaggatttcaaagcatgttatctatatataggactttgtagactaggttagttttgctattcgacttttaaaacaattgctgctgaatctcaaagttaacataattatagaattacagtacttgtgctagaataatagagaaattgatttttttttgcagaactgttaagcctgttgtgcagatacattgaggaaatgtcagaggatttatggtgacattgacaaagaaattcagaaagaaagaaatactgtattactagccaaaatgaagaagcaatggagatacactgtaaaagcatggattctggagctgaagggattcatgttcaagttagggctctgcagcttgctaactgggtgacctagggcagctcagaactgaagtttcctcatctgtaaaatggggcttattgggttactctgacaaattaaccaatttgtattatgcctagttcaatacttgacttccaaaaggtgtgcaataagtggtagctattattattctttaaaaactcaccaaaattgggaaatagaaagcatttttatgtgagagaagggcctggaatctctttagttagcatctaaagagattatacatactgaaaaggctaacaaagtagtctgtttggcagtaatgtaagagtttaatttccagggaacttcacattaatcaaaaattgcttgtaaattttggaatcatagttttattacagt

SEQ ID NO: 130226 - DNA, 1034 bp, Homo sapiens
cgccccctcccgcaggctgcgcggcgcagttcctggttcccgcgaagggttacgtggcagccggcgaggggcctgcgggcgggggcggcccctgcgctgccgagctggctcggggcgggtgggcggacttggggggactgccagcctcggccgcggtgagcgtcagccccgcgagggccggggaaggccgaggcccggcccccgggtctgaggagtgccggcctggagaccacaggccccgagtgacaggggagcccccggtagctccgagattggggtgagcgagaaaccggagtcaggcatctgctttcgacttgaagggcggtggccgccgggcaccggcgcagtggaggcgcgccagattgttttcatttttgtcttttaaactgatattattaccagttaacgaactttttgccctgacgctttaaagaaacaaggtctgatggataaatcgaggttctgaacagcggtgccaaggaatcgagtaattttgtttcttgaagtaggagaggatgggaatgtcaggagtgtgtaaattctcttcccacgtatctagtattttgatgacttatttaacagctgttgaatgtggatgataaactttgcaaggtgaacgagtaacatcctacgtttttcccctcgctccccaatacacacgctcattcctttgcttttttccctttttaatttttctctggagcctttatgtctcagtaaatatacaaattattttgctcctgccttgttttgtctcctctctcctgcatgtaacaagtgagagtagagattttggagtatttttacgagtctgtatttccagagtctaggatagtgcctgggacataggagtgcttaaaaaaagatgagcgacgttaagaatccttgagaaaacctaatggaatgatattaccagtgaccaaaaggtgaatacattttctttttaatggagcatatttgtttttttttttaattttaaaattaaataatattttaaccttattttcgcctctcatcaaatgggcttttctgga

SEQ ID NO: 130227 - DNA, 1069 bp, Homo sapiens
gttctcaaactacaatactaaaataagcccagaatcctgagtgtattttgtttactcttccctaaagattgagacttaaaaatttttttttgttttatttgtttgcttttgagacagtgtctctctctctctgtcacccaggctggagtgcaattgcacaatctccgctcactgcagtctctacctcccaggttcaagcaatcctcccacctcagcctcctgaatagctgggactacaggcacatagcaccacacctggctgatgtttttattttttatacagacagaatctcactatgttgcctaggctggtcttgaactcctgggctcaagcagtccccctgcctcagcctcccagcatgctgggatgataggcatgagctaccacacccagccagacttaaaatttttttaatttcctttggcagcttcacctctttctgcctcttttcccaaggtccctagcattttcatgccatcctaatacacttattctcatgctttgaagacctagacccgtattcctagaactggttcttattacaaaataacttataaactcaaaaacaaaagcaacctgattgaaaaatagacaaagaacttgagtagacatttctccaaaaaagatatacaagtggcctataagcacatgaaaagatattcatcatcactcatcattagataaatgttaaaaccctgagataccacttcaggcccattacgatagctgttactaaaaattaaaaattaaaaaaaaaaaacagaaaataacaagtgttggcaagaatgtggaggaattagaacccttgtgcattgctgacaggaacataaaatagtgtagccactatggaaaacagtatgatacttcctcaaaaaaacctttagaattaccatatgatcagcaatttatcttctgactatatacccaaaaaattaaaagcagggacttaaacagacattcgtacatccatgttcacagcaactttattcacaatagccaaaagatggaagcaacctaaatgtccattgaaggatgactggataaataaaatgtggtatacacatacag

SEQ ID NO: 130228 - DNA, 1107 bp, Homo sapiens
tcccagacccaaaaaccacgaagaatttcacatgtggtagatttgggaacagccaaaggttttaaacagtggtaaaggtagtaaacttagagatgtcaaagcagtaattatgtaattattttctagtgttagtttgtcaaactaataatctttatagaaatgtaatccttaaaatccagaattctaagcttgaatttgatgtagaagccttagcaatgtttttacatgtaccaaaaatacccaactttatattgagcaacaaaattattttaagaatgaatgctttttctagccacaaggtaacttaaaattcagtgcatttacttatctattgttaaatttttactctctgattttctttttacagttagcaacacagatcctgacaagaaatggaaagctcatctttagtttcagattaaagaaagctttgttttattttgctttcagagaatggtatgttttcttaactataggttattttatagagaatataaaagtataaaacattaaaaataaccctagatatactttaaaataatgttatatttatgctaaaatatgtaaattacactatacaaccatatgataggttatttctctaaccttgtcttctaacgttttaccaaaaattcataatctaatagtttatcagttttcaatagattaaataaaatgattactttaaaaataataaaatttatctaatttaaagttgatattatttttggccgttagttatctattactagtgatcagttatactgttttctatagctactttatttaacagcacagatttctatgcacctttactctttcctcaacccttgtctctatctgtacataattgctttgtcttgatgtttctatcaactatatcatgactatctattggttccataactctgtatcatgtgtattttcttattctggtataccacaaatgattcatgcaaatgaatttttggtgattgaaaaatattaaattcccaatttaaagtattatatgataaataattatttctgtaatccattaatgcaaccaacatactttccaagtttaaatcttagtatgtaaatagtcatcagcttatacatgaatta

SEQ ID NO: 130229 - DNA, 1142 bp, Homo sapiens
ccagatgaggtggctaatgcctgtaatcccagcactttgggaggccgaggtggtaggattgcttgagtctaagagttcaagaccagcctggtcaatattgtgagatcctgtctctacaaaaaataaaaataaaaataaattagccaggcttggtggcccacacctgtggttccagctactcaggaggctgaggtgggagggtcacttgggcccagaagattgagcctgcagtgacctgtgatcctgcctctgcactgcagcctgggcaacagagtgagaccctgtctcaaaaaaagaaaagaaaaagggtgggaaaagtattaaattttacttcagagtgagaatcttggtttagttaaaggagagaattttctaatgataattttcagtgggttcaagaaaagaaaaagcagctttttaactcatctgtttatttgtgtctaaagataaggatacagaataatttacttctcaaaatttcttctaagctcgagttcataattgttattattccttatttcttctttcaaccagagttctatatacccctggccacactgatgatcacatggctctactcttagaagaggaaaatgctatcttttctggagattgcatcctaggggaaggaacaacggtatttgaagacctctatgattatatgaactctttaaaagagttattgaaaatcaaagctgatattatatatccaggtgggtaatttttaaatttttttatatttttatgtttttaaatagagacaaggtcttgctatgttttccaggctgttctcaaactcctgacctcaagcagtcctcccacctcaacctcccaaagcgctgggtatacaggcatgccaaagtgggtagtttttcaaacctagcaaaccatttgtgtcaaatgatgaggaaggttcattttggcttgtctctgtatgtatttggccttgaagagataacatataaggccaggctcagtggctcacacctgtaatcccagcactttgggatgccaaggtgggcagatcatgaggtcaggagttcaagaccagcctggccaacatggtgaaaccccatctctactaaaaataaaaaaattagctgagtgtggtggcgcacacttgtaatcccagctacttggga

SEQ ID NO: 130230 - DNA, 1768 bp, Homo sapiens
tagtgtactatgccaattgcatgtccatgttaaattcagcgtcagtatggtgaccgctcagaccttaggagctggggaccaccaggttgcctaaggagaggtgaactggcccagatcggaaacagagcaggtcagaactcccatgctgatcagtactgggatggagcctgtaaatagccactgtactccagcctgggccacaaagtagaaacccatctctaaaaaaaaaataggtaaatacacacagacacacacacacatatttgtcagtgctatcccttcttcacatccactaccagtacttcctcctttatcttactgtctccagctctcccctttagcctaccatccttcattgtgctacttgaaatctttaatgactctcgctgcatacaagataatgtttattctctttaccataccacagtctgaccccaggccacttttctggtcttagttcccactcccctcacaaaaacacttagccatatacaaatattcctgggcatattatgcctgtttatgtttttgtttatatcacccctttccactacttgtctccctggtaaattcttatctatttattcttcaaagcccagttcacatgttacttatatcaagaacgctttctgggcaaaattaactgctcttctccagcttttgtataaattttattctataatagcacttactaagttgtattgtggttttgtggaggggggtaagtgtctccttaaaaagcagtcagctccttaagttcacaatattagttaatgccagttgccatagcaaaacaactcagaaatgtttaacggctcaaataggaaataaatttatttcttggtcccatacagtcccaaaaaggttcccagttagccagtggccctctgcaagtaatgatgtatgctccttccatcttgtgactctaccctcctgaaggctttttttttcaaggttgcatgctcagctcgatcaatccagcaggtagaaaagagcatggaagggatattgcatgggaggttttcatggaccaagtcttctgttgcattggctgtcaattcagtcataagtcacccctcactgtagggtgtctgggaaattaactgtatgcccagcaaaatagaggaaatgggtttagtaactagatagccattctctgatataggcagataccagattcatcctcacatcctcacctctagcacacagaaggcactgaatatttatcttacatatagttaatatctttaaagaggcaaatagacaaacagatgagtaagagaaaatgaagtagtagatgtccatgtcctcttttaaattggtgcccccttttttctactgtgctgtgattttcaaaatgtagtttctaggcagtttccttataatgcttttgttgaaaatatagccaggtgcggtggctcacacctgtaatcccagtactttgggaggccaaggcaggcggtttgagactagcctgggtaacatggtgaaaccccatctctaccaaaaatacaaaaaaaatagccaggcatggtggtgtgtgcctatggtcccagctacttgggaggctgaggtgagaggattgtttgagcctgtgagggcagaggttgcagtgaactgggatagtgccactacactccagcctggtgacagagcaagactctgcaagaaaatagtaagaaagagcaagaaaatataatagcatgttatataattcgcccatgacaccaaaggaaaacaaatgttatattactacttgctcaaaaag

SEQ ID NO: 130231 - DNA, 1434 bp, Homo sapiens
tggggcttcatttcagtacttgtagcaaggacctcatgctttcgttattaattaatgtttatccttttgttattaattactgtcatgacacctttgctacatgttaggcacctggatagagaagagtttccaggttctgtattagtgcctcttcaacacttgtcaggatgccgaagctagctacttttaaattttttgtataaactaggactgactcaaaaaatagaggctttcatgtagacctagaggggcatgaaagaatgaagagctgtttggttgaaagatatgaaatatttacatcccagagataacctgctgtaattcatcccattttctgttgtctcttaatgttaatattttatgcagtcattcacaagtgttagctctatgaaagttgatctcttaaaaggcttaattataaagtgtgaattaatatattttatatgttttatgactagacactacctattgcattaaaaaactcccacggaatcctcagagagaagaaattataggaaatggagagcaacaatatgtttatctgaaagatggagatgtgattaagactgagggagccactctaaggtaagtaaatgtcccttagccagggaaggtgaagagtctgtgtatgtgtgttatagaaaaggatggaaggatcccagcattttgggaggctgagatgggaagatcgtttgagcccaggagttcaagaccagcctgggcaataccaaaaaaaaatttaattagctgagcatggtggcacatgcctataatcctgctattcaggaggctgagatgagatgattgcttgaacctgggaagcagaggctgcagtgagtcaagattgtaccactgcattccagcctgtgcaaccgagtgaaaccctgtctcaaaaaaaaaaaaaaaaaaaaatagaagatctgtgcatatgtgctggtatgtgtaaagagtacatcaggaaggatacaaaagaaatccaataaacattgcttactctgggaggagaaaatgagttgcttgagaaatgagaaaagaaagacttcactctttattaaattgtttatttgaatcatatgattaccattgttttaaaaaataaaatttacactttaaaaaataagtgttgtctcccaaggaggcttagggatctacctatcaattcaattcagggctttcccatattctcacttcccaaagatgacccatacctaaattaaataagttttaggcctgaccgatcatacctcatgacctatctgagggtttcaaaatggtatttcaaactcagttattgtaaaactgaactcctctctcccccacaatctgcacctgttttctgatctcagaacatccacttttctcagtatgtaagactttactcattcttctaagacagaggcttcaggattaccttgcactgctcttcacctttac

SEQ ID NO: 130232 - DNA, 1127 bp, Homo sapiens
atatactgagatatgagatctcaaaggcagatagataaaagcacatattctggcatcagaatacctgggtttgaaagctgtttctgccatttatctgtagagtaacctgggcaagttacttctaaatataatgataaaatatctactttaaacagttgttacgaggaatgtaattggtaaaatatgtaaagtccttggaatggtgccatgtttattttaattgctatgtaaatgttcaagatgactgctattattccttgttcagacttatatttagctctaatttttctcagaaaactttcttagggtgagattactgtagttaagctgaagtgatgtagctggtttttgtgcatgttaaaagtaaaataatttttgcagtttctttaatgtaaattatctgtgtgcaaaataatgctaatgtcaacgcagtgttccaattgtgtgattatcttccatttaattttcaggagaatcctcattgacactggagaaccagcaattccagaatacatcagctgtttaaagcaggctctaactgaatttaacacagcaatccaggaaattgtagtgactcactggcaccgagatcattctggaggcataggagatatttgtaaaagcatcaataatggtaaacagaaaacattcattaagctcattgaggaaagccgtgtttggagaataatttatttcagttacagagctaagtagtctataaaccatttactaaatacctcagttttaaatggtacttttagaaattgattagactgttgaatactgtgcctagttttaacaaaggaggaacggaaatcctgatttctgtttcaaatcctcaattttactttagtgtgtgagttactattcagacttaatcataactaacaactgttgagcatttactctgtgccaggcactgcactaaacaatttatgtggatactgtgaggtaggtgctcttattgttcacattctaacagattatctcagtccttctgtaactttaaggcagttactaagatatgctgaaattcaggcaatatatcattgtattgataattcattgtccctgaaacctatacagtactgacattttctatctctttatttcctcatcccaccatc

SEQ ID NO: 130233 - DNA, 2633 bp, Homo sapiens
catcagtcttatcaggctcctctcaaacctctcccactccagccatgctggccttctagtgtctcagatgaggtttgtgattccctgtctcagggccttcacgcatgctttcctctttcttccactcattcctcccttctttacccagctaatctcattcatcctttagagcacagtttaaataccatttcctcatggaagtcttccctgacccatcagactgtattagggacactccatacttttcatggtccttatctcaatgataatgaaatgatttttttgtgcaagaagcttagtgtctttccacaccttcataccccactataacatcagttcagtgaaagcatattcatggctatatccccagcacctagcacagagccttgtacacagttcaggtagaacagtaaacagttgctgaatgaatgagcattctgtacattttctcttaattttcactattatgactccagaactgctggataactacagttttagctggtcttccttcctcatctgatcagcccatggaagccaaatgaatttcactaaaacactgctagacctaactgtgatgcttagtacataggtactcaataagcatttgaatcaacaaatgacagccaaattgtccagtgtttttactttcctcctctgctcaagaacctttaaaaactgcaattttaacctttcctatcaaaattgtacatactttgtgggcagacagtgtggctgataatagaaaaaggtagtcaagtggaatagaattaaaactctggactctggttacctcgattagaatcctggtgccatttactagccatatgactttggacaagacagttctaagcttcagattcctgatacaacccaatgaaggttgtgtagtacctacctcattggattttataagggctcagtgaaatttaagtgaaaaaacgtatatgaaaagcacttaacaagttctagcacgtggaaaacataccatgttagccattatgtttatcacttctgctttcctcataacatctagataacactgtgctcatagtaggtgttcagaaaatatctaatgattttataagagtgacagcaaatagagaccagttaatagctatcttaatattgacatgaaatacctataacaaggaatttgattctactaattttccatcaattaaaaatttttttctccattcatgtagcaaacagttattgtgtgcctactatgtgccaggcactttgctctagtgaataaatcgttcatagacctatacagattcatccatactcttcccttgagcccttcattagcataatttgcatttgcaaaatgacctcctgagatagggatattattatctgtggccaagaagaacaaagtcaactagcccatgtagagatgatactatccaatcatctattataactatttacagacatcactgatagagtaactgtttgctaagggagaaactgataacatttttttcaatttcaaaactgataacagttttttcaaatgtatagctgaagttttatttttgccacataatgattctaagcacttaacctaagcaatccccttctgctagagaggcagtgttttgaatggagaagtcactggaccttgtatctgaacatctagtgcttcctagcactgcctcttgctggttatatgacctggagcaaatcacttagcctttctgaagataagttttctataaaataaataattaataaagtaataatacctccctagagttgatatgaggatcaaaagaaatagtaaatatgaaagccccaaatggtttaaattgctatgtcaatgtcatatgttatcagtgtgactttttttttccctcaaagcttggtgcaaactcatgttttaggttttatagtatctagacacccctcctttgttctgaatagattgtattaattccagaacttttttctgttttctttcttttgagagcccttcttttatcaattccaattttgttaaaccaagacaggaccattaagagacctaaaactggagccccagaaacatgttctccactaccacagtcgtatggtcactcacactttcacctgcaaacaaccagcacaggcattctaaaagatctgttttctttgctactagattttatcaaattcatgtatcaaccctgttaattttgtcatgacttttgatcagtgtgatgtgatctggtcattaaattacagaaatttatattcatttttagattaggagatatttcaaaacagagtttcttgggaggacgggaaggcaaggattaagaaataattttaaaagtggtggggccttgatggattgaaaaaatttgagccttacctgaagcatggaagtattctttttgtgaggaccagaagacccacaaaaatagtcccagtgactctacgttaggggcagtgagaatttgtggtaaataactgcaaatgcatggaggcagccaaaatctaggatgggtgggctagagagtattattggaggtatcatagtattatagtcttgtgtattttaatttagcataactaaatatgcacaatgctaagtgcagtacaatgtattatggatatagaaataaatccataaattcctt

SEQ ID NO: 130234 - DNA, 1916 bp, Homo sapiens
gtttactttgctcacttgactttcactggtgttttgcccagagtgtaacttcccttctcaaaagcgattaattatgttgaggcgatttcctcaactcagcagcagagggcaggattctcctggcttccaaattggttctctgcagcctgtgggctcataagaggagctgacataagtaatttggggaagttttttgttacaattgtgtgtgaccttgtttgagtttaatttgcagacacagtaacacacctgtatttctaagaagatacttttgctcttgtttagctgcattctgttttagtggaattatgcaggaatgggagatttggtttactgcatagtaagtcttaggcatttagcaacttttgtagtctttactggatgaacccagataatgtagtttctcttgagcatagaatttaattgtgcagtcaagacataaattatttttaaaatataattgattactaaaaacgatttagtaagtacagttaattgagttttccttggaagtgtctactgtttggcgtttttccagtaaataagaattttagaagcagcagacctgcaaagtgggcaggtaaaagattaagttcagagtaaataaggcagggtcaggtagttaccaaaggtttaggctgccaccagaatctaggaggatagagaattaagcaggaaaaatgccagatctctagggtacagtctgtcttggctggaagtccctcaaccaagtaaatccataggcggtctctctacagtgtgtcatcttgaactagtcaatacctcagacaaaagatgcatattatcagaattaccctggaaagtctcttagaagaacaccatgttggagatcagtgtattgtctcagtaagttcagcacaacctgccttttttccagcgttgaaacagatggctgattctgtttgaaaaccaggtgaagaaattggcttgtgttgaggggctatattgtatgaaaaatacatactgtatctttaaacactataatcacactcaacatagcaaagtgctagtgctaagagagacttaaagactaactgagggaaaagcagatttatagtctctcgtcttaaattacttaacactgttgctcacataaattaatggagtggaatggccagtggaattacttgcactatgtaaattatttctccatatagttgaactagagagtccgtatagttgagctagaaataagtgtagataatgctactgtataaagtaaaaggtgtaaagtaaaaggtggctagaagttaatattaattggccccttgtcagatgttctgagattggtatccacctgttccgcttcacaaaacagttctaagatcacaagcggcttttgtatcactaaccccaatggtatttttctgttctcatcttccttgaacttcagtgctttgacaccattgacgactccctccttaatttgccaacaccacattcttcaggtttcctattacctcttgagctgctctttctctttcaccttgatagagtcatcttctttatcaaatctttaattattttagttattcagtatataatcctcatctctcatgttcttctactgtattctctacctaggtgatctcatctacttatttggctttgcctttattatctgtttattattaactaccaaatatatagctcaagttcaaattccaaacttgatcttcagactcaagtagccaacttttaaatctatttgcatgactcactgctgcctggaactcagtgttttccatactgaactcataacctttccagaaaactgccaggtcctccttcagttgttcatatcttgataaacaaagccatcaaaggaaatgcctaaatacccttcctgacatttatttgcttcctactgcatatccaagccattatgaagatct

SEQ ID NO: 130235 - DNA, 1032 bp, Homo sapiens
gaatagacattcaaatctgtaatcctggatttaaaaaactgaagttgtactttatggtatttcactgaatgcatgtataccctttatttttgagataagattggggaagcatttgtagttaaacggttgtggaagtgtatgtttttgtatatttaccagcttttgaaaatggacagatagataagctatcactaactgatttaggtgcattgtgggcaggcatcaagactgaaggtggattgtcacagtctcagtcacctggacagacaggatttctcagctatggcacaagcttcagtacccctcaacctggacaggcaccatacagctaccagatgcaaggtctgtatatacacattgctattttccttaaccctgtaggttgatagttaacttctaaagtagaacctgatgttccatgtaaatagtaaatgatgatggcaactggattgggcttagaggcaggacacctgcttctagtttgattcatcacttacctattttctaggcctaaatttccatatttataacatcagggggttagactggatgatctataacattctttccaaaaagcactaagattttttgtgaagttgacatttttgcctttgtgtcttctgtcagttataaaagaaatgaaaaagtcaaaagtcagccacgtaggaggttgtgatatggcatgtactaaaaacttacgcacttggtattaccatccaacttttccaaaagggctgtattctttattttcattatgaagtgaagcttggggagtgacagtcatagctgtagaaataaagtatgtgataagtgttgaataatgatctcccaaagaacagcttgatcagatttacagacacccagtgaatctttaagaaaatgcttgtaagaatcagtccctgggttctgtttttgaaaatatagacaaaacataatgtaagtacaagtcaaatggaatgacagctgtcattgtcaaagctggtctcaagaatacatagacattacttaaagttagcacattgttatcttgca

SEQ ID NO: 130236 - DNA, 1036 bp, Homo sapiens
taagagttcatttaaaactagagcccttaatcagtttctattcattcctctttatagtttaactttctgttaggtggaaccatatgaaatttccatctccgcaggtcacaaagaccaaatatctgaaatttcatatggccaacctatagttgaaaatatgtcagtgctttctatatattttgtgttttgcttggattattgtgcattattttgttttgtttttgttttccagcaattgggagcagtagtttcagcccacgaccaactcaccagttctctccaccacagatttacccttccaagtaagatgtattttctcttaatcaataaataacttctctgagtagacttttatttatttaaagtcatgtctgtgcccacatgttccatcttaatttaaatgaaagtgcatttcatagagatgtaaacatattgatacaaatttattttgagcatcatgtagtggagacactgaagtatttcagtgctttgtcaattctgtgtgaaagttttactttaagatacaatatttagctggaatttgtgatgtggttgttaatcggtttgcatgtttccatctaatgcatgggctttctattttctgtcatttctgacaaatagcagaccatacccacatattctccctaccccttcctcacaaactatggctgcatatgggcaaacacagtttaccacaggaatgcaacaagctacagcctatgccacgtacccacagccaggacagccgtacggcatttcctcatatggtgagtaacctgcaactgtagtggtggcgttatcgcatgggcatgcgtgtattaacatgtttgagtggtacttaaagacccaatctttggccaatttagaacgtgttgtcaccttctgtgtctaaattcttagtatgattgtttctaaagagcattataagaactggtagctccttatcttgaggtcagaggtagcgaaaagattatgtggttcgtatgccttcttgctctcatttttctcgatttacatctcaaccctgaatttgcca

SEQ ID NO: 130237 - DNA, 1057 bp, Homo sapiens
tgcctcagagactgtctgaccttgttgcctgcccgccttgcttactgttcttcctcccatgtggtagacatgctccccacacagtgtgttttttgctggcagtcctttccctgtacacctgccttactctccctaacttcgtctgtgttcaaatctcacctcatcgaggcccaccctgaccacttgactcggtgcagctctgctgttctacttctgttctaccggatcaggttactccccactctttcctgccaataattatgagccttttgcaaatgctgtcattttcttgtgtattatgtttagttttggactctcaccccaccaaaacataagcttgtgttggcagggattctgtcttgtttggttcacttctatatccctgacacctacaacagtacctgccacatattaggcactcacatatttgcctaatatgtgccacatatttgaattaaagaaaacatgaatgaacgaatgatggcttctactttttcctccgaagtgactcaaaataagagtagtgataggcatgtgagcttgaagagttggagaagactgaaattgatgtagtggatgctggggaagtctgaggctgcctagaaacagagaataggatggacagtagagctgaaggttgaacaaggctggagctaatgaagatgggcctgtatggtagagtgatttttctctacaagggcttagcagaccatgtgaaaagatgctgggcttgatccagggtcaagggtttgccagatagagcatgagagaatatgaaattaagaaaattgagagtatcagtaaaggaatggtttaaaataatttttcatgtattcaagacgggtagaaagaagaaggtaggggctaataccgtgagaaaagatagggatgtcaggggttcttcatctcttgatgaggttggagaacacatgaaatgagaacaaaggaatgaaaattctagacagaaatgatattccttacttaaactcagtgaggccttcaccacatgcctctgtagttagttccgcacccttcatcactacttatgggattaatc

SEQ ID NO: 130238 - DNA, 1015 bp, Homo sapiens
gtgtaatgagaatcaggagagaaaaattggattttagaccatttctagtttgaattcagaatatttggggaagtcaaagctcactttagaagtaaaatggttcatgttaagctgttttaaaaactgatacccatagtcaatgtaagtgcgacctctaaattaaaatgactgtagcttttattgacctgatagggtgaggagcaaatagtattaactttatatatgtaaacattaaacctcctcccatcttttttcttagaaaaacatacaaagtttaaaataaagtaaatgggccctaaacttttaagaaattggctgtaagaaaataatggaatctaagtgtgtttttagtgactttaaataaattctctcttcactaatagggtattaaatataaatgtatagttctgaaattgtgaacatgagtagtggcttttgtaccttttatggaataagtaactgcagagtctaagaactttcagagggcatttaactggttttatatggtaaaattgcaaaattatagcactaaagtagaattgttgttatttcccagagtaagtgacagctgaggtattccgagtgctaatgcttgcagggacccactgtatgttggccttatcctttttcaactgggcacactgtatgtaatccacaaagcaaacaagtgagccgacatcataatgttttaatgctgcatttgtttcaagggaaacagaggaacaattaagtagtttgccagagtaaacacatgcatcaggactatctcattccctgtcactagactataggtttcaagtgttttatttggtttggagacccattaaattacaactgggtggtaaattataagggagtacctagtgctaatttattagatgaaacagattccacagaagagtgatctatttccattttacttctttacatagttgccttttcttttagaaaagtaatgcctttggtcctttttaatataaaaagacaacgatgactgtattttttctttgaaaat

SEQ ID NO: 130239 - DNA, 1046 bp, Homo sapiens
gtaccttaagtcttgtttgatgatctctcaaagcaagtttgccttctggaaataatttctggggttgaagagcatggtattaacagatttaatgtggctattcaatggattggcgaagtactatgtgaggtttaacaaaatgagagagacaaattgaatatcaacaaaagttacatctgtgaagaattataaatttaattagaaaaaaggcaaacttaaaagacctcattaactaatcagaagtcaaagttactagtttaggattcttgaatttgaattctaagaagttctgcttgttgctatttgtattttcacaactctgtcaatatgctactatgggtattctatacaatgagttttaaaaagcattaaagtgaaatgacttgattgtaatataagatgaccatttgttatgttatgggaaatatttttgcactcatagaagtatttaaattaaaaataccagattaggagaagacaagaaacatgctaagtttatgggtgtaaagcagaaaatgtgaacttactgaatgcctcacatcacttttctagaaacaataaaaaataatatttttctcttttgaatggaaatatccctaattaattattttcaaaacacattatggttttagacctttacaagacagaaacttccagagatattatcaaacatgagaggaaatcaacagcaatcagaaataggtgttctttttagataagtcattataagactatgtttccttctgcactgtaatcttgtactacacataaaaaactaaaagcatgtgaagtgtagcattttgtaaactgtaactaattttgctcacatctgtgtctaattgttgtctgcattcgcattcttgagagtagatttatttttcctggaccacgatgtggattcagctgaccagcctaagtgaggattagttgttttaaagttattttgattaaagagtcatttttaaatacagtaacacacaacacatggtttaaataatccctgagacacaaaagagtatatctgaagtatacttaatgaaatgtag

SEQ ID NO: 130240 - DNA, 1056 bp, Homo sapiens
gggtagggaaatgcagggaatatttgacagagtgtagaaatctttcctggagcgtttgaacttgaacttgactctaggatcgccttgccaggtgaaggagaggagagcgacaaagaggggcaaagagatggaccgaggagagccaggctagctctctgcaacgactattgatgacttgaagctatcagtataaatatatagtctcacacattaggggcaggcgaataggtttttaaaatctgaattgtttatacaggtgcagaacaaagtctttctttagaaaagattaatggtgaggagagcgctagatttctctaaacagtcacaaaaactatacccagcctcaacgctgaggaggtcatggccagtttctttatttcttgaagaaatggtctgaccccaccagttcgggcttatttttcacagcactcgcctttccctccctgtcttctttctctgtcttcccctccctccctacttccctccctttctcttctactccatctcctcaccctccctctgttcgctttcaagaaagtcagctattttattttgtttgtttcatcatctttcatttaacctccatttctttcatttttgtgaaattaagttatattttcacttgtaactctgttttcaagttgcagactggtaatgaaggttaggaaatgtaccttatatgcattttttataagcatataactgcagtttgctttaacatgtttgtaatatctggcatttggtcacctccttccactttcaaagtgctattactttttcttctccttggatgattacaacagcttctcgagctgaacagtgtaagtataactctctcttttgaaagcccagtgtttttcatggttttgacaagtgacatactgaaatgaataatacagcctttatttttatcttataaacacactgaaatcaattcctatttgcttatgctttacaaactcttagatgtgaaacaggtatagactgtttgtgtgtacatcaatggtcttgaaattctttagtgacatttaaaaaatattcaatggggtgagtagg

SEQ ID NO: 130241 - DNA, 1035 bp, Homo sapiens
ttcttttaacattatttaattataaggacatgtcatcatttatcatagtctttctgcaggaggaaaagcctccagtaggccaattcaaagatttgatgagacatttatatgagataattttgttacattgaatataaaataaagactagtcaaagacctatagatgcttgggcagtaatcagatggcagtcaaccaggtgaggaggtaacagatcttcaatgaaattccatcagaaaaattgcttgatcattttatcaggatgctaatttcttacattgtagagaaagtttccattccaggccaagtttgaattaattgggttacaccacacaaaactctgaagagaatagagtgtccactgacatgtcccaaaattcttgcaatccaggtaaaagaaaaataactggaggagaaaaaaaatcccttcctgctttttctccctccctccttctttctctctcttttactctcttccttcttccctacctctcttccccctccaccatgagcactttctaatggctccacaaatttattttcctgaaaatattagttaacataacttcacttactacaagtcagaagtattaagtgaagctatgataactagtatctataattcttattttatttataattccagaactcagtattgccttgattgttgtgatgttgaaatcatgattatttcatctaatggggaaattagttagtacccacaatgtgcaagattttgtgccagattgtgtgagagaaggatgaataaaagataaacagacatggtccctggtatttgaaaacttaaactctagtggaaggcaagtaccttatttggaaatctgcaaaaattttgacaattattctcccctttttttaggtcttgcttgagcatagaactattgatgttaatttggaaggagaaaatggaaacacagctgtgatcattgcgtgcaccacaaataatagcgaagcattgcagattttggtttgtatatttgtcatatctgtctgctttctttatcttttcatgaata

SEQ ID NO: 130242 - DNA, 1181 bp, Homo sapiens
tttcattttaaataaccgtgttgttgttccagtcaaggttgcattttacaaggaataaggaagataaagctgcctcctcctatcctaatctcgctcctcgctcagtatggagtcgtccggtttacctacaaagccctgccctagactggcggcaaattcaacgcccagaggcaggaacaggtgtcggccaatcagaagccggaacaggtgtcggccaatcagaagccaggcttgaaccgctcgcccatgtcccgccggcggaagagactctccgcggccacgccccgagccctcgaatgcgagccaatcgttgctcggcgcctgaaggggcagtacccaagcgagccatttaacatggcggaggatgtttcctcagcggccccgagcccgcggggctgtgcggatggtagggatgccgaccctactgaggagcagatggcagaaacagagagaaacgacgaggagcagttcgaatgccaggaactgctcgagtgccaggtgcaggtgggggcccccgaggaggaggaggaggaggaggaggacgcgggcctggtggccgaggccgaggccgtggctgccggctggatgctcgatttcctctgcctctctctttgccgagctttccgcgacggccgctccgaggacttccgcaggacccgcaacagcgcagagggtgagtgcagaccgcgtccgggccgggactacgcggggggcggatgcgggctccgtggtgcgcggcagagggctggttccctacgtcgccgagggaggggctgctgcggccgattagctgggagtccgaggctccgggctgaactttgttcgaatcccggttcgcccgttgtcagcacctgagtttttctcagattgatttcctcttcgataaaatgaaaataagaccctgtttaggtttgatgcaagcattaaatgagttaaaatgtatacagttccactcaacccagtacctttgtctcttttggcgctttctactcaggtattcctgtagtaatattcagcagtccctgtggcctccagtaacccccgaggcatcagtgttttatgttaatttgtgagctattaaatctcatttggcctgctggctctacagcagttacttttattctgtgtagtctcagaataaaagtaaatgttggccacatgcctgcaagtcccagctactt

SEQ ID NO: 130243 - DNA, 1008 bp, Homo sapiens
tgtggtccaggagtatggcttacttggtattgtatgtaatcactgcctgactcaacatctgggtgggcattcaagtttggggaggttaatattaataggttttaaactttgtaagctaaacagactcacttaactgaaacctagatagaaataatataaaatattttctattatatgaaatgtttctaggtataagtttccaaccaatgattttacacattttacaatttgtatctaaatcttttttgttaatgtagactgctacttgtgaaagaattttcaacaatttttattctacatgtgaaagttatattttgtaagaaatgtcttcattgctattctttttttttgttctgaattttaatcagatcttaaatgtacaactctaaatttatgataatttttacaatatgtttgtagcctattactcaacaaaccacacagtggcactactggatcaagtttgattttaataaaatttactttttttcttttttagctattattcatggactatccagtctaacagcttgccagttgagaacgatatacatatgtcagtttttgacaagaattgcagcaggaaaaacccttggtaaatatgtttttttattttatattggaaatatttcaatctgtttctaatgtaagacaatgggaagaaacagacgtttttgggggaagtttgcctacaagtgtctggtgcataggggtgtgggggggtggtgtgtgtgtgtgtgtacacatacagtcatatctaaagcaagtaaaagaaatgtagtccctgtcatcttagaacattggttctcaaactttagcctgctccagaattacttaaagggcttattaaaaaaaaaaaaacatagtgctgagtctccctaactctcatgagtttcagattcagtaggatgggtatggggctctgaaatatacatttctaataaattcccaggtgattctgatgctactcttggggaagtgtgtttcattgactctatttgctaactt

SEQ ID NO: 130244 - DNA, 1074 bp, Homo sapiens
gaaaccccgtctctactaaaaatacaaaaaaaaataaaaataaaaagttaaccacgtgtggtcctctggagactgaggtaggatcgtttgagcccaggaggttgaggctgtggttagctgtgattgtgccacttcacttcagcctgagtgacagaatgaaatcctgtcatgaaatttagaaattcccattccagcaggtgtagctaaaaaataataatgataattaaaataggtggaattaattttgataatcttatttaactcaatatttctcaaacactatgtcaacaagtagtcagtgtaaaaaatgttagtaaggccaggcacatggctcacacctgtaatcccagctctgggaggctgaggtgggtggatcacttgagcccacgagtttaaggctgcagtgagctatgatcacaccactgcaccccaacctgggcagcacagcaaggcccccatctcttaaaaaaaatcaaatgagatattttacctttttttggagtaagtctttgaaatctcatgtgtactttatacttaaggtgcatctcaattcaaactagccatattttagctgtgcagtaatcatgtatggctagtagctgtgcagtaatcatgtatggctagtagctaccatattgggtttagtctcctaccccacataggtttgacaagattggacatgtttggggtgatgtggctgtagacccccacgtagctctgaaatacagcagatatcttaaaggggaaatgcttgtcatcctcctcttatggaactttaagcttttttttttttttttagccagggtgtctctctggcccaggctggaatgcagtggtgccatcatagtttattgcagactcaaactcttgagctcaagtgatcctcctgcctcagcctcctgagtagctaggactacaggtgcaccatcaggcccagttaattttttaattttttgtagagacgaggtctcatgttgtccaggctggtcttgaactccttgccttaagtgatcctcccgcctaggcctcccaaaactctgggagacttaatgtgcctttccactgcagcctatt

SEQ ID NO: 130245 - DNA, 2564 bp, Homo sapiens
taattagttatcagctgttgtgagtctttgttctgaataacttgatcacaactcttttaggaaagcttaataatagtacaactattatctcattatatattcacataaattctgtgagatagtatttattctcaccattttataggtgagaaaactggcctgtcttgaggtttgttataatgcattagacttaggaaccacttaagaattctgttgctatgacatgttatgtaaaatagtttactttcgttcttaaaattcatgtttttgtaaagaaaatcttcaaatgtttgtaatctcatcaacctttttctatttgaaattgatcttaatgagcaaattaacttagaaaataaaatcacttctaaactggtataaacaagaagagtacctagcacatagtatacactcagtaaatatttaaaggaatgcattattaaaaactgacaaagttctacttagctttctgagttacttatttttgttctgtttttaaaagatgcacagtttgaaaatgatgaacgaattacacccttggaatcagccctgatgatttggggttcaattgaaaaggaacatgacaaacttcatgaagaaatacagaatttaattaaaattcaggtatgaataaattacttttatgcttattatatttctagaaaataacatttaaaagaaattaagaggaacctagtagaagttgagcagtagtaaaatttaatgtattgtttctcttcagaaatttgacctttggtttatagtcttaacatgagcactgggggctggaacttaatgtgccatacttaagcatatgttgcctctatgttgtggaaaatttaaaaaccaggggtttgtgcactctcaattgatgcttaaagattatgtaaaaagtagatactatttttaattaatggtaaattttagatttttgtaatcaagaatatataaaattttaaccaagtagggagaattttagtagacagtaagtagcccaaaacgtcattcaaagatacaatagctagcagtcaaagcaaatactaggtactttcttagttaaataaactttttctcttttgagaattttaaaaatttcttttcaggttggataaaagaaaatccaagtcattccccaccttcccaagaattagtgtggtgattgtcaagtagaattaggacctgaggaaaagaaaataggcagaaaaacgactgcttcctttatgaattcaacccagagcaaagagatttgtcatgttattgcaatcttttaggctgctagagaaagcaagtctttcttaatacactactgtaaaatcaaatgggtgacaaagtttatagcaaacatttaatatattccttactatttgccaggcactgttctaaactctttcacataaaactcttacatcctcataacaatcctatgaaataggtactattgtttccaccattttacatataaggtaactgggacaccaagaggttaagtagcttaccaagtttacatagctacccaaatggtaagtggtcctgtcttacttaccacgttaccaaaaatgccaatgcatgaaaaaaatgatcattaaaaaacatctagcttcttaggtgtgtattagatattttccagggatctgactagcaaattttatgtatcctaatcatcacaaacatcatctacctcctctcatttcccttttactcaaaattaatatttaggtgggtcctaaatgtgtgtggtatggcttctaatttatttattaatacatacttttcatttggtctaaattagagatagaatgctgggcatttatgaataaatgtgcatgggaccagtgcaaatttttcatgtcatttcaagcgacacttattttgtctttgaaaaataattttatatcttttatcaaattaaaattattaagctacataaaaatgttctcaacagaggatttcagacttacctgagttatcttaataattaaataactattgggtatttataaacgcagtctaaggttggtatttttcatcttttaggctatagctgtttgtatggaaaatggcaactttaaagaagcagaagaagtctttgaaagaatatttggtgatccaaattctcatatggtaattatttaaattaaaaccatagaattttagaagtgtttatgtagagtgaggaaaactgaaagaaaattggaggagaaaagaaatgctttatcttttaaacagtatagaataataccgtgcaacagaaaaactacgcaagtcacatatgtgatttaaaattttctaataagctggacgcagtagcttacacctataattccagcactttgggaggctgaggtgggaggatctcttgagctcaggcattcgagaccagcctgggcaacatggagagatcctcatctctccaaaaagaaggaataataaataatgaaaaataaatacaattttccagtagtcatattaaaaaagtaaaaagaggcccggtgcaatagctcatgcctataataccagtactttaggaggctgaagcaggaggatcatttgaggtcagtagttcaaga

SEQ ID NO: 130246 - DNA, 1050 bp, Homo sapiens
aaaagaatacgcatcgtacaacactatttgtagagttaaaaccatgctaagcaatgctacatatttgtggatacatacatatgtagtgcaagtaaaggaattcctgggaatggtgaattctaaattcagggtaatggttacagttaggagaggaaagggaatacaatcagattatggtagtaaacagggattttaaccatattgattatgttttatttctgaaactgggtaatggatactctggtttataatacatatctttttgaatctgtctaaaatgtaaaatattttttaaaatgaggagaggccagaagaagtcagaaaaaggtacattggcatgccatttaaaacttaattttaaaaatatctgtgtctcttgagtttgtaaagtgatttcttttcaattaaataatatgtgacaaaaatcgttgtatctgtaactttgtgtgatttatgttaatatatttcttctgttttctttagcctttcaaaagcaaattgcttatgataatctctcagaaagatacatttcattccttttttcaacacttcagctacaaccacatgatggagaaaattaagagttatgtgaattatgtgctaagtgaaaaatcatcaacctttctaatgaaggtatacatattattcaagagtgactaataatagacttaaaggaaacgttataataaaggagaatacttgaaatagaaatcctttaaaattaatcagaatttttcattgtggttttgtagaaaggtgtggtaaaatgttacattttgtggacctaattaaaagatttatgagtgatatgtacttttgtaacttttcaaaattagtttggggaaattttcaaaagaaaaagttgaagggaaaacttagaatgaattaaaaataagaaataggcaaaagcaaatattttaatttaagtaaattttaaagactttttaaacatatttttggggaaaaatagaattgtattaaagaagggccttttaaaatttttctaggccaggcgcggtggctcatgcctgtaatgctagcactttggga

SEQ ID NO: 130247 - DNA, 1920 bp, Homo sapiens
aataacattttattttctgtcttggcctccaaatttttaagttgacagtgttatagtggagcatcttgattgatttgagatagtttttatttgaaaatatctagaatttttattttttttttttttcatgcagccttttctcttaaaattgcctagagagcattttgtctatcaaatatatttacaaggaaagaccaccttcgtaacgctgataaaccaagcagatagctaatgtagctgctggcagtgtcataattattggtgaaaataacaacacagtgcccttcattggcctgtgaacagatacattagctatgactatcaaagaattacaaggcttaatttaatgctatttgtttaaaatggcttaatgcatttcttcctatccttctacctccacgcacgttttttaaggcagcggcaaaagtagtagaaagcaaaaggacaagaacaataacttctcaagataaacctagtggtaatgatgttgaaatggaaactgaagctaatttggatacaagaaaaaggtttgtaatttaatcaatttgtatattttttgttttatgaatgttctgtctttatgtaaaattgatatgtctttttattaaaaataattattgagtagcatgttatcttgctgatgattaacatttaggtatttgaagtactgtagagttatttcatgacttgtgcaaattatatatgctaagcaaaagtagagaataagaaaatattacagtttaaataatgtggatagtttaccattcttggggtatgcttaggaacaagggtgaggttggactcctgtgccccttagttgtgtttagattctacatgttctcattatgtgattcatgtttcactgtactaagagtctagtattttaagatattattcatatatcttctctaagcataagctcactgcttcatctggtgctcaactgaagaaatagtgatttgctttaatactggaggaaaacaagttgtgtcagtcctatatattgagagatagttgttaagtctccaaaattattttttctttagggattttcaggggtgattgttgtcttttgttttagaagcttaagtatcttcccctattgagaaagatataactcttaacattataaagatcttcttttctgttgaacccatggtctgttttctctgttcttctacccttaaaccaaggccagataatcaaatctctgtggtctctggatgggtatatttggaaatggatgtaatattactttcttcttgggaccatgacctaagtgttgcagggaccccatcttaactacttatttagaggtggagattggggttcaagttggatctacactgcatttgtcacatcttaggactgaggttctgtcatcttatagtggcccctcctattgttcctgcctgtcaaagcatgacttgttcctcaggggttcatctctccaaaggctgtactaaagtcttatttcacattgatgtacttttttctaaactccaatttaagaagtagagattccatttttattggcccaattacttccttttgtttcaaaaatcaaagttgaatgatactaatacccagtacattcttgtggccaagccatcctgctcatgataatattgctaataccatggttcttacagataatcatgagcacacttcctatggactctccttatatagtgctacccacttatttcagatgctctcctagacacaaacacagtgcaatccatgtgtaccaaacagaactcttcatgttctcatttgcctctctacaccctgcctctctttaacctcacacatccagctgctctccaagtattaggaaccgcacctcagaaatgcttctccaatctatttttatctatatagctttgtaccattcaaatccatccttgacataacttc

SEQ ID NO: 130248 - DNA, 2456 bp, Homo sapiens
ttgagaccagcctaggcaacatggcagaaccttgtctttacaaaaattaaccagtcttggtggtgcatgcctgtagtgccaactacttaagaggcttaggtgagaggattgtttgagcccggcaggtctgcagtaagctgtgtttgtgccactgcactccggtgaccctcggcgagaccctgtcaaaaaaaaaaagggggtgtaatatttgtatacaacctacacacatcctcccatatactttaaatcatctctagattacttaaaatatctaacacagtgttgaaatagttgagatggacagcttcatggaggtagtagtcttgaacaggggcttttgtaggatggttaagatttttacagatggatagaagaggaaatatcattttaggagagaggaatattactagtgaaagcatggaggtgtaaatagtcatgctgtgtgtatgtggaaaccattttaactataacaaacgggaacttaatcgattcccaaaagttcaattggagactggtggggagaaccagaaattaaaattgaacccatcaaattgtatactttaaacatgtgccatgctttttatgtatcaattataccttaataaagcagtttttaaaacttgaattcatggaaataaagtgccgtagaagagtttttgaaagagtgttataaatgcttgactacaccattaattatgcttatgtttggagaaacttggtttaatacctcttataagcatgtctggacaagaattagccatgttgtaatggactgtatatgtcccgatgttaccaaggtttctttccaaagttatttttttataaattgaaatatgccttgactatgtggaaagtactatccttatgaaaagtttcttttgtttacattcttacaaattttttcttcttttaaagtgttagtgacaaacagtctgcggtaactgaatcctcagagggtacagtatccttattgaggtgaagtaaattgacgtttttcttctttgtctttcaaatctttgattgaagcaattcatgcagacctaataaaaactaccacataaatggtacaattgaaagaatatctcagggtcctagttagcccaacagatagtcacgactctgagacatcttgaaattccaaactgtagagacctgctctgagactgggttgtttcacattgtttctacaaagccattattggaatacacatatagggagttcttgagcttaaaacagatgtttagtaaacacttctctgtcacagaaacaaagatatgatactggggcaggaaggggatggcaattacatttctaatgaatgccccatgccaattttatgaaagttacttgaaaaactttatttgatctaatagaatcgctgtgacagacaatacaacctgtcccgagggcagaaagtctgcatgaatgatttctaacatagagcagttgggatcacaagtggaaccatggggaggaggtggctgacttcatgtggaggaggtgattggacatgaggaactgagaggccaagatggtatatgaattgtctgtgagaacactgaaataattcataatagcagcacttaggtgtagagaaagatctgtgaatgatgaagaagtgcttggaaggatggtaaatggctgtgaagaatgattgaaggtgatacatctcagtggcatgaatcctcaaggctgaagtttctatggaagcaggatcttgaaagtggcattcattaggaaatgaaaactgctgtctctggagtcctatagtttatggagggtggaagattaagccaatctctacttgagaaggctaccaaggagagaaacattgtccccaggggaaagctagattttagacaaggcaaagagcggagaggaatgggtgaagagattgagaatgacattctagaaaggacaatagaaagtcttaggaaggagggacagaggggaagagagaaaggatggctggtcacctagagtatctatagggataaaagtatagctaaaataacctacattttaggtggagataatacagctgcctaagcttaggtgaactgctttttgaatcttagtttgctccttcataaaattggattaatataataccaatttggcagagttttcaaaaaaaatgatgccacatcctgtgtttccaaacagccttacctttcaaaactctttttggaagctgtaaagataatcaagtgatacctgccattatgtaaaggaattttggaatccgtctttggggaaataaaagccataagagagaatgaaagctaatactttgtagtttaaggatttttttccttgatgtatctaattggaaggccgaaagagtcttgtcttttcttttttttgcctgcttcttctgagacatcaaaaaacatcttgatttctgcggagtagatgagatggagaaagatgagacaggcaacagaaatcttaa

SEQ ID NO: 130249 - DNA, 1093 bp, Homo sapiens
gaaatcctttttgtgtattgatcttactgatcttttaattctatttgtagattctcttaggttttctgcctaaacaattatcatttttcagtaattacagttctgtttcttttcagttacatatatttgtcttaccaaactgactatgaataagaaagaaggagtgaggaaaggattatgcttcttagtactcctaaaacattatcgtaagaaaatttcaacgatcctatgcaataaatatttttcctttttttttaaacagataatggaaagacaggttcagggatgtgaaatgatttatttaaagacatataaaagaatcaagactcaaaacactccccctctgatttcaaaggctgatctttgcactataccatactgcttccagatttgaaggaaaaagttaaacatgtactttttcttagaatagcttagaaaaggaatttcattataatcattaaaaatataattgctcttttttctttaatgtaaatcaatatttatgacattatttttctacttttaggtacaaaaaagaaaaaagaaagcagaagagccactgaaagcagaatacctgtttcaaagagtcagccggtaactcctgaaaaacatcgagctagaaaaagacaggtatttggttttttaaaattcgaataacgcttatggacattaaagttataacttgaataattgtgattatttctgttcaacctccccaaaattttgagtgtaaaatatttgccctttgccatcttttattttgccgtcttagataggtgactaatcagcctattcaaaatgaaatacttcacccatatttaaaaagtcttaagttgggtgttggtactgacatctgtttggaattattgtgatactatcataaaatctgtttattagatgtaaggtgggacttaactccacattataagctttgatgtttaaattttcctaacagggatccagtgtaaaaagagttttctttacttaaaaacaaagaaaagataccatttgatcacaaaattttattaaggtgggtcaatttagggcttgattcatttgcttcccctttcagtgactatagtcttgtgccatc

SEQ ID NO: 130250 - DNA, 2136 bp, Homo sapiens
ctttcttagagttttcatctctccatttacatttacccatctgttcttgcatgttgtccactttttccattaaatcctttgacatattgatcataatcattttaaattccaagtctgacaatttcaaaatctgtgccatatcttgagtgtggtcctggtgcttgctttgtctcttcagactgtgttttttgctttttagcatgtttataatattttgctgatagctagacatgatatatcaggtaaaaggaaatgagataaatgatcctttaatgtgaggttttatgtttatctgtctaggagttaccgtttgtagctgtaggtgtcaaaggctaaaatttcctttagtgtcctgtttttgtctctcttgttgtctctgggtttccctagagactgctttttaataagaatctgagggacctctttcaactataacgcccaggatcctgactaatgtagtggtaaggtaaggggaggtgaagcgttctggagtcctgtgcatagttctccttcttttagtaagcctgtgtcctaggctgtgaccttcataagtgcttctcagcccaccaccccttgggtgagacatgaaggctagagaggggtggagttgagtatttccacaggtaagttaggttctggtaaaacctcagttggttaggttctggcaaaattagtttctcttgaggaaaggattttgttaagaagaccagaacgctttcctcatttattttgaaatggggagtatttctaattggggagtatttcaaaatggctactttttccctccgcctgtcagaagcaggaaggaatttttgtgtaatctttaccctgagacctgggggggctcctggagataaaactcacaaaagtttgtgagtccctctgaaactgggcccttggagtttttaactctgaagcttatccacacggatcctccatcagttcctcagtcacagttaattgctcctaccagtattggctccagctgtgagcttctgctcctggcctttctgtccccagtaattcttgtgattttctcaatctgcctctctctctctttagttttcaggacagcagtttgccctgtgacatttgttctttgatgtatctaagaagagttactgagtttcagtttgttcaacagcttttttcttctggggactgtagtgatgatttccaagctcttcacatgttagattggaaaccagaagtctctgtcttatacatataactgatctttccctatagttcttccagcagccattccaaatgaggtgttatttacagatatatatgaggaaaacagttgtttctcttctattcaaaacgaaatataggatatcgaccacataatcagtgataatatctatcaccatttcctatgccaaaaaagaattctgtggatatcacaagggcctggttttattttttagctttccgttgttggccttttgttaaaatacttgttttagaagataagtgacagacttaattttattttgtattgaggtttttaaaaaaaaaaacttacggcaatagcccatgtctacttggacagttttcttttgctgcattggtctgttaaagatatttcttccttcctcatcagaattaaagagccctccttttataaacttattccattaaagaagaaaagtaaatgcctttcaaactgttttccataaacagtatgtaatgagaaatactgtagcagtattttcttttactattcgtagtatcattttaaggcattaaaaagcattatttgttctttagaatggatatacagtgcagatctgagttatgtaatctctagccttgggaaagaaaaagattggtgtgttttaatttgttatgtgctctttgtatcttttcaggctattggcatggctggggttgttaagattttgtatttgattttttgagaaaataaaagacaaatgacaataaaacaaaggaaatgggttgtatgggtttaatgtccagaaatacatcatcttaaactcttcccttaattattactatcagtggaatctggtacaatcagttaaatgtataaaatgaggaaatggaaagttttaagcacaatagtagactttatgaaattgtactgcccttatgttttctttctgatct

SEQ ID NO: 130251 - DNA, 2922 bp, Homo sapiens
atgtggcccccaaatttgtatatgaaattttagatactatacttttctgtggagtacgtctgtaagatttatatgaccccaaagattaataacccactgttgaagtgcttttaatcagtcaccccacacatgaaaaatttattaatgcatctcttggtttttgtcagttaatgacaagcagtgtagtgaggttttgtaggagtgaaggccgagtcaggcagtaatagatggtcataggaggctgtcagcctttgtctagcgattgaatagccatgtacttgtaagcagcacagttgccgataggtgtgctgcagacaaacaaaagcaaaagcacgtacagaagagaccaggttcgtatcttggatttaagtcacaaagcagaggaatagcaagaacaggggatcaggtttaaggtagctcaaacaaacttctgcatgggtttggttacggtcactgccaactttttggtactgagtcatacacgagatggttctcatgtcatgtttgtattcttcaggccaccttgaattctttctaatattgcattagacaattgaactggatttttttttcttcgattatagtaaagtacacatgatataaaatttaccatttgccattttaactatttttaagtgtacagtttggtagcattaaatatattcatattgtgctaccatcactaccatctatcaatagcactcttcctcttacaaaactgaaaccgtactccttaaacagtaagtccatttccatcctcccagcccccttgccaccatcattctactttctgtttatgagttggactattctaggcacctcatatcagaagtagcatagtatttttctttttctgtctaacctaatgtcctcaaggtttatccatgttctagaatgcgtcagaacttcctttttaaggctgaattatataagtataatatataatataattttgtttatccatttatcagttgatggacagttgggttgcatccacattttaactattgtgaataatgctgctatgaacatggatgtacaaatacctcttcaggtccctgctctcgactcttttagatatgtacccagaagtggaattgctggatcatatggtagtccttttaaaaaattttttgggtaactgtcatactgttttccatagtggtgctataattttacattcccaccactagtgcacacaggttccaatttatccatatcctcaccaacacttattttgtgtttttttgatagcagccatctgaatgagtgtgggttgatgaaccgggtttttaaagaaaatctgaagtgctggagaatttcttgtagtctagacacagtaaataaccacgcagatggtcaaattgctctttcagcatgccaacagaaggaataattagttagttgcctgtagcaaatgccaagtatcagtaatttttctgtgtatagtattaaatttgatttttaaaaatgtttaggaattttctcccagcataaaattaaatgtttttaattagtttatgttagttgtatttttgaaagtctattttagacaagatttgagttttatatgggtgtgtaatacttcccctaccataggcagaacaggtttttcactgagttcattagtgaactactaaacattcacaaagcctatttggagatttggaggataataaatacaactattaacaattgtagaagagcattttaagagacagtgtgggcttaaagtcagacaaattcagttgacatgtagcactgccactttctagctatctgatcttgggcagctgagcttacataaaatgaacagtaataataatgacccctaaaaatgttacgataaatgtaaaatcttttaaaaatctaagaaatgtttagagaagtcttccgtctttaagaaactaagcattattttgattttttaaaactggcatttatagtaggtattttctttttgaataattgtttctgtaaataactgttttactttttatcaaaaggcatggctttgggaagaagacaagaatttgagatctggcgtgaggaaatatggagagggaaactggtctaaaatactgttgcattataaattcaacaaccggacaagtgtcatgttaaaagacagatggaggaccatgaagaaactaaaactgatttcctcagacagcgaagactgattgtgtttgtaaaagcttgatgaaaggacagttaagtattttgatcactgcattttgtttgaaacttgtgtcattgatgtaatttaaaacttttgtttaaagcattacagtatttttctgtgaccatcaattaatgagggtttgtgctaccagagttaaagcatatgctatcattgtattctttaagaaccttattttgataaaatgtaaatttgttgaaccctgccacatttagtatccccacccccaaatcctgttccaatgaaaaaattaaaacctgatacgaaaaaaaaaaaattccagttaacctattttgtgtctgtaggctgacctcaaccctgtaacgtaacccattaaaatgaatttctttttttttaagacagagtttctctctgttgcccaggctggagtgcagtggcgcaatttcagctcactgcaacctctgcctcccaggttcaagtgattctcctgcctcagcctcctgagtagctgggattacaggcacacaccaccacgcccagctaatttttgtatttttagtagaggcggggtttcaccatgctggtcaggatgttctccaactcctgacttcatgatccacccacctcggcctcccaaagtgctgagattacagacgtgagccactgcgtcctgcctaaaatgaattttctagatgattgaataacagtagtcctttgatagaagataatgacttggtttatggccttaatatactact

SEQ ID NO: 130252 - DNA, 2028 bp, Homo sapiens
aaacttaagatcaactttttggatctctactaataaaaacaacaaccagaggaatgcttaatgaaaaggctatttagctttggtaaaagagtttttgtggttttgcttacgtgcctaccatgccctgtctcccagccaggcaacagctgagaggacagtggcctgtgctcctagtgcatcttgataccagaacgggcaatacagatcttgctctcacagaaatgtgggtgtgctttgacctgcctggcagttcctgaaggttcagctcagagggttgcctttgttttgccccctccacactagaacagcctcacagtgcttatcagaagcattacctgcagccatctggggctggggacggcaaacggggcaagcagcaaacagaccaaaaaacttggaaaggaaataactgggaggaagatacgtgggagagagaaggctcagaagggcccttgtctgtactaggtagtccggaaggccacacacatgcctaacactggacacatttttggaaaagacctgagaggactctaggcctgcacctctgactgatctttaggctccacagaagtaggaggtggaagctaaagcagaatttaggtgacctggctaagcgctgaaggaatgcccaagtcaggacgaatctacaaagcctgggagaattaccatttttaactttttattttattttattttttttaaatagagacatggtctcgctttgttgcctgggcttgtctttaattcctggcctcaagaaatcctcctgcctcaacttttcaaagtgaaacagtatcttttgttcttttggactcatgacagttaaggaaattaagtgaaatgctgtacgtattctttgccatctttcaatcagcatgtttgtacaattcaaattgtagctgtagcttgtttatttttatttctacactaatccactacatgattctattaataatttacgctgttgatgagcgtttgaagtgtaaaaataattgaagaccaaacatgagaaaaacagactttttattcagagcttgcggtagcaaaggaatcagccacgatctcttgtgtttagcagactcagaggcagataggtttatagtggggggaaaggggcaaggttcaggaatgctctgcttggagggtgttggcatgaggaagctggaggctgatcagctcactgcaggtgtcttacaggattgctttggggaacctatttggctttctctgattggtcccatgttggaagagggagcaaaatgttgggatgatggcagtaactgagtaagtcttgaccattctgaatggatcactggggagattgtggtttggcttccaggagtggttgctgcagagggtctgggtgagagttctattgtcacagaagctcgtccattgtccgtgtgtatgcctagtcccagagttgtttccagtttctggctgctagacttttacatttcacaatgaagtgtgattttagaaataatatgaactcttgcctgccagaacaagggccagtgaattttaaaggaaggaagcacaatctagaactcgacagcaagggtcaaccatgaaaagttaggtatgaatattgttaattcctagagcaagaattttttcaaaaatatagatagatagccaatagaatactaaattactctatttggaatactaataaacccagaaacaaaaagtagtgaaacaaaaacaaaatcacagggacaaacagaagaaataaaatggtacacctaaatccaaccacatcaataattatatcaaatgttaacggtctaagccagaaggtgcgtggcaaacttcttctgtaaagagccagatagtacatattttaggctttgcgggccatacagtctgtatactctgcctcaaattagccataggcaatatataaatgagtgggtatggctgtgttccaataaaactatatttacaacaacaaacaggctggatttagccacaggttatagtttcctgacctttgctgtggaattctagagtgtgtttccttcc

SEQ ID NO: 130253 - DNA, 1008 bp, Homo sapiens
tgagccttaagggagggtttgaggtgacttctggttcagtctccccctaagagtatagtctttcagtgtcctcatttaattattcccatctcaatgtgtccttgggctttgacttctggcccccttgctgaggaagagaagacaataatggaagtaagaagtataggaccccctttcctccaaggctaagattcagacctcttcaaagagaggaccttcctacacctggaccacagcccacagcggggaagaaactggccagagggcacaggtggtgctaacctggaacagcagcccaggagggtgtggctgggtggaaaggtggcctgggggcaactggaactcatccacatcactccccccctgaataataatgataggaccaggactggaagggaatggtcttcctgtcctttcactccagagaccctccaaagccctctgttggtaaagcttaatgatcattgtgtcaacagatgtttacagagtccagcccatgtccatctatcacaaagcagggcagagaagggtggatttggagctgagagccattatattgataactggcacataaagtgcttttatttttttcaacttactcccaacacacacacacacacacacacacacacacacacacacacgcacgcacgcacaccccttcatatgtcaaaatgacattaagtttcatttaaatgtatcctatattgaaagagcaaaaaaaaaaagtgacagtttgactcaagaaatgcaatggtttatatgacctacaactctcgaaggaaaagagtaataattttgcaatgttttgatgatatttacaagtcataatttaaagagatacataatttttccctttctacgtaagtcctcaaggaactcacatctgttttagcccagatttgtatagtgttttgctttgcatggattatctcatttaattcttgcagaactttgatgaatggtattattaattagcagaatggtagtagtaacaggcaaagtggt

SEQ ID NO: 130254 - DNA, 1620 bp, Homo sapiens
gttgtttttcagtttgagatattatattatgattattattattaatattagagacagggtcttgctctgttgcccaggctggagtgcagtggtgcaatctcagctcactgcaacctctgcctccccggctcaagcaattctcccacctcagcctcctgagtagctgggaccacaggtgtgcatcaccacgaccgttttttgttttgttttgttttgtttttaaggacacagggtttcaccacgttgcccagactggtctccatctcctggactcaagcgatccacccacctcagcctcccaaagtgctgggattacaagcgttgagtcaccgcgcctggccagagataatatcttattgacctcctctatatgggatgctgtgcccggccacacctcacatacacacattgcactcacacatgtgcttctcctccccagttccttcagcatgtttatgccagtttttgttgaatcagtagtaagtgttcatattatgttaactctgtaattgttctttacacctgagctgtgtagtttctatgtacatgtcacttattcatctccaaattctccaaccaaattgaaaatctcagaacataatgaaagatgtaggccctccttcggattgcattgttttttggagccatccctgcccctgctcccaggtagtctggctgctctgcaggcctgctgcaagctgtcaggcttacattgcccttcgtctgcactctggggatcctcatttctctcccaggttgtgttccttattacctggaccctcttgcttggtttacactcctgtttagatagagcacctcctcctgtaccttcacagaaaaagcacagagaatggaaaactcatatcttgcatgtctgaaaaaatccttattctgccttacatttgaataataattttataggatatagaattttagtttggaaaacattttccttccgaattttaaaggcattgctctgttgtcttctagtttcaaatgttgctttacataaatattctgatgcaattctaattactgattatttgcacatgacctacttttttctctctggaatattttagattcttgggtatctgataatctggaatttcatggtaagatgccttgttgtgaacctttttttattttttatttttattttttgagataagttcttgctctgtcacctaggctggagtgcagtgatgtaatcacagcttgctgcagtcttgacctcttgggctcaagtgatccttctgcctcagcctcccaagtagctgagaccgcaagcacgcaccaccacacacagctgattttttaaacttttggtccattccaagatggccgaataagaacagctctggtctgcagctcccagcgtgattgacgcagaagacgggtgatttccgcatttccaactgaggtacctggttcatttcattgggactggttggacagtgggtgcagcccacggcaggtgagctgaagcagcctggggcatcacctcacccgggaagtgcaaggggtcaggggatttccctttcttagccaagggaagccatgtcagactgtacctggaaagtcaggacactgccgcctaaatactgggcttttccaatg

SEQ ID NO: 130255 - DNA, 2135 bp, Homo sapiens
tgttttaaagtgagaaacttttaaaagattataaaatagactgcaaggttcaaaacatagatccccttaaatgacacttccgtcaccaataatcggactgagttacagtaattttactttagcaaacagacatgtattctgtgtctcacgggccacctgctgaatgagaggactccagttgaaaggtcaagaacataaaaccacaagagctttttgagtgggtcttcaacttagttaaaataaaaataaaggacctgtgttccttgagaactggcccctaaattttctttctctacttcagagtgtggcaatgatgtgtttggggactttggccaaaattgaaggtttaggaaacattgaacatgacttgagaatatttagaatgtttacaaatgcatttggaaatatttatatcaccatctatataaaaataaaactgtgaacagctggacaagaacactggtctactcgccgaacttttttccaagttccttgacaccgaggattaccaattgcttgccaatggagagtctgatttctgaaacgatatttcgaaagtgttagttacactaaaagcataccgaagaaaggtctaatttacagaattaaaactcggagttaaaaaaaactgatcacagcctgagcaatatagtgaaaccccgtctctactatatatatatatatatagtttttttttttttctaattagccagacatggtggcacacgcctatggtcttgggaggctgggtccacaggtgcatgccaccacgtctggctaatttttataaagaaaaattatttgtagggatggagtttaactgtgttgccaagctgatctcaaactcctgggtgcaagggatcctcctgcctcggcctcctggctcacgctgggattagaaacatgacccactgcacccggttccccaattttttttttaatgatcacaaacagagtttcccttgtttagtttctgtcaaagcaagttttaattcattgctactttaggacaccctcatgttgacagagtaacttggggttactgtatttgcttttcccgttctatctgagcacaagtgctgcataaaggaaaatggctgactgttctatgtgtatttaaactgggaggtctgaactaaatgatctcttttactgctttccaactctgatttcataatgaaaaaacaatgagagagctgaaaagaacaaagccagattattaaaattattatttttaaagtcactgctacctcagccagggtttaaatactatatgggtacaaattaaattataaattcatttaaaaccaaaacatggatgaggtattcagaaaaatattatgtaaatattttctatttgatataaattccttacccactttattgttcttatggtgtgctcaatggaggccatgaggcactagtgactaataaacataaattctagttattaaatatgaaaacattctacaggaataataattgactggaaaggcccatattttaccttttaatctgtatttctaccagttacacctgacatactgaaaaccataatctatgtgtgacctaaattagtctttgcccaatagttgcccagcacgaagttgactcttcttttagttttgtatagtgttatcaaatttaaacactaaataagtgcagaactgggatacaggtgcatgactgtaaaatgtttttggagtcaattatttcagagaaatctacagatttatataagattattataccgcagaggtgaccccaccactgtctcagtcagggttttatgaagaagccccattgagcaacagttctgaaacttcatcgtgggtatgaattacctgggcaggggtccccaaactaggaccccgtagaggccaaagccggcctaccccttctttgtgtctggactgtgagttaagaataatttttatgttttaaagtgttaaaatcaaaacaataatgatattttgtgacacatgaaaattatacgaaattcaaattttagggtccataaataaagttttgttagaacaaatccaaggtttgcatagtgtctgtgactgttttcctgctacaaagtcagagttgaggggttgtcacagagaccacacagcctgcaaagtcaaaaa

SEQ ID NO: 130256 - DNA, 2384 bp, Homo sapiens
caggcccagcctcaggcatctcttcaatgttattttctcattaaatgctcataccaacctcatgtggtaggttattaacagtctcattttttaggaagaaaaaactgaggtggaacaagttgttcaaggtcttatgctagtgagggcagtgtggggacctgagcgtgcagctgtctggtatcccttatctgacagcagaagaatggatttcagctgagcgtgaaggtgacttccagcctgtaccaataggtttccataagaaacctctgagttgaagtgtgtgtcactttcaaattcaccaaacagaggtggtgctgaagtctaacgtcccataaagactgtaagagaagcatccttagtatgattgataaaataagctcacaaaataatctcatttgtatatagtttgtttcttgttgaagattggacctaagaggtagatatatctttatagctccacaaaaaccaggaggggacaagtattttcccaactctgatgaagagtccatattttagccaaagtcaaagagcaagtagaaagaagaagaaaacataaaccaagttgaccctcttgcattgacttgactatacaattgaaaaacatgattaaaaaaaaaaaaaaacacgaaattacccagcatcctctgtgtgtgtagaccagtgtggagacgtagcttgtcgtgttctctccttgttgaatgcagaggtagttataaaggcaggaactggaaaagggagatttctgttgaattcagggagccaaagtactcagaccatcgtttcccaattttggttttgtacctgtctaagggtctccattcctaaactcacagggctacggcacaccatcaaggtgtgaaatgaggccaagttacaaattcaataaagatgtgtgtgcacacagatcggtagggagggggcctgcaggcctttgacaagcacatttgtctgcagtaataaaactgtgtgagaggaaggagaggggccaggaggaaaaaccagaaggaaaggaagatgggggtcagaaggggaacaagggaaaaagtgagataatagagagcatgaagagaagaggaggtttcaaaaatgaaaggaagagaaatagagaaagaaagggagaaataagataataaaagaatagaaaggaaacaaagaaggatagagagaagacaaaagagagtaaaagcggatggaaggagagaaaacagacaaacagagaaaaaaatgagaaaggaaaaaagcagctggcgtgttggctcatgcctgtaatcccagcagtgtgggaggccatggtgggtggatcatctgaggtcaggagttcaaaatcagcctggccaacatggcaaaaccctgtctctactaaaaatacaaaaattagccgggcgtggtggcaagtgcctgtaatcccagctactcaggaggctgaggcaggagaatcacttgaacccgggaggcggaggtttcagtgagccgacatcgcgcccctgcactccagcctgagcaaaagagtgaaactccgtctcaaaaagaaaaaggcagaagaagcagaggaggaaagaaggtgagtcttccccaagcctcaggtaaccacagcaggaaaagttcatggaagctctgcccaccacatagtatcaatgtggctgcccagtgccagcctgcacagcattgtccccacaccagctcagggaaagaaagtcttcagtggtccccttcttttccctcttcctccccacaaccctcccccaactctgatgctctgggtcagagaaaaaaaaatggcaccaagaatccttcctcctgtctctgctcactttaattctattgtgtttgtgtgtctcctctctacctcatcactaagtctagggaggcatttgttgctataataacacctataggtgtcagtctcctggactgactctgttgtcatcttgaggaaggcagggttttgccttgtccatcactatagcttcacacatttacacactcaataaatatttgtgcaaggaataaatgggccagtgagtgaatgaatgaggtcatgggcttgcagccaagacacacaggccctacttccctgcagtcttccgttcctatactgagccttgcagccaagatggctcagcagtcctctacctctgtttcagaaactgcgcgattccaggaagggtagatacaagctgatatcaacttatgagacgccaaagtcatcatcaacatgaactcaacaatgtgaggatactggttgcaaaatagatgcttgaagcctacatgttgattttacctgtctctttactatcccaagatgacaaaccttaactctttttgagcttttcttaatgaggagttatttttgtattactagggaatttaagacaaaaggccag

SEQ ID NO: 130257 - DNA, 1576 bp, Homo sapiens
gtaatacagcgctgtgagctttttgagctattgataacatttttgtttattaacgttagagagaagaagaaggaggttcctgctgtgccagaaacccttaagaaaaagcgaaggaatttcgcagagctgaagatcaagcgcctgagaaagaagtttgcccaaaagatggtaagtaaactttttgaggcactagcacataaggaggcgccttattgggattgaggatgaggtgaatgttcttggcaagatttacttcctaactgtactgagtaattgcttagctacctaatgttacaatctgaaggtagtggggttttttggtgggggatgtaattgcatactgtggcaagaaaagatttaaaggaaacatgttgtagttttctttttaatgattggcattgctaattgtgattgagctaaaaattatgaataactgattattggttttcagcttcgaaaggcaaggaggaagcttatctatgaaaaagcaaagcactatcacaaggaatataggcagatgtacagaactgaaattcgaatggcgaggatggcaagaaaagctggcaacttctatgtacctgcagaacccaaattggcgtttgtcatcagaatcagagggtaagttcagttttactgcattcgggtttgaatgggaaaaaaaaaaaaaaccttcacattacttctgggagccctgattctgaaacaccggagtaacaatattttaggggaagctagaacaaggagggtgctgatcactaatggtttagttgcaagccatgttccccaagctcctatcccttctcttaatagaatacagaaattcagtgtgtaacatgagaggattcctatctgtttaggtaggattcgatattcaaaactataatggttagtattaataaaaatttcgatgaaaggcaaatgcatttctggtccgttttcaccacagtatcaatggagtgagcccaaaggttcgaaaggtgttgcagcttcttcgccttcgtcaaatcttcaatggaacctttgtgaagctcaacaaggcttcgattaacatgctgaggattgtagagccatatattgcatgggggtaagtctcttttctcctttgatttctatttgataaattggttatgtagcaacatgaattttagatgttttaacagtggtcaccttatttatgtttgctttttcacttcaggtaccccaatctgaagtcagtaaatgaactaatctacaagcgtggttatggcaaaatcaataagaagcgaattgctttgacagataacgctttgattgctcgatctcttggtaggttctatttgggggaaaatttggtattagaccatgcgataatttcttaccctcttgtggccgtacatttctcactattgtgaatcttcatgtgttccctatgattcttgatttagcttaaaagaaaacgtaagacatggtttcattagcttgaaccttatctttgtaaagccatgcatttaccttgtttattcctggttatgttttcatctcacagcctattcaaaaagattttgaataattatttcaaaactttttgcaactttaa

SEQ ID NO: 130258 - DNA, 1034 bp, Homo sapiens
gcgctgctggtgctgtgggacatcaacacgcaaagcaacgaggagacggctggcatggtgcgccacatctaccgcgacctggaggcggccgacgccgctgcgctgcaaggtaacctggacccgcgcgggagcattgttgggtcaagcctctttccaccccgcgccctaccacggcaggccccaaaccccgctgcctggtcagccccgctgtggaggaaaggaacaccccaccggtcttttgggagacgagtggaattcgcttcctgataaaggaacgcgatcacttctgtattaccagggagaaggtgccctgtcctcgcggaggttcggtctctggggaccacggcggggggagggggcgggtttcctaagccctccggggtagggaaggcggagggaacttgttaccacaggtttggatcccaaagaaatgtcttgctccgacttacaagcggcgcgatgggaaactgaagcgtctttgggaagttgttctgactagactgaagaagtgtctgtcttactgtggtctgaaccccttagacgagggcagtattgacggtttcattataagtttagcctgaggaacataattacattgtttcgccagcgataagtgctttagttacattccctgagcgtgattgaaagacgccttgcttcctaagagaaagctcttggaggatttaggcttcgttgtaaatttcttccatgtttttggtcaccccagaaaatctgcatttctgaatacttattaactaacctgaatctgagttgtttttttttttaagccaaagcaaagtccataaccaaccataaatattggttcaggaaatttgataatggctgttggtttttaacaaaatttttcatttttagggaaaacatttacctgtacggagaaaattgacttgggcacttctcccctgtattgataatttatcatcaaacttattgatacctgcgtttttaatttaagggtgaaaatgtaccattttcattggtggtatggaggtgtagcaaatacagatttttgt

SEQ ID NO: 130259 - DNA, 1090 bp, Homo sapiens
ttttgagggttctcatactaaagactaagagctgtttctcttgggccactgtttccccaaaaaaagaggagtgtgtagtgtgtgtgtgttgttctctgagctctgggctgagatcagttctttgcaggtgtctttagctccagcaagctgatcccatgtggtctacttgtattgggcttgtcacaattacatgactttcccctaagcaaagttatccagtaaattgctgtaattcccaaagacttcatgggaggaaggcagctgtaaagctcagtcgttggcaagccttgcagcgttagaaatttgaagctcactgtagtatttttgttttgtgtgatctttgtcctactgatcgccatgtgactcactttctgcacttccttctcttttgcatgttttctcctcatctggacttctgaggacagctgggaatggtgaggaagaaattctgccccactgtaacttgcaggtttttacctacacctgtgacgtggggaagagggagaacgtctacctgacggctgaaagagtccgcaaggaggttggcgaagtctcagtcctggtcaataatgctggtgtggtctctgggcatcaccttctggaatgtcctgatgagctcattgagagaaccatgatggtcaattgccatgcacacttctgggtaaatataaacatccttgttttctttgctgggccctccttaatgagaaggttgggaaggggagagacttcagtgccagcctgaaagcaacctgtactctttcgccacaaggtctccttagctcttccctatggtaaactgcagtgtatgctggttactgttagtcgttttgtccccgcccacccccccgccacccctaactcagtatttttgagagggcagaggattgaacattttgaactagtttgaaagattgccataaaaataacacgaaggagcgtaaaaccctgggtttgtttattttactttctgttgagtttataaaacattggttgttcttatgaatttctaaagtcaggatttaggcttccaaattactgctcagccacattttggaaagtgccaaagattctgaaatcaacatttgtg

SEQ ID NO: 130260 - DNA, 1075 bp, Homo sapiens
acctggcctgtttatttattttgagatggaattttggtcttgttgcccaggctggagtacaatggcgtgatctcagctcactgcaacctccacctcccaggttcaagcaattctcctgtctcagtctcccaagtagctgggattgcaggcatgcaccaccacgcccggctaattttgtatttttagtagaggcggggttgcaccatgttgatcaggctggtctcgaactcctgacctcaggtgatccgcccgcctcagtgtcccaaagtgctagggttacaggtgtaaaccactgcacccggccaacatgaactttatttaattcatttacaaacctctagaaatgaatatataaatgacctgagcttatatatgttttaaacaagtaaggaaatcaccaaatacagtttgggcaacttcagcttgcctgtaggtgtgtgttgtgttcagtgggggtggggaactgaattaaagtccttgctgtggctgggtccccaggaacaggcagcaggtgtcaaaggggtggttagatgaataaaaggcagtccaaccaaataaacttgacatagaatttatcaagaatcttgtgtgtttatgactaatcctgagtaaaacaactaccatttgaaataaaagacatacataagtgggaggcgaagtgtcattttcatatttgaagaatggtaaagatgaagctgccgtaaaaactgcagttgatttaagtcagccctaaacagttacagcactatcagtaggttcattatgaaccgcagatactgactgggattgttttctcccgtaacctttgactaagatgatgcaagactacataactaaacttttacctacaccaggtattctaaagtttagccatcttgcctactttgtctgcatgattattttgcttaattgtaaaattttaagtgtaatcaggtttttaagaaaccccatacaatctgcagttaaatacttaaaacaagaaaccagctccaggaagacatctgataaaatgaatgctaatttagtgtgtgtaaagcacagaaaattcatagccttagctttgaaaatgcacata

SEQ ID NO: 130261 - DNA, 1044 bp, Homo sapiens
tggaaaaaaccacaagtgtttcttacatgctgcttgcataaaatgtgaatttcttgcctttccttcaaatagtttagtactggaatttttgaatattaacatggtgcagcttcttagtgttagcctaaacaatagggctcaaaataacataagtggtacttatgtaaacacatgggtattttgaggacaagtgaaacttaaaattcaaagcctgaattttcccaccttaagttgtaattaacatactgccccctactgatttcttaagggttttttacatgggctagtcctgcagtctcttgggaaagagaagcataaggtgtaatgaattacttctaaatgatttcatattgtatttttattatgtttgctggactctttaagtgttgcgatttttacttataacagtcgttttttgcctatagtaaaatgggactgataaaagaaggattagaaaggtggtggtgttggaaagtttcgttgttttccagcgtcatctaggacttgggatgaaagggactaggcagctgaagcaactgcttagcagtgtttttgcgacttcttttcttaggtcagatactgtgttttaaccagaatatggtctgcgtggagggcagggaggactaggagccatacatagtaagaaccaggacttgcaggaacttaaggaaacaacctaaccaaaaatagatagcacttataacaaaaatagtctataaatacatgcttaatgagccttgtgtactaaatttttatatagcacttaaatttacaaagccttttcataaacacttttctcatttgagcctcacagcaactctgaattaaatagagccactatcctcatgtttatggatgaggaaacaaacccagagaggtgaagggacttccctaaggtcactgccagggaaggaagaaactaggacccaaaccctcagcctaggcttccaggttagagcctgtacaaatacttagctgtgggctacaagttcaaagctcctggtacagtaggtagattttcctatgagtcacttaggagttttg

SEQ ID NO: 130262 - DNA, 1042 bp, Homo sapiens
tgggtcccccagcctggaacttgtgccacactctctgcctcactgtgtggccagtcacttgcatctgtggcagagtccctgcggtgaaacccatgttggaatgtgactgttcagaatgatacacgttcttgtcagtgcatagttggcattatgatatgtttttcacaaaaatagttctataatttagcctgttttttacatcctaaaatactttgtctcctgctagtacattttggtaataagccttgggatcccagagcatgctgctggagtatctcttcattgataggtctattactacgtagacatcgccgtaaggcacacattaatacaaggcaatgtttgtagtaggctgtggtccctcctaaaccatgagatagctgcattgaagtgtcacgagcagaaacaaatacctggcttgggagtactttaaattagcagataactgtcacttgaaaggtaattaagaagcttctgccaatggctctctttttatctctagacactgtccccaaaagcttttaagttacagtcttgttggtcacgacttataataggcctgccatgccgatgatacagtgctaagttagccagacacttaaaagatctttttgataaatataaaatatttttaaaggaattgggaaacaaaacatcatgtgaataaaagtttgttttgtgatcctggactgggttttagatgaaattcatgaaatcagttctaaaacttgaatcttactttgtttcagaccactaaggcttttcttcctacgatgctggagattaatcatggtcatattgtgacagttgcaagttccttgggattgttcagtactgccggagttgaggtttgtcagatatatagcatttctttcgttcaatctgtttatcctgtgataagtacaccagaacctccaggagagcacctgctgcccctccattcatgaaagctgcacgaaggcactctgcatgtgtgctgcatgtagaatgttccacaggaacccagggccagccactggaatggaattctatgtcaggtgtg

SEQ ID NO: 130263 - DNA, 1040 bp, Homo sapiens
cctcctgtcttggcctcccaaaacattgagattacagtgtgatacgctgcacccagccactactttctttgaagtctaaaaaggcttcattgagaaggtgcctgatttcccttggggctcatcccacattacatctcagacactatgactactacttacatttacaaattaggatattgccttgttgctttctatgcatgtattcattcattcgttttcctcctttgaaatgtcattttacccttatttggctaataatactagctatacaaagcactaagttgcatgctgccaaattccaaatagcttattgcttttagaaaccgcttctccctccgacttccagcaaattcttctagccttttgataaattaattcataacctttccacatatttatccaaagaggcagctttttaattctggcacagtcacccttttttttcctcctgggctttgatactaccagatgctagaggaaaaacattcgcaatatgcctacaatctatttcaatatataattctatccaattgaatgtcaggcatttctaaagaatgctgttggttgatataacatcccttgcccaagttgaggttttgatttgaagttgcgtattggaatgctttgtgttacattttgccccaaatttataaatctatcatggattctcctttctatcttgcttccttaatcgatgaaccatcaagaatgaagtttagcgtgatatcttgagaaagcaaaagaagaaaatcttctgcttttgaaagggaatgtaccctcaggcaaaaattttaaaaaattctctgtctcgtaatacatattaggaaatgccagttgtcatgcacgcaacttaagatggattaggattccatcactgatcatggaataaattcttatacttttaaccttacaagttcatttgcagccaagcaattagaaaaaactgtgtttggctatattagaatgtgtcaaccctcttaacagtactagcagtttctagaaacaatttagcagaattttttccaaaagtatttggcagg

SEQ ID NO: 130264 - DNA, 1038 bp, Homo sapiens
agttaaaacatgagaactgctacgttttctcaacatggattgagctaagtcccttttaatgtttattcaggttttaaaagacttaagtgtagttttacaagttcattagcttgcctcattctttgagatgcatctcaccttcatattatcaaatttcattacatgcaaagaattatcagatcaacccattatacagcctagcagcatgaagtctttttccatctacagggagaatattgtgtaaatcaggctctcgggtttcagtgggaggcagagggttgcgcggtgtccatttgtcaagttgatggcaccgcagtgaggttacattagcttgtctttgaacagaagtgaaatcttatgcgaagctccccttgctgtcatttacacgaacatccatcctcttaaaccaaggcctctgagaaaaacaaagtgatggcacaatataatcagtcactcaagttgtctgtcatctgttttcttaaggaaatgacttttaagttactggagcagagaactgtagcaaattaacaaaggttgtagtagtaaaagtaggtggaatttttttaaactgcagatgtctttctgagaagattttatatgcagaatgccaaaaaggatttcccccctctctttcataatgaatctcatgaaaagtattacttcctgaacaatagacctactgctgttaacaactggagtctttcttgcttaatgtgagtacatgttaatgctcctaagaaactttctgcagaactgagtctataaaactctcagcctcactgaggtcctctgacaattagctcaccacctttgaattcagagctatctgaatttcagttatgtaacggcaaatcttgcatataatagtaagctgctttagagcaaatggtactttaagtataaatgattggaacttcattacttaatattacatgtagacaattgctttaaaaccctaactgcattgccaatggtggtcaatctaagtctggtgatcaaatttgcaggttttatttccctaagcctgttttatgggct

SEQ ID NO: 130265 - DNA, 1094 bp, Homo sapiens
tctaattcttagtgtcccctctaaattaaaaatatttaggtaggaatttactattcctactattctgtatgcctctatgtttgatgttgatttgaagatcactggggaaatattctaaaaacctttctgttaacagttcactactaatgaatcaaaccagatacattattaaaccaataaataaccatatgtatataattgctaaatagatgtgaaagttatagtggaaaactgttgcctatatagacttttttaaagtgatgatcaatggaatatagttccctaggccacggatttgagagcattattgcccactggaggtcacttttacaacctaaagagtattaccttcctcataaacttaaattatggtgttgcgtatgatttattacactatttaaaactgaaaagcggtaaccttctctcccttagcaatacaccttcaattaagtcatgcctctccccatgtccaaaattcctttttagacaaaccagttactggttatttttcaaaaatttcaatatttttctttcattgctaatagttatttggcctactctctttgtttctaagttggcactgaatgcctttttagattacatatttttttaaataccctttagttaattggcttctcgtttgcatcctctgatggaagaaatttgaaggcatttttaaacccccaaatattctagacatatgtgaaatttaatttcacataatttaatatgtgaaaattaaattttaagggcaaggtagtgataaaaaaaaaatgtcttctgttaccctccatagatgaaacagtgataatgctacgagcaaacctaggtcaggttttctactgtttggtaagaagagtcactgctctaggtcaggcatggtggcttgtgcctgtaatcccagcactttgggaggccaaggtgggcagactgcttgagcccagtagtttgcaactaacctgggcaacatggcaaaaccccatctctacagaaaataccaaaaaaaaaattagttgggcatggtggtgtgtgcctatagtcccagctactcaggaggctgaggtgggaggattgcttgagcctgggagtttgag

SEQ ID NO: 130266 - DNA, 1035 bp, Homo sapiens
aaattcaaaatataacttgatttttgtttattttttatgaattagagtgctaagacagatatattaaaaatgaacatcaactttaatgtttgctttggtaaagtgctttcgtatttgttgatttttttaaatatttcaaaatggtcctccctccgaaacttgtcccttgatcttagaactaaaatgtcttctgctgacatttaactttattatatacaattttcgttttacacaaattatatcttatagttaaggaatttaatcatatcttaaacaaaattacagcaggaaaagtcaccaggagcttctcaccacaggatagatattattctatctaaataatagactaaaaatagactgtggacgaaaacaagagtcagtaaactatggcctgtgagtcagcttcagcccaccacctgaactaagaatggcttttacattttgaaatggctgaaaaatatcacaagaaaaatagtatttcgtgacatgtgaaaattatatggaatttgaattttagtgcctgtaaatacagctttactgggacacagccacaaccattattttggtattgcctatggccactttcacactatgatgacagatatgagtagttatgacagagaccttattgcctgcacgtcctaaaatatttactatctgactttttacaggaaaagtttgctagttcaatcctaggattagaaggaagaagccttaaaaattcaccttctgaattttgtatcaaatattgccttaaacatggttattcagagtccattctcttttggaaagaagccagttttctggaagtattgcccattttatagcacaattagacttgactgaattttgaatttatttacagtggaaaccaattttattttctgaaggaataataaataagtctgtcttcatcagtatttatcagagtgttaaaagaaagtttgcctatggcaaaggttacttttctctccttgctgaaattccatttagaaacacttctgagcagaactttttttttaagtaataaagaat

SEQ ID NO: 130267 - DNA, 1106 bp, Homo sapiens
tccaagttgtgtctcagtctgtgtaatgtaatttcattcatttatttatccatgtccctttagaggcattaatgtgacaagcatattgcatttagagtgaaacattatgcatcaactaaaacactggtacatgaccaagcatgttaaatgtatgttcatatttttgttacaaaggagtggatgtgatgtttgttagttatggaaaggactgggaaaaaactgaagagacagtaacagatattattctctttaatattactttcaataattatatatcttgtaatttattttattacattatgagtggatgtgttataagactatctgatagttattattaatgctaatcatgagctagctacagttctgtatacttttcatgcctaaattaattttgtttacttatacattaattcattagttataaatagaactaacatgtagatttgtactgttgactgtagttaaataaatacaataatttacatgtcatcaagtgatcaaaaaaagtagtaaagttttgaaaccaacttaatctacttatttaggtcaatatttatgaaagaaagctgctttgtgccttgccaagaacatgctattttgtcttaagatttgggtctttatttgtacaactttgtacaactgaggtgcagacgttgcgaaaatcaagcatgttttgaatctcctaaggtttagtgttcaactgtcactcttcagctccttgctgcctgtactcttctgtgcaaggcttctgtgcagtagctacagtggaattgctacctactgctgtgaagtcaactccacagttaatggatctgaggtgtactaatcaaatacatgttttcttaacacagtgattgtgctatgtatcacataccttaatgatctaacaggcaactttctttaaacataggtcttttttataccctcctcatttttgttccatagggggtggccattaaaaacatccgacagacaagcagttaacccagttccctgctgagattagtaaaattagtagtcatgcaacatcaaggacttttagctctgcaggaagtagtttgactcaacttcttttcggagctgggggtaggaaatttaaattt

SEQ ID NO: 130268 - DNA, 1053 bp, Homo sapiens
tataagtggtttctttgtttaaactagtcattaaaaattaggttgaaaatgaaagtggattattttagcaaatcgtcccttctagatggatttcatttcagtttgctattctgtgcctctcctgtgagcatcatccactgtaacagtgttgtttgtgaaaccttccgagtatagtgtaacaaactaggttttttccctcacataaataatataaagaaacacttagttggtgttttagttaaactataattagtttattgtccaaaatcagggagtgttttatggaggggcatttcattattgatcataatcatgccatttccagcaagatgagattgtccacttaaattaaaatcttccttttcaaatataattcacgctgaatacatttcaactcatatgcctccttttgtggagtttaatatgatgatagcaggtttttatagccacaggcttcttttaagtatttattttttaacaatatgacttagtataggttatattgggatggggctggtggaagtgggggggtggtggctggtctccctgagaatctgagaatcaacctttcacctatttattcttatctctcctatacctcatgttttccaatccatatagttatcatcaaggtggctatttgcagcagctttttttttttttttagaataaggtattcatttttgttaggagatcaatacaagtacaattttgtaaattcctcttaggagaatatggagaaagaaataatgcatgtacatacacacccacatttaggaatatagttgtctcttggtatctgcaggaaggattggttctaggacccccaaagataccaaagttcatggacgctcaagtcccttatataaaatgttgtagtatttacatataacctacacacatcctcccttatactttaaatcatgtctagatgccttataatacctaatataatgtaaatgctatataaataatggttataccatattgcttttttgtggttttttttcaattcttttttaatatttttgatatttggatgcatagcccatg

SEQ ID NO: 130269 - DNA, 1154 bp, Homo sapiens
aaccacttaatttaaagttacaattttagaatttgtttttgttgttttaccttaagaaacacaataaatcactgtttaaaaaagatctcaatttatataaagtactggaaaaaagctaagtaatttttagttctatctataatctccgtaggatgaattagaaataaattgtgatgaaaagaaattaactgcttatttatgaatctaatcatttagaaatgtctgagagtaacactgcattcttatagaaacaaagcacaaattgcattcaagctctgaattgattttttgcttggagctgttgttacagtagctgtaattttgctaccagaatgtcttaattttttaaatttgtttttatttctaagctcttggcaatgacaataattataattttaacatatcttcactgtagtcaacatgtagagtctgcttccctcattattgcattgctaaggcctttttaaaaagcttatgcttacataatatactcttttttatggacacgttatatgtttccaaatctgtgtattgtgatttttacatactaatgaatataaacaggtgattttaaaatattactgtgcttctttggttgaatgagctggtattgatgtaaaatactctgtcattgatggaccactacctgcagctaagcagtgagcagaatctccgggaaatgacttagtctggccacatgcatagcccatcttcataatgtcgcagcagaaggttctttgtggttaaaagttttaaagcctatttctttataggtaaccctctcaggtatatttacctggtagaaaaacatgtagattgtttctattacttaaatgttttaattggactgtagtttagaaattacaggaccagcttgttacagattatacactattctgttacttttatttctgaaacttaaaaacaataaattctttttctgtgtttctaggttagaacttttttattttattgcacactgaacagatactgttgcttattgaatattgtgtaaacccttctttggctttccttgcccattgcaatttgatttaagcctactagagccattgtatgtgacagctatattgtattacaaagtaaaaatatatgagtgtattgaaaacaaagttgttttaacttttaattttgtt

SEQ ID NO: 130270 - DNA, 1449 bp, Homo sapiens
ctagaatttttaccttttatgttaaaaatgcaacatacttaatttttcctctgatacttacacaatataatttatatatacatatatatccacatgcatgcacatacacatacattgagccatatttgatgaccaaaaagggagaggccccaagggctctttggtgtgcaattaatattttggccagaaaatcagcagattgtttcagtatggttatgtgttatgacatcatattccagtaaagttacaatgaacagaaattttgtttgtctctgtggcaaaccaaaatgagttttgtaattgtcagcaggccttagtgattatagtggcgcccactccctctactgtagttaaaggtctgttagcatttcagttgtggaccttctattttcagaagtttataattaattgtaaacatttgctctatggtgaaagtttgccatatgagatctcacttcaggagtaaatttctgatttcaagttgtctgttttaaagttttatagtaccaccagttaaaaataaacaaagttatgtggaggtgggaaaattgaattttgagaaatatgaagtgaagatgaccggcgttattcatattagtctgtcagatttctgcattaaggaattaaaataaatttctgcattaaagggattaaaataaaatagatgataggaaattgtgcacttcagtacacaatatttaattgttgtaaccaaaaagcaaaaaagattatagttttttaatgctttttaatctttgtttataataaaaacatttaaaatgcgttatcttaaattaatagaaaactgtagttcaagaaaattgattttaggttaagcatttaaaacagcaactttttcttttttttcatactctgaattcctctccttcatttgacactgttaattactcctgtccctgacattgtgttgtaatttttcttctaactttgaccctttttcatctctttcactgctgtctattgtttcccttgcactttgatcacaggcattaatcagttccgagccttaggctcttttttgattcctttacacttaccctttccaggtgcttatccacttgcatggtttcaattattgcctcacaaatctgcatcttcagtaccaatcaacatttctagttcttcaccttcagtaaaccttcattgattagtcccatctgcctggtgaatgcttacatgatgcgctctatccagtttatctcaggttggacatagagcgtcactacttggatgtgcagtaattatctaaaatatagtaggacctcaattggacttctttttgcttggaaacaaacattttttaggactggagtgatttttaactcatttttttcagcattgcagttgtaaatccaccattccatcaaaatcgattctgtttattttgctaagttgctcaattcagtggtcatatttctcagtcatcat

SEQ ID NO: 130271 - DNA, 1010 bp, Homo sapiens
aatgtctttggccacactttgtatttagtgtgactaaaatacacgtatctgtattgtgaacaggagtaaaccatcataacccgaggccaaaactgttagcctttcaaagctctaagtattacttcagcctcttcctatgtgtggtagtcagactggatatcaatattgtctctaccaatatcatctcccttatttgttgctgtgttttacctcagggtacatggcaaagataaagaggattggatagttctcagcttagtgtgcatcctggaataagagacagttcacactgactaaccgatgtaaaagcataccttgcgtatctgcagcaatgcaggaaaaggagagcataggtaattgaaatccacatagtgcattccccagaggatttgtgcaggaaaaattttacaaattaatttaaaatgactgaaaattataaattgtttaacgttaatccaaggtactttaaaagtggaagagttttcttaaagttccaagtactgtactattttagcaaatgttgctttttttacacttttaatattaaacagtatgaaaggatccaggtagttgagcaaagttcattttcctatttctttgaaaagcatctctataaaacataaaaataaaaaaaaattagccaagtgtggtagtgcacgcctgtggttcctgttacttgggaggattgcttgagccttgaaagttgaggctgcagtgaggcataatcgcacgactacacttcagcctgggtgacagagggagaccctgcctcaaaaaagaaaagtgggcttcgagtcagacagtggtattggctccagagcatctgtataattccagtaaatcatctggtttggattgtaatgaaccccccaaagtgtgttactcatagccgaagaaatttctaagacccttaaatgattactgtcaataatctgagactatttgcattgcctaaaatctgacaggagatctccatgtggcagttccagctaataaattatatttctact

SEQ ID NO: 130272 - DNA, 1047 bp, Homo sapiens
atttctagatgaggcaggggttggcagtctagagcccacagctttctttttatgtatgtcccatgatctaaggttgtatatttaaaaatcattgaaaaaattagtagaagattggtttgtgatgtgtagaaattatatgaaattcagatttcagtgtccataaaaacaaaattttattggagcaccaccaccctcatttgttgatgtattgtctatgactgctttctcaatacaacagcagtattgagaaggtgtgttagaaaccttatggcctgcaaagcctaaaatatttactatttggctcttttcagaacgtttgtggacctctagtctgtattaatgaataatagagtgtatgggattataagtttaggtatatccaatataggaagctatgttttatatataaccaattctttaagtcagtgtcttctaatcagttccacttatttgtccctgctggttctagtctctttttttttctggtagaagttgtatattttattctaattttgtttcatttttttcttttttcctattgatcagtaaacagtatatgatgtgtattattataggaagcacttgggtttgagaagtatctttgtaaaataaatcttgaataattttatattgtttctatacagttgattgatggggaacactttttatatttgaagttgactttgataggctaagttctttttaaaaataattatttcatatgatcatattagcaacagaatgttattcttactggatttagttggcccgaggaagtcataatttagtttgttcctaacacaactggagtaaatattcttagaatacttcacctctttgatttgaatgctgttaccagtgtataaaattttatgtatctatttgtattctatttgatagcttttattggttcttaagagggtttgttaaattttcgtttccaaatattgaataattttgcagttgaattttttcttttgcaaattttatggtttgggagagataaaaataatatcaaaccagaacaaggataatggaattattgat

SEQ ID NO: 130273 - DNA, 1040 bp, Homo sapiens
gaatttgccaccttttatattttcatgtactttacattctttttttctttgcatttaaatatatttaaccaagttgaagttgtcctttatatgcagtttttgtagtactttatgaaggtatgatagacatacagtaaaatgtacaaatcttaagtatacctcttgatgactttattttatgtatgtatatatgtatttatactttatttgatgactttttacatacgtatagcctcacgtgatcaccactcagatcgagatacagaatgttcccaatcacctctgagagtttcctcagacctctttgtctttgacacatccttctcccagaaataatcactattttattatcatagactagtttttgcctgttgttgaactttttatatctagactcatacagtatttatgtgcatctggcttcttttactttgtataatgattttcttgtttggggattcatccatgttgcttatatctgggttttgcccttttttattgctggttagtgtactttgtatggatatatcataatttgtgtatcttgtatatgcaaaacaagcactctcttttcacttaatatagtggccatttgtcatatatttaagaatttttttttcttttctttctttttttttgagacgcagtctcactctgtcacccaggctggagtacagtggtgtgatcttgtctcactgcacccacagcctcccgggttcaagtgattcttgtgtgtcagcctcctgagtagctgggattacaggcacctgccaccatgcctggctaatttttgtattttagtagagatggggtttcactatgttggccaggctgggggtcttgaacttctgaccttaagtgatctgtccgcctcggcctcccaaagtgctgggattacaggcgttagcccctgtgcctggcacaaaatgattttgatggctacataatgcttcatatggcttcataaggtatataaatgtatgtctatttttttatctaggttgtttatgccctcttttttgttaagattgctgcagtaa

SEQ ID NO: 130274 - DNA, 1045 bp, Homo sapiens
ctaacattaatcatttataaaagttgtatataccactgttcttattatctctgcattcacttatattgtttttttaaatggaaagcaatttttatttatatatagctgtatacatttatgtttgcatatatacatgttacaaatctacaactaatgcatttatgtttgagctctattcagttgcttacaatatcttagttgtgcataattttctatggcacatttatatcttggctattggagattatcataatgatcataaaatttgtatataatgtggcagcatttgttctctaagggttgattaatcttcttaaagcaactggctattaggttatttgcatcctggcatctcctacaaactaaggaaaataagaggaaactacaatttgtcaattttgttttctattaatggtttttatgaaggatttaggggcaacaatttaatttgttcatatcttttgttcttgctttaacagaaaaaatagttgtagccttggtctacctttccagctatatgtcctgactctctttctgactcattctgcccttaatcatgttgaactgtttgcatttctcagaacgctttatgttcttttcacatctctctgcctttgcctaagttgtagtgtctttctgccttgaaggtgcttttgcccttactcattgttgagcactcagctccatgttacatcttccacacgtttgtgaaacctctgattcctctactgggcctccagtgggacctatagttctctgtggtagccgttactgtgttatagtacagtaatatatgttggtcattagttttgtgctagactgagcttgtttttgggtgtgtattttactcgtttacatttcttggtccctgtagtatatactctttgctcctcattgccaattccaggtattcttccttgagacagtcccccagttttgagtttcatattagcagacacacttcccacattccctcatgattgtcatttacatctgggtgattccatcacatttcttatggctcactttcactctctttagcatt

SEQ ID NO: 130275 - DNA, 1253 bp, Homo sapiens
agccagttggctgaaaggtttgaaatacgtaccccagtaaaaccattcaatcaataattggtaaataatattttaaaattgtttttaatctgtatagatgacattttgtagctttgtacatgttgttaattaagggcatataattttacactcaaagtataattgctgaactcaggggtgggtagacttcaaaaatatgtctgctatagaaataacttgaaaaaaaaaattaaaaccgtggccagccaccaaattgtggacactgtttatatactgctagttaacaattaccacttttaaaaaattataaccgtttttgttctatcttgactagataaattctcacaatgatctctgtcagttttattagttggcctgtttaaccaagacagaaagtctttgaattactcatagttttaaactgcttttaatatgaaaattgcagctgtaaattatgtattttcatattttgcgtaactgctctacactactgtttgacttgatcttcttctgggggttagggagaaatctgtctccatattgctggttctcttaccaaaatgcttttataaagaaatgaccggtgacatttattcaccaaaggaattaatatactgagtcaaagattaacaatgctatactatagagtaataggtcatatatagcctcaattgagttttttatgacaatattttaacatacctctctctctacatataaataccataaagtaaactaaaatgacacagaggaaagtagaggaaaatgaaataatttcggtacatcttatggtttaaagagtagaaaataagatgaaatatcctaaaatataggagcacagacatttaaaattcataatcaggctaacaacactctcttgaatttaggaatcattgaaaactccttgcacttagatttaatttatatgttagttacattattaaaagtcataaggcatttatctgagtcattgctctacagagagcaattaatggcttgtaataataaaaagaatatttctctgtaatgcattgttgaaagacaaccagaatatcaagaaaatgtatataggaatatgctacttgcctcctccctgcatttcctcgtggggcactatttgcgacataggcctacagaattagactttcatacttagaagataaggtacactcttcttcttttatttatttatttatttatttttaggccattcttctggtttgccaaattctattaagacagtgatacatttg

SEQ ID NO: 130276 - DNA, 2138 bp, Homo sapiens
ctgagactaccgatgtgtgccacgacgcccagctaatttttgtatttttagtagagggagggtttcaccatgttggccaggctggtctcaaaacacctgacctcaagtgatccgcccgcctcggcctcccaaagtgctgggattacaggtgtgagccaccgtgtccggcctgaaaacttattttctaaagggaaattaatcttaactgtttattgatttggagattgtatctcattggtaaagaacagttacttccttcacagtctaaagacaaattgtgtattattctgtgttaaatagcatggcactgttgatcaggagtttacttctgtctcattacaatgtgaacttgttgcccataaaataattctcttaagattgatacatcctgactatgtactaacatgtcatgtcagtttattattttaaatagaatgtgctaataacatatcattttaaggtttatgtgaactatttctctgaaagaataaaaatttgtcactgtataattgaacatatattgcactttgtattcacaggtttgggggaggcagatcagacatgtaaactatgtacttcttgctaattgaaattatttctacattaaacagacttgtagaatttacttatacatgcttgactttttaattatcttttttctccttttcttaaagatgatacttgttgatgccactgttatcatcctcctagcagaagatagtcctactgagaaaatgagcactttgatcattcagtctttgaactttaacctttgactggaagtgacctataggcaatgaagactacttccttttactgcatttttactcgtgtgcattctgggcgcatgttgatcgctggttcagtccaggcaactgacatgcttttattagtcatacagtattaatgcaggtgtcaggaaatgtcaaatataattccattttttatttttatttttttaagcttttggaaaagctccaggtcctcatgtattgtgcaataacaatgacttccttggcggttttggtacgttcattgccggcaatgggcgttgtaacaggaaaagttttcattaactcctgccattcaatgattaatgcatgatagggcctatgaaatgaacttactggttatagtgggaatataaataaagtgagggatccaacattactttaaaagtcaccccaactgtttatatttggattctatgcactgtgatcctaaggttaacagcatgaattaacatgcgtctttaaaggactgtaatgaaagatcattgcatatttattgaattgtttatatctactgtcaagttgttttgacatggaagattttcaagtaacattggcagagaggtacagtatgttatccctatggtgaaaataaattaatttgttgtatatagttcctcaatctctgaagtaaaggtatgagtaatatagggtatgaatggtttaatcaaggctttattttggaagtaagaaaaatggcagtgatgattaaattgctgcagtccataatttgggcttgttatttgtacattaaagattttttccaagtaagttacactctgttaacttcctgctagccatcagcatgagccctactgcctaaacactatttcatttatttatgtttggaaaccccgtaaacatttttgtttgcaatcttgtttcttttgttataagtcaagtttgaatgttacaatacttttattgaaacttttgttaagttttttcttgtaaattttctttacttgtgagtatcatcttgtcctttaatcctgtaccctaaaataagaaatacatttttgacagaggcttaatgttttaacaaaagagtgtggacatttttattttaaaatttaggcaaaagtcactatcaaatggttgcttatttgtctcacacagccatatagtttttcctggagggttttgttttgttgttgttgaaaagactttgcttacagctagatgaaactttctatagaaaaaaaaaattgttgaaaggtccagttctcagtaccatgtgagttaatgatactacaactaagttctttttaaaaagtgattaatgtattttataaattaccttttcacatatgcaaaatctgtttctactacaatgttatttttact

SEQ ID NO: 130277 - DNA, 1025 bp, Homo sapiens
agaatagcagtcacaggcaatgtgaataatagcttgtcctggcattataggtaaatttgggtaatcttacaaagataatcatacgcttgtaaaaagtataacacattaattttcttattagaactttccacaagtcagtatcttttcctgcttagctctaggtgttatactgctttgttccagtataacacctagttaccaagacatatggactcttgatgtttcttagcatcatctaattttcaaaggcttacagaacaggccagtttccttatgtgactttcaaggctaggcagaaagatcagaaactgaacaaaagcttactaagaattggataaactcactgaaacacttagcatttcagtttctagaaactaagtggaattgtgtgcctcaggtctcaagctccacagtcctcctgtgtggtgcttcctgacatacttgggtcaaggtgagtcagtgtttgtcagatctaagcaaagaggcaagagaggtttggtttagattagtgattgtatatatacttcctggatgctggatgcaggatggaggcacagttaatgaaaaacaacaaatctgaaatttgcttcatttcctggttttataagaggaggactctgctgacatgctaaagctgagctgccaaataccagtgttaaagttcttggaagaagacacaagggctccatagctcaggggttagagcactggtcttgtaaagttcttggaagagacctctctcagcttaaatttgtggttttctacattattagttagaatcccttaagaattaggccagtcactgtttaccccactgttattgtctttgcttgcatcatagcttgtatttatttcttttgaggttcttatttaccacacagtgatttattaccatgtaaaaagtcacctcattagtgtttagaggtctttggatatattaaataaaaagttgtattgatagtgactgcacatttctttattacttacttgtagttgactatcaatgtgttttccagaattccttt

SEQ ID NO: 130278 - DNA, 1050 bp, Homo sapiens
cttccttgaagtagtcaggcatctaatttcataatattcattttttaggaattttctcaaattgtgtccacagattgacttggaatacctaaatgtcttgactgtcttatgctctaatgtttctttttgttaaatgaaattactaatattaacacataagagcattgtgaggctcaactagactgatagttacatatatgagttttagaagtgccaaatggactaactgttttccttcctgctatcacagagtcctactcacgattgctttctggttagactttccttaaatgatgtcataccaaattcacttattttcattagcctcaggtagaggagaggattcccttaatctctcattttcattagcttagctaagcagatttaagtctgaaaataaatcctgcatatacactatacaatatttaatgataggaaaataatcaagttattggaatgattccgaaaggcataaaggagactaaaggataaggatatctatcatagtatctataaactttaatatagctttaatataaatttgatgtttccaagtctttgtagagggtaacattttcttttgtctaggcagtatgcaacaaatttcaggaaaagtctcttccataatatatcttcagtgttgttggcatcactttatctgcggtagctcccttgcggagctgccatatatttctcatatattgttctagtcagggcatatgttcagcagaaaggccaattatagtagaaatgccaatatatatttttcccattttttctcttaaatattgtttagaaactgaatcttctggtctatctttgatggtattctattacagtaaaaacagttctttgtggaggtttgtacattgctatacttctcccaacaaatctagtttagtagacttttctgttttgttttgagacgaagtctggttctgtcacgcaggctggagtgcagtggcgcaatctcggctcattgcaagctccgcctcccagtctcacgccattctcctgcctcagcctcctgagttagctgggactacaggc

SEQ ID NO: 130279 - DNA, 2104 bp, Homo sapiens
tgtggtggcaggtggaggctgaggcaggagaatcacttgaacctgggaggcggggattgcagtgagccaaggtcgtaccattgcactccagcctgggcaacaagagcaaagctctatctggggaaagaaaaaaaaaaaaccatctgtggaaactatgcttatttgccccttatgtgaatgaactattgaaaaaaatttccttttatttcagaaattcacctctggcatgtaaattcacctctggcatgtaaattcaccctttatatgtttagacaaacttctaaaattctgtatctggcaggttaggccctaagggttacctattacatgcaattcccctggttttggttgctaaaagttttagggtggctgcatttgccctgcatgcagtatgttaaaaagcccctgctgttttatttaaaggttattgagatctgaattatttttatctcagtcctcttctacttcacagttgtttctgtcttcttcattactggttctctttgcttacagaatatctgctgcatctgctgtaggtgttttctactgctactcatcgcttttctttctcttctctcctgagtaccttttggttcatgcctacttactggctctcaggccaagtgatttagtttataaccatttctctttaggaaaaatactgttctccttgtgctctgaattggctgggtgaaacatgatgtagtaaccttcgtgttgctattttctttaaaggttggtgattcagttttgccaaagaagataatttggcagttgttcttttttttttttttttttttttttttgtggcactttcagatcactattcttcttgacttcttgatagagaccttactgggaaaaatatctttttttttttttttaaggccgagtttcgctcttgtcgcccaggctggagtgcggtggtgcgatctcagctcactgcaacctctgcctcccgggttcaagcaattctcctgcctcagcctcccaaatagctggaatgacaggcacgtgccaccgctcccagctaattttttgtattttttagtagagacgggttttcgccatgttggccaggctggtctcaaactgctgacctcaggtgatccacccacctcggcctgccaaagtgctgggattacaggcatgagccacaccgaaaaatatcttttaaaaaaataattgtggccaaagaagaaactcttgggtattgcttgtgttttaatgaaaatatcctactggtcaaatggctttttatggcaaaatgaatacctcaaggtagatgtccgtaagatttgtaaactcccattctgtacatctacaacacatgggagtatcagatgcatatgatgtaataaactatagttcatatttatgaaaaataaaatttcattaaaaaacagttgtggacagactccagtgtggaactataagaccatgtaagcatttgttttcttttacagagcaatacttttttttagcaaaaagtaatgaagagggtactagcaccgatagatgtaattgagataaatgtcatgcatagagcgtagccattacaaaatcaaagtcctttcagggagtcttctgcaattaggtaggataagtgacttgatttctcttattttgagactttacttttgttttttagcttttttttttttttttattagtgggaatggagagttgatgtccagaatttaaagaaaaaaaagaaatagatgcaagtatggaaaatcgttcctttgggaaaaaaatgccttttgctgtcttatctagtcttagccaaggaaatgtgtcccatatgttagttaatatatttgaaatattagaagactctactcatatgaaagactgctttattaacatgtaaatctttgtaaaattgtaacattgtaacaaaatcagattcatagctagatatttaaaatatatataaaacttagcttatggtaatttcctataacatattccatattaaactatagcataccttattctattcatatttacctcactggttcttttttctgctctataaagagaaaaaagggtatgcctaaagcaatactgtatatcttttatcagtttctgctataactta

SEQ ID NO: 130280 - DNA, 1123 bp, Homo sapiens
gcaggctgtacaagaagcatagtgccaccatctgcttctggtgttggcctcaggacgcttaccatcatggcagaaggtgaagagggagcagtgtctcacatggcgagagtgggaacaagagtcagtggcgaggtgccacacattttgaaacaaccagatctcaagagaactcattcactgtcgaggacatcaccaagccattcatgagagcacacacccagagtgacccacacacctcccaccaggccccacctccaacattgggggttacatttcaacatgagatttggaggggacaaacatccaaactgtattagtcagagagatcatttgggctggagcggtcatcacagattatataggacatttatagccccttgtaagaattttgactttttactcttagtgagatggggaagcctttggaaggttttgagcagaggaacgatatagtcctatttaaagttaaaaggaacagtctggctgttgtgtggcatataaaccgttcagggcataaaggtgcagggagatcagataggccgttaaagtaacccaggtgagagatgatggtgacttgcaccagaagggtagcagtggacgttttggaaggtggtcatgttttggacctgttttaaaggttgaaatcaacaggatttgctaatggattaatttggagtatgattgaaggaggggaggagtcaaggaagactccatgatttttggcatatgcaactgtacagacaactgaagtgtgaattgtatgctttgggggcaaaagggaaagcaaccaatttagaatattctaagggggcaaagaaaaacctatttgaactggtagaactgggccttaaaggacaaaaagagtttatgtgaaaagtatagggcaaggtgtgaaaggacttggcctccttacatttgtgagcatgggctcttgtagttttatgtgtcgatacatgggggattacagcaggagatgagagtggaaggttattttggggcttatcaaaaagggtcttgcagtgtgaaagaagtttgacgtttctatcataggtattaggagggatggcccatctccatcaaaactctgaagtccacaactgggcgtggtggctcatgcctctaa

SEQ ID NO: 130281 - DNA, 1008 bp, Homo sapiens
gggttgtgcagttgagatttcctcaggaggggtgccttcaatgtcattaacattggagcatgggctagcaggccggtccaggggtctgtggtagattttagtcatggactgtctggggctccatttgaagaacgatttgtagttttacagcttcaattctggaagagacaaacttaacaaggaggttaaagatagagggattgaaatgtatggcctgcagtgcaggggattatttctttggcacactttacaggccttgactatctgcttgatagttttgaaaaggtctggtccagtaaataatgatttggccatctgatggcacacccagctaatttttatattttttgtagagatggggtcttgccatgttgcccagactagtctcgagctcctgggctcaagcgatcagcccacctccttggcctcccaaagtgctgggattacatgtgtgagccaccatgcctggcctagtccaggtttttatcttttatttgaaccattacagtagcctttagttctttgaattcctacatcctttcacggtgccaatagatttgtttgaaggcacagttatctcactggttacataccacacacatggacatgcacacacatccccccccccccacacacacactcccacaccccactccacccccccaccacacacacactctgtctcactccaccatccccagaattcctcaccccctgacagtaaaacctcttaatgtttatttcctatggaatcaagtttttagcctggcattcaagtccctgtatagtcacatccaaacttaactttttctgcacctgcatgcattctgtatggtaatatttctatatagtacttcataatttaacttccattctgattttgttttctaacatcttttaatgaagtggttaggggaggtagattcatcctcattttatatgtgaagaaattgaaacttgtagaagtgaagtgccttgttcacgttttaatacctagtttataggaca

SEQ ID NO: 130282 - DNA, 1019 bp, Homo sapiens
ttggtaagataagtaaatgagttactataattacttattcttcagagaattataacaaagcacttcatttttaaaatttgaggcttgtgagatccgttggctaaaatggtaagacatgatgccagctctctctagtattgctagcaaatgagctattctggaaaatacaaccaaatacctgaaatatttcccagatactgaaaattttgcttgttgggtgctgaaatgtactatttggaggaaaatcatatttcattgtcactttaaacaatataccaaacacagcttaatcttttcttagttatgtaagagaagagataaagtcagttattgtatcatgctataagtaaagagataattgttttaaagcatagatttaaatggatactgactccttaagttctaaaattttcatatgagcagaaaactaccaagacttttaggacttatttttatcattttcataaaagttaaagtgaaagggtatgtgctattgtgacctctagatgtctacaataagcatttgtagactataataaaaagaacaaacatcttctctccagaagattgtcatcacttttgttgctttctggctggccagcatcatttctgactgtaaatgtgtggagacaacaggatctcagtctgttttcatcatcagcctatttgtctaccttcaactaagttcaatgatggtatgggaaggaagaatatttcacaccaattcaaaagcttttgactagggagatattgggggaaggcttactctgggagcttacagatttttcaccagaggaaaataatatttctgtaagcatgaaaccaagtcaaaaatgtgttctctaaactctttccttaatatttaattctaaatcaaatatcaaacttaaacattatgttgaatttcttctttaatatttctgtaagttacagcatttgtaataaattctccctattgtcctatttcaaattcattttatcctccttccctgattttatttgtctgttcttctaacatt

SEQ ID NO: 130283 - DNA, 1423 bp, Homo sapiens
tagacctcctttgccttttcttgcatctgcttatcttgcattaaaaaaagaaatctttacatgctagccaaaacaaaatattttcttcattgaatatctttttaaaaaatttccttaatcttttcatgccttctaggtcttccagcagattctccaggaaagccacccatttggctgtgctcttgaggctctggtggctgctgccagaactactattactgccatagatgtatttactggtttataggaaagaatattataatgcatacagatgaagaagtacatgagggaagggatgtggagtttccatgttccgttccagatgtgccaccctccaggaaactccatacattcagctgcctggaagctctagtgttgaaatagtttgacaatagattgtgaattataggacaggctattcaaattttgagcaatatgtatatagaatatataaggggctagtaaagagaaaggtatgaacatttggaggaaatttaatgatttcagattgtagaaggatattatcaaggataactggaaagatgttatgttgtttttttaaaagtgcaggctgagtgtggtagctcacacttgtaatctcagcactttgggaagctgaggttgggagaattgcttgaggccaggagttcactaccagcctgagcaacaaagtgagaaccccatctctaccaaaaaaaaaattagctgggcattgtggtgtgtgcctgtagtctcaagctacttgggaggctgaggtgggaggattccttgagcccaggagtttgaggatgtggtgagctgtgatcacaccactgtactccaacctgggtgacccagacctagtctcaaaaaggacaaattattattgatgttcttttctagaaacgactacagaaagaactgttggctttgcaaaatgacccacctcctggaatgaccttaaatgagaagagtgttcaaaattcaattacacagtaagtatttaattttaaaagggctctttgttttattaccaataatgtatgaatgttcacccgctttttaaaactacaaaattattttcacatttcattctttcaccaagaggtaaatagagtaaacagatcttattctgtgcatttatatatataatcaattttgttttacggcattataaacattgttgcataatttgtaaagctgtttttaaactatctttggtacatttttaaaaaattttgtttaactgagtagcactgactttgtttatgaagtgattctcatctataatattaaagaactgtttggtgtgaggttttatcaaattaaaaatatgtatctatttaggcatatgaagagagtaatagtcaaaaggtatcccatgccctaaaaacatcaattgcgtcctgtacagaagggcaacaaagtgaaagtgtgactctca

SEQ ID NO: 130284 - DNA, 1404 bp, Homo sapiens
cggtcgaagcggacaccagccggccgggaagttgggtgataaaggagggttggggaagaaagggcaaagtctggcgttggcggtctcagaatcggctccccgcacacacacacgggcgctgccagtctgctgcccgccagccccagggttgcctttacccccgctgtccctggcccgacggaaacagctgcgcccgcggttgttgccggggcaggggcggcggggggctgagtgtgcgggagccgagaatgcgtctccggagaaggcggctggctgcggacggcgcttagcggcctctgctccggcctcccacgccgggccccccagactgctcggccccgtccctctcttcttccctttgactcttaatcctgtgcccgtgggtatcttctatttccatcagcctcggtattctcgcggacattcctccagcagtccactgtctccttcctctcgaagctgccccgtgtccaccgcctgatgggcgatctcccgagagccgagtcctcagcccccttaaacctctcgggatagcttgccttctattttgtttcccactgcaaggccccacccttgcggtcgcgataaggctatacatctctttgcccttattcccagacctttagtggaaccttagtttggtaggaggcgtttgttaacctgtgccatatccccccgacttagcaaggcgtggttttctggctttccaacttaatttactcctttttcccgaatctagggagttgtgggtttttttgttttttgtttccaggcaaagatggcaaccacaattgtagttgtgcagggattgagtgcgttatctgtagcctgcatttaattcacaggtgaagactagcggtatcaaaggcattggaagagaaagtagaacgctcaataggagtgtcagctgagtaccctttagcgttttcataatatccccttgggtaaagagaccacattttcttagaagtgttttttgcttttgtttctggaagaagcaagtctctgttcctcctccatttttttttctttactctgctaaaagtgtttttcttcccttttctgcatcttcttcctcttttgtacaaatatagctttgcttcacatttactcctgtgcttttatgttattcccctttcaacctgttttccttacaatattctctttaccttgcttctccctctggacttgcctgcagaacagaaaagttttatgtaacatttctagttgaagagatatcacgaatggtgcagggaaaaaacaggaacaatttcaggaaacattatactttacactagtctccccagagacgttggagaagtttcgtcatttgaggccaaaaaaggaacagtggaatgctagttgaacagtagatgcaataggctacattaccacttaaagatt

SEQ ID NO: 130285 - DNA, 1027 bp, Homo sapiens
tgctttttaaattgcttatctttcatgcagttattatcaagataatcttccttttttaatttaatttttttcattttgttttttagagtcttgctctgttgcccacactggagtgcagtgtgatcactgctcactgcagtcttggcctcctgggctcaagtgatcctcccagcctcccaagtagctagaactacaggcatgccctaccatgccgggctaattttttttctttttaatcttttgtagatacagagtctcactttgttgcccaggttcatctcaaactcctgggctcaagcagtcctcccgtctcagcctcccaaagtgctgggattacaggtgtgagtcaccatacccagctaatctctctgcttagaaagtggggacatacttgttgatactgtgaaaaagaatttatcttaggtggcaaattcagctcatgctaacagagaaatacatttagagacatcttactatgcatggagctgtcatcttagtgtaattttgctaagcttatcaatattatttgaaaatagtgcacatagtctaagaaataatataaaattgttgtttaatggccaggcgcagtggctcgtgcctgttttcccagcactttgggaggctgaggtgggaggatcacttgaggccaggagttcaagaccagcctggggaacatagtgaaaccccatctctactaaaaatacaaaaattaactgggtgcagtggcatgtgcctgtagttccagctactcaggaggctaaggcaggaggatcacttgagccgcagaggtggaggttgcagttaactgagatcacactgcagcactccagcggggtgacacagcaagatcctgcctctgaaaaaaaaattgaccgggcgcagtggctcatgcctgtaatccagctctttgagaggctgaggtgagcggatcacttgtggtcaggagttcaagaccagcctggccaacatagtgaaaccctgtctctactaaaaatgtaaaaattagccaggcatggtggtgcatgtc

SEQ ID NO: 130286 - DNA, 2013 bp, Homo sapiens
aggttgaaagtagagttggtctcttctgaggctctctttttgtcttgtacatggccatcttcttcctgtcttcacacagttttccctctatgcccatctctgtccggatctcttacgagaataccaatcatggccgggcgcggtggctcatgcctgtaatcccagcactttgggaggctgaggtgggtggatcatgaggtcaggagtttgagaccagcctgaccaacatggtgaaaccccgtctctactaaaaatacaaaaattagccggtcgtggtgctgcacacctgtaatcccagctactcaggaggctgaggcaggaaaatcgcttgaacctgggaggtggaggttgcagtgagctgagatcccgccattgcacttcagcctgggtgacagagcgcgactctgtctcaaacaaacaaacaaaaagacaccaatcatattggattgccaccctaatgacctcttttaattacctctttaaagaacttatctctaaatacagccacattctgtggtacaaggggttaagacttcaacatatgaatttggaggacacaattcagccaataacatacataattcttttgttttacaggtcagtttgctgagaacgaaaccaatgaggtcaattttagagagataccttcacatgtgctatcgaaagtatgcatgtattttacgtacaaggttcgctacactaacagctccaccgagattcctgaattcccaattgcacctgaaattgcactggaactgctgatggctgcgaacttcttagattgttaaataaaataaattataataaactgttaactcttttcagtatttaatacctgtagttcagttagtaactttttcatatatagcatgttgcctgtatgcagttgaactatataaagttcattgcaaagcagattatcttgtttttttgcatagcaatcaaagttgaaatttgtttgctacatcaacaaattaaggacattttcacaaactgagaaataaacaaatatgccaattcgtaggtggttttgccttatcctttgaatgtgacttaaaatcagcaatgatgatatagtaaatactgaaatttaggtgtaaatcaatacgttctacagggaaataatgaggctaagtatttttatgtttttagtggttttttagaaacctaatcttatagccgccattagcattactagagttatgcaaataattgcattataaacatgtttataacttagccaaaacattgatttttataactctccaagtatgagttgaaatttcttatgtcttttgataaactgcagtattctttaagtgtactttgtccttttgtttattgctacaatttaagaactttatttaaaaacaattttggaaggttactaggtacagcttttgcagaagaaactgaactgtagccagatggtcagcaagtaaactacatgacttagagttcttgtgcattatacattttgggtaattcaaagtactgtatttgcattgactataaagcgtcgtttgcaatatttattcttccttcatagtcccttgttgtgattatacttccagttgtttaaatgtattttaaaagactcactattaactttattcagatcttaaaagctacacctttttgaactattccagtctttctccatccaattagaatgttatggaataacatgtgaagagatacagtgaaaatcatattataatgcattgaagatatcctacatgaattatcttctattaaaatatgtcccaataaatatacccataatcagtgggtcttctactgaaatcaagctcattcagcttttctattaagcagccaaaaaattttttgaaaaaatatgacagcatcattccttatgcatggggaaagaagcactggagatgggtttagtattgtctttatctcagaggtggaacaaagttgtcattatagggtctataaacttaagtctccagcttatttgagactggcttaatatggctgagcccggtg

SEQ ID NO: 130287 - DNA, 1031 bp, Homo sapiens
tttagagataggatctcactgtgttgtccaggctggtctcagtctcctgggttcaggcagtactcctgcctcagccatccaaagtgctgggattacaggtgtgagccactgcacccagccctgtcttttttattctcatggaagttacttcatgtccttggttatatcatgccattcattcaagcaaatatttgcttattgtctaccactgtgtactaaatacaagatccagaacttgctgtgtcctcactgttttaagtcagtatgcatcatccttccagcatgtgtaccatagcaaggtgtacagagcattgctaacctcaaaagctcacttgagctttggtgtccagggattttcttggggtttcattctgtagacatgattgatgagtcataagcaacaaggctgagctgagtcttcagcacccctccaactggaggtcatgttgatatcaaaaaaggcacctcaaagctttttgtcctgagtccttttgttagtttaaactatccaaaggcccattatgagttacctggttaacataaactaccaggacccatgaagaatagcaaggacttgtatcactagggaaattccaaggatttagaggccacctctcaaaacgaggatcaaaaaccagccaaattctttattatacaacaggacccatagttttgtttggattttcaacggaggcctttatccagaaaaagaataaaggacctctgccttaaaacacctcagtatggcagttttttctcgataattatgttccgtgtatgtattttaatggaatgaacatttttacacgtctgttacttttaacatgtcacattttacaacctcttcaacaaccccacccccaatcaatttataatgattatatgttatgtttctattttaagtaatctttctctgattcagaagtgccaactgatcaagctcacaaagcattttggtattcttcaattgattttataaaagtacagtgtttttgttgtaggaatggtgagctcgtaatgtaaccaggagg

SEQ ID NO: 130288 - DNA, 1182 bp, Homo sapiens
cggacagtctctgtaaccaccaaaatcttaacacgcagtgcgagaaactacaagtcccaggatgcagggctgcctcggtcccaacgccgacggtatccaccagagaaactacaaatcccagaatgcagtgctctctcggactcccgagagcctctctaaggatgcgtctttacagcaattggatcagggtctgcgctgcatgctgggaatccagaagagctagactcggattggtcgaaatttgccggttgcgttcataggctggcctactataggggaaaagagtagggcgctacgccctacctccagacggaagtgagcgacacactctgcgtcctcgcctcaccaggtacggatctcccgcgcgtcgccgaaagcggctctgacccagcggaagtaattctttcgactgccccggaacccaccggagcaggcagctgggggtgggggggcggccctgggataggggctgtggcagtacgcggggacccggctgcggtggctgcgggactgacgagtgagtctcgggctggggcggaaacggagctccgggtaagggtggagggcgagggaggccgagacgggacgagctcgcaatcccacttcccaccccttcccttctaggcggggaaggaacggaagctgttaacctccttgggcctccccagcccctagtttgggggaggggagaagagggcggcgggacctttcctggcgccgctcggtgggtttggaaagaggtggaaggaggggcagcagccagcgagactgggccttctccgggctgagcgcgggagggtggagttaggagcatggtagccctgtcgcttttcctttctgcttgttcctcgtgtccgctcagattagttcttttcttgaagtcagtccctagcccagggagaggtctctcgcttcttctagctgcagtacccgagaagtttaccttctgggtaacttgttgggtgattctatgctcgacttcatgagttgggggtatcgtgcatctactggccgtccagtcttgtctgaaaggaggtatctagtgtgaaatactgtgcccattgagtttctcttaaggaactgagatctgttaagtaacatataactgtggagtttgtgccatttagcgtgagcatttctactccacattgcttttagtgtagaaaaccgaaattctttttt

SEQ ID NO: 130289 - DNA, 1109 bp, Homo sapiens
gaggtccccgggcctctgtctcccgggcgtcctccagcagcgggccttcggggccggtagccggctggagtacggggccttcgggagccgcgcgccttctccggcgtccgggtcgagcgcaggtagggcgtccgaggtctggtgtcccaagtgaggcggggagggcgggcgtcgtgtcgggcctggggagccccagcggctcttcgcgacctctcccaggtgtccgtggctggagcgcgggaggagccccctctgcggggcttgcagaagtagcaggccgagggccccggggtcctcagcctccgcgagtccaggagaacggctggaaagtgcttacttttatggtagttccaaatccagagggtttgtggtgacaactatatgtagttccttttctgcccttgagtagaagcttagaagtgttaatttgcaaaaaattggatgcagcacctggaaatagaaccgaaagagccaggttaacctgactttgagcttgttctacttttatgaggtggctgtacttttaagaattactttggtccctgggaaaagggggatgcagatgttaattcttttattttgatctgaataaattgtcttctaattctactctgtaaaatatcaggattggcaaacctggttaaaacttggaagaaatgcttaaaatggaaattggaatctaattacatttcagcattgaggaattaggcatgccttttacattttgaagtgtatacactgtgaaactcattttcagatgtatggggaacgcttctgttcccttgaaatttgatgtaggatttcaagtaaattttatttctttttttttggaggtgaagtctcgctctgtcaccctggttggagtgcagtgacgtgatcttggctcactgcaacctccgccttccgggttcaagcgattctcctgcctcagcctccccagtagttgggattacaggcgcgctccaccacaccccggctgattttttttttgtatttttagtagagacggggtttcaccgtgttggccaggctcgtcttaaactcctgacctcaaatcatcctcctgcctcggcctgtcaaagggttgggattacaggcgtgagccgctg

SEQ ID NO: 130290 - DNA, 1048 bp, Homo sapiens
tgtggacgtggttccaacattcactcctatctcattagaagaaataggtagcagcatcactcaccagtcttatgccatgacctgctgctttaacatctcctggaatgttctgggagagaacgtttcgtttgcttgtgcacgactctgttcatttttgctgtttatttaaatctgacgtatagtcatctaccacctgcggtcctggccggacgaaacacacgtgttgcatctcaaggaaaagaaacaacaaaatgctagtgaaaatgtgcttattttgatagcaatataccatcttttatgtcatttattcttcctatacttgtaaaaggttatttatctttaaaatttagcaatttgaagacactatgccttcctaagaactaatttaattctaaatatttttaacattactgaggtgaattatttatgcacttaggaagtgctaaattttaaaagctgaaacacaacagaattctaagaaatatagtccaaacgttgcatggattgcagtaatcagtgtttaaaggattcagtttctttgctgacgtactttacaaccaaataaaatcttgtcggtggctgtgttaattcccatgaaagttaagcaagatgctattaataaactgctctgctctttcttgttttctttttccaacttaaatttctgttgaatacattcaggtagaacataaagccttgttcaatcactgcctctcagttttctgcctttcctgtttttcaaagtccttttgtaatttcatttcacattttaaaggcttagacatttttattttaaatatgtgtcttttacagtcttttgtcattctgacatttctggatttttgctgttttataatttaccctttgttattcagaagcatgcttacttatagaaactaaatggtctttataaaagtaattacttaaaaagaaatcaggggaagaaagatatctatctaatctattaaatctttataaaacattacattgcagagggggagctactcctaaatattttcatgatttgcatggtttaatcagatttttt

SEQ ID NO: 130291 - DNA, 1032 bp, Homo sapiens
ttcctctccctcccccattttactcatcaccctgtttgttcttcatttaattcagtgatttaatccatttcgtttaacaacccacatttgggtcaggcactgtggtacacgcctggaatcccagcactttgggaggccaaggtggcaggatcgcttaaggccaggaagttgagaccagcctgggcaacatagtgagacctcatctctacaaaaaatacaaaaattaaccaggtttgatagcacgcactgttggtctcagctactcaggaagctgaagtggtaggatagcttgaacctgggaggtcaaggctgcgatgagctgagatcacaccactgcattccagtctgggtgacagagcaagagcctgtctcaaaacaaaacaacccacatccacggcacttggaaatgtgctggaagatagtagagtctcattaaatattggttgcctgaatgaattgggcaatgtcacgtgtctgtgcactgggtacatagcagtgaataagacaaggcccctgccactgtggagctcagagtcttgtgggggaaaatagcagttaaacaacaaaggataatcaagtgtgaaacgccttgtgatagagaaagagcagggcactctgacctctaccacggagatgtgggctcagtcagggaaagagaccttcttgagtcaatgatgtgtgacccaaaccctagacccgaattgattagtgtttgaccaatgacagctccaatctccattattcacttaccccacacccaaaaaacatcaatacttttgaggcctctgtaacattgtttcagtgtagtcttacccagtatccaaatggagtaccactgtttcctcttctgtaaaatgaggacaataaaactacctacctcataaagccagtttagaatacttttaatgctatataagaattagacattattttaacagtaaataccacaatcatgtctttgtaataaaggtggcttcttcatggagcagatctgaaaagatgggttatatgaggttggtttgtttaaacaag

SEQ ID NO: 130292 - DNA, 1035 bp, Homo sapiens
ctcttttacctaaaaaccttgacctgtgccccttttttccagctcccaacacctatggttttatgtgtccatttaatgttagtttctctcctggcctccttaaaagaatatacactttctcttaacttctcctttaccctcttattcctagaaataatgacccataaccctttcattcatttaaatcttagagcatgtatgagctatatgtgtgcttctagttgataatattacagggaagcatacaatataatcaaattcgaaccataattaggaatatttttaaaaatatttttaaaagctcaataataaccacttagattgttttttaaggccagaattggtctctttcctgatttgattctgacgtaagaaagaggactcagaaacctttctccccattctcagagcagggggtggggaagtgtgtctgcctcatatccttgttctgtgaagaaaaactgatgactgttacattaaaggattggaagttcctttaaggacgttatgctcccattgtctgttgtgatgtagccacagtgggcttccaaggcaggttcttgatccagattagtgaatacacaacctcttgccaagtgcagttctgcatagttacggtgaaagagccgctcacatttttcgttgtcatgctggctttaagaatgagcttaaagaaacatcttagaaaaagaaaagaaaaactaagaagaccttaggtaattttcttacttaaaagaataccagagagcttgggaaggcattcaggaaagaagatgacatcttgtttattgaaatctggaattcgctctctgaaagctcagagcactaagggtaacatgggatttatttggggttgtgttttcatgatattcaaagcgtaattatattcagtaacatgtgccctccagtaaaaacagacatctctgttttgatccattttcttcatctctgttttgctactatgtagataagtttgaaagtctgtatccctgactacatgtaaccaaatagtctgtgaatggtccctcctgtgtt

SEQ ID NO: 130293 - DNA, 1426 bp, Homo sapiens
cccataacattttaattatttccaggtgaaagacagaaccacgcggaggaaagaacatgagctgagtcattgaacacactcaggtttagtcctgattctgctgtttattggtgtgtactttggacaaaccattacctgctggagcatatttccttatacataaattagagcgaataataaccttgcagaactgttgtgagagtccagcataatgatttgttcataaagtgcttagcaaagttcctaaaatatagatgctccgtaattgcaaggcaggcagtatgatatgtgtgtattatttgagtgtatattttcatgcatgctatagtcttatataaatattcagtttttaatttccacatttttgagaacttaagatagatttttgatgttaaatttaactctaaaatgtcttctggttagttaccctctggtgtgctgaatccacagtagacaatgtgtcgccgtctttcctttcctcctcagtttccctgttatccacttttctctgtgctgttccttcccttcctgcctcccttcttccttcccacctccattcatttcatcactaataagaaaggtgaatgtgtcagtagaataatcaaaaattaaaaaccaatattatgtgaaccatctgtctgctttgctgaagagtaggccagttcttggaagtcaaatttaaaatggccatttctgcacataatgagttcttacccatgaggatggcaaagtcccccaagttttcaccacctcacagctgaggaggtgataccttttgcccagtccattagggatatttgtactttgcaccctgtatggttctattatgatgcctcctaccatgcacttataaaaataatcaactattaatcctcgagtgttatgttaatatacataaacatctattgctagactttgcaatctacagttacaaatacatataacttcattttttacttactacagatttcattgctgtgcatagtccattatttaagattctttatcattcaaatgataggaaagtttagttagaaggtatatttgcctctcctttgttgaatctgatacctctatgcttatttaccaaagcaaaaaaattcaaatttaatatgaagactatcatcactaaataacaagaggtctagtttttatttatacaaataaatgaatttatttaaaaataaaatgcagctaccacaactatcgaatattcaagttgaagggaactttagaactctttagttttccagtggttttcaaactgtgttcctcagaattcttaggttttattgaagggctgttgttggaggcaggggaaagccaaggggtgaagatgggtaactgtaagccagaacatacacacttttatctgcttttatagcaaggggagagaatatgttagatttttgtataagaagtgaat

SEQ ID NO: 130294 - DNA, 1007 bp, Homo sapiens
tctctacatacttaaaatatctacaagcttttacctgaaatgtgcaaacaaaaggttattcaaataactgaagactgttacagttacataagtctgtggtttcacaccttctgtttatttagtattaggttggtgcaaaagtaattgctatttttgcgccaacctaattaattgcaaaaactgcagttacttttgcaccaaccttggtatttaccaaagatgacatgcattcatctctcttgagaaattgtccatgggcttaactctgtgtttcaccttcctagtaaagcatttccttgactattcctgtgctccttaactatcctttccttctccctcttgcgttttcttgtcttctgcccacatttgccattcctgcccaaccccattttcttactcttcccacctccccacttatagactgtgatcctctgtccttctggatgtctggctctactttccccattttcaccccaaagtcgttcatcaatctagttcatttactggatgttaattgagagcttactccttgctgatgacatgcatgctgttgaagaaatgggttttcagaggcagcccttgggtgagacaaataagtacacagccaattgcaaggcataagtgctggtgcagctgaaattctgctgcagagggtggcagaggcttagcaacccacggaggatgggaagatgaaacctgtcctcgccaaagcccctcctggggctgcttttccacccgcctccatctgccctcttctccatggcattcagtacagacctctgttttggtgtaatacttattagacaatattgtactgagtccagccagttctctttaataattgtataccttgcagatagaacacatccaataaattgtgacttccctggagttaattttctttgcagtaaagcgagactggtgacttagaattgttgtcaagggttttctagctgaaaaaaaaaaatattgtcagctaaaacaagtacatatttgtattgaaaacg

SEQ ID NO: 130295 - DNA, 1099 bp, Homo sapiens
tgtgtgtgtgtgtgtgtgtgtccttactgagattgctacataccaggttgttccctttcgtggaaatggtgattattcgtaactgaaagtcctttgtggttagtgatagtgatttcacaggactcgggtaaaacacacacgcaacgcctgagtggtttgagctaaaaccaatgagttgcagttttggaggttttcttgactcatgacctggggactgtacccactccttgaacaggtttcagatcaaggcctaggagcaagaacccgagagacccatctgcaggcaagctgcaagagaatatcctgcttttcctcaggatactagccctgccctctgtttagggccaagaatgccagaaagactctgggaccttattaaactgagctgaggggggagattttattcaagtgttgtctatgagatctgttaagccttagatttcttacccagaaaatgggatgatttggtactcagctcacaggagtttaggagaattaaatgagatcaagtatatgtgagtgcccttggcacagtgagtagcacttagtaggtgctaaataaactgttacagccaacaattgttaaatattttcatgccaagtattgtgaaaagacagtgttcgtcctcagagtgttctgggctgagaaattgagaaagccagcgtataatatatgaggtgatgagagctgtgatatagcaaagaactatatgtacacacatatagaactatatacacacacacacatatagtcacatgggtgactatatcatcaatgtatacatgagcccagcagagggtccctaatcacttagaggaaccaagagaccttctagagacttgagtcttgagcagggcctgaaggaaaccagtaggagtttctagaaatagaaaggggagaaaagctttccaagcagagggacctgcaagggcaaaagcatggaggattaggagctctcatttgtttcttccctgctaaagtgctattgtcattcaaacttatgtaggtccagggcacagagaagcagcatgtgtggttagtggtaaagcacacactctgtgccaccagacagtcgtttagaccctggccctgccaatg

SEQ ID NO: 130296 - DNA, 1189 bp, Homo sapiens
aatgcagtggtctggggctgtacctctgggaggacattactaggcattttaactgcatggagtcggtagggcaaagaacagtgagtgagttaagagtcccgcgaagcacacttggatgcagcttgagaacaagagcaaggggagctgagggtctgttttgtgttatgttctgtggtaccatctgtatctttatgttccttggtccctgctggaacttgtcacatgtttactctgtttgacgtccctctctggtttgtaatagagaatctacatagtctccaaagctggtcgggagtgcagtccagctgcaaatctttggtgatggcaagtccctgcttgagaggactccttgcccgtcggagtctgatcaaccctgctcctgcaaagaaacagccaggtgttgggtgtgtttgatgaagtacaagagtctctgttgggcagtctgatttttctgttaagaaaatactagttatatgaatgttctgctgtagtccaccagcagttttttttactgttcatcaaacatgaaaatatgtaaagataaaaatatttttactaaatgatgaacaaatgagtcaaaatataaaattgtttatgtcctgaactcttcaggtatcaatttctcctgcaaaatcatagcttgcattggcttatgccttatactttctgtctatacgtggacttcgagttagccagagatgtaaaagttttaagttttcaagccatggaggttaagaagggatttcttggatatatttattagcttgatttaataattctgcagtgtatccatatatcaaagcatcacgttatacgctataaatatatacaatatttatttgtcaattatatcttaagttgagaaagggaagagggatttcttggtagaaaaaaatgaaatttttaggcaagctgatatatttgcaggccctgaatcaagcagctataaagacctttaagaatttaaaataggctttgcataactggattttctcatgacattttgaagaacttttttcctttgagttttctgttcctcctttccccattcattgcatcactatgattaatatgatattctgctcacttaaattctaaataacttttagaagcctgaataaatactgaactagtgaactttaaagccagatagagttgctataaaatatttttcccaatagttaagcat

SEQ ID NO: 130297 - DNA, 1003 bp, Homo sapiens
agatttgtaccctgtagcttcatcctcttttgaaaagtcttacaacaaacccacctggattttgcgttgcagtgccgtcgagtacagctgagtcatggcaagagaagaggacaattagataaggggtgcctgactattaaaggatctgaaaagcactaaccagggtattatgcaacacacaagtggaaaccgtttcagagtgccgaggaagttattaacaggagcaaaacaacatgtgaggagagtgattttagctacagtgctcaaggtagattgcaagcagcagaagttggggatgagatcataaaggacatgaataaatgcatctaggcaataaagaactgcacccttgaaatttgtaaaggaaaacccatcttgtatacaacaaccagctgtatacaagggagttaacgttctaaggatgtgagtacaattagctaagagcataagtggcaccataaaggctgatggagacattatggggagaaagatagtgaatctgatgtgtggacattcaaggtgatagataaaaagataacatgagtttcaagtaagaacagtactttgaagccttgagcacttagcagcttcccgaggatatgaatacatcaaaattggagattggcactggcatttataacagcaattattaggaaagtgagtagagggggctggaatagagaaatctctaaagaagaggcagagatgatgacctgtgtgtggaaagaagcagagaattatttttgtgctactattaagacaaaatgctagacaaggttcaattgttgttataaatgtaatttctctatataatttcatcatctaaaatcaaattagcaagtactttttatttaaggggtaataagagtagtcatcacactatctagatagccacacactatcaaagctttaactcttcatgttgactctgactacgtttatataaaagaatgaaattcacatctataactttctttgccttagaaaaggcattttccagttt

SEQ ID NO: 130298 - DNA, 1120 bp, Homo sapiens
aggtgggtgcaaaggacagtggaccatgtgtatttggggtctggtaaaatgtacattgtggttgggaaagagtgctaggtgtagggtgttgagagatgaggagggtctcttgaacctataagagggagtttggacattatcccaaggataggggaaggctattgataggtgttaggcagaattacatcatcatctttagaaagatcactctggctgcaggtggtatagggaatggggacagtaaggggcagtgaaactggagacagattaaatagtcacaggctgggcacagtggctcacgtctttaatcccagcactttgggaggctgaggcaggaggatcacttgagcccaggagtttgaggctgcagtgagctatgatcacgccactgcattccatcttgggtgacagagcaagaccctgtctctaaaaataaaaaaatagttatctgctaactagtgatctaagtgatagcctatgtgttgggctaagctgtggcagtgggatggaaagaagcaaatgattgaatgagagcctcccaagcagattcactaggacctgtggctggttgagttaagcatggtaagcctagaaaaggagtcatcagagtggctccaagttcctggcttagccaactaatggatggtggtactgtttactcagaaggataccagacaggaagggacagatttagggaggaagataagtttggatttttggcttcttgaatttcaagatgctagcctaaaagataatgggggaagatgtatttggaactcagagatttgagctgtgcttgcagagcttggagccaaaccctgggaaagacttacgggacatgcagagaaagaggaaatccttgtatgtaatactagacacagctctttttaagaagtacaagtaaagcagttctcacattaagtgactaggaatttgttgccttatgacaatgcaattcaggtatctgaatttctattcttgaatttgtgaagttatgctttctaaggtttgtgctcaagggacctacccagtgagcaagctctgttggactgtttttttttttttttttcttttcttggcaacctactggaacaaaatatcactctcacaaattattatg

SEQ ID NO: 130299 - DNA, 1647 bp, Homo sapiens
aggctgaggcaggaatcgcttgaacctgggaggcagaggttgcagtgagcagagatcatgccattgcactccagcctaagcgacagagcgaggtctccaagaaaaaaaaaaaaagttagtgtagatcaccatcatccttttatacgttatccttttgttgtactttatactttatattgttatcctctgaacttcagagtctgggtgtttcaaccaaacttctggaatttgctcctagaagaatatatagttttcaaatatgtttctcttctttatcaaagaatgtccatttcccatgggagaaagggggggtgcctagtctaacttcgtcacattttttctgggctctttaaagaaagacatgattgtccatatcaaggggcccaggagcaatcattgagaattctctctgtgtgcatgcactgagggaacagctgaaactggaaagatgacctaggtgccagctctgtcctgcccctacctccaagcgaggggttaggcttggatgtaatagcactgataggtgtgacttggtagcacagagaaactcctctggccagctcctggccttcagctctgatgtcatatcactcaccacgcaacgggtcattacgcataacatgggaacactttgtgttatgacagccttgtaaaacctccttaggatatctcgtttctaaagatctttctttaaaacaaaacaaaacaaaacaaaaaaaactctttctccagccctcccaagtccgggcccattcagacactcggaggcattgagatggacatgtgttttcgtgactaacaagtaggttcaagagaatacaaatataatgaaaattagtcttaggccataataaatgggaaggtcacacagttctccagactttcaagccattaaaaaacatggttttaaaaacttgaattgtgtaggcatggacttccattttgattaaacagggagggcaaggagaagagactgtatagggtatgaatgggatatgagacaacattcagttctgcagagatctacttagtaaaagctggcactgaagactggaagggaaaactgaaattccaggatgatgataagccaggttgtggggacacatgttgaccctgttttaactgtagaagcctgagcttgcttaaatagtacaaacttcaacagattccagctcatttagccctgaaatatgaccctttctcaatagtacacatatgaagaattaaagtagcagtttctaatgcatcatttgtaatgaaaaccaccctactcctatgttttctggaaagcccccaaaatgggattgcattcatattttatcctgtatgctttgtatgagtttcagctttgacctggagaaactctgtttttaagcaagtggcagagttctgcctgcatgctgccatagctggtaggcttctccaagcagcagctgccaggcagccgaagcaccctgctcacaactttccattatggattaagctgactctgccaatctcactttactcaagacaccaaactggacgcttgcaagactagtgccttgcaaatctttgagatgcttttcttattatagatgaaatatgaacattgtgtttaggagcaggatccaacaaatgccaaaggtatttatgtaagtcattcag

SEQ ID NO: 130300 - DNA, 1097 bp, Homo sapiens
cttagggaattaccactgccagtgctcctaattttgttttgctgggcaaaaccacattttaaagatggaaacttagctctcataattcatgctataatctaacaatagtcaaggagtgcagaaaatgtcaaagtgtgtgctacgggtaactttttccttaattaggtcaacattgttacaggacataaccagggaacaagagcatcaggttgagccaaactgttatttccattcttcataagtattgagctggtcagtgatacatgtaagagattcccttccagatgtggaaactccaggaagtcagcttatcctaactgtgataacattggcttagcttttgtatttgacagcaccaaaacatgtgagataccagaatgtgggagcttattattaatttttttggaaagtttttcttgtttggaggtcattttacttagactcaaagaatatcatttaatttaacacataaagttggctgggatagaacagttattcacaagatcacttgacttgattcacattttactcataagtaattaaaacccaaagtcaactatgagtcaatgcacattatggatccaaattaaactgactattaccaatatcagaaaaaaaagcctattctctgctaagttattataaagggccaggactttgaaattcttaaattattctcaacaaggggatcttttgcaagtcaaagctgtttataagctatcgttatgtctgtactgtaatgatagtggttgtattatatttttaaacaaagtttagatcaccttttctacagatttttttttcttctggtgctctggttaattttcagtaattagcacaagtgattttaacgggaaggggaaatccttctgatgccttctgagtcattttaatgaatagattgttaaatagttaaagaaattttaggacaaaatcacctaaaatgtgggcatttattgctaaggaaagcattagttattttctttagttctgctacctgtattcttctatatctgcaccttggctgcctgtcactctttgcaactgttgtaaccagtgcttctagggcaaattccagacgcttggttgaaataccc

SEQ ID NO: 130301 - DNA, 1078 bp, Homo sapiens
caaaagtggaaaataacatgacaaaatctggcatgcattgttaaaaacaacagctacatgggaaaggcaaagagacctacaagaatcgccacattctatgcagaagagattaggtcactggtgtattaaaaggaaaggggtggagggaacctgacaacctgacatggacagatgggactctcaatgtgccaaggttggaagaaagaagagcagtagagaagggctggagtgagtaggagaaaaccggtgaataatagattgacaagtggggtgtatgtgtgggcacagaaggactacgtgcttgaagttttaccattaatagctggtttcagggatccagcaagagggatggaaaaatctattgggaataaagttctattagggaaggatatcataggtgagacaaaaagaaaaaggtgtggtaataaatggaaaattttatttttagtcttatttaagtgagtactgactagccacagctttgtaagacttgaagcataaatgtagcatagaatattaaaaatcctgtttctgcttcaataacactcttccacagaagtaaacgcccttttgaaaccacaaaatgttagcatgtcttcaggtttttgttattggcattgaattaatgaacctcccttttttttgatggagccatatgaaatttccaatgttcaaattttttaatgtacaaaaaaaaatggtgacatcatatggttcaacttagtacttctagagttcttttttttttaattcctctacttaaaaaataagtagggctaccactaaataaggttgcatattttgcattacttttagatatatattatattatatattaaaagtcttcaaggttttcatctttatcccaaactaatttcatttcaaagctattattttttgttgatcagcacaaactttaatgaagggtctctctctctcctgtcttctctaccaggcatcttttacttcagatcacagttttggatctactttgcttttcagtttgcttatagatcagatactcagcacatctaatcttgctggcttacttttagacctagtgataaacatttgttag

SEQ ID NO: 130302 - DNA, 1060 bp, Homo sapiens
gtctaaagcaagtttattgctgtaacttatttcatacaaaggttttggccaaaataggaatatcactaaaaaattagcttgttttctgctgttctcactaaggagttagcttgtttttgtttgcactctccccatcgccacatgtccatccctgtacaccctgtatcagattcagggaaaatctgattccgagtttttttgtggtgacattaaactggaggaggaaggaagcagtaattccatgtgagacgtatcacttattttattagtgatttgtgtattacatgttgctgaaatagaaaccccctgaatattaacaataagttagtatcatactcatgaaatccaagtctaggtgcccagaattttttgtgctaattctgatctgtactttgttttttcacttgtcataaaactattgaaaatatctgggaaaacacaacgttttgttaactagatgcatacttgcacatacccattcggagcatataaactgaagtttggcatagtgcagtgcaaatttgactgaaactcctaaactggatgccttccactacaagattgtgtagttaaaatgactaaatctaaaaaattagctcccaaatgaacacagtttaaaactggtaaaagtaatttttatacttgtgaaatatgcatctacattttaggaatcaagaggaactaattagaactttatttgagcagcagggagaagttggaacccacctgcttcataaagaaataggccctttcttattctaggttcattgactaaactaaacctattttaaatttcagatgaactgctaacagtttgactgcaaattggtttctagcaattctgtggaggaattctttcatatactgtgatttaacaaaataggagaggaatgtggccaatgctcttgtcccccccttccctatttgacagttaagcagagacttaaactttctaattattgctgttgccttaaacagcttggattttcaagccatacttttttggaaattctaaatactgtactagtcttatttttggagataacagtttaaagaaact

SEQ ID NO: 130303 - DNA, 2327 bp, Homo sapiens
ggcggcggcaaaagaggagggaggacgggggcggcgtcggactggagccgagcggcagcgcgagctgcccagggcgctgtcgtgagctcgcccgccgggcccccacccccgagctacaccctgccgtgcccagcactgcccgcgtccgtgcccctgcggggagcgcgccggggctgccccccgaatgacgggcggaaggttcgacttcgacgatggcggcacctactgcggcggctgggaggagggcaaggcgcacgggcatggcatctgcacggggcccaagggccagggcgagtactcgggctcctggtcgcacggcttcgaggtggtcggaggctacacctggcccagcggcaacacctaccagggctactgggcgcagggcaagcggcacgggctgggggtggagacgaagggcaagtggatgtaccggggggagtggtcacatggtttcaaggggcgctacggggtccggcagagcctgtgcacccccgctcgctacgagggtacctggagtaacgggctgcaagacgggtacggcgtggagacctacggggacggaggtgagcggcgtaacgggcggctcggctgctccgcgagctggtgcggtgggctctgccccggctgcggggaagcggggaggacgccgggcgcacgtgtccggaaacccgccaaaacacctgggggcgcctcccacccccgcgcccgcgcccgcctttcccagagagggcgctgggaccggactggggcgcgagggctggatctgaccccgttcttggagcgggccgtgtatccacactcaggggagctaggcgtgaatgtacctggccggcgccagcgctgcgctgccaccgggagggagcgccgcccgggagggttgggctggagagaggacgctgtcacttgagcccgtcacattacgttcctgatccctccctctcccggccgggtttgaaatcgccactcccgtggagttagagcgaacaccctgagcgggtgaggttggcggtccgtgctgaccgctcccgggattggtttcacgtggagtcgtatttcgcttctggtcctccagtagcctaaagatagaagccagaaccccgtaactaggatgttggggaattgtaccttatttgggggtgcatttggaaacgtcctagttatgggagcagaaaggccacctgatgcaggtggagttcagagtgtgtgagttcctagttttcattccgtttcttaaagtattggtcttaaaagagtagcagtctttgctgacctggagatcttggacaaattactaggaagatattttagaaatgggtaatgaagtctacattttaaagaatacaattagcaggtgtgttcctatagctgctaagttagcagctactactcctgagaatggcaatactgaaacaataatttgcattatgtgtgacctaagccagtattcctggctgtgaacaaagatcaccttattttaatatttaacaatatttgccaaagagattgtgtatataccaggacagaagttcctcttttattaggaaaagtatacattattgaaacaggtgtcaaaacctgatgaatttccttgtgtaatacgctgagaaagatattcatgaatagcttatgctttagcaaagtgcatttcctgataaacataatcatatttagttgaaaagggttgtaggaggcgacatcactttttggaattaagcagctcagagttggaggatattaaagggatgcaattaaaagtttctccagcccactgcaaccccatttataccattgcttatataaaagcttacacaatttgtacacttcacttagtcagaacacttgggccgtgtttcaaatgcaaaatggcagaatggtagaacttgctaaaaaggacatcttttcatcctacagtataaattaagcatatggttctcatggattaaaagaaaaaaacgttctctaatagttttatgtggggctgagtcccgagtttcacagtagttaattgggacccttaaatgttctgaatgggcataaagtacctggttgacagcgctgtaaatatgtcagtttgtgactggattttgttggaggccccagctctactatataactaaattccatgctcaaaagtagaaggcaaaatttattgttttaaatgtgtgcattattttataatcttttaagaaggccagggatggttctcttcagttttggaaggttaaaaatcgtctccttttaaagatactattcattaaacacactctcttggtttagagtattcattatacctagtaatcaaaatatatatagcacagtagaggctg

SEQ ID NO: 130304 - DNA, 1034 bp, Homo sapiens
agcaaatggaaagaagaagatactttgatgaattgtgtttgtttcttcttgagtttagtgggatattggagcatttcaagactagttctcaagttgtaaggatccatttccacagggatgatataccaggttaaatagtgtcacctcaaaattcttatctacctggaccctgtgaatttaaccttatttggagatagagtctttgcagatgaatcaattgtagtgaggtcatattggattagagcggcccccagtccaatatgacttgtgtccttataagaagagagaaattgaggcacacacaccaggtggggatttgagaggcagccacagaagatagaaaagaggccagcagcacgctcttcactgagcctccagacaccctgctgatatttcaatttcagatttttggcctccagactatgggagaaaaaattttggtggttttaactcaccctgtttctggtaattagtttgcgcagcccttggaaactatacaggtgataactgggtctgatagtgaattggttcactaatggggcaagaaaatattcataaaaatggaggggtacaatcagaccctggtgtgctgtgccaacacttggtgggtggaagcccaaaagaggtaagaaaacaaaagcagagaagtaccagaaataactcaaacaagctctacttttcaaaaaaagagagcttcatcagtgtcatatataatggaaataatgaggagaatgagacctagagaaagggagctggcaggatatagattatcagacacttttgagaaaacattttaaaagagcagcatctctcaatcttgagtgtgcataagaatgacacacagacctttttaaaaatgcaagtcccagagcgacctctgtggatagtaattctatagatctagtgttttgtctgggattctgcattttgacaggcactccaggtgattctgaggcagaagcttctggcacttcaatttgtgaaacgctaatgcaatggtgaagtcagggtgaatcagggtttgtggaaccaga

SEQ ID NO: 130305 - DNA, 1051 bp, Homo sapiens
aaggtattggtaagaaatagtcaatatgggtgaaatggcagtgagttcaattgtttgtgatgtatgtccaatttttgtatataatatatacaatatatgtatatatactttaaaaagcgtaaacatatactttaaaaagtcatctgcagtcctagaagatggatggcaaatattaatatttcagttctctgtgtctttttcaagggattgttaatgagccattttgcatgttacattcaggaagattttgaggttgtatctgaatttggtggagaaagaagtgttttgaatgattagccatgtttgaaataggcaaagaaaagggaaatggcacttgtgccatttttttttcaatccctgacttagatctatcatggactatttccttttatcatcactttaatttttatgttactgcaagcaaccagtgtttctgtgtgcctgaaatctaatggaattcagtattagttctatgctgtggtgggaaggacaggtggattggatttgaatctcagttctcctaaagactagcattagcttgagcaattttcatgagtcttagtttaacatctataaaataggcataataatacctgtattctatggatttgtgagaattgaatggaaaattattagtaaaaccccagcactatatctgaagttatttacttacttgccttctttcccagccagtgctggtatgtatttgggaacataatgatattttgatactgattttaagtagacagataaatctgttacacaatatttgtacattctaaagaataatatacatgaggcttaaatatgagctcgattcctcacttgcataaatgtataaaactgagaaacgtctattttacctgaatgcaactcttccgtgatttggtataattgatgtgcaaagatattttacatgctcattcatacattgtaacattttgagagataaaagtacagcgacacagtctaaactaattaaaagaagattaagcatagaatatgtaatatcaacatataattgatttatttaagcaattctgtttactat

SEQ ID NO: 130306 - DNA, 1050 bp, Homo sapiens
tctctcacaaaatcttgtcactgatctcacaaagaatgagagtgacagagtgtagatgcttggagtcttcttcacctatgcttgctgaaaggcatccttttgtttatgaagggaaaagccaagaggtactctgagaataggccctgagggaaaacaacattccttgactgtcttggggaggttcttgagggctgatcctgcctagggttgattttgttggctcgagtgagaagatacatagctccctacccccatccccaatctagtaatcttactcctgatgagtaatgtagaaatatttttaacttgaaggattgaaaatatttgctatggggattatgatgtttggctattgctggagtaaagtgaaggaggttatatatgtttgtcatgttaagaaaccagcaattgtgaatgtaggctgcaataaacatggatagagcttgcaaatttttgcaaaactaaaactgtagttattggttcttcctcttcatttcaggatccatggcattcattgattgactctggatgcaatccagattcttcaacattatgtctgtttctgaatactgtgggttatctttgacctagaggcagaaaaacctctgctgtctggtgtcccaactgttagcaaaaggactgatgtgaaagttgatataatgagcagaggtgtggtttcggggagtgggctggctctggacccagcctgcctgtcatgcagatcctgattccacatttgctagctgtgtaaattggccctttacttaacttctctgtgcctcagtttgctcattcacaaaatggagcaatgatagtaccttcccaggatcaaaattgtttctcaccttaagaggtttttgggaggactaaataatgtacgtaaaacatatagtacagtgtatagcacataatgaacatttaataaacattagctattatgtgagaagttctagagtctctatgaacctttaccagggaattcagctaagtctgctttattgaggagcccttgtcaccttcatttattaactgtggaacattaaagccttt

SEQ ID NO: 130307 - DNA, 1706 bp, Homo sapiens
atctgggagacggaagttgcagtgagccaagatcgcgccattgcactccagcctgggcaacaagagcaagactccgtctcagaaaaaaaaaaaaaaaaaaaaaaaaagtaaagaaacaaggccggcccagagcagcttgagcagccgcagtctgcaccctctcccgcccgcccgccctccacggcacccccacccgccccggggtctctttcccccttcctcctcctcctcctccaccccaccttcctcctccgcccgcccgcggggccccccctcaccttcccgcctgcccctattgttccgcccccggcctcccgcccttccccttccagcccattccccttttcccctcagtcgcctcgcgccagcagtttttggctttcaccccccatcagtgaccaaagacttgaccactcaaagtccagctccccagaacactgctcgacatggaaaccagtgtgattgaaggtggattaaatatcactctcaccatccgactacttatgcatggaaaggaagttggcagtatcatcggaaagaaaggagaatcagttaagaagatgcgcgaggagagtggtgcacctatcaacatctcagaagggaattgtcctgagagaattatcacttttgctggacctgctaatgccgtcttcaaaggctttgctatgatcattgacaaactggaagaggacataagcagctctatgaccagtagcacagctgccactagacccccagtcaccctgaggctggtggtccctgctagtcagtgtggctctctcattggaaaaggtggttgcaagatcaaggaaatacgagagagtacaggggctcaggtctagatggcaggggatatgctacccaactcaactgagcaggccatcactattgctggcatcccacaatccatcattgagtgtgtcaaacagatctgtgtggtcatgttggagtcccccccgaagggcgtgaccatcccgtaccagctcaagccttccagctctccggtcatctttgcaggcggtcaggcctatacccttcaaggacagtttgccattccacagccagatttgaccatgctgcaccagttggcaatgcaacagtctcattttcccatgacgcatggcaacactggattcagtgcaggtttggatacatctgctcagactacttctcatgaacttaccattccaaacgatttgattggctgcataatcgggcgtcaaggcgccaaaataaatgagatccgtcagatgtctggggcacagatcaaaattgcgaacccagtggaaggatctactgataggcaggttaccatcactggatctgctgccagcattagcctggctcaatatctaatcaatgtcaggctttcctcggagacgggtggcatggggagcagctagaacaatgcagatttatccacaatccctttctgctgttcaccaccacccatgatccatctgtgtagtttctgaacagtcagcgatttcaggttttaaatagtttgtaaattttcagtttctacacactttatcatccactcgtgattttttacttaaagtgttttaattcctttctctgttcagctgttggtgctgagatccatatttagttttataagcttctacctgggatttttttttttttttttggtgttttgttttgttttgttttgttttggctcatgaatttttctgtctgtcatg

SEQ ID NO: 130308 - DNA, 1082 bp, Homo sapiens
atggtctcatttgactgaatacttataacagttccacaattgtagaattatgaaatatttatgggtacctattatgtgcaaatcactatattaggtacagaaagcacaaaaacagatttttttttttttttaccgtcaggaaggtttacctctagtgaattgcattaaacatacataaataaatataacatgagatgaagtttgtcaggtgtctaggagatatttgaaagagtacattttcagctctttgggtatttggaggcccaatggagatgtcatttgcactggtccttaattactggataagtttgggatccacagatatagaaagaaagagaattacaagtgaaaggagctgtaagcaaaaccataaagacaataaattaaaggacatgcacagaacacaatttgttccacttggctagagtcgagggaaataaagttcgaaattcaaactggggtcatctttaatgccaggctgaagaatttgacctttatttaataggcaatgaaaaatgttgcttatcaatgtcaacacgtaattcgtggctggattacgcagcaggattttatcaatctatgtcatcatgacctctgaaatccaacctttggtcaggagcatatattgatgtctaagaactttaggattaacttccccagggaaatttatagcacagctttagatttgattctttagagaatttttatttgaggcaatataaaagtctgatgtgtgttgactacaagttttaaaataaatggtggaatgcttttggtttgccaatttctgaaaagtaaaataatgacatattaagtaatggaaatgtgggaattaaaactttcacagaaagagcaaacaaactcatcatttctttccttatctctgtttctgtgtcaggcccccttcctggctcatgtcttgtcctccaagatgtcctcagttgcctctatttcagttcttttttctttccatgaggggtgagacaccattttagaacttagtaagccacgcttggcctcagtgtccgaaaataattggagtaatttcattttgtttcttctagagggggatccagaaggtt

SEQ ID NO: 130309 - DNA, 1049 bp, Homo sapiens
tttttatggctgagtagtattccatggtgtgtgtgtgtgtgtgtgtgtgtttgtgtgtgtctgtgtgtgtgtatgtatgtatgtatatatgtataccacattttctttatccattcatcaggtgatgggcacttaggttgattccaaatctttgcaattgtaaatcgtgctgcaataaacatgcacatgcaggtatctttttgatataaagacttcctttgggcagagacccaggagtgggattgctgtttgctttctctttcacagagatgaacactagggcatttgctgataaacctctcgcacactaatctccatcttcaagcctgcatcttggggaatccagtctgtactctccactaaaatagggtgcaaattgagctacaggccagatggccttgtaacgtaagattcactccattgtgtcctacagccaacaactagatcacaacatgggcaagatattttataaataaatttttaactataagaatgactttaagaggtaaataactgaatgaagaaaaccaaatcaaaacttttatgtgagcatccaacactgctgaataaatgagtattcaatgaatgtttgaactgaataatgtactgaatggatacagtaagacaggataattttgtccatgtttattaaataccatttatgtgtcaggctccaggaagggacccaaagttaagacatggcctctcttctcaagaagctactaagacagcagcatttctagtctatccataacccacattaatttatgctctgttatttatggagaaacagatgtcaatttgtgaagcaaacaattttctaagcataaaacatttatttcttatgtgatataaaccaagtcatattggataatatggattttttatgtgtaaaaagagattgtgttttaaaaaactgaattatattgtacttattcctttatcaggtcaaatacatttcaggtgaatgccaaatttatttattaaaaaaatgagtttcagaaaaagatataccagaaagtattgttataagttactttaatgggaac

SEQ ID NO: 130310 - DNA, 1049 bp, Homo sapiens
gacccggaggtccccatcccctgtcctctccgcggtcgccgcatccggggctccagccgcagcgctgggagctttggaagccgtgaggctccggagctgctctgagtccgggctgcgcgtcatttgcagtctggggaatgttgatcacctcactaattacacctctctctcccccctctccctctccctctccctcgctctcctctctcattcccagagtgcatatcgggaatagacacacaaagacatgcgcactcaacttaatcagccatttttttaaacagggctaaaacgataataattagcagaataaagacatatcggattttcatttcctttcctccttttcccaaccccttcacaaccaaacagcgagaccgcggtcggcacatgctttaactcctcccggacccccgaggaccgctccatgccccccactttctgctccagcgtttttattttcacccaataaagttcgaggattattttttattttttttgtttttttaatgaaccctctcgttttacttggatgtgatcagctgtaagtaaaataaaagcaaaacaaaaaagaggcgaagatcgagtaggaactgcaggggaaatggaaagtaagttttttctttaacttttattgagtagtttctgttaaatttaggtcgagtatcgattatctttccagcctgatcttgcacaatctttgatatttcgctccctctctctccctctccgcctctcttcctctctacccctacctcgctcgctcctgctcgctgtcgcacacatcccctcatcccgaccatctcttccgctctgccccccttttctatctctttccccttttttttggctcaaggttttgctccgctgagggagggagggggcactgagggacctgattttccactttctttaggggggctgcgtttttccggatttaacttttggattaagtggcggaggatcatctacgtttgcttgggcagttttctctccttttccctgtcttttcgggttttgccttccccgcgagccccgggcattctagt

SEQ ID NO: 130311 - DNA, 1028 bp, Homo sapiens
cgtctaccctctttccatgttaggcctctctttcctctttagatgcattcctagtggtagcttgtgaagttttcccttcataggctaaacttctttcatcttctaagaattggccaatataatctcaacagaaaagagcaactaggatggtaaggcaactagaaattaccaaaatgccagagcctgggaagtggccttacgatcattcagttcaattaactcattttaaaatatgggctattgaattaaagagagttatctttgattacccagcaaggcaggaaaatgttgagacaagaattcacatattctaactctaggaccagtggtcactcaactgtattggctatttgaaaaaggcttgttgaatgaatgaatatgaaggttgtggagatggtgaagagttggaaggaaaaatgtgcatgataacctgtcttctctgagagagtgagctctctgttatcgacaggagacaagtagaatctggatggcctcttgttattgtgactgttaaacatatttttgtgttaagtaggaggtagattaggtgctccaaatggacaagaagagcctatgattcataaaaatactgatgatttcagtgacttaaagtgtatttatcataatcataaacatggtgtgaacaagaacaacacttcaattccgtgtaaggaaaggatatgaagtcaaggctgtgatgttttggaggcagcataatgtacagaaagaataacacctagttaagaccagacattttttgattctgcgtactttggtttcttttttctttttaaatgatattatttaaacgacattatttaaacttacattttaggtattttaacacctactacatttgttggcaacccaatgcttaataggaatcttattcaacctataagatacctggattacatttctgttatgggtgcccttgtccaagttacttaatcttcctgagcctcagttttctcatctgtatatcagggttgctgcagagattacataagataaagtgttgtgaacat

SEQ ID NO: 130312 - DNA, 1046 bp, Homo sapiens
tctatgtagcgaggaatgttttacgtccattgtctcattcgatcctcacaacagcccactgaagtacatgcagttgtacagattaggaaatggagcatagcaaggtcaggtgtctttcccaggatcatacagatatttgaggagctgggatatgaaccctggcttctctcctggaggctgtgctctaataatcattctttactgataagcttctccaaaggctgacgctacccatctggggcccatacacatggaagacatccagaaaggtgtggaaggagactgtcctgagtatatacaaaaacacacatttttctctctgaagagtgtgtccatacctttcataagactctcagaccctgtatatgtaaaaccagctatctagacagtgctcacaaagagttacaaagtggtaagcccttttacaactaaaagagagtacagttagtagggcaaaacaggaagtgtttggctcgatactagcaggatttggataggtggatgtcaagtttggagatggggagaagggagagaagcccattgtctgagtcaagaaagaattggttgtttcctcttcaggttatagttgagagtcagtataattgaaggcatttatcttcttagcaatgggagactgtgatgcgatgcagctattagcagtacatggccagtgagtacatgggtttgagtgaataaaagagctgctccacttctttcctcctcagtctgtgaatattagcaaaaattttattacaaatataaataaaataatctcaaattttgaaattaaataagtccattgtttcacactttcagtattagtaaagtagaacaatattctatcaatatataacaaaattagtgtcaatatatattttggaatcaaaggaatgaatgctgaccacactggacttactaattttagctagcatctttataatgcgatatgataattaatttttactttatgtgacagttgttggtgccacacattattattattattattattattattattattatttttgagacagaagctcgct

SEQ ID NO: 130313 - DNA, 1088 bp, Homo sapiens
gggctctttgacttgcccatgggcatggaaggtttatgcccaggtctgttccattctactctcatggtctcccacaccccaaccgctctcccttggttgcaaatgaggaggaaagtgcagagagaaaagtgttttaagttcctgtaaataactgagaagagcttgagttagaacacagtcctcctgatttacaaaataggcaccatgcctatgtctcttgctcagaataggcagggtaggaggagcccaggagagaaggaagattaaagatgagcgtgggagtagaatgctgaagtgcacaatgaagggagtcttagtgcgtagcaagaggctcctccacatacggcagccctgagccagcaggtgatggtggaccagggatgtccctagtggtcctcagaggtcaggtccttttagattctgagcgcagataccttcattcatgaggtttattatcattgttaaggcacatagtttgtctatagaacactgttcgttcatttccagcaaatatattgagctcttaatatgtgccaggaactgtcttaagtcctgaggataccaaggaaggaacacagtctcttcattcatggggctctgatagaagaaatgggcatgaaaacaagtaaatgatggcacaatatggtaagtggagaaacaggtatgaaaaatgctttctgggagcatagaggacagagaatgttactgagcactggaagggactcaagtaagacaactttcaattgtagctctgaaaggtacatgaaaaattaccaaggaggatagggaagatacctcaaaataaagaaacatgcgtaaatgcataagtgatttataaacaataaaaaaagacaatgagatttttactgggtcttaatatcaagcataagaacaggtattttcctctcagccatgattgggtttttgggcaaatgttatcataaaagagtttttttgtttgtttgtttgtttgttttttttgagacaatgtcttactttgtcacccaggctggagtgcagtagcacgatctcagctcactgcagcctcgacctcccaggctttagcaatcctccagcctcagcctccc

SEQ ID NO: 130314 - DNA, 1097 bp, Homo sapiens
gtctctctctatctctctgtctctctctctctctctctctctcacacacacacacacacacaaacacaccacaccttattttcctttaataccagggttgtttttttctgttacatccagcctcttatctagtgcaccttaatctttcatttacatctccaaagatttgaatgaaaagaccatctggatatcatacccgtatcactcaaacatctctgtgattgcaatttgaaaaagaaagcagtgttatatacccctaaaaatctagacatttggaatatagtctttagtacttttatgtcataatatattggcaatactgcttgaataacgcttgtcttggtacttttatgtcctaatatattggcaatactgcttgaataaccattgtcttctaatgaaacagggcatttttgcaagtgtgaatgtggttatctagcacaaggctagcaaataattttgatctgtgtagcttcccttagatatcatctcttaagcataacagcacatagccatgttttctttttttccagtttgacaaagaaagcagcaaatttaaaagaatacaaattgtattacatgaaattcattgtgattaacctaataaagtaaacgaaggtacttgtagctttcctcatatcagcaaatatgaatattttattcttggcttcaaaatttccctgagaaatagtctaaaaactgtagaaccattatcagtacccctttccacagaagggttaattttgaatagtacttctaatgactgtctaatacttttatgaggccactaattgaaggtgctaggctttgttttcccttctgaaatttccatgtgtaaaaataccattaataaatgctcttttggattgggaaggtgaatcaaattagtaattaaaaaattaaaatgtataaataatagaatttgtgtgattagtgacatttgataatataaaataacccagagttaacttacggtcttacgttgattgatatttgaccaaaaagtaaaaaatacagcataattatatttttattccgaagacccagtcaaaaatgcaagtcctatcattaaacttctatcaataaatatgataaaa

SEQ ID NO: 130315 - DNA, 1060 bp, Homo sapiens
actattctttctgttagggtattggctttttaaaggcctagacatgataatcaagcccggtgtggtgatagcccattttaatttttttgtgtttttttcccctagctttattggagtataattggcaagtaaaaatggtatatattcaaagtgtgcaatgtaatgatttcatatatgtatccattgtgaaatgactgccacaatcaagttaattacatcaatcaccacccgtagttacttaccacctgtgtgtatgtgtgtgatgaggacacttcagatttgctcttggcaaatttcaaagaaacaatagagcatattaactatgctattctggacatgagttcctcagaacttactcatcttataactgaaaatttgcaccctttgactaatatctcccatttctctcaccctcccagcccctaccaaccaccattttactctctgtttcaataagtttgacttttttagaatccacatataaatgagatcatactgaggtccattttagcaactaaatttaagcctcattttttttttttttttgtcatgggtggatttgccagttaataatatttaaaatatctgaactggtctatatactggattatggcagtgacttggtgttttaattatatcagcttgcacataatacatatttataataatatatgtgtattgaatcagtaagctgtacctagctaaccattcagcttcttatatttcatttaaatttttttccctttagcaccaatttgtttccttagtctatttatggcattattgtggtatatatttttatatcatagttttcttagagtactgtgtgatatatacatttttagtaccttaataatgatatttctgcattcttgttccttcatactaagatttagtactatttattttcggcaatagcgtgatagaatagtaaccatgtattgttcatttagttttctttttaacttcctttacacatataaaatgtatttgagaaagattaaatgacttgctgaaaaaataacacctttggagtcagtagtagtgctggaaaataaac

SEQ ID NO: 130316 - DNA, 1030 bp, Homo sapiens
acttttccacttagatgtctcataggatcctcagatgtttaaaattgcatgtatatattttctttctgttcaaacctgtattgcctcgtgtatttcttgtttcagggacttggatcactatcactcaattacttaagtcagtttttcttggcttatttctctccagatagtgtcacttctaccacctcaccgctgtcaaagataacccttttctctctgtccccattgatacttttctaatttaggccatcattagtttctcactagatcattttaacaacctgttaactcgtctctatgcttccagtctttctctcagcctctattccattcttgctcagggtggccagaacaagtagtctaaaatgtaaatcttactagttatttgcgtaccactattgggggcttcccgttaccttcctcataaaatacagcctcctcagcttggcttctagggcctttaggacctgtctcctgcttctttccagccttatctcatctgtgcacctctagtccttagtacctactcttctcaccattggcaatagtattcttaccctcctttaccaggctgacatgctaatatcaggtggctgcttaggtattgcctctcccaggaagccttctctgaccttctgaagtatagttgtaaccatagtgccctgaattttcccttgcatatcactgatcgcaccttattgtaatcacctgtttattttatatagcacacctttacttttctctctcgttccacaaccctccacaagggttgaaaacagtgtctgttgtaccattatatcactagctctcatattaacaggtaaataacagatgcacaataaacatggtgaaattagtaataatcatctttctggatatggtaatttgaaatagttttaaagggtaatggatgggaattgatattttctatccttcacacatcccagactttcatcctattcatttattcatttatctagtgtttgtagagtgccttctgtgtaccaggaactgagatagttgttctgat

SEQ ID NO: 130317 - DNA, 1465 bp, Homo sapiens
aatctgttagtgaacctgggctagaatacagagctaatcagaggcagtttaactctgctttccccaatactcgctccaacatctgttctttattttcacaataagcattctcagactcagaagtatcaggtttctgaaagaaaaaaatatgagtgccatgctgttatcttaaaaatatacttataaagctaggcccaagtattggaaattcttttctaaggtttaaaaaaagtattttgtgctagttttagatacttgaataactatattgtgtatgagataagtaaggcactcagttgattgtgtaagactcaatataatcttgagttgtgttgagtttcctcttctccctaaatgcaaaaaaaaaaagatattttcccctcttctagggcaggttacttaccattgtccatatttttgagaaatatgtgcaactttgaagtttatctttcagatacattttagaaatgttttgtcatgtatccactaccacttcaaaaagaaaaatcctatttggattttgatgaggcaatgttcattgaagttaaaagtaatttagaggtctgttggacataacacagttttaaaatttcacatatcttggctatacccaaatgagcacaactgggatttacaacatcaggtgtctataaactattaaaacttagtttatgtatggtgaaagagaggaacgagaaagtagtgacaaggcacttagcaagtctgtgacagaagcgggatttgaacttaagagttgttaggcctgttcacagtgccagaggtcacagtgttctaatgggcttcagccatagccttttttcttttgcccatatttgaaacgtgttctgggaatcagtgtccagttaaatccctctttgatgcacgtcccatttattagtattgatttcaatacattggacagtaaatctatctgactacacaaaggaaataaaatagtaggttataggttcaaaacttaagatgtctagtcatagaattttattcatataacctcataatatgaaatgctagtttaacattttcagaaagagaaaacaatgaacgtggtctcatccactttgattgccagaacatttaagatggtgtggcagtgacattttcattctaaaacttagtttattattgtggagatggaaaagaatagcctggcagggggtgcatgagtgggtatgacacagtagagattacttgagaatcacgtttctgctgacaaagtttacaggactgtaaatttaaatgcagaattttgtagacagtatgcattgacaaatatgcctaatggtaatacctctaatactgagagtcttggaacaggtcaataataatgtgtatattgatagcagcgatgtaggagatgttacatggtattatagctaaaatccatgttatccccttaatcataattacgttaatattgacaggcccttgacaatacccacattat

SEQ ID NO: 130318 - DNA, 1088 bp, Homo sapiens
tgagttgaaatatgtgaagttgccctaaattatgtagggcaaaacagttgaattctggtaatttcaagcagttcaatctaataaaagctcttgagaattttctgttgaagttaggatggtgcctttctctccttcctccttctcccctctccctcccctaagagatcacaccttgcaaatatcaaactctgagtcttaaggttaccgttcattaattcatccattctttcattctagaaacattgatacagtgatagattaggtagtttcttacctctattggaagttaaagtctagtactttgaaggtgtttaataaatattatattgcagtatccagtaagaaatattcaaaagtttgcttaatgtgtcagagtaattgcgtaaatattgtactctggcattagacatatgtttctagttgaaaccagttaccagacattaatcttggctataaaacaagaaaatatatggactcttgaaaatttctattaaagataatcttactctttcttataacttacgttatttgcatgtaatcatataccatttgttttacttttggtcttcagggtctttatgcttcttgaatagtcaatagatgaggtattaggctcaaacactatactttgaaatgaaatataagttatctgtttttgtagaatcaatatctgagcacttctacattctgtagatagttatagcaaaaccttttaattccttttcatctaataaaatttgtgccccacaaaatctatctaaggataatagaagtagttctagacttgagagagttccaatctcttataagctttttttatttgtaaaatggagagatggtaaaatctaagcagattttatccttatatacagtattgtcattcccttcatatccctgataaatggttataaaaattgtggcagagatcagactgtccgttcctcttgtggattgttgaaattattagatcttagtactgccctctaaaacttgattagaagactgattgctcttcagtgtagcccttggtttaaagatagtcgtgtctcatcaaaatttctgttttgttttattttttcgtagtataa

SEQ ID NO: 130319 - DNA, 1367 bp, Homo sapiens
gtagctgggattacaggcatgtgccaccaagcctagttaattttgtatttttagtagagatggggtttctgcatgttggtcaggctgatctcgaactcctgacctcaggtggtctgcctgcctcgacgtcccaaagtgctgggattacaggtgtgagccaacgcactcggcggaatggatgtatttcaatatagtgcttggcctgataatgtctccctgcagttcagacagtgagtgaatgagaggcagagaaggactaagcagaaaatgtaagttagtgtttcaaaaaatgtgctcatcaggacattggtggagaacattggttttgggagtacaaaggatttctgataaaataaatttgggcaaataacaacatactaagcttctttttttaagactaagggagttctgctctaagagaacccatttaacttaggttaatgtaccattttccaaacatttggccatgtagcaagggattcgtggataattcctagtataaatgatgggtcatgttcagactgggtaggaaaggacatgcagccaggaatgaacttattaagaaaagcaagtcactctgagatcaagatagtaacttagagaaaggtaggaggtagaattctatggttaaagaggaaacttgagtgttttaaagtccagagttggttgttttggcagtagttttgctgaactagagtgtaggtgactaaaatgctgtgaaggatgaaggttgtgtgttgagtcgggtaggcattgactaggttaagacaaaaactcttctaggatgagctgaaaagggtaaatcttctgagacactggataatattgatctgaaagtaattcgattttggaaaggatattgggaagaaagtgatataacatatttagtgcttcagaagaaagatttgttgagtgttaaaggagtcaaatgaacggtgatagaatataagacttaccagcagtgaggagatggacatgccacaagggaggccagaactgttcttaatttccaagatttctttgaaaatgttctctcatagttcttaaatgtatgcattttaaaatgtcacaactatttgaaataaaatctttatttctcatcacttatagtgttagataaagataccatttcaagtcttaccatcatgcaggttttgaagttgcaaaacataagcaactcataacagaatcaacagtgtgtgccagatagattttgtaaggagagattggcttcttaaaagttctagaatattaaagtactttattgacttggttgtatccatcaccttgagtgcttatttcaacagtatttgctctctgatataatattcaccaataatcacccctctgaatatcatctttctctt

SEQ ID NO: 130320 - DNA, 1152 bp, Homo sapiens
atagtcatctgctatcctcattttttaaaaatacttaagagctgtaattacagtgcttggttgttgaaatgaaaactgaaaataagtatgtaaaacacttgattgctaattgtgtactgaaagcctaagaggctgcaagacacgaaataatccagttttgaggttttattttttcccaaagtttgacagttctaccttctttagtgtttgtcaaaatacaaaagaaaaaagagtatttagtttaccgatgtcatcaatcatcatgcttaatatagtggagggagaatgtttatccagttggcttattggaggtcatttaagacagcttccattctaatgtccctaaactgaataactgaataaatgaatgaatggacaactctttaaaaaaaaaaatctgaatagtagtagaacactagataagctcaagaaaaatcttaggcgaagaaaactgcaaagtttgagttccagaagggaggaaaagaattagtatgggagaaggacacaaatcagaccacctgtcctattattttgtgttaactttatattagcatattactattatgttaactttagtaatccaaactactactcttacattaacttttgtaatcctaaaactaatgtattctttgtattttctttttctagtatctatgttcaggcatttagtggagacttttttttttgcagtgtagtaactttgactttgttactttttcttattcttagtgttacagggcagataaatattttacagaaaaagggtcccaatccagacactaagagagagtttttggattttgcacaggaaacaatttagggcgagttcgcagtgcaaagtaaaagcaagttgattaagaaagtaaaggaatgaaagaacgggtactccatagacagagcagccctgaaggctgctggttgcccacttttatggttatttcttgatgatatgctaaacaaggggtggattattcatgcttcctctttttaaaccatatagggtaacttcctgatgttgccatggcatttgcaaactgtcatggcgctggtgggagtgtagcagtgagaatgaccagaggtcactctcgtcaccatttttgttttggtgggttttgcctggcttctctagtgcaacctgtttttattaga

SEQ ID NO: 130321 - DNA, 1034 bp, Homo sapiens
taaactatttcttgacagttttccatttgatgaaataaaaaattttaatagatgagcctgtattttaaaatgtattttaacgtcatgtattattacttcctaactagtctgctatataaagtatgtatccattataaatgaaaacataaaggcaaaaaagaaataacgtttttcctctgcttactcttttgtactaaggatttatcttttgttttttttccttcacacatttgattcaaagctagaagaaaattggaagtcatgtaccagcagactttttttttttttaactctttactaagtttagacaagtaaaactgggtagttataaggatatgggaatttttgcttatcagatgttattacttatattttttgaatgactgcatagaaacttaagattttttaatgtccgtttcaagtactatgctattaatctgtttccgtttttatctgttatagattatattcaatgtccatattgtcagaggagattcaatgaaaatgcagctgatagacatataaatttctgtaaagaacaggcagcacgtattagtaataaagggaaattttctacagataccaaaggaaaaccaacttctcggacacaggtggtaagttcagttttaataattgctataaacgagaaaatggctcatggacattcatagattattgtttatgcttttcatgacattagactatatttttctcacctgcttttatagatatatagttttatatatctataaaagttgtatgcttttagctcttatatctgtaaatcatttcaagctaattgtgtatagtgtgaaggggcaattgttccctttttctatgtggatattctattgtcttagcacgttttgtatatataaaatatataaaaacattatatatatgtatacatgtttttagattatcgagtgaaagaccttgttacatattcttggtcttttctcagatgtatattaagaatattttctcccatcctgtgacttggctttccattttcttaaggatgtcttttgagg

SEQ ID NO: 130322 - DNA, 1088 bp, Homo sapiens
gtttttatgtgggaaatatatacaaagatatctgtcaaatgatagtaactacattttgcttctcaattcagactacatagaaaatggaagacctaaaggaatataatgtaattatcattatagaaaaggaaaaaaaaatcaaccaacaatatcttttgagttaagtgatttttcttattgttgtgcttccaaaaacaagagacaggctatccataagaaagagacagtttatcagtagatcaggtagttgaaaagtaaaaaaattttatcttttagtggtaagaaactgatctgatttattttcttctccaatgagttgactcattggatgattaagtgaagtatagacatagcaatatgtgctttaattttacaaagtcattttaccatatcacagagaattggcctccatgttaggtaacaatatttgttcatagtgttgtttatagtttcacttacagttgatcatagattaaaagctgatatttttcagtatttctatagtactggcaattttatcagttggcaatattaaattgtactgacacagtattcctagataggacgtgtaaagctggctggtgtaatgaagagaggcgctgaccttggagttagaagactaggtttctgcatcataatctgccactaaatagctttgggcatgtatctctttgtcatgctgtgacatattgtctgactgtgacaacatctgtgactctggttagaccttgacaactgatccaagaaaatctgaccaacatacctggttactaatggaaaatatgcttttgctaacaagcagagattttgagtacaataattttgtcagttgtgcattgcttatgatgaatgccatgaagaatacatattttttggctatcccacatcatatataactgtcaatcatacctgttcaaattctgattgtccattctgtataagatccttgcagattaaaggaagctttccaactactggaaagagagctgtggagctcatttctaccaatatattactatattaactggaacattgtgttactgtattaaattagaaccattcatagctgtctatttagtgacagagtt

SEQ ID NO: 130323 - DNA, 1071 bp, Homo sapiens
aatcattactggaacctgtccttcaattaggttttcaaaatctgaaaatattggcaatctttttatatatgtaatgtttccattggataattacctttaggtttttattatattttacacatctttcttgaactgaactttgttgtatcacatgtaggatttgaccatttcttatcatataagaggaatatgtttttaaaatatagtcaaaaattttctaaattttaatttcaggaagttttttctgagaaagaaaaattttaatccttatttccagaatcatgtaagataaccactgtttggaagaaaaatgttttgataattaaggattagaataaaatctgaatgtttaaaattccaatagatgggtttctttgtactttaacaaattaaaaacaaattttaatttaaaatattttagaaattttacttaatacatttatttaatgaaggctgcttttaagaactttaaatcctcacgtaaacaccaccacctgcaaagtattaatatcaactttttcaacaaaatgcctgctatgtataagctactgaaagaagacaaaaattaataaaatgtgtccctcctcttagatatctataatctaggaaaatgaacacattcttttcagacactaaactccataagaacaggtatcagatctatcttatttaccaccacatcctgagaatggagcacagtgcctgacacataatagatgctcataatagatgctcagggtttatagtcagtgaataagtaaagaaatgagtgagcaaatatctcttaaaaagaacagacttttaaagttaacaagcagtgatgtgttattcagtagcaaataagattgtttcctaatgtcataattcaattttccctgcttcctactatgactagatgttggttggtgatagtttatatgattcagttatttggttggttgatttaaaacagtgaaatatcctacaaacctgcagtttgtcctgctatcctctagatggagagcctttataattttggtcaaaatgtgtgtgtgtatatataggccccttaccattattatatgtgatttt

SEQ ID NO: 130324 - DNA, 1093 bp, Homo sapiens
ttttggacattagttcttaccttgacagtcagataaaattaaggacttggggagtagatatctgatgaaccagaataatgtcttttaaaaaaactttatataaagaagcagtagcaatctccttatgggtacacctttatatattttaatagtaatatggacaagttaggccctccacttcgaacgggaagacttgtgcaaaggttgtatgacagtgatacaaaatcagacagtgccatcaaaagacatgagttattacctatttacaagtaagtatttgtaactcagtttggttaatatttttcagatatttccttaaaagctttatataatggaataacataacttttactgtcctatacttaaaaaaatctgttgaataatttctaagccaaaatgtgtcaaataatctaggatttaaaacattttgatttttagtaagcatttctgttgtactaaataaaactttttaggttatacattttattccattaaatattaattttttgaggtttcaaattgcagtcacatttaataattatttttatgaagttttttttagtagtaattagggttttttgtaatagtagttttaaaaagcagagtttgagaaaaataatgtcttgtacagtatataatattgttagattatctcttagataagccgatggtgaactattataaaaagcccagaaaaagaaaagattttaggaaactttcaatccaagggtccttagtctttttgttagatggttgtaaattctgcctacaaccgggaaaaagtatgacactgccaaagagtcaagctcgaggaagagtatgacacagccagttctgacctggctggctgaaaagagtgtgtggcaatggcagttactttgaaactctacagcatgagtcttcaaggtttactaatttgggtctcaattctagcccacattttaaatatgaaattagggcctaaaaattaatatacctattaatggtggaaaatattaagcagagtaacttagttaacttttaaaccaacacctactacaacagtctgctcagtatgtatgtatgaaaagtaataataaatttaactagataa

SEQ ID NO: 130325 - DNA, 1089 bp, Homo sapiens
agtgatcaaggccattctagatgttactaaaaataaatgacaggtatttaatattggtagctattaatgatgataatctcttatattttcctctaaatataaacattttgaacaacctcaagttaccgatatggtgacattatgtgtatatattcatgggtgtgtttgtattgtttgtatatctcatgcacttaagacgattctatagccaaaaaaaaaaaaagtgttcttcctatttaaagtccattctttgacaatgatttcctaaagattgaatttctagaaaaagactctagtagttctacaacatccccaaagaggctatacacaagagtagagtaaacctcatgaatggacttggagtgagcatttgaagaggtgcagggcattccattcatgcaccaaagtgattctttgcttgttgaagtttagaagtaatttaaagaagtaactatgcaaagcaaccactttgaatgacagcattgtgtattgaatatgagttctgtaatacagcccacttaagttcaagtactactctggccacgtagtagcctcacaatttatataatctctttgaacatgcttccactttaaaatgggaataatatcttctgagatttgggggacattaaataaggcatgtgtagtatctggcttcataattgtcatgtagtggctgtttgaaaaatagtggatgttgttattacctgcatgtactttggaagcagctatttacaattttagggtactctctcctactttgccatataagtagagtaagaaaaatttcaactaaagtttaagaacctctaatctggaggtattttttaaagtattctgctgttcatataacactgttcacctgtgaaatttaaagatttgattaaagctctatagagagggagggaactatgcttcaatgaacatctaaatcctagctttggaacacactagcagggtcaccttgggtaagttacttaggggctctttacctcatttgtcttatctgtaaatggagttatgaacgctacctatttcataggattattaggataaataaatttctatgggcaaaataattagaattgt

SEQ ID NO: 130326 - DNA, 1049 bp, Homo sapiens
attatataaatgttaacttatagtggcaacaacagtagtaatagtattagcatcagctatctaaatgtttatatgaattgtactttttttctcataacctttctataagtgatcattttataaatgatgagactcagacttgctgtcacaaagctgtcagtagcattagcatttgaatctaaattcatttgaattcccaagcctctgcttttagtgttatatcatcatcatttagttttctaacccttctttgattcttaaagtttcaaaatggagactcatggatgatccaaccagaagtccctctgatttcggatagcccaggctgtgcagttggtaaaattaaatctttaaagggaatattatattaactcatttattttagttgctgctttttagaactttcataagttgaatattattctttaatgtgactagcaaaaaaattctttttttaactacatcgtatatgcctagaataatgaaacttgtttgtttatttaaccattatccgtaagcatttatcagaatatatgttttgagggaaatataaatttaaactgtttttaaaaatgtatctttcagaatgattaccttataaatttcatgtaaagcatatatacatattttagttgattttatttactatcagaatagtattagtaaatgcaaaattatttggtttatctttaatattaactactatttgctttcagatttaaaataattattgggactttaatcttttgaacttctctgaagcttctaagtattctttctagtcatgtgaataggtaatttgagaaatacatgctcactgttcaatacttttccattatttttcctcttttttatagagctaatgtcaaaccccgaaattccacaccacctagtttggcaagaaatcctgccccaggtgtgcttacaaacaaaagaaaaacatatactgagagctacatagccaggtatgtttagctctgctctcccaataactaaaataaaattgagtatatgatagttttccaaggaccatacacaaaagtaagtaa

SEQ ID NO: 130327 - DNA, 1053 bp, Homo sapiens
atatcatgtactataaaaattgattcaacatgattgttactaagttatatcttggaaaagtgactgaatttcaagagcaaggaagaataattctaaaggtggaaatggcaagtcagttggaggagaatcagagtggcttcagatttttcacatctaaatgcaaaagataatggaataatgtctacaaaattctgagagataaaaatgtggctcagaatttgatacctagacaagatgttgttcaaatataaagtgcacaggcagaaatttatgtatgtcagaatttaggcaatagaacactcatgagccttttcaaggagaagatggagggggaggggagctactggatataaaatccaaccaaccaagagaaaagtgaagacactgtagtaaaaggtcaattgatagcacaaaattcacttccttgtagaattagagtagcctcttcaaaatatattatattcttttattttcctcatggttcttgctactgtctcaaattatcatatttttaggacagagactctctgtcttgataatccttgtatccccaccatctagaatgttacctggtacagacaagacccttcataaatatttattgactgactgagtgaatgaacatagtttacattaaaaaaaacttaaatgttattttaaagttataaaattacagtgtagcataaaattatatgttatatcgtgtatatagtataattcaaaattatgttgtaaagatgttgatatacataagtgactgtgttagacacttctggctgccatatcaaagaaccatggactttggtactttggtggcttataaacaagagaaatttattcctcacagttctggaggctggaagtccaggattggggtggcatatggttgggttctggtgaaggacctcttccaggttgtggactaccagcttctcatatcttcacgtggcagaatgtgaaattttcagatggctagagagctctctggtgtttctttataaggcactaccaccattcattagaggttcaccttcatgacttaattacctcccg

SEQ ID NO: 130328 - DNA, 1079 bp, Homo sapiens
catatgttctttggaaatttgttatgaattaaatatcaggtactttttgatatcaatatgaactagttttggatgttatacaatattttttatccataaaaaattattttacctaaatataactcacatggttgaactacataactcttagtcaccacagcaaaggctgtttcaaaatataaaggctgctagaaatggccaaacgctttctaggaataactcagtctaattgtaggcaaatacagggctatccctttattttaagttgtaaacttataaatctaatgactaatcggttataatatactttcacaacttccaatatctttaactgtgactctattccagaggctttcacagattcaacttctgtctttgcactgacagctctcatatagcctgaggtctacatttctcccattaactctaggaccatttaattcaaatatctagtagatatctctacccagatgtactatggcacctcatgcataatagtcaactaattgccatcacatttagcctgttcctgcttctgtattctctatcttaggtaattttagcattttcctagtctttcaattctgaaagcctagaatcatctttgatggccttcatctcatccatcaccaaattctatagtttaatatatcatcttaacacctgtattatccatctattctatagacttctactactagtcttagttcaagtagttgtcagatctcaccgggaccacttctgcagctgtcagtgggccctgactaaccttcctgcctcccctgtgcatctggcctttttaatgatgcttgagttatctgtcccgattcaaatctgttaccatttttcttctttttaaaaactctttaatgaagtatctctcccccagcacctatcaggatttggtcttgcatttgattggtttgctaacagaagtagccaaagaaggatcaaattctagccaaatattgcttcaaaaatatgtgtaaataaatggacaatgtttaaataattgtagttaacaaataaggaaaatgtaaattgattacaataaaaattagttttttaatatcaattta

SEQ ID NO: 130329 - DNA, 1150 bp, Homo sapiens
tacggccatggctcacggtaagatcatggctcatggcagccttgacttccaggctcaaacaatcctcctgcctcagcctcccaagtagagtctgtttttattgctattcaactttttggtcctcaaatatgatgaaattacccaaaccagataagacagttggagaccacatagtagatcctcaactacttcaactctcaaaagaaatggcatagacaaagggtaaagagtaacattatgtgcactcttaatggaacaagcttctagtgaaatctcttgaaacaaactgcaggaagccatgcattataattattattatgagaattttaattccaaaacctctgtgctttatattgccatagtctgtctggggctaattattcaatgacaacaatggcaacagaaaacactcttaacaggcaaggcaaattatgttttaaaattgagaaagtacgtgtaatatacaaaaagactgaattttccagcaaccctcattggaaagaatgcacaaaatgccatccggtgaataaataggttgatttaaatttgaggagcacttaactactgaaaattgaggtgaagaagacagctaatgctcatagcaagtaaaacaacctcatgtattaaaacaaaaggtggacctttggaatatttatgataatggtaaaagtatccctttcactctagcatttaattattttattatattctcctttaagctcatttcaagttatatgttatataatttttcctctatcatctactcctcccgaagtataccttttggacccctgtaagatgacagagaaaataaaaagtatgatttcatacaatctatacaaatctgattacaaggtcagaatctggtgaataattagcaattgatcatccaaatgtccatcagcagaggtttggataaagaaaatgtggtatggccgggcttgtaattacagcttgtaattctgacacttaaggaggctgaggcaggaagattgcttgagcccaggagttcaagaccagtctgtacaaaagagtaagagccgtctgctaaaaacaaattttaaaaaattagctgggcatggtggggcaccctgtagtcctagctactcagaacgctgaggtaggaggatcgcttgaacctaggaatttg

SEQ ID NO: 130330 - DNA, 1003 bp, Homo sapiens
aaagtgaaaacacagtatttaaacagaattttccaacagcctgcatatagtgaggacttctcaagcttctgaatccttttccattgaattgtgcaatggcacatgtatgagcaaagtcaagcctcctggctcccaggtaggcacagcccagttcttagctcctaggaagcttcagggcttaaagctccactctacttggactgtactatcaggcccccaaaatggggggagccgacagggaaggactgatttccatttcaaactgcattctggtactttgtactccagcaccattggccgatcaatatttaatgcttggagattctgactctgcgggagtcatgtcaggggaccttgggagccaatctgcttgagcttctgagtgataattattcatgggctcctgcctcttgctctttctctagcacggtcccactctgcagactcagtgccttattcagtcttctctctcgctctctccgctgctgtagccggaccctttgccttcgccactgctcagcgtctgcacatccctacaatggctaaaacagcaatgggtaaggcactgcgcctcgttctccgtcggctctacctggagcccacctctcacctcctctcttgagctctagaagcattcagagatattttataaagaaaaagatgttaatggtaacacaggaccaggaaggacagggcagttctgggggaggtgggagggcagagaagaggtctatggaaatctaaagcgaagaatttcttttaaaaggtagaagcgggtaagttgccctcctatgggtagagaatttattctgtttccatatttaaaattaggactcaatcgtgaggggaggaagctaccttaactgtttgccttaaatgggcttaagggacattttggaaagtgctttataacgaccttttttttttttatttcttctctagtttaagaagaaaataggaaaggggtaaagggaaggtgggagaaaggaaaaagaaaattgca

SEQ ID NO: 130331 - DNA, 1506 bp, Homo sapiens
tttgaaagatgggtggagacggggggaggggatggagagaactgggcacattttacggtattgtctcgtcgaagaaaccgctagtcctggggtgcggtgcagggaggtaagacggcgggggacagggtgggggtaggacctccgctcctttgttttagggcaagggaggggaaggagagaggaagtcgcggagggcgtggagggcgcgggtgggcagctgcaggggcggggaagcgcgcggcagggaggggtggagggacagcggcttcgaaggcgctggggtggggtttctttgtgtgcggaccagcggtcccggggggaggcacctgcagcgctgggcgcacaatgcggacagccccacccagtgcggaaccgcgcagccccgcccccccgcccggtgctgcatcttcattcgaaagggggtcgggtggggagcgcagcgtgacacccaggagcccaaccctgcggggacagcggcgccacgccccgcgctccccgctcccgactccccgccgcggcttccaagagagacctgaccactgaccccgccctccccacgctggcctcattgttctgcttttaagagagatgggaaaagtgggttaacatttttcttttcggaagcaaattacatagagtgtttagacatagacacagataaagggttctttgaagacctttgatcgtttgcgggaaaagcttctagaacctagacatgtgtatgtataataatagagatgacatgaaatcgtatataaagcaaaagaggtcaaagtcttaagttaagccacgcgaaatttccgttttgtgggtcagacagtgccaaatatcggcaatttcataagctcagagagacaagacagtggagacacaggatgaccggaaaagattctggattcagggccttcatccgcaattggtcttgtgccttgagtgcccacggttctggcgctcagtggccccggggtgaaaaggcagggtggggcctggggtcctgtggcagctggaagcacgtgtcccccgggacttggttgcaggatgcggagacagggaaagctgccgaaaggactccatctgcgcggctccgccctgccctaccctccccgcggagccggggagacctcaggctccgagactggcggggaagaggaatatgggaggggcagttgagctgtatgcagtcctggaacctcttttttcagccccgcagtccacaacggcccgagcaccccttgatgtgcgcagacccccggcgtggctctcagccccagcaccgagcccctcccagccaagcgggtggctctgcagaaaagctggctcgagccccgcccggccacacaaaggcgcggccccacccagcccgggcgcgagaccgcagaggtgacccccttcccagggattcagggagggctgtctcttctcgcccacccacggtccgcggagctcggggctttttttcccccagcccaagccccccgcccaccctctgttctctatgattttcca

SEQ ID NO: 130332 - DNA, 1141 bp, Homo sapiens
aagttatttagcagccgaatattttaatgcttaaaaataaaggaataaattaaagaaaatcattgtttacttcttcatcgattgaaatgtgccccctgttcagagcacatctgaatatcagagtctccacctgcagagaacatgcagcttagcgagtaaaacaggcaggtatgtgatactgaggaggtgtaccaaaaactgactgctgttatttttcccatcttctaagtctgtctttcttttccatttaaagatacctttttaaatctaatccaatgtgatttcaatctagttttatcagatttcaacaattattgagcatctccttgtagtggttttctgtttattagaaaatcgatgttaattttaacgaagtaagaagaaatatataagtataaactaattttgggtatcatcaaaagtggattttttaaatatgcattgatagaattattttttgattacattttatgtaattctaatccagctataaaatatttaatagtgtcatattactgtgttcctcaaactttgatgtgcatatgaattacctttgattttcattaaaatgcaaattctgattcaatacatctggcttgaggcagacattctgtcttccgaacaagctcccagatgatgctgattctgaccactaaacacatcagttttagggatattaacttgtaatatacaggtatccctcctggtaagctctggtattatgtcttaacatttttaaatctatggtaatctttacaaaatattttacttccgaactcatatacctggggattttattactctgggaattatgtgttctgccccatcactctctcttaattggatttttaaaattatattcatattgcaggactcggcagaagaccttcgagagaaaggtagaaaataagaatttggctctctgtgtgagcatgtgtgcgtgtgtgcgagagagagagacagacagcctgcctaagaagaaatgaatgtgaatgcggcttgtggcacagttgacaaggatgataaatcaataatgcaagcttactatcatttatgaatagcaatactgaagaaattaaaacaaaagattgctgtctcaatatatcttatatttattatttaccaaattattctaagagta

SEQ ID NO: 130333 - DNA, 1024 bp, Homo sapiens
gagttacgtcctctgtggagctctgcaacaaggcgtcaagaggtcagagtctaagtccccatcagctctgcccttctccaccagtgctgctggtgctgcatggaaggaagagcccagaagggattctgagtttcagtctttactcttgctgacgcaccttggtcaggtcaattttcctgtttgttcctctaattcagcatctgtaaaatagccatgtgaactgccttgtccatatcagagggtctttttcagactcaaggaaaaaaacgtgaaagtgattagtgtctgtcaagtagtatataaatgcaagaagttgagtttttaaattgtcattagatataaatacccatgtgcatgcatttagaatgagtaaagagggaacaaggagcgcaatcaaaaactgcgtcatttgctttttgaaaaatactttctatgtaatgaaaagtgaaataaaatgttaattgagtccctctgacaacagcatcagacgttttgcagttcttgtgattagaacccacctggccagcccttcttcctcctaaagaagagccttcttcttcttaaatgaaggttggctcagaagaagcaattaactcattcaacgttttgttacagtcaatccacatccaacttttccccaactcaatctgctttaagggaaggatggtaagtggtggcccaagatggcaaccatcaagcttagagaatctctagaagcaggggtgtccccagcaagtagacactgaaaatatgagagggctgataagccagagataaaactcagtacttactttgcttctagtccatgtctacccctttcttggcaccaccttgacactaccctctgagtccaccttcctgagatggtacaaactctgcttagacaaagcagcccatgtccaaaggtgttagggctcagtttaaagctgccttcaaaagttaaaacagaagtgtaaagttctgtgcaattaaaaataatcagcttgtcttggaactcaaacgaatgtaaaatcctatgaaaatt

SEQ ID NO: 130334 - DNA, 1021 bp, Homo sapiens
gaactccgttatgtttctcgtctaaccaaaaagggcctacagctacgataatttccaaacaaataaatctgtgctacttgattttcatgcaaagctcatatttgttcaaaaggaaaataaagcttaatttaaaatcaatttaggctatttttatctaagtatgcttaccgttattcaactccctgcagatattgtcaaatttctcaatatggtaaatatttattctgttaaaatatatccatagttacactaaagacagagaggtcttatatgttctaaacaacatagagcaaatgctcataaacagcattttattcctatctcccggaataacaacgctacttccaattgctggaatctaaattattaaaataaacccatgctgcaagctttgtatgcttaacattctcaaatgttcacttttcagatatggaagtgaagcaaatcaacaaacgtgcctctggccaggcttttgagctgatcttgaagccaccatctcctatctcagaagccccacgaactttagcttctccaaagaagaaagacctgtccctggaggagatccagaagaaactggaggctgcagaggaaagaagaaaggtaactttttccataggttttccttctctctctccctcccctgctcctccctctcacacactcgggcacacatgcacgcacacacacacacacacacacacacacacacacacacacacacatacagagagcaatgacagctgaacctgtgccatgccaacatgtataggttttcagtagacacagagccaggctagttggggtaaaaactgtaagatagatgctaattttaggctagccaaaccagagctctcagaaatccaaagagcttcagtgctctagtgccccttcccgtatattgaatccccttattataaaagcctcccttccctagaccatcaggcagaagcactgtagagaaaacacagccctggcgaactccagtggtggggaggggaagaagtgctgcttcctccctctc

SEQ ID NO: 130335 - DNA, 1090 bp, Homo sapiens
aagttacaggtttgtgaagattctacctagcaaacatattacttttaaataactattaataaattatcttaccatgattataatcaaaggaatctgtaattgctaattatttctgattattaaaagataagcagtattgcactaaattgacataattctaactcaaagtaaatatacagatagacatggctatagatgtgaaatatgatttctgttagggctttttaaatttaaaaaaacttacgagttctcctccctccccctacccttaataccttgaaggcctctttgtgggacttcagggaccccttcagggaactatgacctaggctgtatttggggggctttctgggtttatagctggaaggctgccacagaggcatcgccacttgggctcagattcactttgtgttcaatgttttggcaatgtccccacctccccattccatctgttgacactattgcagcactgaccatctggttactaggttggaggatactccctcgggctcctttgaaccagaattagtgctccagtgattagataatagaagaagcttgtcataaaaagaataagccctttccctgctttttctccattctttgattatcgctggtagtcagtgatgatcatctctatgagtctatatcaatctcatcaggtcagtttgaacctcatctcttgaaatcaaagtttccataatgcaactgacccacaagggtgaaatgacatgaatgctttaaccatccatttatcatttattcattcattcaaccaacatgtatttagcaagaggcagcagagttagcataactatacatcccagttggcccaggacaactccagctaactctcgttgttttgataccattattaattatttctctttactctcataagtgttccactttggacaatcaattacatgagcatccttagcagggcacagtgtttaagggcatctttaaaatattgtctttaagaacatgtggttaagagaatgtctgtgttcaaatcctggttccaccacttaaaagctgtgtgacctcaagcaagtgacttaatctccgtatgtcctcctttgtcaat

SEQ ID NO: 130336 - DNA, 1025 bp, Homo sapiens
tttctcacgtatttccaaaggtttctctccaccctcacaattttccattaatgtagtacttaattaaattagatagttaaattttcaaatgtgaattgctaaacaggtgtggaaataccattggctataatcaagcatataacacaaccatttgagaaggaaagtatgtggcaatattagggaagagccctttcctctcaagcaattcagcatttaggaaccatcagacagcaggacgatggagggaacagagagggttaacatggcaagttactgaagaggacttctactgaatcttgttgaattccccacttaatccagattgtatcatatcttctttcttttgtaattctaccatatcatcttagtcaatgccaagacttctgagctcataacatggtaacaaataccaaaggagctttcagtatcgtttagaaaggagagaagcaagtaacccagacaaacttgacaactgctttcccctatccaaccatgaagtacagtacttaggaaataaaagaaattgcttcactataattcatcatttcacttctaatatctagaaaatgtcaaatgaaaatattatagccatattttagtggcaatagtagcacataatatgatgcaacttaaaatgataaaaatattttcagggaataagattctgtgattctttccctaagaggtaattttgataatatgtacctgttttgtaaatgtcaatagtcttggggatacaggtggtgtttggttacatggaaaagttccttagtggtgatttctgagattttagtgcacccaatacccaagcagtgtacactgtacccaatatgtagtctttcatccctcgcccccactcccaaccttcccccacaagtctctaaagtccattatatcactcttatatctttgcatactcatagcttagctcccacttatgagaacatatgatagttagtgctcaattcctgagttacttcacttagaataatggcctccagctccacccaagttgctgcaaaaga

SEQ ID NO: 130337 - DNA, 2334 bp, Homo sapiens
atgggggttatgactggaaacgtcacttggactgcaattatgaagggccttgacaaacaggtcaagagtttaagaagcagtatagaaagtcttcgtcctggatctagccctcccagagtgtccatcaggattataaagtccttaaaatattagtcaaaaggaacgacatcattagaaatgatagagaaacaataatgtgatgttttattacctttctctggatttatactctgatcctaatattcaaaactatcttaataacatgaacttttggtcatagttttaaacaaaaacagtgttaaatatattttttaaaacacagtaagtcttgtaagatcttttctaacatgacattttgcagggcccatattttccttctgaaatgggaaaaattcataaaagtagacaccaaactgggttacttctagtcaagcgcatggtacgcaaaggaccagacaaaaagggcctgtgacatttcttcttccttttgtgttttttaggagaggcatgctgcggaggtgcgcaggaacaaggaactccaggttgaactgtctggctgaagcaagggagggtctggcacgccccaccaatagtaaatccccctgcctatattataatggatcatgcgatatcaggatggggaatgtatgacatggtttaaaaagaactcattataaaaaaaaaaaaacaaaaaaaatcaaaaattaaaaaaaatcaatgcggtctctttgcagaatgttttgcttgatgtttaaaaaataccttggatcttattttgtaaatacttacatttttgttaaaaaatacaagtattgcattatgcaagttatttcataatcttacatgtcctgtaacaggcttttgatgttgtgtctttccactcaaatgaatttgctaggtctgttctttttgaagctccccatgtctaactccattccaaaagaaaaatgaggtcagtagacagtctatggtgctagaaacccaccattgcctaatgacctagaaggctttgttgtctctgagcttgactaagaccatacctagatcacaggtattatgactccacatgaaccttcacatttgttcgctcataatctacttactgcctaaaaactacaaaaccaggctaagaaataccaccagtcatagcatttacttctgcttctcctggattatgtgctacaaatgtgctttggctttagaaagggatggatgagaagacagacctgagaccaatctgggtagaagcaaaaagttgaaccttttaaagtgctgaacacaaatccaaattcgaatggttcaagcagccgtgaaatcgctcttcataaagtgggcttaattctctagtttaagttcttttgatggaatgaattaattaatgtgtcaggtggcttatttgtggatgccatgattgatgatgttcattttaagctcttacctatagtacaagtacatgatgctactgaatatttttccacttggaaactgtgagctggttgttgcattaaaacacacatacaaacaaaatcaaaaacactgcggactttcactcaagctggtctttcttccccagtgtaaggcaatcctgcctactaacaacaccaacaacaaaacactccatctgtgaagctgacgcagttaagggggctaggcagggcatttgtgccaactaagaatcaccagatacccaccataagtacctatcgcagttttgaagtcgtttctccccaactcccaactcctgaaggttgctgcctgcatatttactcttcattagtgctattttcctgtatgtcattgtgagcaagctgtgattaataaagaattggagttctgtgaactaataaaggtttggtctgttctcttgcctcttcatgtgtctgaccctggagttcagattttaaaagggcagccactgaattagacaatctcacaagcaaagagataataaggagagtttgaaggaaaccagtgccctgctgagtcatttccctttgggaacagcaggccgcatctcttttctcttgccctctgatgggccaacactgtgggagaggtcttcaatctgctccctttaaaaacatacaggactgaacaagataccacaaaatgcagactgataattctgaggaagtgagcccttttcaaaacattgaaggttcctggcattatctcaagttctcccctgtggcccacagaacgcctcccccagcctaggccgtctgttaagatgtgatccctgacgtactgctgaattttgtactgccaataaacacactgcacacatgggcgcagcagggtcctgtcagtgacccaaatggatcttacaggacc

SEQ ID NO: 130338 - DNA, 1049 bp, Homo sapiens
tacaaactgttggtggccctgaatccatctgaccagctgctggtatctgccaggactggcagttctgatttagttaggagagagccgctgataggttaggtctcatttggagtgttggtggaaaggaaactgaaggtaattgaatagaatacgcctgcatttaccagccccagcaacacaaagaatttttaatcacacggatctcaaattcacaaatgttaacatggataagtgatcatggtgtgcgagtggtcaattgagtagtacagtggaaactgttaaatgcataacctaattttcctgggactgccatattttcttttaactggaaatttttatgtgagttttccttttggtgcatggaactgtggttgccaaggtatttaaaagggctttcctgcctccttctctttgatttatttaatttgatttgggctataaaatatcatttttcaggtttattcttttagcaggtgtagttaaacgacctccactgaactgggtttgacctctgttgtactgatgtgttgtgactaaataaaaaagaaagaacaaagtattctgtggtgtatgtcttacataccttggcctttccccctcttggctaagaaaagataaactttccttggttttcattttgcctgattggtttgtatgtttaccagtttcattattcttggacttctaaactgtgtgaattcgtgccgttgaataaggtgacttcattacaatgcagagagctttgccctgcctcctacaaggggacatagcccttttgctcttatgtcagatgatctggccctaaactggccatctgtggattaggaaagctgaaatcagactgagacttacaggggttgaaaggagcttggatgaaatattttaaaaccgtgttgactatttgacaaatatttactgagagtacctactatgtgctcatttctatgctgagagaatggaaatttatttcttttattaattttttttaaatggcaaaacaagaagacccaaatgtaggggctcgggactctgtggcctgatgagcagtg

SEQ ID NO: 130339 - DNA, 1021 bp, Homo sapiens
aaggagtgttggtcctgctttcaaatgagtaagaatgtgatgtgaccactagagatgttttttcaatgtgagcaaaatcattctgaagggaaggatgaaaatcattagtgaaagttgggtgaggtaactaaacccagtcttaaggagtttggagagaacctcggccctgatctttcagtaggtatctctgaaactgattgctagtgcatattgatagaaactagaagcaaagctgtcaccttcctctcacttccatagccagctcagcacatccaaggaatcccccatctgtagattttatgttaaatgtttgattttacttaataaatatttgtaaatgtgtgtaaaaattttgtgtttctttttcatttatttgtttgatcaaattggggctccctcaacagagaactcatttataaaactgaacctatagtccaacttctctagaaagcaatttggtctgtatatttgacagtctaaggtagctttttgacagacttgcaacagaattttccgttatgtacagatgctcttctgtggaacatttggtttggctctaaccttgtctaaacagatgcactttgccagtgtctttgaggggagggaaaatactggcaacagtaaggttcttttttgttgttgttgttgttttttaatctggtggcattccctaccaaaacttcaaccataaggtatctcaattttatttttttaccaaaaagaatgagctttaaaaccttaattttaacattcagtttttctacttttcttgattcaatagcatggtttgaaaaaaaaaaaaaagcacagcccacaatcagagagaacagggtggaatcctacctctactgtttactagctttatggctttgggaaagtttttcacttggaaaatggtgatagtaatgcttcttctaaagttgtttgtgtgagaagaaatgaaataacatgtaaagtgcaaatcacgatgtgtggcaaataggaggagcatgcccccccccacctatgtctttttaatgta

SEQ ID NO: 130340 - DNA, 1053 bp, Homo sapiens
atatatccatcttttcctttatataatactttttgtgttcagtttaagaaggctttacgtatcccaaagtgtagaatatggtcttaatatatattttagaagttttattgtttaaccatttatattcaactctaaaatccacctggaattgattttagtatatgggatgaggtagaagtcaaatttcatttttttcatatgattatccagttagcctagaacaatttatgaaaaagactgtccttcttgtactgttttgcagtgctacctttttccaaaaataaaggcctataaatggctgtttctggtatctctattctgtaccatgtctttgaaccaatatcgtattatcttaatacatccagctccaaattctggagagtttctggtagaaccctctgcctttgacagccatgtactaatgaagttaaaaactctctgtcctctgcagcaacagtgagaactgtacacgcccttgtgtcatggaatacgcaactggagtggcattgtattttttaaaaaagagagaaaacggctgcagcctgctgagctcaagcagctgctgcttgatgtcttccactgtgagagcacctttctgacaggttctcaggctcgactctgaggtcagagcaggattaggacaggaacccactttgcactgacagctgctctgttagtcagtgcactgacttcagctccatggcttctcaagaatgtttaattaattttctcactactgaaagttatctctaaaaatgttataatcttgtgctttaactggttttgttttttgcaagagattatgattttcccaaaatcagatgaaatttgtgttctttacctgctcttggatgctttacatgacacaaagttatgaaattataagtgttactatccagtcttctcattattattatctgagaatagatagtttcctttgcagaactaggtagctctcaagagaggcccagtcagcatattaaacagctggctccctgtagcagagaagctacccatgggaaataaggaactctgttgatggcgtgggactct

SEQ ID NO: 130341 - DNA, 1072 bp, Homo sapiens
caaaaggcttttcatatttgtaagaaatagcaaaccatatgccatcttgcagaagccctgattgggaaagaacgtggctcttggccagcaattaattaagccactcttttgttttggccatattgtggtggtgcataggtgtgaaatactctgtcttcactaaatagaaatattcctgtgtatccatgataattttaagaaaacctttcaattttggtgttattttcctataaagtaataggagttgtaagtgcaagtaattgaagcatgagaagaatggagaaaagttattgggataaaatgaatttggcatttgggtagctgaaaaatgattcctatcattttggtccatagaaaattgcatcaatattaacaggaagttggaagctgaacatctgtagcaggtctcttgttaaagaatagagaaagagaaaagattacttaattatgtattgtgtatactgggatatcctattgtcaaaaagggaaaataattagcctgactaatcaatttcctgcatttctcctgaattccaatttagatattcttgaattatcttcaagtagagatctctgatatcagattatatgggctcaattaggttactcagtgttcctctcatcgttcagcttcacttgcctctcattagagtagaattaactttttattcaggatatagtagttaaacagagttatgggccttgggtctaaagattgaaatcagggaaggccggcctcaacagagagcttcctttcacccattttgaccattgtcactgcttcccctcattcatcctcattgctgttgatcttagcaagaaacccagagacactattgccttgcttacaaataaggttttatgtttgatcttttcattttgtaaaagataaagcacctaaatcttaaaagggtgctttctttttttaatgaacagcagcggctctgggaatttcaaaagctctataatgttttgttcctgtggtaaaaaggattcacaacagacattgtgatctaaatacttgttttctttttcttttaatggaaaattatttccctaagattaagcataa

SEQ ID NO: 130342 - DNA, 1042 bp, Homo sapiens
aatctcaccattgatgggctgcatgagtgccctcacaacatagcaacttcccccatagtaagtgatgagagagagagagagagagagagagagagagagagagagagagagagagagcaaggaggaagtggtgatgccttttatgacctagtcacacattgtcacttctgccatattctgttggttaataaccaagtgagtcacaaagcccagcctatactcaagagaaagggaattgggctttgccttttagagggaggtgtacagagtttgtgtatgcattttacgtatttaatttctgtgtgtgaacaaagcttaacttttaatacaaaaatttagtaactataaaaacacaaaatatatgacagcaagatttaagaaaatggaaacatctttctctgctctgttttcagtgttaaaaatattttcatctctaatatattattagacactacttaaacctagattttctgtatacttccaaggtaacctttatttttttctttccaactgtgattctaggtatctaaaattcttgtctccttacttatccatacattgagtcaactgctagcagctttgagctacttcagtaaacatttatcaagtggctgctctttgctaggcctagtgctagctttggctttaaaagtccatactgcttctctttctgtctctattaattcaaatctggcaaaagttctttttttaagctgctgacactccattttcttaagtagttatttctatctcatgcaagagagccttgctaatttcagacaaatttcaaactattttttattttggttaattgaattaaactctatccagccatatagtccagaaagccaagagtcagaatagactcatttctcttcattacaaccttcctcctgcatccactcaatcagctttcctcttaattatcactgaaatctgccctttcctctgtctctaccattagggcttttctccagccatggatatcttgtaccttgtacctgaatttgccacagttactttttttttttttttttgagat

SEQ ID NO: 130343 - DNA, 1649 bp, Homo sapiens
caatccctgcttccagggagttgatctggtcagggggatagagaagtaaaccaataaatataacatcatataagttctgttcattgtattctacaggcatggagaaggaatcgatggttcaatctgcttgtgtcagaggcttcccagaggaactaacaatagaactgggttgcaaaggatgggtaggagatactaagtgccgaaagtgagagtgtttctgggtgaaggagcagcacttgaacaagttttaaatgagagagaggctgcctcttctgggaattcaagtggtttagttggcttaagtttaggaggagtgatgggagagtggggagatgaccaggagccagattttcaaggaatttacatattgtcctaaaaaattgggattttattttcaaagtagcaaagaatcattaaaatattgtaacaaggaacgtgggtcaactttgtgtttcagtgagatcattctggcagaggtgtggagcatatttcggaagaaggatgtgagagggcagttagtaaggaagctgctgaaaaaaatgatgagaatatgaattaaatctgagggtggagaaaggagacacatttagcagtttaggaggtggaagagacaggtcttggtgactgaatagttgtggttggtgagagagaaaaattttgaataatgtttcattttggacatgaatggactgggtagtgagttgggttgtgttggggaggtagagaaggggagtgtgttattgatattattgcctgctttaaaaacaaaaattaaaatgcccggatgtagatcacttttattctcttatttccattcaaggtcataatacttgcgattagtgttagtcaggaacattctctttttataatataatattgtatatatgtgtataaaatccctgtggttaaactatgctgttgctttggtcaaagagccaaattctccaaatcttttcatttcattaagttgtattttagttttgatttttcgagagttgtaaacatttctgtaaaatcttcaagtccagttttataagtaaagtccgtttactaatgtgttaatgaggattgtgtcttttaaagcattgtctctatgctggctctctatcataaaacacaggattgacagctctgaaaattgaagggtttcaaaacaagcatgattggcagctctaaggtaactggcacgtgcactgaatcttatttgtacttttgtttgacactaaggtggaataaacaagctaattttcccatctttgtttctatttcagattgtgtgatatgtagggtcagataaagagtggaatgtatgttggatgtttcaaaaactaaagttttcaaggtgtattggtggggaaaagagaaaataagaatttgaattaagtgggtcattttattgcagaggacatggaacacattaaaaaagcatgcatgtttttatataggttggtgatttaaaatcattctactagtttttctttaacagatctcttcagtcttttttaggatagaagagcatccgttatatttagctttttaataggaaaccttaaaatatgttcaaatatgatcaaattataaagtatgatcttagagatgttccaagttcatgaaactcatgtaattcagactgaatagcattggagggg

SEQ ID NO: 130344 - DNA, 1099 bp, Homo sapiens
ggtattatccacatttcccaaatgaagaaaatgagtctctgagcataaataatgtgctgcagtcatgcaactagggattaacaaagcagggattcaaatctagggctgtgtatatccaaattttcttttcaccccgctgtgcttcactctaaatcatacaatatatagtaactcaagcatcataaagacttcctaaaacagtcttacatatgaagcagtttcattccagggaccctgaaggcagtgtggcagtgaagctctgtggaggtctgttaaaaaatcataggtagtctgttatatctttggttatggtgtccattgttgctgtggtctgaatgtttgtgtccctgcagaattcatttgttggaacataatcaccagtgtgatgtagttaggaggctgggcttttgggaggtacttaggtcatgaggattctgccctcgtgagtgggattagtgaactggctagttagttaatctatgaaccagaaccaggtcttcatgacactaaatatgcttgtgccttgatcctggacttccagcctctagaactatgagaaagaagtttctgctgtttataagataccctcatttatggtgttttgttattcagatcgaacagactaggaaatagtatggtaagttggaatagtgtaacccccaataagctaataactatcaggtctaggctttgttttgtaatggatctgtatcataattgtggtaagacctctagtcacaggacctggttaatatcagtatgcctcatgttatttgggaatgatgtatttcaaaaaagtttattgtgtaaataatagaaaattggctatttatacctaatatacttaatttttaattgtttattggttcttttaataaaatgtattatatactttctttgaaccttgttagacctaaaatagttgaacctttttttgtttttgcttttgatgacccagggtcataattataaacattaatttctatattgtatcataataaaaatatacagaattattgctgcataaccatataaccctccagttctgcagttttgtgttatctctcctttactgctgttatgcccttgtctgcttttt

SEQ ID NO: 130345 - DNA, 1521 bp, Homo sapiens
tattcgaatattccagaagacagaatatctaaaatcagatgttcaatcctttcagaatactggaaaaataaaaatatatagatttaaagggcttatttcaatataatagggaaattaatttatttttagtataatttttaagtccactaaattcatatactgtaatagtaaaattatatagttttacttaaccctttgttttcttatcagttttactgacaactttaagaattataccagtgttttaaaaactatttgatatgtaaaggaatgatggaaaatgtttctggttttaacgatggtgccaacctgtttttacattatagaattctaggagaattacctctgagtaataaaaatcttttgaaatgttgtatgtctcacattttcaaagcatgtttagaggaaatgaccagttaatatataaacaatgaaatagtgaagaagtacatagaattctctggggaaagtaggtttttgttaacacctgtaacatgcttataagcagtactatacatttcttaaaagaaaagatgtatatgttctgtatgtattttgtttttgggtggtcatatgatctgattatacccaatcagactcatgacttcccaagccaaccttaggtttttcactatttggagatcgtaactctcatttttactcagaaatttcacttccatcttttaatgtgtctaagtttgcttctaaggctacacttaaatttttctcttttaatcactttaatttttataacctgattatggcccttaagttttttatctattggcattaaatatcaggaaataagagcaattaagcacattcaagtggagcctggtttgttgggatttgggaataaaactaaatagtcttgattcagtttgggttttgcctacctttttaaagctttggagattccattgttgacaactgccaggaaatgagtggtggactcagtctaggagttggcagctgaacaagttgcctggcctctggccagctacccaaattgagatggttggattctctgaagggacataaatgtacactgagaactgggtgtcactgggacacacagtatttatcccaaagaaatgaaatgttcctaacagcttcatttgtaatagccaaaaactgaaagcagcctagatgtccttcagctgttgaatggttaaacaaactgtggtacatccttaccgtggaatactacttagcagtaaaaagtaatgagtgtttgatacacaaaataatttgaatgactcaaaggaattatgctgagtgaaaaaaaaaaagccagtcccaaaaagttacatatggtgtgatttcatttatacaacatttttgaaatggcagaattatagagatggagaacaggtcagtgcttactaggagttaggaaggagggaggtaaaagggatatgtggagttacaaaaggacagcacaaggaatccttgtggtaatggacttgttctgcattttgactgtgatggccagtacagaacctttacatgtaataaaat

SEQ ID NO: 130346 - DNA, 1078 bp, Homo sapiens
atattcacaaattctagagattaggatgtggatgtctttgtagggggagggggcattattctttctaccatatatggagaagtcataaaatactagcagaatagcgatgattgacctgaagccacctaagggatggattttagatccatccttaaggtaaggccataagagttaagtgcagtaaggttggaaacatagagttcagtgctcccttccaaatatatgtataggaaaggagtttttctatttcttacctaatatttctcactcacgcttcgctcccattcataccacattctaagccccttcggaaaccccccaaaataattctcaattgctgagttaactgtggtaagagtgaaaattgtagcatcacatgtatagtaagttaagtgtttgaaactaaaaatgtactgtttatttaatgaaggaaacaaccaaggtgttttagagtccccagaattccctttcctttccttttctctttcctttcctttccaaggcagttctaattgggctgttcagtttttccaggaggaggctggggtgtttcctggcagtcccagcacatccgttagattttctcagtccagctcaggctcagcagcatctctgcaccctgcgtggttgttctccgtctaacacagtttagaaaacattattctactagatgatgggtaaatgtgtttggttgtgatgtacagttcaccaatttcttattcacaagtctttgacatcttggtttaatggaaataaaattccctggggaggaggatatcaggaggctgtgttgtagtctccgttcagcaagttcttagctttgaagcatttgaagtttacgtgaacccctttactccttcttaattgataccactgacttcagttgctccctggttcaggtcattacacacactgtggatcaagttatcttcctaaagttgggctctataatcagacttaatgaggttatttacttattgctctccttgagaatcttctaaacctccattcacactgcctgcaagattaaatatacaatggtgcatctctctactgtggcttcagaggcctactgcca

SEQ ID NO: 130347 - DNA, 2203 bp, Homo sapiens
tatgcagaatcagctagttttatgtttcataatgtctttcccttttttgaacttttttttaagtctaaagtagggggaaccaagcctgctggtggtgattttggagaagtcttgaattcggctgcaaatgctagtgccaccaccacggagcctcttccagaaaagacacaggagagcctgtgagattcctacctttgttctgctacccactgccagatgctgcaagcgaggtccaagcacatcttgtcaacatgcattgccatgaatttctaccagatgtgcttttatttagctttacatattcctttgaccaaatagtttgtgggttaaacaaaatgaaaatatcttcacctctattcttgggaaacaccctttagtgtacatttatgttcctttatttaggaaacaccattataaaaacacttatagtaaatggggacattcactataatgatctaagaagctacagattgtcatagttgttttcctgctttacaaaattgctccagatctggaatgccagtttgacctttgtcttctataatatttcctttttttcccctctttgaatctctgtatatttgattcttaactaaaattgttctcttaaatattctgaatcctggtaattaaaagtttgggtgtattttctttacctccaaggaaagaactactagctacaaaaaatattttggaataagcattgttttggtataaggtacatattttggttgaagacaccagactgaagtaaacagctgtgcatccaatttattatagttttgtaagtaacaatatgtaatcaaacttctaggtgacttgagagtggaacctcctatatcattatttagcaccgtttgtgacagtaaccatttcagtgtattgtttattataccacttatatcaacttatttttcaccaggttaaaattttaatttctacaaaataacattctgaatcaagcacactgtatgttcagtaggttgaactatgaacactgtcatcaatgttcagttcaaaagcctgaaagtttagatctagaagctggtaaaaatgacaatatcaatcacattaggggaaccattgttgtcttcacttaatccatttagcactatttaaaataagcacaccaagttatatgactaatataacttgaaaattttttatactgaggggttggtgataactcttgaggatgtaatgcattaataaaaatcaactcatcattttctacttgttttcaatgtgttggaaactgtaaaatgatactgtagaacctgtctcctactttgaaaactgaatgtcagggctgagtgaatcaaagtgtctagacatatttgcatagaggccaaggtattctattctaataactgcttactcaacactaccaccttttccttatactgtatatgattatggcctacaatgttgtatttgttatttattaaattgtgattgttttattattgtttatgccaaatgttaactgccaagcttggagtgacctaaagcattttttaaaagcatggctagatttacttcagtataaattatcttatgaaaaccaaattttaaaagccacaggtgttgattgttataaaataacatgctgccattcttgattgctagagtttttgttagtactttggatgcaattaaaactatgtgctatcacatgtgaaaagcttaataaattccatctatcagtagtataggtctcaatatttattatgagaccagtggtctggaaacagcttgttgtaccgaatcaactggagtctatgcttaaaaaaaaaaaatttttttttaaccatccttaaattattgcttaatggtatcatattaacatattctaaataagggctttaaggcacaggctgttgaagcattttctcagaggagtggatctgtagaagtctgtctttctatagaaatattgtgcttactcaagtgttaaattattttttctatgaactagtctacttcttaaaattcaaacatattcttttgatcacattgtttcttgagcatcctgccctgctactaacttttcaacaaggcaaaatggagtaaagtggcaatttctttagatgagtgaaataccctcaagtctcttttctgcccaaaaagggaaaagtgatagaaatgggggtggcaagtggggtgagtggatgaaggtgggtattgggggtggctgtgaaag

SEQ ID NO: 130348 - DNA, 1044 bp, Homo sapiens
aaaaaatgctttaggtcactccaagcttggcagttaacatttggcataaacaataataaaacaatcacaatttaataaataacaaatacaacattgtaggccataatcatatacagtataaggaaaaggtggtagtgttgagtaagcagttattagaatagaataccttggcctctatgcaaatatgtctagacactttgattcactcagccctgacattcagttttcaaagtaggagacaggttctacagtatcattttacagtttccaacacattgaaaacaagtagaaaatgatgagttgatttttattaatgcattacatcctcaagagttatcaccaacccctcagtataaaaaattttcaagttatattagtcatataacttggtgtgcttattttaaatagtgctaaatggattaagtgaagacaacaatggttcccctaatgtgattgatattgtcatttttaccagcttctagatctaaactttcaggcttttgaactgaacattgatgacagtgttcatagttcaacctactgaacatacagtgtgcttgattcagaatgttattttgtagaaattaaaattttaacctggtgaaaaataagttgatataagtggtataataaacaatacactgaaatggttactgtcacaaacggtgctaaataatgatataggaggttccactctcaagtcacctagaagtttgattacatattgttacttacaaaactataataaattggatgcacagctgtttacttcagtctggtgtcttcaaccaaaatatgtaccttataccaaaacaatgcttattccaaaatattttttgtagctagtagttctttccttggaggtaaagaaaatacacccaaacttttaattaccaggattcagaatatttaagagaacaattttagttaagaatcaaatatacagagattcaaagaggggaaaaaaaggaaatattatagaagacaaaggtcaaactggcattccagatctggagcaattttgtaaagcaggaaaacaactat

SEQ ID NO: 130349 - DNA, 1412 bp, Homo sapiens
gcctagacaattaaatggccaatgaaactaaagtgaggtaagggttctgatgtgaaaagctgagggtgtgatgaggacaagtggcagaaagttcacctggcttggtggaagggaaggtcagagaagacctcttagaggactcagtaatgtccattgaggattttaggttgaagggaatgtttgaagtttgagggcccttttgaggaccaccaagaacttcactgtgctgtaggatattgagcaggaggtgaagctagagagatgtgtaggccacattgcagagtttgaacttggggcaatgggaagccattgaagggttttaaacaacccaagtggtgcattcttctgtaaatgttagagagatcagtggctgccctgcacatcaaaggggagaacgattggagacaggcagattagatggaaggacggagttgtactccaagccaaagatgatggagagtgaattaagttagtgcaatgggaccaagtctagagctatttagaagtgagaagtgacacggaaaaaaaaaaagattgattggatgtagaacaagttggataagaatccaggacaaccccaggtgtcaggctggggcagctaggtaggtgctattgccatataaagtgttaaaaaagaatagagaaggggctagttgtcgggggaaggagttcagttttagacatgttgaactgcaaggagatttgatactataattaaggaatgtgttttaataaatttaataaacaatgaacacacattattcgcatttcccaaacaatttggatggtagatcaaaaagaatgagagtgaaaataaggggtctgtgaccactcaattaagattgagctaagagcaaggtcaagttcaaacccactataagcttcttgcatccatggtcactgactgttttcttactgttagctgtcctgttggacagtgtaacagtgagagagcatatacagattagcattgaaaaggataaagtgacatgtgtaagggttttgaaaaagtattatacaaatgcaaggcagatatattgaaataaatgcttattggcaaaatttcaggccagataggttggagtagtgcttcacaaactataatgtgcacatgaacaactcagggattttgttcaagtgttgatttcaattctgtagctggagttgggtggggtagaaaggatatctgagatcctgcatttctaataagctcccaggtaatgttgagtctgtaggtccttgaaccacactttaagtattaaagggttagaaagcttatactgtaactgagaaaaaaacatatatttctttcccatgttgtattcaatatttcttgaatgagtgtagctaaatgagcaattcgatgcaatacaaaatgttatgcaagtgtagagacagacagttcactaggt

SEQ ID NO: 130350 - DNA, 1019 bp, Homo sapiens
catacaaacgttagtacataccttttctgtttgtatgcagacatatgaatgttttttcagaagaggagttacactgtacacacacagtcctacagcttattcattcagccctcactagcagggtgctttgtgagccataaatgcagggacctgttctttttggtcactgatacttctcaaaggcttagaacagttcttggcacattgctcaatatgcatctgatgagtaacaatatatataagagtcattcttctatgtcatttcaagagacctgctttatttttcttagtgccaagtcatatatttgaaagcaaactgtagttgcaggaagtcaaggattactaaaattcagttctcaatattgttaggactgttatagcctttccttgaaatctgccccaagtgttaatttttgaaatggcaaattggaaaaccaggaatcttatgtgtttttgacattggacatgaggagaaacttccaggtcattcactatatactctcctgaatatatttagattctataaattgtaatgaagtctgctttaaaatatgactaggcaccattcagattaaaaagtgtaatttaaaaacatacaatatgttggctgggcgcagtggcttacacctgtaattccagcactttgtgaggccaaggcaggcagatcacttgagtccaggaatttgagaccagcctgggaaacatggcaaaaccctgtctctaccaaaaacgatagaaaaattagctgatgtgttggcatacacctgtagtcccacctactcgggaggctgaggtaggaagatcgcttgagcccgggaggcagagtgagcagcgattatgccactgcactccagcctgggtgacagagccagaccctgtctcaaaaaaaaaaaaaaaaaaaaaaaaaaaggatagcgtattaaacagataccccaagtatcctaaggaagctgtaaaattacatgctggggatataattttgttaaattacatttatatttaattaaacatgaggtcca

SEQ ID NO: 130351 - DNA, 1753 bp, Homo sapiens
accatgacaagttggttggggaagtgacagaattgctattttacccggcttcgttacctctccttacacacgtacttgaccatatctatattacttatgtctgagactggccctgttcatggaatcaaatgcatactcttaaaatattagatcagaaattgagaatcttacattataaatacttgtatgtacctgcacatatatggtacagattatatctgttcttttgccgattgagaataatgttgaagaggaatcaattatattttcaaactagttggattttttttcagtatttgtatttactatttgtttttcttttctctccatagaaactccccaacttttaaatcatttgaagaaaaggtcgaaaacttaaaggcaagtagagagatgaacagggtctttttgatacattgcctggtgtcttaattaactttgctgtgcgaaaatcattgacattaatatttctttctaaaaatatctaaagaatgtaaataactttactccttatgttactagtggacatttaaggtgttatgtacttaatatctttttagtgtatgctgtagtgtggcagcatgccacatgctgaaaggaaatgtacaatttacaaagaaatggcactttagaaatttgtgctgctttttgctttattcatttcaagtacctttgtaggtggacaaaatttaatataactttcttgtcaacaattaacaagaatataggaagcacaagaaagaaaacaaaaaattggtcctaccactcagacagtgatagatgtatgtgctattatgctgttacgctttaaaaaagaagtagccatacatcataatcattttcctgtatcagtaagtattctctttcaatattatgtgcaatggctgcttgtatattactttttttttttttgagatggagtctcactctgttgcccaggctggagtgcagtggcgtgatcttggctcactgcaacctccacttcctgggttcaagcgattctcctgcctcagcctcccgagtagctgggactacaggcgcgtgccaccacacccggctaattttttgtatttttagtagagatggggtttcactgtgtcagccagaatggtctccatctcctgacctcgtgatccgcccgcctcggcctcccaaagtgctgggattacaggtgtgagccaccatgcctggcctgtattaccttataatggatattatttgttcagtcctcaattgttggacattttttttattataatgatgccatgatgatcgtttatgattcactgtttttattttttgatttctttgattttagtggaggtgaacatttccccataataatgagctttattgatttgtaaattatattatctttgagattatattcaaagctataaaatcatcaactcttaggatcacaggcaacctcaaaagttgtctagttcccatctattcctcgaccctctctacggagtttgtataaaacccatattttcattacttcctaactctgataattataggggatatattttaaggattaaaactagtatcttaaatgtttttatatcagtcagtttaaaaactaatattcagtttagtctttcagaactttgagtcacgaaatgcatctttaaaagcagggtacatttattgaaataaaacactctacagtgatctggatctttttttaatttatttttttattatacttttaagttctgggatacatgtgcagaatgtgcaggct

SEQ ID NO: 130352 - DNA, 1663 bp, Homo sapiens
ttattatactcttataccctaggtattgaccaccattgtaggatagagagaatactgagttacatgcatcttttcctgttatgtaagacatcaagtacagaggtgtttaaatatttcattgataatcctgattacacagattgccagcatatttgacatatatcacaatcattctccatgttatcagatattaatgcaaaattagatttgaggacctacattgaagacacgttatcatttgtaccaaatgagtctttaagaaaaggaaatcataagcgcacaaaatatttaaatataactgagaattaataccttgaacctatacactttacccaaaggaaagtttatttaccaaagtcgtgccagtggtcaaactattataagcatagtaacaatattagcagaatacaatcattttacgagcctaggaatgaaggcactctcatctcatgaggtggtctttatgggagatggctaagagtaggtaaccttgaacctgagtggtcagtgaactgcattgtccttgagtgggcagttgcctccttgtcttactaagagcccttccctggccttgcttgtgtgtgtatgtgtgtatgtgtgtgtgtgcatgcttcatttttgaggggaggcgataaacactgaattagacccaagttctattcttgattctgctgtgacctacggtaactcatttaacacctatatgccttacagctccgggtgaaagcactttagttttcaaagtgctgtaaaaatgcaaggtggtattgttagctctagtaactcctgggaattaattggctcctgaataaaagtaaattatgttggaataactttgatcccctccacctcaaaaagtaggtaattcttcatggcgccaagagaataaagctcctggggagctaagttttgtcagcttttaataatgttgaagcaccactatactaaccttatttctatctctttttaatgctgcctcttagtatacgttccattcagcattcaattagcatgcctgctatgaggtaaagtatatttttatgaaatgtagttggtcttatgctttatttttctttatttagatgtttaacttgaactgttctgaattagggaactagaattccccttgaaacaagctgtgtgtttaacactctatcagttttcagctacacttcctctgatgttgggatgggtgcaagagatccgttaaatgttttgattttgtttttaaaaaaattatttctattttattttgtaaaacctttgtttcctgtctgaaatctgttcacaaagtgagcactacttgttaacaaaccttcttttgtcccgccacctctgtctgcattcgctttagttacattctccttttcttcatccttcccattttcacttcccccatcccactgtgacatttggagccaactatgatttaattctactatctgctttcattagcacttgcaagtgatattacctcacctaacctctctagagagttagaggatttttaacaatctgtgcttggcttaaacttaagtgtccatcaaaatcacttggagtgcttgtgaaaccgctgcttgctgggccccacctctagagcctctgatcctgtagagttggggtgggacctgaaaattggcattgcttatgacttcctgatagc

SEQ ID NO: 130353 - DNA, 2912 bp, Homo sapiens
cactttgtccattttgtttaaaaaatataattaagattatgctgtaccattttcagtcttgtttttaataaatattaagtttttatgaatatttaattgcccatcagtatgtaggggttaaagtaaggtttttgattaaaatttggaaatgaaagaaatgagattatcttttgaaagttaaactttgtaattcttgcaaatcacaggttaggtaaaggcatttaaaaaaataatttcaaggccaagaagtcctgattgtgttctgatttaatgtgttgacacatataaagaaaacctacatcttttagattatgtgagtcacagaggcaaatattggccacgttccctcaagaactacccaaggaaagggagcttaggctgtagatttgagtgttacaattccagcaataagtccttttctcccatggaggtggatacagtaggctccttttgctaagtgctatgaagtaggtggttagtccttaatcccactcactgtttgttctaggtccattttacctggcaaacttatgccggtgattttactccttaatgtaattatggatatagaaggagaaaatgcagcagttttgccaacctgaatgtgttagactcagcaacagtttttattttacatagtcagttgataaatcagcacttgggatttagatatttgccttatgccttgattgaggggagggagatgtataaggaaatagagaagagagagagagagctgctcttgatgtcctgagaatgaggtgtggtggtagcaaggccaaggaggacgtggtcatgagtgctgtcctgggaggccctctggggcagcctgcttttccctcaggtgatatgcttatatttcccctctgtttgcatatgttctatgcctatgtgaaagtattgactcatgcctttagcattttgagggaaactttaaaagaaccttctcattgcagtcagtgccagggttaaacataaaattttagtgttattaaaagcatactataatattcagtagacacatttgtctcatatttttggtatatttaagaggaagtgctaattaattttgcctttatttccaaagaaaatttctcctttttaaatgtgtgtttcttcatgtgcccctgtagatatttatttggtttgggctcattaaagtcctgctagacaattcccttttgctgaaaacttccaccacttaatgggaaaagaaatgatctctttcctcgtgtcagaaaaagaatatcttttgattagaatttgaaacactttaatgaacttttctctgtttcatgcccatattcccaattttagttatcaaaattgtttattcatttattcattcattctttcactcaaaagtatttattgagtgctaactatgtgccaggcattgctgtagactataggggtggagctaaaaaccaaaataatgctgaaatttgaaagcttcaatgtgaaatttgaaagcttcaacgtgatatgcttatatttcccctcctgtttgcatattttctatgcatatgtgaaagtataatatacagtagatgctaattcatgtttcaattaaagcatgtgttataataataattaacatttataagcccagcgagacaatagtacctcagaagcagatgctattgtttttgatattacagatgaggaaactgagccatagagagattaagtgacttccccaaggttgcacagcaggtataagtggctgatggtcaggactggaaccgagcacacctagtcctggagcctgcactgtcctcctgggcctccccagagcagtggtggtttaagacagtgcccctctaggcactgtccagcactttgaacaatagctgctgtgatcaccaacatcaaaagattgtgtgagggcaaagtggaataatagtacatcaatagctgtgaaaagcatacgtggtatatagtaagcagtccaacatgttagccattaactttcccttctcctcctcccgctgctgctacttccttccttatcctccctctaccccctcctctcttattattattgagcatgaaagcatcagataactgttagaaacaaggaatattttttaaaaatcaattcagctgttttaaaaaaatgactttttcaaagtaagagtaaatgcagtgtgagattgaaaagtacttagtgagaatcagattatcctgattttttttttcagtgttttgaggagcccatgtttgcattcctagtttgattacagattaatgtatttgggggttacaaataagatgcaacatttttaacaaaatgtgccttatagatggtaaccgattcttacaacctatctattagagatgattctggtcccgtagcaacatgactttttacttttgaaggtttccatattacatttaagcttgaatgaaactgaaaatgatgagcaagttgaagctttgtgtaacttgccatagagaagccagaaatgaaagaacagccaccctatagttagattacaactagttaccaacaaaattgaatttcatctaactatggattatggggaggatccagcaaccagatagaattgaagctgatgtgtgctccttttcttcctactataaaatagctaccataaaagcagagagaccttgactttgactctgttaactgattttattctgtttaatgggtatatttatcttcaagtgtgatataatgcatacagaaaagtgctcaacaccaaattcatttcagtgatttttttcacaaaataaacagtctagtcacttccttgcctttccttatatattaccactgaaacatatttagtaggtacatgctaggtaaagtggtatagagcccaaccgatccactgctggaggaagtgatattgtacatgggttcttagggacagtgactagaatta

SEQ ID NO: 130354 - DNA, 4654 bp, Homo sapiens
tcgggagagtggatgttagagtgctttattaagtattatctgtgtagaaatttgagtcctaaacctacatgagatagctgagtaaggaagtatagggagagaggagaaggccaaaaacagcttaagatgggattataaagagctcccatggaggaggaaagagaactctacaggagagatcagcaagtaaccagtttactcaacaacattatacattgtttttagagagaaagataaatgattcaaaaaaatgtttaatgactggaattttggatgtagttctgtggtaataatcttaacttactgaatgacttttgctatattcttaccccaaaccccttcctcataggtagaagaagaaatccagactctgtctcaagtgttagcagcaaaagagaagcatctagcagagatcaagcggaaacttggaatcaattctctacaggaactaaaacagaacattgccaaagggtggcaagacgtgacagcaacatctgcgtatgtttccttgatcatacactttccttgggagtgtaaaggacactgttgtgccttttgtctggagaggggaagaaaaagaggataaggatgcttcagcagcttttctttggacgacacggcaccctttttttctgattttcaagtgtgcctgcctttttttgtaacttcaatttttccagaccacttattctaaggaatagaaagaaagctagccagttggagaaataaaattcaaatcccataagtgttatgtattgacttgccacaaatatgtacattttgtcctttagtactcagaataacccagtaagaatgggtggcaagataaccctggataaggaaacaggctcagacaaattaagttttcatgtcacaaacctctcaaaatgtggagtgggaattcaaactcaggtctggagccagtctttattattattattaatgtatttttttaaccttgttgtgtaggtatcaaaagattctcaggtcgtagtctcagatatatgctcttggcagaggtcaatcccttaggctttttgtctttttgaccacacatgctatgatatagcattatcataatgcagttttgtttcccggcacaaggaggagcaagcttctagcagcagaaaccgaactgctctgtcttctgtattgagagccatctgcagagctggtgagcacagaagttgttttacaatttaactatcagaagtgaggccaactgcatttaacatgacagtacttgagtccccagtcttttggtccattttctacccatctaagttggcagtgggaaaacatacaggaaactattttttcaacagtattaccatgaaccatgtttttttattggtatttgatcttgacagggtaagtaaaaatgcctgagcattctttcccataatgtgggaattgttttggtaggtacgatattattttgttttttgttgttgttgttgtcatcatttttttgtttttgcttttctcttctctaatctccaggtagctgggaaggaggtggtaaattatagctttgcgtgatagcagataccacactagaataattttaagcattgcatattttacatactttgttgaaagtccatcatgtccgtatttggtagctctctaaagacatgcaaaaatttttagaaagtatgcccataaaatgtatttggataataaaatacaaatgggtcctacttacgccagctactaattgcttctggcccttttttaggaaatcaagttgacaaaggcatctgaggaatttgatttcatttttgttttgtttggattatgtgagaaaagaacaataggtatgagttctttcaggcctttgcttattttcatcttggtttgatgattatttttagcccttaccttgacttctttggccctgcctttataggactctgtctttctggctggactagggcactgcagaagattgtgcctgagcttagggttgagcatacgaagatgtggtgatgccgctctgctggttatgaaggattttagaagttctgaaaaatgttttctctttttgagagttctccagcaggtggtgaccactgcacttgaaacaattgatattagaaaagatgagctgacccttcttttgctctgtgtgtttataatttaatatagttacaagaagacatctgaaaccttatcccaggctggacagaaggcctcagctgctttttcgtctgttggctcagtcatcaccaaaaagctggaagatgtaaagtatgtcctcatttttccttgctcattaagtagctgacgcaaattaaaatgttattgttgttgcatctgtttcctgaccttggctctagttgatgctagctactcctgttagagtgagggagggcactccttcaaaccagtacctggaaggctcatctaaggtcttctaggcctagcattctaacatcaaatgatcatctgatgatcatttaaggttgttgaaaaattctggttgtgaacttctttgtctttttagttcttcatgatcatgcagggtaagtatgtctttggttgcaaatttgtgattgtgggcagagcctggtgtgttactaaggatgactacaggagcactgaagtgcacgcttcgattcagatttggcttcacgttctatatgtgacattttatatcatggtgtgattacaacatgctcatttgtgcactgttttattctaactggtaagctgtaactatgttcatgcttaggccaaaatcttgattttgagttgttgctttttttttttttcatttagattagtctgcagagttttccttgccatttttataaaaccacttcacagtgcttttgtgcccccccttcactcatgtggattaggatagtgatgaaaatgacaaatgtggtttaagtcagctgtgcttctgttggcatgcaagatttgtgtttaaaaaaaaatgctcagattgcatggcttcgtgttttgcatttgtggggaaagtgtatatcttacaaccagaatttcttggttgaatagatttggtcaatttatgtgttatactttacaccaaaagaacaaattcctcgctcattatatttagactgtcattgtctaagcataatgtaataaatatagctttcttgaactcttttgacaattatgtatgtatctattaggtgttcattttctctatgctgactgaattgtgtagcagtttagagcccagggaaaacattatatgtttaaaacttaggttatttaattgttttagatttatcagaacttctttcttttttaatgcttactctggcttcttacagattgcaagccttttcacattcctttaggtaaggagagtttgaaccatcactgcagtccagcagttgtataagaaaagtgtgctgagattagattaccatgctacgttggatgatcgtgtttgtccagtacataattttcttgcgtttagagtatctttttctctagtgcattcctaatttcaagggagggtttcttgtataccatgggtagttgataaattaaaagaagtatttgacactgtggttcaagggatatggaaatgattttgacatttcttttttacttttttctttggtaaaaagaagcagctttaccatggcatgcaaaattcctcccttttaatgtctgactttgtttgttttgatgcttttgtttctttggtacttttgtaaggatgttggaattcttcacctgggtttcattacacaattgtaacagactgcatatgtactgcctcctgatgttagtcttccatcttctattggttactctacctttttttttgttgttgtggtaaaatatacataaggtaaaatctgccactactctgcactttttaatacttgttttactagcttatagtttttatgattttattctttctttacacttgttatattctttatgtacacaaggcaacttcatggtttgaaaaagggaaaagaatattaagctaaaaaaagcacattaaaaagatgttagctcaaaccatgccttatagaaagagactttgtgatgttgaggaaacctttctctttcccaggcagactctttgattatctgattagttgttggaggaaactaaggtggaggaaagtctttagagtataagcaggaaggatgatatagtagtcttcatctctgttcctatggatgcagattattttcttaagcaatcactcatggtagtctagctgcttgcctttttaagtaagcaaacaggtacttaaagctcctatcttggtgacacttacccctggaagtcagagtaaattatagggatatataaactctaaatgttgaactatttaaagctaaaattatgcttaaaaaatcaagtaaccaatgataggtgattgtgtatcgttggcattcagttaaaaagtgctataagtaactgaatacagagccagtcacatcacccattctgctaacatttagagtgtctactgtggacaggttccatgggcataaccataaagaacgcatggcttttattagaatgaagcttaaaatcttagagtggagtaggggaagagtggggacttgggataagttaagaatggaagagccttatcagtactggttataaaatgttcgatgtgatgcaaacatcagtgtaaga

SEQ ID NO: 130355 - DNA, 1021 bp, Homo sapiens
tgaagagatatgcaaactcctgccctgggttactgggaaggagctaaaatctttcatctaatttatactgatttacttttgcagcaatttaaagtctcagcaagatctcattttgggcccttcactcttctgccataactatattgtgactgagactatgaacagaagctaagagaatgctatattttctaaattcatattttggcagagtctacttggtagtttccggtggttagctcagattttcttttgtcctttgctgagaaagccaggtcatttgaatatccagagatgagatgtgtggatctactctaattggctttattctggctaggacagtggaggagcttaaatagggattttacttagattttgcactttaaaaaatggtttaaatccccaaccaggtctgctgagaacagacccagtccctgaggaaggagaagatgttgctgccacgatcagtgccacagagaccctctcggaagaggagcaggaagagctaagaagagaacttgcaaaggtaaagaaccattccttttgcaactttatttttgcacttaaaatgtactgtcatttgtgattctaaagtacatggtgatatgtttatagttagttccaggggagagaaagcatatgtgtttacttctccagcaggtcttgagtaggggagaggagatagaagagggtgacatcggttcgtttttatatgagaaaaaagtatatatgggtaaaatagatgtgaaaagtagagtgtgaagcaggaaatgaatgagaggagtagtagtgaatgtcttctaagggacttcactgacatctgatacacttgctcttcagtgcatcagtgactttgttctacccttggctgtgttgcagagatggccactttccaacttccttccgcctttccttccttccagctccctccttccctcccctcccttcccttccctaccctgccttccctcccctctctcccttccttccttcccctctctttcttccttcccctccctccctc

SEQ ID NO: 130356 - DNA, 1059 bp, Homo sapiens
cctttagaagcagttattccttcatacttaccagtatgagattgctttgaaggccaggagcaccatcagggaggcccttcctttattggcacaaggcagcagaaagccagaagcagcttagccatcctcccggctgggtccctcatctcatagccaatgctgggaactggttaaatgaccttctctgtaatttgccaaataagcaatcaggtttttccagaagttaattttttccttattaatgaagaacaggtcacattttgttcattttaagctgaaaaaatgggtaacctagaaaaaaacatggtaaaggtgacagcatgaaacttagttttaagtattttaggtttgtgtatttgccgacagtagggatgtgtgaagcagcattcctctcttggttgcacctggtagccatctttccccaaaagtggctgggatttccaggaacaggaaaatgttgaatataacagagaaggggtagagctggtctgtagaagttgggggcaggaggcagcagcttgatgtctgctgggggattctgattgccaggaaactttctccagtgctgaccttgccttgcccaagtggcccccctcagacctctgtaataaaggggcctgggctccccctttgcccagcccccttctaacttataaattttatgtataatttaataggggccacacagaatggggaagctagagcttgataatggactgaaactcaagtgacttgcgggggagggagggaacctttgagaagctggggctgtggttttgtgacttcaggtggaccttgatcggtgtgcaagcatccagattcccaggaagattgacactgcttgcttcttttagttcccttctacccttcttgtctcttggtttcacctcctttcattttccaagttatggtcatggctgccttgggatgttttctgtcaaaaccagggcagttgtagggttgggtgtacctctaggcagattctgaaagattatcttcacaattcctgttagctgttcgaaggaacctggggttgtgagatttaaaaaattattaaaa

SEQ ID NO: 130357 - DNA, 1083 bp, Homo sapiens
tttctccattatactgttactacacttgatctcagccaaaaggccaagaagtgatctccactcaatgtttttccttctggcagctagttaatctgtggagaggcactttaaacatcatttaaatatcatcttcttcctcaaaatttctcccgagctttagcatccagcgatgatttttgtctgaatctttacaaagatggtcagggtggcattcttctgtagttcttccttctctctatttattactttcttggactcttggattcctgtttttttcagtggtttataatccctgactgtccctaatttttttggcggcctgattgtcccatattggctagttggagccccttccagccagctgctgtatcaccatgacacgtctgcattccccaagtatctgcggcctgcctctcctggtggacagccacattgtctccctttgacgtgccctccaagtaaatattgtgtttcatagcttttaaatcagactgtcctttatatgtctttcaagtttgtggagaatttacactgacatatttgagtgatgagttaacaggcagacagaaacttaattttctttatagtcatttgtacctactaccatttccgtttgcaatgacatgagtcgtctccggttattaccctgcagtacatacgcactttactggctgcacctagttgacttctgaactgcccttgggctccctctgctggcatagtggtgcgtgagcacttttctggggtcatggaatggatttctctttctgcccattttctttcttttggtttgtggttttctctctcataaattattacacaaacatggaccatacaatacaaccttctttcaaacctgatttgtttgctaactgtatcagtacctttccatataaaattcataaatatttttatataattatgtcagtgtttccatatttttctattacctgaatgttctttttagcatttaaataatccatttttagtaggcatttgtattgcttttttccatttcaggtagcatctaaagtgaatgtcccttgcatgtatactattcatatgtgacttaataagtagagc

SEQ ID NO: 130358 - DNA, 1136 bp, Homo sapiens
atatatatatatatatatatatatatatatatatatatatatatatataaaattttcttttgtctagaacttagtcacatggccacatctaactgcaaaggagcctgggaggtgtagtctagctacctgcgtaagaataagaacaaattggcttggcgatttgttagcattcctggccatattaagtaagattattaaatcatacacattgttaacttgatctttcagagatgacatgacagtaattgtatggtttcatagatctggctgtgtttcaggagagcatttttccatcccatgctctctttccatctaaacgttaattatcttatccttttaacactgagagagcttcctggaataaataaaattatatgcctattttgataaatacctgtttgatagcgatgttttataaaactctgagaaaagtcaacaaggagccttcacagtgattaatacagcagttattatggtcagatgttaaaaaaaatctcatgtcttcagtcttgtgccaaaaggcaaagaaagttttgaagctttccacacactgatttggtttcaagataatgggctactattgagtttacatgtagcattggtcttctgctattgtctttataaaggaaagtatgtgaaatttggaattggaaatgtcatttcttaaccagagtagcaggttcagatggtgaagctatcacttttggcacaggactcttgtttcttaataaaatttaatgaaaaattgacaagatttgtgcagtgtatattttttttaatggttgacccactgaatgcatctaattagcttattacagtttaaaagcaagtttaactgcctaaatgtatgacttggtattttgatcttgtttgttaggtctcagcttgctgatgatagaagtttgtggtccaatattaattttaaataagtgcctactgttctctagaaactcccattcccttaaggaaaagtgtttcatatgagcctctcattgccaggaatagctgtgtaagcattgtggaagttttttccacattaaaatgtagtccaccagttcatttattccttttagggttgtgacagtcgcttgtgtttatgcacccctgtagagctgtctttaaactcattcagcaaa

SEQ ID NO: 130359 - DNA, 1055 bp, Homo sapiens
ccttcacgcccctagtttcccttattattaacaccttaaattcatatggtacatttgttacatttggttaatgctgagacattattattaactaaagtctgtagtttttattagtgttgtccagttcaatggattttgacagatgcataatatgtagccaccattgcagtatcatacagaatactttcactgccctaaaaatcaccagcaccccaacctagtcattcctgcttgcctccccctcagcccttggtaaccattgatctttttactgtctccataattttgtcttttccagaatgtcacatagttgagatcttacagtattttggcttttcagattggcttttgtcaataatatgcatttaaagtttctttgtgttttttcacagcttgctagttcatttctttttagtgctgaataatattccactgtctggatgtaccacagtttattatccattcacctactgaatgacatcttggtggtttcttgtttttggtgatcatgaataaagccactatgaccattcactacagggttttgtgtggtcataagttttcagctcatttgggtaaatacctgggagtgcaattgaaggatctgtgatatattcttggtcccagcatctctcctcctgctgacaattaccctccttattgtgacaacctaaccaggcctgcctctcccagggcttcctcttcttcacttagagcattttctgaacaagtctggacacaaaggtcttgcttatattttcaggaaagagtatttaaaatacttcttaatcatggttccaacttatttcaactcttataattaagtgatcattttttttttaaattatggtagaatatgtgtatataagatataatttgtgattttaaccatttttaagtatacagttcagttgtattcatcatattcacatcattgtgtaaccatcaccactatctgtttccaaaactcttacctggggatatgatcattttaaaagaggaatttgaagaaatacatctgaagctatatttggcaatatgtttccatcagtaac

SEQ ID NO: 130360 - DNA, 2462 bp, Homo sapiens
acctcagcctcccaaagtgctggcattacaggcgtgagcccccgcgcccagccacatttatatctcacagtttctgcaggtcagaaatctggggctggccaagaaagtggttctggctctgggtcttccatgaggtcgcagtagagttgttggctggggcatcagtcatctcagggctggaggatctgcttccaagcttacttgggtggtcattgacagcaggtgccagttcctcaccccagggacctctccataaggctgttcacaacgtggcttccctcagagcaaatgatgcaagagaaagagaacccaagagctgtattattctgttggtcacacagaccaaccctggtgccacgtggaaggggcctacccagaggtgtgaatgccagtgatattgggggtcatagagatgacccactgggtaatgagtaaggaaaggtacagggcgtctgtagctggaatttaggggattaggagtgatgtctgggaggtgaggctgatgtgtcgtgagttgcatggagtatgaatgtgatgtggaattaaccttcaaacagcttagtctagtagtggagttacattttgtatgtaactgtggaaagtgacacatgcacagagccacagatgatccacgtgttgctaacactgggtggtgtggttcatccatgcctcataatgtcatgattgatactctttctacacacacacacacacacacacacacacacacacgagttgtattgcccctgaaaatgctcctcttggtctgttcttcctgccggtatgacagaacttcctgagattgttgagtttagggttaaatcaaatctgaggtgacccactcgttagtttggtagtgtttccccatcgttttcctgttgctaagtggtgcaggagtagaagctggtgcaatagtttcctagagtgcggtgcagctaacccttttacgtacatcatattgtttagaatttgttaccaccttcaaccaattcatataaaaatagattacatgtgggagttgtatttgtttgtgtgtggtgtgcatccaagtcagtgttaattttaagtgagtgtcctgcactctgggtgtttttcgtagctacaaggaagccttaaccgttgttacttacaatggattacttttcaaaagttgtttaatctctttcaggtcattaatggcttggagactaataagcaaaaccattaaatactactttatgtctgaaaaaagagttaatgttcctggaaaaagcgagctgttttctttagttaacaaggtggagctggtgttcccagtggttccggttctaataagacttgatgagttggaaatgatgttattctggagacaactgtggagtaattagaattttacctcattttaattaaaagattctaactctaacctaccttcccaggcatttgggaaaggcacaggtaggtctccttgccagtgaggctccactactcacttgtggggttgacatcaggagaacccaggacttgggccttagtgaggtctcacgttctcaccactaaacaaagagaaagcatttatgcaggcatcgaaccagcgtctgtgtgtcacagctggactggtgctgaaaaaatcaccagggccttagcataaaacaaaggctgctttattatgttgagagcataaataggcttcttttcttttttcagtcagatatgaaattagagttgcttactgctaacatggagcctgctggattgagctgttttgctcacttctgccagataatcagaagagccgggtggggtcccctagctgggtgactgggagtcaggcatccatcccccgaacatcaggctccccatttgtaaatgtcttgtattcctgtcaagatggttaggaggattgaaaaacgccgttgtattttatttgattttgataatacacttaacatgagatctaacctcttaacaaatttttaagtgtataatgcagtattgttagctatagtgttcaagtgcattgggaggcgctatccaaatgcaaccccttccccgccctcacccccaccccccgtttattgctacttgttattttcatggttgtgctgaatttttccccaaggcaaatctttacctctgcccttgaagttgcatatgccccagagtgggtaattattaactgtattaatctggaccatatactgtacagtctttggataacctggacagtttataattttaaatgttttaaaagtttgcaagtctgaaactctgaaaaaattttttttttcataaaaatactagcctaggctgctgatggatgtgggtttctttttggggtatgaaaattagattgcggtgatgtttgcataactctgtgaatatactaaaaaccagtgaaccatactctttataaaaaaatagtggattttatagtatgcgaattatttctcaagctgctattagaaacaaaacactgtcct

SEQ ID NO: 130361 - DNA, 1171 bp, Homo sapiens
aagcttgttaaaacaagacctcacaccctcagagggcttgttaaaacagactgctgaccccacccacagagttctggttcagtaggtctgcggtgaggcctgagaatttgcatttttagcaagttcacaggtgatgctgatactgctggttcagggaccacatttgggaatgctatatagcatgggatttttttgtgtgtgccttttagaaaatcaaatgctgtcatgcttgtgtttctgtatttttcatcagctccatgtcatggagcactttctgtgctagtacatattgatcacttcattatttttaactgctacatagtgtacccacatataaatgtgccttaattctattaatggatacttgattctttccagtattttttgttaactattataaataaatcctgcattgaacatctttgtttattcctcctttatgcagctatgtttgtctagggtaatatggagaagtgaaattgatgaacatgtgcactttttgttctatttttgttttaatagataatgggaccatcactctatgatgctcaccacattaatgcccggccttaggtagtttgttttattctctgcctaagctgaggctaacctggagttgctaggaaaatcataaatgtgcttactagaccctttataaactgaacctgaaatgggctttgggctgctagccagtttttctaagtctttttgtagactaactaaaagcagtgatagtcaactgtttttttcccctaccagcacacctggtaaataagaattgcccttagcaacaatggctcacttaggtgaacttccaggggctatacatccaagtatatttttttgcacgacttcagtgctagacttttccaatctggatgttcttacctcatgttagattccgtgtatgtatagccaaatacagcattctttgtcccctctgccttctaaaccagtttgtcctgtttctgttctgcacagtgatgtgtgttaggtgagttgggctgtaggcagggcaagtgggtgttacgtcctagcattaccctttttaattttttggaattcataaattaaaattgggtgggggagagctcacactgagttgtctactccttgttttgccaagttattaaaatcaactaacaaaaagccaccatgtttttatagatat

SEQ ID NO: 130362 - DNA, 1205 bp, Homo sapiens
acacacacacacacacacacacacacttagccaggaatggtggtgcacttgtaatctcagttacttgggaggctgaggcaggaggatcacttgagcccgggaggttgaagcttcagtgagctgtgattgtgccactgttttccagccggggtgacaaaatgagaccttgtctcaaaaaaaaaaaatttagaagtggaaaatttgtaagttttaataaaataccacttactttttagctctggtttggaacctgacttacagcaatagtagggagattaataaggttacctcttaaggcagtctctcaaatgaaaattgagtatagttatcttatttttagatttatagatgtctctaaaccttattttaaagtgagttcctgactactcttgtggcgtttattttatctttacaagcattggcagtaatggttgatttcacttctgattatgaagttagtaggaaataaagtacagggggtgtggggggtgtgtgtgtgtgtgtgcgtgtgtgtgtgtatgtatgtgtgtgtgcacattttccaggccccactgtcttgaagaggcttgattagggattagaatggtagtggctagagggcctcactaaggtttgttccataggtctcagagctcccttttttgtcgcctttgccctgctgccctgctcaacaacccctgcaaatgtaaggatgatggtgggggctgggagctggggtggccgctgccacatgtagtgctaaagaatcaacaaaacaggacagcaaaagactatgcaaatagtttagctttctcaaacaaggtcttcattgttcattctttttcatcctttggtagctagctgtccttcctactagtgttgactgtttgtcatgtactctctccaccggagtcaccagtaagaccagctgaactctgttgagagttttggagtaaaattctgattggacgtggttttttgtgctttttgtgatcggcagtgtttcagtagctcttagttcccggaacctcattctcctatcccgtcagcgaggtctcccttatttttgctgagatgcatggttaaccatttccccaggctcctccctagcacctgcagtatcttaaaaatggtacttttaacttccaggagcaatacatgaacacaagagtatagataaagataggcaagagtgtagataaagagagttgtgcagagacttcatc

SEQ ID NO: 130363 - DNA, 1056 bp, Homo sapiens
agtgggtaatttataaaagaaagaggcttaattgactcatagttccacatggctggggaggcctcacaatcatggtggaaggcgaatgagaagcaaagtcatgtcttacatggcaacaggcaaggagagcgtgtgcaggggaacgggcctttataaaacctttataaaaccatcagatctcatgagacttactatcacaagaacagcattggaaaaatccgcccccatgatttaattacctcccactgggtccctcccacaacacacgggaattatgggagctgcaattcaagatgaaattcgggtggggacacagccaaactatatcacctatgtagtggcaaatctttttttttgtttggttttgttttaataattggatatttcttttatatgaggctgtaacaacactttttgcttcatcttctctgtgtaaataacttaagctttttaatggatacagctaaaaatttggccttgttaaaggaggaaaaaaataggctgaatagtgggaagtgagcagaactgtgtttgcttttaggttaaaaaaagaaatgatttttctctgtacaacagagaaacatggcccagaaagtggaatggcatacagctgtttctttgtagttcttcagtcttcaagcatgggcttttgcttgtatcaaaatataagtgggttatgatgacctcctagaatccaagagaataaagcttgaaattggagtaactgatgttccccaaaccccagagtgagaatgtgcttttatttagcattttctcttcagcaaaatctgaagagtgcttgttacagagagcaaaacttttacttgatcttttgtcagaaagttaaagaattaaaaaaaggctgttttagatattggctttaaaactgttgttttatgttgttatgtcaagggtgatgccacacactgttgacatcaaatccaccaaaatctcacttaaaaacaatttagggccaggtgtggtggctcttgcgtgtaatcccagcattttgggaggctgaggcaggaggattgcttgatcccaggagtttaagac

SEQ ID NO: 130364 - DNA, 1054 bp, Homo sapiens
ctttctgctgttgaagagtttgaaattcttagttcttttcaaccagttctatgtggaaagaaaggtattttatttgacagtgatactaacattgaaggagtgtttcctagggcctggctcccgccaagcatctatgggcagcaaatgccctgtttgtccctcacatcagccctgggcagatgtattttcccttttcctgttttactgatgagggagcttaaaatttagggagattaaggacctccccaagatcatagagtttatcaccaatattttactgactctccataatatagagagctcttatcttaaatgaattggttacagatgtaaatttgccaaaatggaggtgatttatttaataataccaagtctcaaatgttggaggttttaactttgaattattgacttaacctctagtagaatgttatgatgccagtgtagccaaaaaagaaaagagaaaaagtcttgcttttgttgattttaaaagtgcctgggacctaggaggggagagggcaatgatgagatgtggaaagtgctggaagggaagcattctgcttacccctgtccagccttcttgagggatcattgctccctttgaggaaatagtttttccttccaaggcaatatactctgcttattccaagggaagccaatggacagctcaccgtgcgggccccgtgtcttggaagcacctgtggtgccattaacttccttcagttcctggagcattgcagtcaaagcagctgtacttaatgtagttcgtattttcctgcacttgaagtaattctttatcattttttgcataagttatacataaccttagtggagaaacctgtgaaagcatagaagtaagacatttctttgtaataaaatcctagtaacctcagcactctcctcccacatttgttagtgcctaagagtcttcttttatttaatatacatataaattcagggtcaaatatgctatcagaaacaattctaatgaaggtaaaaactaattttattcacaaatgtttttgtgtaccctctctttctcccctccccagcacac

SEQ ID NO: 130365 - DNA, 1045 bp, Homo sapiens
tgtttgcatctccctcacccccattatccaccactctggcagtggtagataatgctgaaagatttgggttccatggatgggggtggggggtggagttgaggagaattgggttggggttgaagaggagtggggtggggaggaggagaatgggagggctggtacaatggattgcaggcctgtgggaatgggggaatggtaaagggaaggcaaccggaaagggaaactgctctttggagaagtcatgggtgttttaaagggaaatttggattaagtgatgggaatttgcttggctattcccaagcaaatattcccaagcaaatagactatagatattaaatttgaatgtcgtttttagttcctcagtagagaggatgagtagtttggcatttgtgtgtgtttgtaaaatgagagcagaaactagaggcatgggagaataactggatttgctatgcctgtggatgccactggttttagttaagatgcttttaatgcaaaatgtattttaatagtgatatcgtagagtttgaccttcaagaagctcaagtctgtaagcaataattcactttaatgtgtaagagccttgcagagaataagaacatattaaatatttgcagaatgaaagtattatactttccctgggtggtatgatagccagagaagcagtttagtctagaggtgacatttgggtgaaattgtagtaatgctgtgattttagaattttaaccagtgatttctaagggccaacctgaagcttgttttcatcgtggagtgccttggctatgggactgatttgtgcagcttctagatttgttaactattctcgctcgggtttttttgagaaatgattttcattccagaacagcagttcctcgacctgagagtcggtcagtgcttttcttcaggtcattgttgagggggaaacctatcggccaagcctgcctctcctggtgactttatagtgctgtgactttatagtgactttacactgctgattgtgtcagggattcaatgaaaatcctgactgatggtaaagagggcatggcag

SEQ ID NO: 130366 - DNA, 1097 bp, Homo sapiens
ctacattttctaatcagtttatagggctaggaacatctcatactttttaaagaaatgttttctttccaaataattgaaacaaaattggaatcggaagtaacagagcttcagctttgcattacaattaagttttccagctggggttttactgggtcatttttagtaatacaactactgtggttaccagcaacaacatttattgttttctgtatgtcaggttctgtctaaatgcttttcatgttttatttttgaaaaatttcagaacataccctatgagcagatgctaacagtatccctacgttacaaatgaaacagggcatgaagggacagagtaataactttttcaggggcacacagcttggcgcagacaggtctgggattttgatctgtgatgtctggctagagagtacgtgtccttacccagcctatacctatactacataaaagttgcagacaatcttccttttccttgcaaaggtgttgttcaaaagcacagtacagctgtggtaggagccatggaaaggagcaccaagcagtgtatctataccagagtctggccagtgtgtctgatcttatgcatcagaattgattgtaaattagttcagaatactgaacctgaagtcatatcgaggttcaaaatttggcttcatcattttctggttgtgagacattggataagtcactaaacttctctaaggctgatatctcacatatgcatgaaaattaggtacaaatctgttactagtactggtgctcaatagatactgatttttgaaactgaatattagatacttctgtaaaatgctaactcagtggttcccagtttaaacgaaacattttatttctttagagacaagtgtgatattggacatagtgctcaataagtacttcataaacacattttcgatgcggttctattgaagttagttatttacttttttttttttttttttttttttttttgagacggagtctcgctctgtcgcccaggctggagtgcagtggcgggatctcggctcactgcaagctccgcctcccgggttcacgccattctcctgcctcagcctcccaagtagctgggactacaggcgcccgcc

SEQ ID NO: 130367 - DNA, 1222 bp, Homo sapiens
gaacatcaaatgatttaaaatacgttaaattgcatcatgcctttcaagagtttccaagcattaagctcagcgcagcacatttactgtgtgtggtatttcctactttgatagagcagtgttgctaactagagcatacattgtgtagaaaaccctcctgactaccttttatggagctgaataaatatgtatacttgagtgctctcatgttagtcataacctttagtttagcactgttatatagaagtgacagtcacgtagcccactacacattatactagtttgaatttaaacaaagcaaaacaactttataattttaaggggaagaggaatggttcctgaggccaaaaaactagagaggaaaggcttcaaaaaaagaataacacaataatatgtcactatcattttaacattgtaattgtgccttagaaataaataacagaaatgtggggtatcatttatttaaaaataaagcaaatgtagagaataatggataataattttgagggtctactcccaagtctctgggtgtgacccaccccatccaggctgttaatttatttggtcaacagtttcgtgatttccatatggtgctgatgtctttgttagctcttcttcacttcctgcatttatttttatgtggcaggctgcctagtccctaggggaatagctgagtggtaggaggggttgtgatcttttagcaagatttcaaaacagaataatgtatgcatgtaataaaaacaaatacgctcactcacagtgcaaaaccaaaaagaacacccaaatccctggaacttctgtgctactaagtcttttgttgtaggctaagattattttccttttggggttaattatttctgccttaattattgactgttgtgaaatctctcttctgagacattcccaaattttatttaaactagtgggtaccagctgtactgaaaccataattttagccatgtatttttattagaaaaatgtttccaggggattaaggaattttaatatttagtggaagttttaaaaaagaatgtaaaaatgccttttggaacctaagaatagttgtctattttagaaaaatcagaaatattgatggagaaaaaagaaaattacccataatcctgtgcgagaatgagaaatcatagttagcatattaatttatacctgttcatgtatctatgctttaaacaaatcacaattttattattattttttttaacagtgt

SEQ ID NO: 130368 - DNA, 1173 bp, Homo sapiens
ggttcaagtgattctcctgcctcagcctcccaagtagctgggattacaggtgtgcgccaccacagcccggctaattttgtatttttagtagagacagaggtttctccatgttgaccaggctggtctccaagtcctgacctcaggtgatccacccgcctcagcctcccaaagtgctgggattacaggtgtgagccactgggccaggcctgtactttactttcatttacttgtaagatagactctttggagtctttcagctctttcctcgctccccttcagattaatttcagacttaacacaagtgcttacaaacattacatacaatatgctttatatgtgttacctatgtgtatatatatattatacattacctgtataacgtatatatacacatacatattattatctaaattttaagcttcttgaggttagaaacatttcatctttggttgtcctgagtgggataacatgatgacttgtacatagtagacatgcaaatgtttgagttagaaagcttgtcacatgtcttgtatatattgttagccggcttaggggccaccatgtaagtcagcattatgtctgtctggctttcaatgggggcgacgcaggacgggggagacatgacgacaaacgtgcccatgtgtatttgtatactaatctgttacacactgtcgtttgacataatgatgtttttagaataactatgtttggtacttgtcaaagtaaattaaacggctgtgttttacttacgtgagtggagtaactagttttagtagtgtttgtgttctagcttgggtggtaagaatcaacagtcattggtagcactgcagtattccaacttcttgtgtagtttttataggactagtttaagtgtctaattctaagacatatttttttcaaatctttatcttgtaagatgagtcttttcgtgtctataattttcccatatgttctttgggtgaggtggaggactctgctccgaatgaaagaagaggcactgccttgggagggtcagttcatttactccaaagctttgctgtgttagaacaacgtggccaaggctgggtgcggtggctcacacctgtaatcccagcactttgggaagctgaggcaggcagatcacttgaggccaggagtttgacccctgtccaacaaggtggaaccctgtctcta

SEQ ID NO: 130369 - DNA, 1035 bp, Homo sapiens
gcggagcgcacaggtcgaccgggtcaggtggttgggtgacgccccaggaaagcgctccaggccgagggcgggcggcgccgccgcgcccgacgcctctgggggtggggacttcgcgggagtcgccggcggaggcgaggaggagctctgcgcggcgcggcgggcgatccgagccgggacgggctgcaggcgggggtgctgcagaggacacgaggcggcgggctggagacatggaccgcggcgagcaaggtgagggcgcggacccagcgggcttgggctcgggcttggactcgggcttggactcgggctttggctcggcgcggggctgagcgcggcccggcggctcgagcaggtgccgagcctcctgggccggcgccgcaagttgcatctcccggatccggatctggcatcctggggccctggaaggagcggctctggcgggggcagatgggactgcatgtgtgagtgtgagtgtgcgtgtgtgggggagagggagagaaggttctgggaggtggcgaaggggctagcgtcaggggctggcggccgtgatgcgctttgggtggaaagccgcgtgaagggagcacggcgcagccagctcctgtaagtgactggaaccaggaacagaggacagtgagtcgctctcgtccctccaggtgggaaacccctctctccctcataaattaagactttctgccttcttctaagttcaggtggttaggatttttggtggcgtatgacccatggggggtttgggaggcagatatttatcatactagaaacccccagattgtggagtggtgtctgtgggtttgagggaagagagcttttcgtaggaagggtgaaatcccacaacacaaaaccttcagtctaatttaccatagcgttgggtgcacttgcttctgaaaacagctcaagtgaaattacccccaaatagagcaatagtaggccatggttttcagatttaaatagtttcatcctagagatctctgctgatcataagcctgtgactgtacgcagatgtgtgtggcacgcttttaa

SEQ ID NO: 130370 - DNA, 1030 bp, Homo sapiens
ctacagcattattcaagagaagttttcatggaaatttatgaacatctattgaggatcattagtctagcttggtaagatcagaaaaaaattcctgaaactggagaggagaggatgaccacaggaaaaaagtgggagtgttctaggagaagtgaagagtacagagaccataaaaatcacagagacataaacacatgagtgcaaagtgaaatcatcttggaattaacatttggggagtgacagatgatattggataaacggggccaaatgatggagaaaaagtaagtggtgggaacccattgaaagattttaagcaaagaagtgacatgattagactgctttttagatagaaaggttcccgccatcatataagccagagaacagaattgaagactagagagacaggggtatcagttacgatgttattgcaatagaacaggaagagatgaaagcttaaagtccagcaggcatttagagaatagtctggattggagatatttagatatatatttgggaattatcagtttataagaggttaagtaaaatcagagtaagtaaagtgaactatggagaccatgcaacatgagaagagatagagaacttagaattttgtgatggccaggtgcagtggctcatgcctgtagtcctagcactttgggaggctgaggcaggcagatcacttgagcccaggagttcgagaccagcctggccaacatggtgaaacctcatctctactaaaaatacaaaaattagccaggcatggtggcacatgcctgtaatcccagatacttggaaggctgaggtaagagaattgcttaaacctgggaggcggaggttgcagggagttgagattgcgtcactgcactctagcctgggcaacagagcaagactctgtctcaaaaaaaaagaaaaagaaaaagaaaaagaattccatgagacagcatcatttgaggagcaggtacaagaaggggatcctgaggagatctcacatctgataatcctcattttcaaaagttcctttttatatatccat

SEQ ID NO: 130371 - DNA, 1111 bp, Homo sapiens
aaaaaaaacctcaaaaccattttcctgggtgaagacatcgttccagttgagaggtgcgggaagcttaggcgtgggggtttagaaagcctgggaacaagttttataaaagttctgtatgtgttgtggggggaaggggatggaatgacaattgtcgtggcgctggattttcttttttatgactcatttcttatcagattgaatcaaaaagaaagtgaggttgaaggttttaacctaaaaggctgactttgcggtaaaaaaattttattagctgtgattttagagaagctggtctatgctcacagacgtttagtgtgctggtcgaagtcaaatcgggcaactctttgaagaatggattaaacagtttacctttaaggctacccctttcaggaaaacgtccagccgaaaaaattctttatatgaaatcaaaataatgtcaagtatgagagcagtatgtaaatgtagagaatgctatttggaattccttgctcttgtgaataattttactaaattaatctctgttgaactttcttactacggcttggttttggtaaattattgtagtttttacttgtttacttttactcagatttttgtgctgagatttctttttgtactgttccttttcagaaagatttttaaatgcagtttccaataagtactttaagcttagcattagaaatgtttaatgtgtagttatttgtatcaagtagtggatttggattggtagggaatttatttaccaaacaccgtgaaagtgcttacaaaacaagtaagctgtattttagttcttagtccttgttttaacatttccagtctaaagatagtaagccttactattttgataatctgtgttcaagccaaacagatgttgatcagtcctcctttttgactttaaggcaacctgtggtggtggatggaattcattctttcgtattggttagccagtcgttgattttataaagttagctcttagtattctgtttattggaatgattctgccgttcagcacacttaccctggggttaattaggcgcaccagtaaccccacagacacagcacccatgtttctcagaagttagggctttaactttaaagcacagggtgatccccc

SEQ ID NO: 130372 - DNA, 1044 bp, Homo sapiens
gtggtttcttttttttttttttttgaagggcatatttaatagctgctgcaaacatatggaatagtgctttaatcagtggtgaacaagaaattgctgttgttggttataaaaacaagggacattaatgttcttgttcttgtaccatagtaatgagaaaaaaaaatagtggttgaatggtgtttaatttgtacagtttgtgtcaaagtagaatgggcagatattttggtggataggcttttgtcttagttataaaaattaggacatttggtatgataaaggcagagaatcttaacaattggcactggcccagaaaattcagggtgcagtgaccatagcgtgttatgactgctacagtaggcatagccacctcctgaagtgttttcaactgcttgatatacggactttaggcagttcttgacttgtacatgctaattcactgcttccacaaacagttcatagatatatgctgccagatatttagtgttgaaaacttttgcttcttccaaatattcatacaatattcatgcttttactataatatatagtagattgaacactgaaccaaatgagcttgggttcaggtacagcttgtgtaacaaagcttttagtgttgggcctgtatcaaagcaagattcttcccccttatttgtaatttctatagagagcataggcaaattaataaaatttactcagtctcaaaagggaaaccaagtaaacagaatgatgcttttgtggaaagttacactgtccaagtaattgttacaggtgtttttagtatcattctttacattttcacacaagtcctaaattgttcattcctctttgctacatgatacgaaatttcacaacatactggttttttttttcttttaaccaaatatttgcagtaatccaatacaacatactggtttaatacaagagcttaggttaaataagtctcattattaccttatttcctttctccagttccccaaaaacaaaaataagggtattactcatgaatggacttgttttgattcctctatccgtgacttaacagttttt

SEQ ID NO: 130373 - DNA, 1657 bp, Homo sapiens
gtttgattttaatgtttgccaagacttaaaatttacctttttattaatggtagatagggtgatatgcctagcataaaatataacttggatattttaagttcaatcgggggagactgttgcttttctatagagataaagcaaacatttaattcctataagagaaagtttcttttcttaagaaaataattgctctttttaattttaattttaagaaattctcaattcatgttcttagcttatatttgaaacatataacatgatgaatgttatttttaaaatgaaaccctgctgatcttcagtcagatgtgtttgatttttttcttttttaataatagcagtgggttgcaccaccactgttcactccatttcttgattactcacaaattaatatatttgattatcgctttttaaaaacttgataattgttttccttggtttgggagtttttaaaaaagtcaataaagtttaatattaatgttttttatccaattacaggagtcagaaataccatcagaggaggggtactgtgactttaatagtaggccaaatgagaactcttattgctatcaacttctgcgacaactaaatgaacagagaaagaaaggtattctttgtgatgtcagcattgtggtaagcggaaaaatcttcaaagctcataagaacatcctggttgcaggcagccgtttctttaagactttatattgcttttcaaacaaagaaagccctaaccaaaacaatactacccacttagatattgctgcagttcaaggtttttcagtcatcttggacttcttgtattctggtaacctggtgctcacaagccaaaatgccattgaagttatgaccgtggccagctatcttcaaatgagtgaagttgttcaaacttgccgaaatttcattaaagatgccttaaatataagcattaaatcagaagctccagagtctgtagttgtggactataataatagaaaaccagttaatagagatggtctgtcttcatcacgggatcaaaaaattgccagtttttgggcaacacggaatcttaccaatttggcaagtaatgtaaagattgaaaatgatggttgtaatgtcgacgagggccaaatagaaaactaccaaatgaatgacagtagttgggtccaggatggatctcctgaaatggctgaaaatgaatctgaaggtcaaacaaaagtgtttatttggaataatatgggctcccagggaattcaagagactggcaaaacaaggaggaaaaaccaaactacaaaaagatttatttataatattccacctaataatgaaacgaatttagaagattgctcagtaatgcagccacctgttgcctatccagaagaaaatacactactcatcaaggaagaaccaggtaaatattatctatacaaggatacttccttgttcatcctaattctagttggatataatcttgaagtatatttttaattgaattattttagttataaagtaatactaaagttgtttacaaaagaagggggaacgtcattcaaatgcataacatatttggtatattttctttgtcttttttcaacacatatatatgtgggtttatcaaaagatgtattaatagccaggtattgcatatattgtcaaggaacgtggactctgctgcatgtacggg

SEQ ID NO: 130374 - DNA, 1002 bp, Homo sapiens
gttcttctgttattttttgtttatttatttttttgagtcggagtctcactctatagcccaggctggagtctcactgcaaactccgcctcccaggttcaaacgattctcctgcctcagcctcctgagtagctgggactgcaggtgcgtgccaccacacccagctaattttgtatttttagtagagatggggtttcaccatgttgtccaggctggtatggaacccctgacctcaggtgatctgcttgcctcggcctcccaaagtgctgggattacagacatgagccaccacacctggcctagagcaggtactgttctgttctcaccatagaagctattttgtttgtccactgtcacctgattttcattcacctttgcattcattgcaaagcctctgaggcctttctcttcaatatatttctctccaaaagttccgtaggaatcttagagaatcacatttacagtgggaatttttttaaaacgagaagaccattgttaagtctttagtttaatctggctgtgcatatctttatttgaagaagctcagtgggtttgaggtttcctatgcatgcctgaggcttgtccaccactgtcatacattatttaatgcttgtttttttcacttcaaagcactgtaactgttcagtgtctgatttatacgatggtggtcatctgaggatggagtattttctgttaaaggaatcactgtttttagttgccagagggcaaaatgccatagtaatcctgtgaaatgttcctctggctttttagatttgggttagctttcagtgataggaattttgtgtatgtatgtgtgtgtgtgtgtgtgaaatttttactgtgtgaaaaatcaagtgtgtatatataacgaatactatatatctttttccttgtactttatatcaagttttaacaataaaatccctgagacaatttagttaaatgaagtattaagggtagatagactccttagctagcactttgttttgtcttaatgtagaagac

SEQ ID NO: 130375 - DNA, 1053 bp, Homo sapiens
agagacagagtctccctgtgtcaccaaggctggagtgcagttgcatgattttggctcactgaaacctccgcctcccagattcaagcgttctcctgcctcagcttcccaggtagctgggactactggcgtgcaccactgcacccagctaatttttgtattttgtatttttagtagagggtttcactatatgttggccaggctggtctcaaaaactcctgaccacaagtgatctgcccactttggcctcccaaagtgctgggaatacaggcgtgagccactgcgctctgcctggaatagtataatttaaacctaacctaattcctctaatctacctgataacccttcaaatgttagacgtttaaagagtcctgtttttgtaggctatgtgctcttctgcccatcttgtgatgaatacacacaatttactctttccaggcaagttctgaccaatatagaacatagcctgtgtttaccaacgttaaggccttcccaaggtcattcagctagtaagagtagaaagaggcaggttgcatatttaggactatgctgcatgaaaaccttgaaattaactactaaagtagtagattcctatcttttttaaaaaattagttccttttaactttaaaatatttttatgatccccttcatcattagttatgctttaatttccatttattgagaaaacagttgtccatgaaataaatgcttttaaataaatttgaagttctatagcaaacatctgaaaagtcttagtgaattgttcaatctgcaaacaatgcttggcatgtttggatttggcgggggtctcttctagttactgtgtcttccctcaggtcttcagcacagagtttgtaagatacagttctaataacgctgtcttgtataatgttgaagcttttgtttgggtgccttttaaagattgagataagaaggtgtacccatagctgcagggtttttattcagatggtatttttttatcttgaaattaacatatttgttgtttgactcactacagagtcatatttgttgtttgacttcacttcagatcatttc

SEQ ID NO: 130376 - DNA, 3990 bp, Homo sapiens
cattgtagctatgtagccaaatacagacgaacactaaaaaggcacttgctcattcacacaggagtgagatcatttagctgtgatatttgtggaaaactgtttactcgaagagaacatgtaaaaagacattccctggtaagtaactttaaatacagctgatctttgagataaactatatttatgtcagtgaagtttaaagggatttaaacagttaattgtgaatttaaggaagattgtctcctaaattgctttaaacagtttgactttatgaactgatagtgagctttttacagagaaactggtgtattcactcactattaaatgtgtggtttaatttgagtggttcaaatgcattctattatatataatatccttatattggattttttccccctccaattaggtgcataaaaaggataaaaaatacaaatgtatggtgtgtaagaagatcttcatgttagcagccagtgttggaataagacatggatctcgacgttatggtgtttgtgtagactgtgcagataaatcacagccaggagggcaagaaggtgtagatcagggacaggatacagaattccctcgggatgaagaatacgaggagaatgaagtaggagaagctgatgaagagctagttgatgatggagaagatcagaatgatccctctcgatgggatgaatcaggagaagtttgtatgtctctagatgattaactgacctactatactcctcaaggatgctgcatttggacctaatatgaatcgacaatttggattgttgaacttgaaggcttgcaaaatatggtacatgctggatagtagttatgttgctgtgaaaactgtagggtcaaagccttatagcaaaaaaaatttttttttatatttgcacaggactatacagcaaacaaccatgtggttggattacatggagtccccacatactcagtcagttatcaaagtaaaatattttttatttataggatatacagtaactatttgggtcctatgaaaatagtccttaaagagcttacattcatgtgctactttaacatgaatggagaaaatccgtttatggaagtacagtgacaattgacccaatcactctgtccatcaaaccactcaggctagtttgtactagtagagttttgtttctatttttatttttattaattttattttttttaatacagattttcagtgaggggctttttcaaccccattggttctattttcttgtatttttccatttaatttgcttcataacttaaaccaagtctcttctagtcttaggtattatttctcgattttgtgctgatgggcatgtttataagaactggagaggtaatttattggaatgaactaactgacttcctccattcccctcttcctttttgacatgaattttactacttcacaaatgaagaatgatgttatgaagttaccgtggcgaagttgacaaataccactaaaatgattatgatttagaagtaactttcttctgctgctctaatctgataaatggttactatatgatattttctgacatggtatttggttttgggtatctgttactttggcactattcttgtttgcctctttatttttgccagtgtactatacctcagtcctatttgaaagacctaattgaaagaaaaatcatagaaataagtaaaatgatttgttttataatttatccaccatgtccagtttggttagcttgttatgcaatataagtgaaatatcaggtttttacccgtgtcccttttatcatgaaaattaacacaaaatgtgcattctcttttgtttcatacttagcgggatattgattgttttgaaattatgatcaatacttaatttatttttttctgtccttgaagtcactacaccttgatacagtctttctagtagtcaccatgattcaacagtctcaaaaatcttacaaataaaattctgagaagctttattattctataaattcttcagggtacaaagggtgacatattgaggtgaaattgtcagatttacttagcctggtgacatgaattagctgattgtggaactctcagcagcatttcacgtattgttaacatgtatggcatttattagcatattgtatattatataagattgagggatgtcatattttcagctttcttttaaataaaaattgagtatattttcctattttatatcaggtaactaaattatgctagttatgtggaaaaaattgcaaagatgctttgacagatataatccctttggtgctccatctgatcaaagttgaaaagttgatgttttttaagagacaagctttatcattgtctctgatttcagtagaataatggtttattgttagacaatgatgtttctgcttggataaatcaaagataaattacagttacatggttagatgcatcttttgtcatctatattgtagtttctacataactgtaaacctgacagataagaatagtttcggtttgatttttgtttaaaacagatgagtacttcttaatgttctagacaaatgagtaaaatgtatttctggtagaaattagttgggcaaagatactatgaatgaaaaagtattttaaacgtaaaatgttctttgtgaatatgtaagtatagtataaagatttctttcatcccatttatccccttcctttaaataaactagtttacaattggtagatctgtctatatataaatatatattaaagaacaaagatatatatctaaaaatcacctaaatctgctttattagactacagttcacttattgcatagaaactggacttggctttacattcttaatgtacttttacttttcctcaagatatgaacttactctcttgaagctgaattttcttttactacttaaatcatttatgtatatctggtaaattatgaccaaatttttgttagattgcatacagtaaattgaaatacacacttggtacactacgggattgttgtgcttttgtttggttttagttggaaataaggtttgatgtagatggcttgttactgttaatttaaaatattctataattgtccattactttatgttgtgttgtgacagatttggctatatttttagtcaattgaaatatgatactttaaaagtttgtttttaggtaatccaaaggaaaagtgtttatactcttgaatatattagcctcagcctatataaaaatttctttgaagtaaacattttaccggaaacagaattgacagatttttctacttgctgactgcctaacttattttgtttcatgatctcgagggactgccttttcccatctagatcttttaaaaaaatagttttagtactaaggtatactactggacatttctatttttttaagtgtattctttttctgacttacagtaaaatttcaggaagttgatagatactaagaacttatgattggtctcagaggtaacaatgaaatactcataattttgtctgtggaactctggcagaattatgttacacatttggcgaagttgtctcttgtaatttatattttaaatgaaaaagtattttagagcttttaatgaaggggaagagtataaactttctttcatattcactctgtagttacagaccgtctcataaatcaagattgtgcattattagagttctcagagacagatacttccatatggacccctgttcatttttcttatttactagatattttgctaaatttagcacactagcaattaagagtttaaaaaagaagaaacgttataggaaagggaaactgaacagtaatgagtagctttgaaattggggaaaacacactagctgggttaggtacagctatcctaatggagaagagtgagctaaatgcgttaattcatgtaaagtgcttagaacactggtacataataggtgcataacacatcttaaagttgtttaataatagataagaaccaagaggaaaaagaaataagaaaagatgggggaaaggaaggagaaaatagga

SEQ ID NO: 130377 - DNA, 1192 bp, Homo sapiens
ctgtgacagagctcgaatttgaccacgtctgattctgaagcccatactctttcagggaggctctattgctgcctcattaaacaactcttgtagaatttcagctcttaatggagtctatggattatatttttcctataagacagctgtgtttagaattttgagtgtctttcctccccccaataaatttccttactactctttcttcataaagcagttgttttgtcactttgactatattaagacacatcagtgtagcacatgctcttaactggctgtggcattttaattttataaaagaatggtttttatctgaagaactagatagaaaccccagtttttgtgccgttcagtcacccagatccttaaacttaactatggtacataatatccacacttagaactaacaggtgtttagtcactttaggacttaaaatggaaagtttttttttttttcctgctgtatctctgctttcaactgaagttaaagaattctagatagtttaaaatgtgttagggataagcacacttcaaaagatgttttctagccctaaattttatgacattgggtacttaaatttggagtacactagctattgagaacaatattttgggttgaggagagatggttgaggccattatttagtgggagcattggcattttgaacactgtaaacaaaagaacacttccgcctgctgtttgtaaaagctctttgggaagatcttttacgaagaccaactttttaaaatgtaaattacctacctaatataagtgtcctaagacatgtatgtaaacttccggaactgttttgtctgtgtatttagaaaatacacaagaatctttattcaaacctaaaaatataaacttgtgagcactaaactgcttctggctttgtgaattttattgactgacatttaattcagatttctttgcaagtgtactaatttagactaattggggtaaggggaacaccttaatgaactttgacttatgtataattcagatatctttgtacttaaggcttacaagtttgaattatggaatactataagggttttttgtttatttgtatgtttttatatgaaagtacataaatgacagactacctccaagtaatcctgctttaattaatagcagtgatttgtaatcagtgtatcttttaagattctctacaggttttagaaaatattaaaa

SEQ ID NO: 130378 - DNA, 1046 bp, Homo sapiens
gtcaccatcccctactgtatagaccagttttaatgataaagctatcctctgactttccaccgctcttaacttcatgtcagaaccggcagtggttttaggccaatccccatctctgcagctggtaggaagttattccaagtgcccacagatttattcctttatttatcatgtccccagacaggaggctgctgaaccatgattctgagctcacgtgtgtcagaaggatgccaaaaatggtgttcatatgaagcagaacctcttagactttcctgtaactcaactttaggaagaaaactgcatttcagggtttggtggcggtgcattttacagtctttttgttttaaggtgtgataatactccaatgattgtgtgaaatatcatctctcttaaaacaatcatgtattatataatgtctgtctgtgaaacaaattattttttaattcattaaaattaacacaaaatatacccacgtaaacctaatgaactgccattttgttctggagggacaatataagctaaaaattaaacttcacaggctcatttattgttacacatgaatggagcctgggcatagtgactcatgcctataatcctagtgctttggcagcccaaggcaggaggttcacttgagcctaggtgttcaagaccaggctacacaacacagggagaccccatctctacagaagaaaattagccaggcatagtagcacacacctgtagtcctagctactcaggaggctgagacaagaaggttgtttcagcccgggagtttgagtctgcagtgagccaggatcctagatgcagagtgagatcctgtctctaaaataataaaaaaaaatttaaaaattacttgagcactcaccaagcactttgctgggcctggagatatcttgatgaatacagtgccatctcctccttggaactgcttataggttaatacttagatgttcttagtaatgtactaatgccaagattagtccatttcctccttacacagttactcagccatgcttgagtttgcctgctgctccctacttcataatttc

SEQ ID NO: 130379 - DNA, 1034 bp, Homo sapiens
agaaaaaaatattcttcaaggggtatcagttatagtttcaaagaacaaaatatgaaaatattgtccagcaaagcaaatcattgatcttttttcaaaattacttatattttggaaagtctatatagaatatccacaaatttcttcagccctcttgttgatttcatattttcatgaaactttttcccctaataatttgtcttcgctctttaatcagtgctttactacattactcagcctgaaaaaatatcttttccttcatctgacaatgtggaaataaagaactccatttctgtcattctggttctcttcagtgtccattgagaaagtttctcaactgtttgtaaaatacggggggaaaaaaacacgcatttctaaacctggtacttaaggttatactggattgtttgctacctaattagaagttattggggaaggggcattgtgtctttttatatgatttttagccaaatccagatgttctgatacacatttctgaatacctgtctgactgtaaatacagcctgtggaggttcaggttgataaacctttcacctgactgctccacagccatgctccttgccagcttctggcacattgtacatagatttgttgaatgtttaaatgatgttgtttttctaaatgctgttctctaaaacaattttttgaatttcttttgctttccattgttttggactttgtgtgttcgttttttaaaaaaaaaaatgtttcctaaatatttaacaccaggaaaaatatttttaaatacactggtgctaattgaaacagaaggaaattttcagatcgaagatgtacaatgttaaatgttcataccagttaaactgcactttcccaaggggacagctggcatctacttgaaatgggcatcaagagaccaccaaatgtttacagtttctgtggcccgtttaagtgtaaaatgcagaagtggctctgtccccccagagttaaggatttgctacactggtcctctggaagcatttaagtagaagaaaaggcttatagtcagaatcacttta

SEQ ID NO: 130380 - DNA, 1083 bp, Homo sapiens
agcatataattgttataatttcgtatttatggaaagagaaaaggacttcagtccactcatgttgttaagcacttgtccctcactccactggagcccccttcctatgttttgggcacagatggctgggaccgagaggaaagaggaagagcggctgccagagtgtgaatatacccctcagggatatacagcggagtttcatgataaactacccatactttcccaaaaaaggttgaggagcaatacataactttgcagattacaaacccttgttttactttttaaaccttttttccatactctgcttattggaaatcgatggctgtgatgtgaccaacacctgtgatgatagcaaagcccctcctttcacagtctcctgactgttcggggaacctccttggtcattggtagaaagctttagaaaagacttagctttttagggaagaactaaaaaatctccaaaacatactagtcccatgacttcgataactgaaaatgtcctgggtgtaaactaacccaggaatgtggatcatacatgttttttttaaaaaaaatccctgaatcaatattttcctacaacacaccctaaaattcctatttttgtaattaatggttggacagtgatcagccatttaaacataggctttctggaataaccagacactagaatagtttccaaagtgttttgcgtatcaaaatcctatatacttagaagaagaactcaggataagaaaaaatcgctaggtcccaaagggttcatgactatcatcagatgcaactgcgagtggcctacggtcattttttcaaatgagaagactggagagagagaacaacagtaatcacaaaacctctgttgcccttagtccatgacaatgtttaaggaaactttaaaaaattaagccatcttctgaattgttttctacaccaaatctaaaatattaaaatgaaattattaaatatttaaaatggggtatttagtggaaatgcaatcagtagaaaacattgctttttagtgcctgctaaacaagtaaaggagaaagaatgaagagaaaacagcagtccttcctgtgtgacactcgtgtggaa

SEQ ID NO: 130381 - DNA, 1049 bp, Homo sapiens
ttaaaatcaacattacccacctccaaggccaacccagagtagtcttgaacctgagtcagcctcagtattgcttgcaaggaagagggaaggggctcattaaaggcctggctcaaaccttagtcttccagactgactagggacgtaagaagacccagggacccaccatgttctcaaaccatctattcagtccaggcctttcagcatagacataaagagcccacccgttactcagtcatgttgccaagtgcaaactgatttatccccagatgaatccctttactgtagcagatccctaatccctaaatttcagccaatttggtagttaattataggagtttattagctaaatgtatgttctgagtaaaagttttgactctttggggaaaatttattttgctgctagcatacaacatttgctatgtatataaacttaagtcaatgccagaaattttaaaaccagctcaaatttataatctgtaatgatcaaatcaaaacatactgtaaactcagagttggaaacgcctggtaatatggttaagtcatgtttaaatatgaatgcaatttaaatgacattggcaatgcctgagatttctttcattgtgaatgattaaaaggcagtccaatatatgaatggatttcatcttacctttctcccgttaatttactaggtgtaacatcttgagtgtaaagtcattcacaggcagttgggttgtggagctagaaggagcctcaaaaaaaaactttttggccagactcctacatcatgaacagggtttttgatgaataatatttattattatgtttctaaagtaatacagtgttggagaatgaaacagtttagtcctttcctcttctgatggaaaagaatcatagcgccgttgccatgacaataacaggatgtagaaagacccatgaagaaagaaagaagaaagctatggttccgaaagcaggtaaccacagattttgaaaggaggcagagatggtgattaaactgtagtccttgttttttaaaatgttctttcatgttaggcaccaccacatagttaata

SEQ ID NO: 130382 - DNA, 1009 bp, Homo sapiens
gcaaagaggaacacaagaatggtggagaccaggttgaactgcagaacacatgccctctttgaaggggtgcccacactcagctctagacaatcagaaccatgcagaaatcaggcccagggctgctagatcttctgacgtggaagtatgatattacctgacacgtaagtgttgacaactaactcaaactcttggccaacactgtgcagaccaaagagaagctgtacacagacaggtgcagcctgcagcccccagtttcaactattgggaaaagtggatttcacattccacagttgtcaggtcaggttcatccatcagccccacaaactcacatgtcggcactatctgggcaactaaaataaaagaggggaaagagatcatttctccccagatatcattctcatggcagacttgaatatagatacgctgagttatccagctctctcactctgcctccttttggcatgcccaggctgtgccccgtaaagtgttgaatcactgttatcctaattttcttagtgttttctaccgtggccactgtgatgaggggctggcaaagagcagcctcgtgccttccgagaaggctgccaggagcctctgaagcttgaagcgagcacacattgcctccttgtgccaaagcccttggccagcctccccacactccttccctctccatccggcctcatgagtcttcgttaccaagtaaaattaccactgcttcacctctgatacagcagaagccttgcttcagaactggtaggcatttaggctatttcagagtgtccactaacctcaaaaggaggtttttccacatacaaaaccctagcatctttgaggggaaagcaaaatgagaataaattatgtcatgaaaaaaattagaagttgcttccttcatttagatggactaagttattttaaactctatcttacatcagagtcctgatggtgttgggatagtcactgaccctttcacgtatgtaataagatacgtctcgttcacacactatttcat

SEQ ID NO: 130383 - DNA, 2729 bp, Homo sapiens
gaggactgggcagactgctcccacagcaggctggcagtggaactggagccctggccaccgcagggagctcagaggccaatctacgcaaaaggcatgcaaaacaatggattctggtcccaaaatatttctaagtaaggcatgatgtagccttttgattttttttttatcctttgacaccccagccttcagaaaaggtttttcatctctctccaaagaagtcatttcatagtgactgacaggacattctccagagagcgacaaagcagagtggccagcaggcagtggtgttaagccttgggccttcccagcagatgtgtgctgcattggtgggtgggaggcagtgtgacagcctggagaaaacacacaggtagcaagggagtcaggggggaggtacaagagggctgtggacacctggctcttgctcatcttcttggtgctgatcagctggtggtcaccatccctaagtacctcccagggagctgccattttctcctctgggagcagctgcctgaagcaaggagagaatgacctgaagggaagtacctccggccaagagtgcagggctgctgtgcctagcctgagcgggccatctctagcagatatggacttctctccaccacactagctgaaaagttttctcccttggttggcaaaagccagtgtcaggaaaaaagctgtgggtttctgaccaagaatgtgtgcgcttagctgcaaagtgcctgtcagcagctccaggcaccaacaaggtgcccttttattagacaattcctgcccgaacataaccatattgcagatgaaaattttcaatagagaatgacacaattcttgacctttctaaaaacttttcaaagagatagtcacatgtgtatatgttgcaaaagatttttgaaactgaaatgtcctccattaaatctcaagagcactcgagttttaagtctgctgtttctggtgtcacactaagacacacttttgaaagcagccctgggttctgaattagttggcactgctgaatccatgttcccccttcatcagactccaaagtgcagcattcacttgcaaaggttgagagaaaagtggccagaattgtacatataacagagaataccttgagaatagtagcaaaatactgtaaataatattcatttcctcagggaaaaataaagggcatgcaaaaataggtctggagactcctgaaactaggaagaattttgttatcactaaagtcttttatagtcagaacaatttttttttcaaatgaacatggtatcatttcaagacaaatttatgtgaactgggcagtactgacatttgtgaggcataggggagtgccctgggaaaacggtttggagctgacctgtagcctaaggctaacatttgaaccacaggtgcaatgcctgggggtgggggagggggacggggtgggggtggtattcctagactcacgtaaggctttttctgaatgtaattgtgaatacaaagccttgctggtcctttttatcattacccaatggatgactgtttattagctatcagcagaattccgtaggcgaaagcaagccgtgaacgatgtacattttgctttaatagcatgttagcgaacaaacttccatggacttttgtggacaaggtgctgctttttctcatgaccctgtagaattgctatcgaccacatcttctgtagcactgacctgtgtgaactcagggaagaatttgtgcatacaaatgagtggaaacagagcaggattcatgaatatgaatgagaatgtgaatcattttggagaatgccctgggcacacgggtcaactggaaatttcatttctctaagaaagtagccctaccagcggcacggactgttcctgttcctcatacctgtggggattcctccatattggaactgtttcatgtatcttttttgcattgtaactagccaaacctgaagtcagtaaataaaatgagattagcactttttttaggtaccagttgtatcactgagtaatgcacaccaatagagcaagaaagtataaaatgtatttaagaccaactggtttgcttattatgactgactttgaaaaagcccatatccaatgatatacatgctttaaaaggtatatctatcgtaggaccaggaaccaaaatgggaattttacttctggtcctgttttgtaaatagttcctttttttgaagacaatctcatgttttataacttttgttgtgggtctgagaatcacaatggtaatatgtcttggcaaaacataacctttaaatacaaaaacaattataacttaattttccaaataaaacaagaaatacactgattaggcttctacagttctaagagacatgacactttggtaataagcgtcagtactctacttctcaagttaactggaaatattttacaagatgcagtgttttgtaatcacaaagaacgcagacattttgtgagaaatgaccttggttttatacattgtagcttattttttaaaatatagtattttaccaggcaggaagtattaatattataagtaattcttgctcaccaaacaaagggctatgtctcttttaagcaaatgttttgatgcatatctttttaattaaccctctgcagcaagggtagaaatacagatcagatggaatgggtattataggagaatcaagatagcaacagctactccttttaccattactagtgtgttttcaaagtatggaaaaagatgcctgaagagtc

SEQ ID NO: 130384 - DNA, 2850 bp, Homo sapiens
tagcaaattttaacagttgagtgtagtggctgtgaaaacaaccagcacatattagagtctgaacctagagagaagtcgctgtctcccaggctggagtgcagcgcgatcttggctcactgcaaactccacctcccgggttcaagtgattctcctgcctcagcctcctgagtagctgggattacaggtacatgcctggctaatttttgtgtgttttaagtagagacagagtttcaccatgttgacaggctggtctcaaactcctgacctctggtgatccgcccacctcagcctcccaaagtgctgggattacaggcatgagccaccatggccagccttttttttttttttttcctccctcactcttgcaagggatttttgagctctccatagaatgcccattgaattcctcccactaaactaaccttcctcgtctgtcttacaggaagcccaggggagagggcaaaaagtgtcggaaggtgtacgggatggagaaccgagacatgtggtgtaccgcctgccgctggaagaaggcctgccagaggttcctcgactgagagacccccaggcagaggggctcagggccctgagccgctcctgccctggcctgccactgcaggtgttggaaagagcttttcctactgaataaaacacagttgaagccaggaaaagccctttcaggaaccttggaggaataacagcaaaaacacagaaaaattgtttaagtcaccacctatgacaaaagaaagttgctcttactgagaacccagcttggagcagctataactagttttttttccttcaaaagaaaagtcaactttttttgctgtatgtctagacttaaaactgtggacttctgtagcaattgaaccaacaaagcccattttacctagaaaggaggcatattttgataagctttctgaattatgccattttcaagatttttttgacacttaaaaaacaagctacaggttattcagtagcatttgtacaaagatcaatacttacttttgttgtgaataatcttttccgtatcttccatttgacttcttggagcagtatatgtcaggatgtgttgcaagacagcgcagcactctgggcatcttttctatggctttttgtttgtttttcttttaagaatggccccacactgaaccatggtagagctattagtttgtagggccccagatggcataaactcgagaagggattgtccacggaaatcaccagcagacttcagcccgaagctgagttcaggaagtccagctgtcactgttgggaaacatctaggagtcttccttggatccataagaagctcttcccctaaaggcagcacagctaactctactctctacctgccacaactcagtcaagaattggcacctgtagccatctgggtaagcctcgatgcttctttcagggatgtgacacaaatggcaactcggagctatttgttactgcttgtctgtcaagattgtagccaggttaatgggtcattttccttctctccagactccaccactgactgatttcagaagaggtagagaactccaaactgtcccagcaggtttgctttagacaacagagcacagcccacatggccctacctgttcagaaagtcatgttagatcaacaaaccacttccattctgagtgcacttttataggttttatgctttagcatgtccgggagatgagttaattaacaatataaacattatgtgagtaaatggaaggtccaaactttaagtttttcttataaaaatattggagctattcatttaagaatttgctcaaaagggaacataacgccaaaaggaaaatgcatgtaggtataggaatttctcagtttagtagggccagggcttgcactatgttccatttattgggcttcgtaacttacttgcttgtttgtttgggggatagtggtgtggggagaggggagtcgtcaagccctataaataagctcattctctatctacccgactctcaattgccctgctaaagagttatttctcctatacctatgcaaagtaggaagagcaccttataggaggcactgtatagggacaggggacatgggatcagccataggaatgttaaatgaaattgcacagaggaaagtttaatatatgtctagagattatacatacacttttttaagcgtaaaaagaagacatctagtaatgacagatattctttttatatacaagcaaaagaaagtataaggaggttctacagtgcaacatccacaatctgtgcattcacatattatgggacttttattttttaaactctcatataaattttttaaaattactccttggaagagatcctggtttttttcttcatttatttttttctttaaaaacatttattttaagagaagagaaaaagagcttcatctaattttgcatcttgattaccaatcagtactagtcacagcaccagcaatactgtatgttttagactgacaaggtcagccaggaaatggcatttttttaaacgcagaaatgtgtttgtttcctctactctaacacgtcctttctcctcctggtgtcctgtcaccccccatgcagcaccactgatgcgagatgatgctctggcctggtccaggaagccctgagccatgggcagattgcccagtggccttgggcggccagagcttgtcacctgtttaaacaagttcaccatgtgtttaaatgacagggtacagtcctggaccagaggtttttctcttcagcaaagctccctggcccttgatcgttggactgttactaatagaaaaagattcaagtcatgaagtataaaatccatcccccatcccagaactttgaaacacaaggagggagag

SEQ ID NO: 130385 - DNA, 1103 bp, Homo sapiens
atatacgatatataaaacattccgtatatatgatatataaaacataccatagctgggttaagtaggtattccactaaaatcctatgtgagctttttttttttttttttcttgaaacagggtctcagtccatgacccaggcttagagtgcagtggtgccatcacggctcactgcagcctcaacctccctgggctcatcttccccacttcagcctcctgagtagctgggactacagaagcacaccatcacacctggctaatttttgtatttttagtagatacgggggtttcccatgttgcccaggctggtcttgaactcctgagctcaagcaatctgcccacctcagcctcccaaagtgctgggattacaggcttgagccactgcgcccagctgagagcttctaatttattctttcaccagagaattcccaattgtgctgattgtgtaacctgtttcagcaaagactttagactgattttagcagtcaagcttgccattcctatttaaagataaagtaagggtggggtggaattttcaaaggtttttgttttaccctagaaagacaagaaggctacaactaagaatgttctttttgttgctaaactctctggccatgctctaaaaaaaacaagcaggtgctgctgtcctcctcctcctccttctcctggtgggctagctctcataacagcccacccacacagatgcaggactgttgtacacccacggacagcatgccagcagctgtccctgaatgctccaggagtgccaggcaagccacgtagaatttaaaaacgtgaattcttaccctctaaattggtgtaatagggttttcagaccaaagctctaaaagttgtaagttataatgaatttgtattagtgatggcttcaattgtgtccaaactgaagaacagagaaatattcatgtgataaaatgcttttcaaaaaaaaaatacctttatccttgtactctaaaataaataccctgaggttgtcaaccctgtttagagttcacttttctcccacatctttgagacgtggtattgaagagggatacttttgtacacttcctagaaagtgagaaaaacccctttctgaaaaatccca

SEQ ID NO: 130386 - DNA, 1050 bp, Homo sapiens
ttcagaggttgaatgggggggtacaagtgcagttttgttacatggctgtgttgcacagtgataaagcctgggcttttagtgtaaccagcatccaaatagtgaacgtggtaccccttaagtcatttctcatccctcacctccctcccaccctccccgtttcgaagtctctaatgtctattatttcactttctgtgtccatgtatacacattatttagcttccacttaatatctgtttctttaggggtttcttgtctgcctgtaagttcccactataagttccatcagggcggagtctatattttattcactgtgttatcaggagaccctggaacagtgcctgaacatattagattctcaataaatcgttgttgaataattgattgaatgagtgaatgaattaatgaattgctttaagacatcaaggaagggttccctggaagtggacagttgaactgagtgctgcaggataaggaagagtttgcaaggcaaacaagagggaggaaaagcattccagacagaggggaaatgcatgtgcaagatttcaaggcaagaaaacagattggcttagtatgattgttttactctcttttgcattaggcgcgttggagactctgactacagtgatggagaagaggacttttactacactgagatcaagctcaacacagactcagtggcagacgggctgagcagcctggccccggtctcaccttcccagtccctggcttcacctcctactttccccatcccagattcaagccgaacagaaactccttgtgccaaaacggagactaagttgatgacgccgttgagccgctcagctcccaccaccctctacctcgtgcacactgaccatgcttaccaggtgacttgcaggggactgtgagagcaatcactttgaccttgaccaaaaccaggggccatctggcctatgagtaaaagacaactcagtggaaaaacagcatcacacacggcagcccggtagctttgatttttctccctttaaagcctaagatctcacacagatagggtcctatggtctagtctca

SEQ ID NO: 130387 - DNA, 1055 bp, Homo sapiens
ggatgcataatcataataatcctgtaatagctgctgttggttgaatggttattcctgtcagcattctgctaactgattcacttccatgatgtcatttaatcctcataataatgctgtgaaacaggtactgttattattcctattttataaataagagcactgagaactcaagaaataagcccaaaatcagtgctctcaatcatggcactggactgttttagaaaatattgccgcagcctgggcaacatggcaaaaccctgtctttaccaaaaatacaaaaaattagctaggcatggtggcatgtacctatggtcccaactacttgggaggctaacgtgggaggatctcttgagcccaggaggcggaggctgcagtgatccaagattgtgccgctgcactccagcctgggtgacagagtgggacccatctctgaaaaaaaaggaaaagaaaatactgtgacccttgttgaagaggtggaattttgtactggtggaggggatggtttctggagccagagtccctggattcgtatttcaactttgccagtagctggttcattgactggacactttttatggagctttctatgcgtctgtaaaatggagattaatattagtatctgtcttttaggattaaaggagataaacacttaagacagcacctggcacatagtaagtgctcagtgaatgttatccactgtttagacagccagaatggccctgtgactaccttcatgaacatgatctgaaatattccagcagagcccatttctcttgaaggatatgaggaaataactgaggtcaccaagatactcacaaacctagggatgcctacaatagtgtgctgagttatagtcaagaggctggggatgctgctacttttctaatgaaggaaaaaaatatgttgggatgacataaagaaaatgttgttagaaaatagtttccattctaatatcactctctcccctttacagaattccatgaaggtgatgttcaaatgcctctggaaaaactgtgggaaggtgctgagcactgcagcaggtatccagaaacaca

SEQ ID NO: 130388 - DNA, 1069 bp, Homo sapiens
agctcctcctgggcctgttgcgggtgttaaataaagtacacgtggaagctgctagcacaggaccaggcacagagtggttcccaatcaatggtggcctccctctgttccctttgctttacatgaagaagaccattctgttagacttgaggtctttgctgacgttggtgttctgcagaagtgctttccactggtgtgaattttcagctgttatccatgagatggtggacattccagctttgcaaacatctgttagctctgcgaggagaagctagggtagaagcacagatgggaccattcagatttggctgccgcaactctgccagaagctttgcttggtttggctttcttgggcaggcttggacccatgcagcaatctgggcgttgtttatttagctattttttcatgttctcctcctcccatggcttgcttttctttagtgtaacagcaactagtctgtttgtagacaaaggatttgtttcaactggatatagttaggggactttgaaaagtactgaactaccatttaaagagcctcatgctttgctgcaagaatgtctttggcctatgtagagacaaatcactttacaaaggtgtagacagggttaggggaaatcagtagggggtggtgcaggactccaggggctaacaaccttggaaggccattattaaccctaacccgtagagccttaagaggctctacaagggaggaatttctacaatccagaaggttaccagaactctggaaatatagctgttggagaggttacccaacagatagggtaacttttggaggagagatgtagccactgcccacctgtggccaggcagaaggagagagccaggaggaatcaataccttcctgctttccaatctctcctgcctcccagctgcctgccggtgcctctcattagccaaatccaaccagagatctatgaaccagaagccctgttaatgcagcctcctgggaccctgagcatggtgcagaaaaggcatggtgtagacctgacaggtcaaatacgacaggtcatcaagtcccttaatagatatgtaacttttcacatcaaagaa

SEQ ID NO: 130389 - DNA, 1014 bp, Homo sapiens
agaaagttcagaaagaaatggagagcagagataggaactccaggctgtctgccggagagcttacttcccacatgaagtatccgtcacccataaggaacctgcagccaaggtaggtgagagtgtgagaagggaaatgaaaggcttctctatcctagctctggaggtcagccagccaactttgtcaagcccaggtctagcagaatttttcctctgggatttcaagacagactggcagaacttccaagctcagagaaaaaccaggttgtgtgagccaggactcttgactttggggaggtgcaatttccgtcatgaccacaaggtgatgcagtgaccctaaatacagccattcggggagttcgtgggagaaaatgaattctatggaaggccaaagagttaaccatcaattccacaagaccccaagaaagtcaagaagcgctgatcagaaatgatttgtgtgccctttccatgccagatccctgattctgtcagattctggattctgtgcattccaaaattgtcatgccagctttaggacttacatgacttaagcaagtcacttggcctcttcagcatcagtttcctcatctgtaaaataaggaaaatggtggcaccatattgatgtggctgttgtcaggaatatacgagaggccctgtaaagagcaataaatgttagctgctaatactttgcctttcctcctcccccctcccccaccgccgtttggcaactgcctgaatggggaatttgagaagcataggtgtggagagaagggggtgcttgcctccaccctccaccctgacccacactgaccgtgccaatgccacagtggctcaggataactccagatccctcagccaccctgtgctcaattgggtgtgcattagcccccctgcaatgcactgggtgagtgcagcaaggacagtagcagaaattgggggcataaaaggaaatctgactcaggactctgcatttcagaacattggcagcatctcagaggcaatttctaaatttcagcc

SEQ ID NO: 130390 - DNA, 3174 bp, Homo sapiens
actgcaacctccgcctcccaagttcaagtgatcctcctgcctcagctcccccagtagctgggattacaggcacgcaccaccatgtccagctaatttttgtatttttagtagagacggggtttcgccatataggccaggctggcagaagacattctaactgggcagaaatctctccacattagcaaacatttcataatgctttccaccacaaatgggaaggtaatagccaatagcaatcttagagtaattattgccaataaattcttatcctatcccagctttgccagagagaatggaggttgtttacagcccagggactgcatgcactgaagaaataggtccaacctcttcctggtggcctgggcccatgagggatacttaccagtcatgtagcaagtcactttgcttcctgctgcctcagggtcctcatctataaaactgggataataatccttattctgaaggacagatgttgtgagaatgcttgagactgtgcgaataagctttgtaaaatgtaaaacactcacaaaatgtaaggcattactatttgttgtaataagcagaatggaaaggggctttagataactatccagaaattatttctcttagattcttaagtgttagactaacttcctataaatgtattctaagaataacagtcctataagaaccccccaccccccaactttttttctgaaacaggatctcgctctttcacccaggctagagtgcagtgacccagtcatagctcactgcagcctcaaacccctgggctcaagtaatcctccctcctcagcctccagagtagctgggactataggtgcatgccaccacgccgggctaatcatttcattttttctgtacagacagggtctcactatgtaacccaggctggcctcgaattcctggcctcaagcgatcctcctacctcagcctctcaaaatgctaggataagagaagtgagccactgccctcagctaagaaatccctttttaaaaaaatgttgaaatcggaggggttggggtgagagggaactctgtgaccaaaccattcaggagaatactgcaaatgatatttctttcttagaaatactgtagtcgataaacccagagctccccaaacttagtgaacaagaaaatcttttttttcatataatccccactatgatcccaaggaatttgtgttgcacaatacaaaaacacatcagaaaactcttagaaaaacctattatcatgaggttaaaataattaaatgtttataaactacaatgtggcttttgggagggggcgtataaatagaacaaaaacttacatacccagctgttgcagatgattgagagggctggggtggtttcactggtgtagaaccaaggctcccatttccccactgaaccatgcccgggcacgcaggggtcctggcactgactgtgtttgtgtgcatgcagagagcctcagcggatcctggaaggagggcggctgcgtgccttccagcaccagcagcagcggctactggagctggagcgcccccagcgaccagtccaacccgtccacgccgtcgccgccgctctcggctgacagcttcaagcccttccgcagccccgcgcagccagacgacggcatcgacgaggcggaggccagcaacctgctcttcgacgagcccattcccaggaaaagaaaggttggtggtcagccacgcggtcttctgcattcagtttcctgaaggtgctttctgtcccctctgaagggccggtgtgagcttaaccttggacctacaccccctttctgtggaaagaagcagcttacgttcctctttaatgttcttgaagtttgaatagaaattgttatggtgataatttaaaaatgacaaatactggtaagtttcctgaaggtatatacacacgtatcccatccatcctctggttataaattgctgacctgggacttaccagtatttgtaagttagaaaattggacctcaggcttgcttcggtatgaactcgctctcttcgtgggacttatttttttcatatgtaaaatataattaatatatttttctcttttctcaatcagccctgaagggttattgggaagaatattttgtatctcatttttatgcagtcatctgtgaaatatacataaaagctgagatataaacaaacttccattcttacatcctagagattatatattaactaaataaaaagtgaaaaagggccaggcacagtggctcacacctgtagtcccactgctttgggagacagaggcaggaagattgcttgagaccaggagttggagaccagcctgtgcaacatagcaagaccctgtctctacaaaaaaaaattaaataaaaaaaaaattagctcagtgtagtggcatgcacctgtagtctcatctactcaggaggctgaggtgggaggatcgctttagtccaagagttcaagactgcagtgagctatgatctggccactgcactccagtctgggcaacagagtgagaccctgctgctttaaacaaaacaaaaaggagtagaagaaaaaaaagacatctaattaattgatttagcaaattaattgattacacatttgtttaatcctcccagcagtcctatatggtaagttttgcatttccatcttgttatgaggaaactgaggatcagagagattgattgtacatttaactggcccctgtcaggcaggttagaaagggacagagccaccattcaaacccagatctgcctgagcctcaagttcatattcttttcattctctttaggtacatttcagttatgttcactcataatttttcgaaaacatttccatttcacagaataaaggaaaactaccactatactaccactaaatctgaagacatttggcattatttttaaaatcaccacataaatgtaaaactgttgttatatgtattggtttttaaatgttgtattggtagcttcattatgaatggctgttcacaaacaaaaatccaatacaaagccctgaggactgcagtgcaaacttttttcctcccccaattcatttcaaagaggaaaacaaagagatggcattgatccaacaatgccttccctccctgcatctctcagcatcattccacatgtgtaacagtggaggtgatatgggcactctctctgagtgtgtacatgtgaaaaaggctgacat

SEQ ID NO: 130391 - DNA, 1048 bp, Homo sapiens
taataaagtaattcagtgctcatttatggtttaaaaactaactactcaactaataaccccaaattgtctgctgtctctcatttagtctgtaagaaaaagcaaattcttaaataggggaagcaatttattataatgaaggctttttttttttttaggaaaaaaagattttctctagaattattgcacatcaatgagtttttggaaactgttgtgatcattttctgtgcctaaaaaggatcattctatcaggaagtgagtctgcaaagagggtgagagtccagcagtgcctgtctccattcttgacaaacagaggtttaatataaggaggctctgtcccctaagaatattataaatcagacctgactttttttctgagaaaaatcatttctatatcacttatagtccttctgactaaatagtctttctaaaggaaatgtcattcacaaatcagtaagcaaattcacttttggcattgacatgaagccatgtaaccacactgtaataatagttggttttcaaaataaattcagtgcctcatacttaacatgattatacatctagcaccattagctttattttattttacaaatgcatactacagtatatttgtaagccacccgggcctgccaagggagtttttcacactaagtaaaatcatcaagccttatattatgctcttcttgaactcctgttgtactaaatggagctttcttatttacaataggcaaatctagtctggtgagcgtatcagtctctgtgtagactgcagggagtgagatgctagtttggttttgttgatgctggcaaagcatgagactgcataaatgaccatttcattctaaaagaacctagctgtaatgagatgggtagtttctcctatttcaacttaaagcttcactcctctaacttaactttttgcttgacatagttgaggaatatggtagaaatccataaataggtaaaggtagttatgaaatctccccatgaatgataatctaccatttgtcttcactccattactaattacacagacattaacagtattttt

SEQ ID NO: 130392 - DNA, 1084 bp, Homo sapiens
atgcttatttgtccacaaaaccttcattatgaacttactccaaggctgggcacagtggctcatgcctgtaatcccagcactttgggaggctgaggcaggaggatcacttgagtccaggagtttgagaccagcctgggcaacatagtgagaccccgtctctacagaaacttaaaaaattagccgggcatggtggcgtttgcctgtagtcccaaccactcaggaggctgaggcagaaggatcatttgagccctgcaggtggaagctacagtgagccatgttcacaccactgcactccagtctgggtgacagagcaagaccctgcctcaacaaacaaaaacaaaacttaccctaagcaagggtttgtgctagaagttgggaataaaaagatgcaagactaagccctgatcttcgcatggggaggaggaggaagcacaggcagtctaacaacagcacagcagtcagtgcccctggcccttggcaggtggaaggcggcttccaggagcaggatggagctgagtactaagggtaagtagaagcaggcaagcacagaaagagaagaaagcttgttccaagcagagggcacagcttattcacaggtatggagaggagaaagtgagtcttcttatggagaattttcacgagttggaagagttgccccgcagaggacttgtgggaaaatgggtagagagtcgggagaccagagcagagagggccaggtgtttcctgcattggagttaagtctcatgtgagggcaatggggagcctcccaagagtgaatttctgtgtccccgcggctgttaccaagcctttgccctccactctcaggtaaagccctgctgcttgaaggcttcttccacctcccgcttccttaactctgctgacatcctgctcatttgccctttatggaaggcttgagccacctggccacaacttttctctcctcaatgctgccatcatcccggatgacatcagcctcgccatttccgatccagcgactttcacctctgccctgcctctgccctctactcccacggccataccttggactcggccatctctcagaatttttctacatagaaaatct

SEQ ID NO: 130393 - DNA, 1092 bp, Homo sapiens
acgtgtcatgaatgctcaataaatattagctattaggagaaagaagatgcagtttttttaaaaagatgacaattttttttctctttaaaactaaatctggaacttaagcagcttaaaaggggattgattcagtagtctgtcactcatcggtttgtcccgctcttcacagtgtaagacagtggaggtatcagccctgtcccaggtgtatccagaagtggctgaaatctgcaggcaggtcccagacaggctgaaggtgaaataaaccaaaatttaaagttacaatgaaaaactctgaataactctcagcctaaagcatctcagcaaattagcccacttgacttgagtctttcatttctctgtccaagtagagcagctgctcctgaagggcaaggccattacccagagcccaggccccactgcctttgtggcacacaagctaggatggctccacagctgctctctgaggggagacacatccccccttgctcctggggagcccaatatgggtggctctgttaggaatgatgtgagtcttctctctttgaaaaaacaaaaaggtaaaatagctacaactgtcacttctagcccatgtttcagtctgttgccaacataatgatgatactatttcaggtaagagaagcagcagaaataagaagtctggtctttttaaaatctgttttttctattaaaaaaaaaactagggaaaaaaatcaccttatttttcttgcattgtaaaataagaaaatgctggatttgttttctcctaattgccctcatgaaataactgctatcaccatgaaaatgtagctggaagttctttacattattggggcttaagtggatttgaggctccaagcaataacatacttaaccccatcagtaagcctggaatgactcaaaatggacacagacgtaagagtgagaggtgcaactttgattagttttcttcttgagaataatcgtgacatttaccaggcggatcgttaacctgcagacttcccaaatgacacagggtacttcaaccccattagcctgggccatgccgcccctgcacatacgacaggctctgctggatgaggtgctccccaggac

SEQ ID NO: 130394 - DNA, 1106 bp, Homo sapiens
tcagaatcatcactgccactgggactgttgtcagtgtccattttccctatgactgcttagctagagcctctgatgtctgtcactagaaggctagaacatacagagctgttgaaacaattatggctggaagtacagtaggaaccaccataggatggtgtcaggaaacgctatgttagcctaggcctgagattcatgtgcctatttgcaatgccacagcataccccaagctcacccaggtgggcctcctgctaccaagctggcctccagcttttggtattcctgtctcccggaagaattagccctatgcgaaactgcagctcacatgcctggtaccctctctacttgcctaattcttaccaacctccctccccagtatactggataaaaatgttgtcttattcaacctaagaaagctgattgcaagcaaatataaaataaaaacagaaaaccgctgtcttagtctgctcaggctactataacaaaatatcagacttgtggcataaacaacatttatttctcacagttctagaggcagggaagtccaagatcaaggtcctggcagattcagtttttggttgaaggtcctcttcctggcttgcacatagctaccttttgctgtgtcctcacacggtagagagaggaggctctggtgtctcttcttcttataagacacaaatgctatcctgggggctctaccttcatgacctcatcgaaacctaactacctcccaaagacttcatctccaaatactatcatgtcgaggggtagggcttcaacatatgaatattgtggagatagaatcactgtcgtaacacatacatactgtagtgccagctgcctgggtggaaatccaaaccccaccacttacttcactttacctctctgtggctgtttcctcatccctaaaaaaatgaagagagtaatattgacctcatagacttaagaggagtaactgagttaatgaatatacaggctgaacagtggctgacaaatagggaatgctgcatgatgtttactattatgatttatttaaagaggttgattataccctgggtttgacctggtaggactgtaacctaaacaggttaataagggtaactcttggg

SEQ ID NO: 130395 - DNA, 1049 bp, Homo sapiens
acaggaaaaagtagcagcagtgttagcatgccctgtgtaacgtatcaagttaaagtaatcattttaggattgcagtgtattcttctagaacccaaaacaacccatccctgtagtgcatgcctgaggggtgctgaagaggatattctactcgatgtcagcatcagatacaaggagggtcaatttcagagtgaagcactttgctgaaatcaatcttaaacaatgacatttagacacagccagcttctaagatgacagcgaagaaataattgctataaaaagaaatgtgtagattaaggggattcccctgaatgacctgtggctgaagaagctcaccatttgaagttatcttgctcattagtttacttctgcattatctctcttctccctgcttcctccatacggcaggtgccttgtcttattcatgaatacttagttcaagttgcctgatacgaattttatcaaatattttatgactgataagaaaaactgaagatgtagatgatacaaacgtggaaaagacatcagactccacatcctaaagttcccaacttagtggaatgaccagctgaactgaaaaggtgacatttaagaggaataaagatgaaatctataattcgagccgcagttaccacctgcacaagggcaagatggggagacttggtttaacagcaacacctatgaaacacttaggggatttaggtggcaataaactcagtaacacgtcaacagtatgaaaaacaaatatccaacatcattactagaagtgagtttcccattacagtcaactgattgtgaacaagggtgacaaaacaattcaagaattgtctttttaacgtcatttaattttttaaatgatgccgaggcgagtgaatcacctgagatcaggagttggagaccagcctgaccaaaatggtgaaacctcatctctactgaaaatataaaaaattagccgggcatggtggtgggtgcctgtaatcccagctactcaggaggctgaggcaggagaatcccttgaacctcggaggtgaacattgcggtgagccgaggtc

SEQ ID NO: 130396 - DNA, 1202 bp, Homo sapiens
acacatttgtatgcaagttcagctctgtaaatatgtgagagagaaggagacagttctagatgggaattagctgatgaatggcctcgaatggcatgctaagaggtttagctttcattcagtaagtaatatagagtcatcaaagatttagtttataaagggagcagtgtcatgatgagagctacatttcaacaagatcactaggaggcagtttgaagaattgattaaagtaaaaaaggagaaaaaaactagtggtagaccagctagccaactggtaataatcccaacaagaggacagaacctaggaaaggggacttaaaaagcagggaatgcattggcaagaacttgcagaaacagaagcaaaagaacctagagttcagattggcaaagaggaagagggaggcagcaaaggtttttgtgcacattctctctcgaatctcacaacgccctaggaagcaggtattactatttccatttgtagttgagaaaattgagttacggaataagtagaaaaacagaacttcaacccagttttgcagtctgcagagtctctgtttgccccattttatccttctaaaatataagcttcaggaatgcagctcgctgcatcctcagtgcctggcatgaacttgcacatagtaggaaccagtgaatatttacagaagaaattataaaatgagtaagtggtactgcatgtgtgaatggtggtgtggcagagcaaccagagagttgaacatctcacagtggtacataacagccctgctgttgatgcaatgaccatgaagtgatgggtggactacagttggatttaagacatttcacacatgtattttctacttaaatctttccctgccaaggttttacattagctaaaagtgtcagagaggctttaaatactggagctatttaaagagtatagagtgcctttgcaacttaaaaatggaagtgtgataaagtttaagcagtgttttaattggcctttcttagctttccctgaggcagataaaccaaacctacagaggaagctgacagtgaatagcagcaagtaacaaatcttgctgagcagcacttaggtattgtttctgacagcatatgccctccatgtagaatttaatataaagctccttcagtaggttaaaactgatgaatagtataatcccagtctgaatagattcttgagttcttgttttcagattttaggaaca

SEQ ID NO: 130397 - DNA, 1009 bp, Homo sapiens
gtttattttaaacctcagtaaattgttcattatccaattgaaaccaacaaaaatgtatagatggccaggagcagtggctcacacctgtaatcccagcattttgggaggatcatttaagcccaggagtttgagagcagcctgggcaacatggcaaaaccccatctctacaaaaaaattaaaaaatttaaaaaattagctggtcatggtggcacgtacctgtagtcccaactactagggaggctgaggtggagaattgatcgagcctgggaggtagaggctgcagtgcaagccatgatcatgccactgcactccagcctggacaacagagtgagaccctgtctcaaaaaaaaagaaaaaaaatgtagagtgctcactctgtgcaagaaatggactaagtcactgaagaacacaaagatgaggacaacgggttattgccaaccagaactttacatgtggggaagaggaatagatgtgtactgtacttggaaaactaaaatacaaaactgtacaaaaattgtatcagctgttggcataataatgctgagtagcaagccacccccgacttaatggattaaaacctcagttacgtacttatttattaattagcaggttgtttgggggtgggttgatctagactggacttggcaggtctgggcttcaaactgcagtttgggtttaggttcactcctcatgactctcatctgccttggatcagcaagccagcccaggcgtgttcttctcataacaatggcagaagtgcaagaggggcaaacagaaacatgtgatgctccatgaagcctagattcagaacaggcacaccatcctgtctgtccaattttacgggctgaagcaagtccctagccaaccccaacaacaactggtgaggaagaatactctacctctagagggagaaactacaatgttagctgataaaggggatggagacagggaggagtgagaaacagagaagaatgatttagccttccacagtaagataataaaagttcaa

SEQ ID NO: 130398 - DNA, 1976 bp, Homo sapiens
cccgaaggcgaactcttgcaaaatataaccaggcatcagaaggcacaaaaaaagcaaactgtgcgttttggttattttgtattatttttaaaaacgaaaaaaaaaaacaaaaacaaaaaccagttgcagaactgctgttgtcactgagaagagacttctgttgtttcttttgcatctccttctttgtctgagagcagaatctttcccctcttccacttaaaacaacaacttgatctatgactgaaccgatgctgggtctgagccgatcgtaagtctggccctgagccacatggctatagcaagggagaaatgtgtgcgatttcccacattcttttcattataatatgtattgtgagtatctttatttaatctcttgctattctacctggcagtataggttgtggttaaagtcaggcaacctaagtttgtattccaacacagatatatgtactatcattatgatggaattgtgttgctgctccaggcctcagtttctccatctgtaaaatggggataataatcaatcctagatcaaaagattattgcaaacattaaatgactattacatggtaatctttaagaacagtgcctggtccatagaatgtactcaataaatgagtgatcattaataatatacagatgcataactgctttattaaccattataggaaactgtgtgtgtctgtgtgtgtgtgtgtgtgtgtgtgcatgtgtgtgtgtatttttaacatgaattggaagatgtaaaggcattagatgatgtactttcaaggaaattattctctcatgaaaaaggcctgttttgtttttacctgttgttacggaaatttttaaacatacactgaaataggatcaatattgaactccctgtatgtccatcatcccagttcagtaattatcaacattttggcaactttgtttcatctactgtctccaccctttttttcaaggtggagtattttaagagcaaatcccagacattatatcattgcacccataatcttttgagtatgtacctccaacagaaaaggatgttatttttaacttaaccacagttattctgacacctcacaacattaaaatagttcttcattattaatatccaatgtccagttcatcttcaaatctcccctgtagctgaaaagtgtctttttacaccttcaaaaaatcatagaaaatattcctcattgcttaaattttttaaaaaaggaatttctaaatatgtcgtaaattcttgcttttacagagctgaatttcaaactgattaaaaaacacatgtgttgatatttatgcagtaagaaaaaaattgcaaatttatttttatcattgttaatctgaataatttgttttaaagtaagaggttctgtactggttaaagtaactaataaatatgtattaattttataattattaattttatatctgtaagtcagatggccaatattttgatatgctctgtatctaaacatacgacttaaaatcttatttaaatcaacacggtatataaacaagaccataatttattgactctttccctattgtagacattaattagcttgtttcatcttagatttaatgtgtgttactcactacctacattagacatttgtttagaaaaatatttaatgttcactatttcctttttaaaagaaatttcttttacttttaagctgttcctgcttaaatgtatatatttaatttttagaaaatacatctctctccatttaagggcaagctctgtatggctccagatgtgtttagaattcatataagcattgttaacagtaagcccccagggagacatgagctaggtccacaaaaacttatatgtacagtctatttttcatgaaggatattgtctctgtttcattgctgactctaagtttgcaggatgacatcatcatcttggacaaatcaaggtcattcagaagcctctctgctggggccctcattacttttccagcatcgtctcccat

SEQ ID NO: 130399 - DNA, 1533 bp, Homo sapiens
atgtgtacagaaggaaggggagaaggaagtaacctgcaggatggtttgaaaagaataaaacagtagaaggatgaacaaatctgagacataatagagaaaattaagaaacttgattaattggaagcatactctccttttaagggatatgtcctaggctgaaggccagctccaaatggcagacagccataaatagatagtgacgatagtgaaaacacaatcaacaaataacctactttgaacatttgaatctaaaatttgtaaattaggaatataattttataatcttatagctcaagtggaatacatgctaaaacttataaaggtgttgtggtaaaatgctcatctttctattgttgataaactcaaactgtatttcaacaggaaataaggttttatctgcaaatatacatatacttaaaatattccttttaaagtgacagcatcacatctggcaatttgtttccttcctttctaatgaaaattatctgaatttttaagttccagtttatcttgttcagtattatactgaacagttagacatctaattcttgttatggatagtcatagtacttcaaatataagacttccttatatatttgaaacatttcttcctttcatcttttaggtaactaaccattaggtaggcatcctgatataatggtaatattaaacaatccagaaaacgtggaaatattcccagggtcctgtggacctttccatatgactgattgagtatccttacaacatggctactggttttccacagaactggagtctgtgtccttctctgaagactaaagagaagcaatggccagcttgtctagtgatctggtcctgcaggaaactgcttgacagtctctgtagaaacgatttgtttctatcaatagtggtttctcacattttgctatgaccagttgacttgtcataaatgagtagattggcagtttttcgaaacaccatctggagaatactggtttgtatcatatgggagtggttttgaataagttatactatcagatccatagcaaaaaaaatgcatatcgtcttttgttttctgaggtgactataattctagattagctaataaaacaatacaaagatttccacttttttgtagggttcaaagtttaaaccatccttccctctgagaacaataaaagctggacaaaatatactaaaaggaattgctcagagacatgggaagtctaaaattatgggaaaatatggaaaatgagtaagaaatagagaggtgaatctgccatgtagggccacttttccactcagatatcttatggtcctggaagaggtaaccgagaagctgagaaatgtagcagggcttttgacagccctgtaggataagggaataaaatttgaaatccagaaaccaaccaaagctgggagtgaagctagtaaatgccccacactttggattgagacatggctggctactgccaggaataagagtgaagtagattggcccactcagagtctgaagctcaacttcaaatcagttttaatccttgaaattgaatc

SEQ ID NO: 130400 - DNA, 1741 bp, Homo sapiens
tcagtttcccaaagtgattaaagtgattgttccattttacaatcttcacaacaatcatgagaaagtctgagttgtgagaaagtccgagctgtcccaggaaattaaatctactttcccttgacagaaatatatttaatcagttaagagtagttgagacgattttgatgttttccttatctttccaaagggcctgcttgttcctgttttgtacacactgtctttagagtctgcttggttctgagctcgtgtttgacttcattttgaagtacaaagtttttgcagctgtaatctgatatgtggaatttggtcatgctcatgtgcatttactggtattttaagatatgaaagttcttccaaaattatagaaagaggaattgcagaggaatatttttaatagacacattcatatatagtaatccccttgtgatatgcatgttttctagcaaagttgattgtacattttatagagtattctattatttacaagtttaaggtatatcacttacttaaaactttggttgaggtaggtggcaagtctattaagatactgggcattatccatacataatggtatttctcctgaagatgtcatttccccctcatagttaaatttcccctcagagcatttttctagtcctggaacttagctgcataattgccacagccctaccaaccaaaactgcagaatttctccctgtgcttgggaattccgtgaaatttctctatcttgactatctataaagcttaatatagccaacgataacattgcagaagtagggactgccatcaaaaatacaatgtgacatggctttaaaattccataggagcccaaaaagaagtaaaactatttagctcctgaattatgaatttggaaatttgaaatgtttatatcaaatatattgagacactgatacctatatttacagcgaaactaaggaaaaagaatgctgcaggaggttgtaggaatagaagaaatgggtgtcctcttaaagcacacagtttttattctaaacttaaacattttaaaagttgatcattcaaattgtaaatgtttttcttaattattgaccacagattttttaaagtacagtttttaatgcatacaagtgtcatttctgtttgttttgtattactttcattttctcatagcaatttactactacaagggaataagtaaaaatttaggtacttatgagctttgaggatcagtaaaaaataaagatatatctgtttgtcttctagtttaaaccacataattagctacttgaatgtttaatattggttagttcatgtgtgtctcctcattacttctggcctccccaatggtaaaagggatggtccattagttaagcacattattttgagcaaagatcacccgttccctggctctgtgcataaataaaagcgtatttgtgccagttgagtgcccttgtgaattgtgatgaagatgtcatgcactaatttgcagccagattagattatgacaaacttagcagggatgacacgattttttgaatggatatttgaaatttttcatgatttgaaagtccctgagccctttattttcatgaatgattatactctgcaacaagggagactatatttaatgatgtgattagcagtttgtgacatatttcattttgtgttctcatgtaattgagttattttcaaatagtaccttggggagatgaattaactattttagtgccctaggatttagtttaatgaagtacttctctca

SEQ ID NO: 130401 - DNA, 1363 bp, Homo sapiens
tcaagaccaacctggtcaacatagtgagaccccatctctacgaataaaagagtaaataaagggctcctgatctactagggaggtgaaggctgttggtcatttgcaggtagttaaaattatatagtagttaggaagtagatggggccattccgttgtgggcacaggggctgaactcacatcacacctcactcattagtagatgactgtagatatcaaattgctttaaaccagtttctgcttcttcactgctgaatccccagcaccaggaaaaatgattggaaccattagttgctaaataagtatttgttaaatgaaccagggtttgaatggaatttctgcgtttctcctactccccagaaaaaagggcctgaccatgtctctcagaggcggcctagaagctggagaacatgtctcagaactagtaacttccttcttctctcccttcctcgttttttaacttccttccaaattttggtgtctttccgactctaagccaagttcccctcaccaatctttctgtttctagaactttttcctattcttttccttgggttcgtcccacccaagaataagttgctttcactcttgctatttgctacagcaatgcccattcccctaccatttccactagtctaaaatatggattttacacagtggtttaaaaaaagaacgacgttgctaatacgttggtttgggcctagggggatcttctgagatccttccgggcagaggaagaactcttaaagtcatatttgaaggcactgatgctggagctgagaggactggatgatggccttaactcagatgccatggcaccaggtagctgcctcctactgttggtcagtttctcccttcaaggaacaaaaacttccccattctcacttcaccagacacatttcttctgtttacatgaggctctcaagcatacttaggctggagaagagggttccattagactttgcatggtgcccacttttattagatataccaatgattttgttctggttatatacttgccattattttgggaatgggcatttctacatcacaatctcttttcttctgacaatccaggaaacatctctgacatctgactataaaacagatgtttctgaagatggagtatagccttcacataaagccttgccgtttgtaggagaattgctgtatctaacaactgttgcaacttcccaagaggaaaatgaagtgctttaaacattttttcatggtggctcacacctgtaatcctggcactttgggaggccgaggtgggcagatcacgaggtcaggagatcaggaccatcctggccaacaaggtgaaaccctgtctctactaaaatacaaaaaattagccaggtgtggt

SEQ ID NO: 130402 - DNA, 2382 bp, Homo sapiens
ccagagatttagagacactgggaatcactgtttctcagtagtcatgtctgttttcctcagctggaccattctgttctgttttttgggttttttgtttgtttgtttgtttttgagatggagtctcactcagtcacccaggctggagtgcagtggcacgatctcggctcactgctatctccacctcccaggctcaagcaattctcctgcctcaacctcctgagtagctgggattacaggcacccaccaccacacgtggctaatttagtagagacagggtttcaccctgttggccaggctggtcttgaactcctgacctcatgatctgcccgtcttggcctcccaaagtgctgggattacaggtgtgagctactgtgccaggccctgttttttctttttaagtgttttatttgctttgggtttcaatagatcctggatatatcctggaagttgagtgcatgcaaatcttaagccatggtgggaagggacactgtggaaggagtgacacaattgagtgccttcttggtactagacctatgatgaacttttaccctattatcttctgctaattgttgttaattttttactaatttactatattggtcagagtagtctaggtctgccatggtgacaagcagccccaaatctcagtagacttaaacagcaaagtctcttaaacagtcgaagtctttaatatatttctggcttatgcttcatgcccatccacaggattcaggtaaatgtagcgaagaagagaacacagagaactgagcaccagcgttagagaagcaacacatgtcacttctgctcactttccactgacccaggcagatcatggggtcatgcctaactgcaggggagcagggcttacaatctaccctaggcctggaaggaggaggccttgtgaacagtctttaagacctgagcaatgagaatggttttttgtttggcagcaagtcagtttctttttgcatttatccatttatgaaatcctaaactggaataggtattatatggaactattctgggctttcagaagtgttcatatttcatgtcaagtggagttaatttgcatacatacatatcatttcgtaattttaagaaattttgtggagggttttcaaaagaaatttaatacttgttttaattttctgttataattttagcaggggaaaatggctgcaaagctgcagatatttttgttctttccttttctatatttgttggactagttagaggtgactgcacataccagtgcggaggaaatacttatccaaaccactaaatggctgtcctgcttggtgttgcatttatgggagatactggctgtcccgttagtattctacatttctgagcagtcagcaccatgacaagatattaaactgaaagaaatgttaaaaatagttcagaaaatacaattgtaaggaaaaaaaaacagaagaaagtcaggaaaggccctttaggtttgggagtagacaggagagacgtttgttttgctcatttctgatagacagtggcattccacagttcgaagccaagtgagtaagactggcagctgcttgcttagggtgtacacactaaggtctctgcctgcatcacttcgcctggaagtgaagagccctgaaattcccagacgctagatgttcatgtagcaaaacagcaaatgctagagagcatctctcatggggtctgcctttgagggtcggagaggcctagctatttggcactgcatattttttccatcaaccctgtagctgactttgggctctaacttttctcaggggttactgcatgtttgtggaagctgacagccccagcatggatgatattactttaaacatttttaaaacattctgtccttttcagataaatttgcttcattgcttccttctttataaaatgtccccttagagagtaggacacattttactcgttagaattggaaggggaaaaaagcattccattctttagagccacatccagtgttcactgcttttgaagaaggagtgatgtttgacacagaaatgcatcaatggggaaggccacatttaacttttgttgtttgggctcagcactggaaccaaaccagtttttcttgtcccccctccttttttttttttgtccaagtggcagaaagcccagaaatataagtttgcattgccaagagatggctctaaatatagtgctggtgggcaggaagattgtttcctcatgaatgcaactggtgtgtgctgtatattccttgccctcctccagcaggaaggaagagtttggctttgctgcactgcaagcctcaggcgctcctggctggaggagtttagaaacaggagcctgggcaggtttgctttgcactctcatctccagccaagacgtgcagatcaaaca

SEQ ID NO: 130403 - DNA, 2942 bp, Homo sapiens
cagagcatgaactttggagtcagaaaaacctgggatcacatgcttcctttgccacttacttgctatataacctttggcaagttactcaaattctgtaaggctcagtttctttctctgtaaaatggggataatactaccatattttattacatctaaggcactatgtattttaagatacagcattattttctgtgtaattcataaagaaaaataatgctgccaattaaactgtgatataacttgattgattataaaatgcacctgatttcaaacatattaaaatatgaaaaaagtgtatgctttagaattgataaaatgcaaggatgcctaccttatgtggttttgataaagtttaaatgagatagcacacgtaagacagtatatgtagctttcatctagtaagagcctaataagtattagctattttattattagcgattatggtcctcttcttgcaaactcttaaaatgagtcagtatattttgctttcttttctaatatttgaaactgagttatagaacagatctacaaaaccattgttggtttttttcaaagaaggagggaggtattaacaaaatggctgtctcagaccagatgatatataatgacctgtagttctgtgcaaaatgcttaataagggtgacacttgacaaaggcctttttgtggaaagtgtgcttcccacacttcatcagtctcttaagtgaaggtagaataaaggcccaaattatgcttagtaattcaacaggttgagagccagcttttaatgcacctctgctccgcttgccggttcctgtgataactgataatttggtgactagctgagcctttgctccacagtgaactgaaggaagccctttatacttgagactggaaatacttccgatgacagtgaagatgtatttgaagcaatgtgatattgatacaaattgctccaaaggcacagctataatacaacaccatagtaggccaaagtctggacaatgagtgtatctgttaaattggccataggtataagaaagaaagcccagtgcccttcaattacagtcatgtgtcacttaactatggggataggcattctgagaaatgcgtcattaggcaattttgtcattgtgcaagcatcatagaatacttaacacaaaccttgatggtagaggctactatacacctaggctatatggtctagcctgttgctcccaggctacaaacttgtacagcgtgttattgtacggaatactgcaggcaattgtaacacaatggtatttgtgtatttaaatctatctaaacattaaaaaggtacggtaaaaatataaaggattaaaaatggtatacctgtgtagggcatttaccatgagtggagcttgcaggaccgggggctgtgctgggtgagtcagtgagtgagtggtgagtgaagtgaagggctaggaccttattgtacactactggagactctataaacactgtacacttaggctacaccaaatttattttttaaaatttcttcagcaatatattaaccttagcttactgtgacttttttagtttataaacatttaaggtttttttttttaactttttgactcttttaataacacttagcttaaaacacagatacattatatagctacacaaaatattttctttacgtccttattctataagcttccatttttaaaatttttaattttttacattttaaacctttttgctgaaaactaagacataaatacacacattagcctgggcctatacaaggtcaggattatcaatatcactgtcttccacctccacatcttgttctactggaaggtgttcaggggcaataacatgcatggagctgtcatctcctatgataacaatgccttcttctgaaatacctctaaaggacctgcctcaggctgttttatggttaacttttatttttacctaagtagaaggactgtactctgaaacaacaataaaaagtacagtatggtaagtactagtcaataggaatttttcagctctattataatcttacaagaccaccatggtacatgactgcatatggaaggacagctggccactcatgtgtctccttggccaccttgagagacttcataatacttgcccctttgcacactcttcttgctgcctaattgcccgtgtgcctagctggactgtaagctcgcagagggcagtgactgtgtgtcctgctcgccattttttctgcagttaactagcactcagaaggttaaatcatcacttggtgaatgcatgaacactgtttaacctcaggtaaagaagtgaattacatatgatgatgccagactttatcaaaattcaaataataatcattttttatgcagtgcatattcaccaaaattatgcattgtggtctaccattaataagacatgttctttaggttgttaaaccaagtgagtttctgaaaaataggtattgtgacaactagaagtgcatatacagaaattgttccaaacaacctgttcctcagttttacaccatattatggggcagtatatgaacctcttcattttcaaacacataaacacagtgggtcccttaagcttatagtctcaactacctagtctgtaaaatggaaatgataacaatacctcctcatggggttgatgtgaagataagatgaaattgtatcttttaaataataatatccctggtacataatcagtaatgaatgagtagtaaataacaatatcattgtttccattgtagtggaaacttgtgtgttcacagatctgggtgccaggaaactttggttttcttagagggagtgagatactgctcttggatatgtctgtcttgatatctaaaagacttgggtttctggtgcagcgacatgtgttctttgatgggctctgatgatactatagctcttcagctacatttttttttttttgagacgaggtctccctctgttacaca

SEQ ID NO: 130404 - DNA, 1050 bp, Homo sapiens
aacctcagggaagcctgtttagtttcttctaaaactcaaggcgattagtaggcccagatattcttaaaatgtgtactgcaagcaaaggaacctctgcgaaaagtgggttgatgaccttagttatagagggtttcaaggagaaggtaattttaatagcagcaaaaaagctgagtagagcgaagtgaatttctttgtaaaggtgcttataagagaacacctggggtattgattaacatattaacaactgcctctttggagtattggattgtagctgcttagtatcaataagtttacaaaaactagccaaagcattatatagttcagggttattgcttacaccaatttcagacattaagcatgagtgaatgtttttctttctgcttttctgtttctatattttcttcaacatgcactattttatgattaaaattatatgtgagtagaaaacgaggcagtgttattgattatatagtaaattttgaattattcttatttgtttagcaactattatgcagtctagaagtgaagaggttaaactaaaccagagtgtagaggagggaacatggagttccttatattttacataattttaacactggtggccatgtgtttctcggtgtccttagaattgagaatgaacaatgaatactttaatgggtgaaatcaaataaactgttattataagatatttattaattaaccaagttaattacaagtctttgaaagatgacagatttgtgaggcatctttagaacaaaggtcaaattctttaagcctccattaattcctgggacctcaacgtaatgttatatatgatagcactcactggaatgggtgtagaaggtcaaattttaggaaattctggcatggacttttattgtggaaagtagcttaacctctgtatggtgtggtttccttatttaaaactaagagtcacgcgccgggttcagtggctcacgcctataatcccagcactttgggaggctgaggtgggcagatcacctgaggtcaggagttcaagacgagcctggccagtgtgttgaaaccccc

SEQ ID NO: 130405 - DNA, 1172 bp, Homo sapiens
gtgatttttgttttttaattcctaagatgataggatggttaataaaaatagctgagtaggagatttccacttttggaagctcgagtagacatagttttttctatttcttcccctaagtcaaactaaaaactctggacattatgtattaaaaaatataaagatgaaaggtagagagaagaaaacagactggctagaaacccccgggccacagcagcagcatagcagtaagtttcatgggttttcatttcgcttcgtgtatcccagacttggagctgaagaagctggcaaataggaaatgtcaacagcatagacaaagctccaatggagcctgctctttcttagtcaaaagaccaagacaggaacatcctagcgagacggaaaacttttagacaatcctctagccgaacaccacagaaggaaatgtggacccaccctcacccatgccagcaaaggcctcgtggggaacccagacatctaccctatgaagccctaaggaggtgtgctaatactcctgctggagtggtttcagaaaatgccaagaaaggagcttagatttttatcccccctgggcagtaattacccctttcccttcatggtgtgagcagagactgtgtggggaatcagaactcacctccacacacagtaacgcagtgctgcacacctcagctgtcagcagacctgagtagaaaacctagacttctgtccccatcttgcagtaacaaggcagcaccccactctttcctttgccagaggcatggcaaagaaagccagttagaaaaagaagatttaggctggttgtagtggctcacacctgtaatcccagcactttgggagggcaagacaggaggattgcttgagcccaggaattcaggatcagcctgaccaacataaagagaccccatctctaccaaaacaaacaaacaaacaaatagccaggcatggtgacatgtgcctgtagtcccagctactggagaggctgagatgggaggatcacttgagcctgggagatcgagagatcgaggctgcagtcagctatgattgcaccacggcactccagcttggcagtcggcgcaacagagtgagaccctgtatccaaaaaaaaaaaaaagaagatttaaataacattcagaatctcatcacataatacaaaaatgtccagttttatttaattc

SEQ ID NO: 130406 - DNA, 1802 bp, Homo sapiens
ggcccatagaccaaatctggttcaccacctgtttttagtacatcactaaatggttgggggaaaatcaaaagaagaataatatttcatgacgtgaaaattatatgaaattcaaatttcagtatgcataaataaaatattgaacacagtcatgcttatttgtttatgtattgtcattggctgcttttgcaaatagtagcagaattgagtagctgtgacagagactatatgacccacaaagcctaaaatatttacagatatggccctttacagaaaatgtttgcccactcttgtgttaatgggatggtttagaaactgtggatttttgagccccacctcagaccagataaatcagaatgtctacagatgggggtccaagaatgtacattttaagcaagctcttgaaattcacccctaggcgaacagtgagacaagactaatgatcatgagctaaggatatgggaaaggaaaagattctgccctactttttctgccgaacttattgtgttttaatccaacgctgtaattttgctacagactgtataaattatgtggatcagtttctaagcacttctctccaattcagctctcttccaaacttttctattttgtggaaagaaggttgtattagtttcttagggctgctgtaacagattatgaactgtgggttgacctgaccaacagaagtttgttctttcacagttctggaggccagaagtccaaaatccagcaggggtgtgctccctcttgggggtctagggaaagaacccattctttgcctttttcagcttgtggtggctgtcagcgctcttgacttgttagtacctcactgcagtctctgccccagtgatcgcattgccccttgctcttctctgtgtcttatttttcatctgcctcaaatcttcctctgattttctcttataaggacatttgtcatgggacctggggctcacacggctaatccaaatgatctcatctcaagatccttaatataattatatcagcaaagctacaaagacctcttttccaaataaggccacattcacaggttttgggggttaggacagggacatctttttgaggccaccatccaactcaatacacatgccgctgttctcctcttcccccaacagccagtcagtttccaagtcttgaagattccatccgcttctcaagtcctacttgcaccattctgatctctttctgccataggaatctcttagaaatttctgacggtttcctactcttcgaaaagttcagaacatacttctaagcctgacatttagggctctctgcagtaatgttgccagcgtattttccatttctttctctttcttcttccctccatgtaccttgccctccagccacactgtgccacttgccgttgccctcactgctcctcccttctctctgaaccctctcacactgttccttcttcctggaacactggttgttcctccatccttatcaccatgacccctacccctgtatcacctaacacccagatatctttcaaagtccatctgaggtcctacctccccatgagagctttgctgctccttcccactagggatgaatctctgagccttcggcacctcacatggtatattattattattataatattaatattattattatatttagctattttgactgcaaatgtaggaaaattaacaaaataaaggaaattaagaaaagtaattctaaagtttagtaaagtgacagcaaacaagatcaacttttaaaaaagacggttatcctgtagagagtgactctagtttataaccagtaagaaaatataa

SEQ ID NO: 130407 - DNA, 1290 bp, Homo sapiens
tccatttatagccctgacccattatgctttgattttgtagtttaactttcaaaccatgccatttctgtggtttccaagtacagtgcccttgaacaacacagttttcaacagctcagatccactaatatgtggatttttttcaataagtgcagtcggcactccatatgggcgggttccatgtccacaaccaaacaccaatcaaaaatacagtattcacgggatgcaaaacccacatagagggacgacaggaggattttgtgaggattttggtatccttgagggtgggaagcatcctggtgccattcacctgcgaataccaagcagcgactgtacttcctcaaaagcactgctgacaacccaagatccctcagatgtccttaatgaaacccttttttcaggctctttcttaccctggtcgtcctcctcttctggttacactcccattactaaataccattcctactattgtatattaacgttccttttaaaacctagtgcctagaatagcagaaggactctacatatcatgtgattatttcagagtacagtggactcttgtattcatctggacatcgtaattgtattaatgcagccaaaattatattaagtacttcagcagccccatctccctagctcttgttgagactctagttaaaaacatccctgaggccttttatcctctgaactgctgcatcacgcagctgcttgtaaagccgtctctcctccaacttgtgcttttataattgaatctctttaaatgtaaatgcagacaattacatttgtcctagttaaatttcatcttgttatttcgagcccagagctccagcttgttgagatcttattgaatcttggttctgtcatggatttctgttatgcatacttgcttgtgtctgcaacccaggtagagaggcttgaaaataaatatatcccagctgcgctaactcaaagcaagaggtactgagagaagacagcagtgatgattgctcggggatggggaaggcaactgcccattctctaagcagtaatttcctaatatttttggtggcagttcacagttcaacattatgagatatagcaaaagccatttattgctaattacatttaactgatgtctatgaaggactattcctatacattagagtgaatttgagactatctccatcattctccagccattcttcagtgggagaaaaacggtggaattaaactagtggaaacaaggctttctcatctagtcccaatccagtcgataagctgtgtttgccaatcactgctccagcacaatggccc

SEQ ID NO: 130408 - DNA, 1593 bp, Homo sapiens
aatagtttgtaagactataggtgcatgtttaaaatgcagttaccctccacaggatgttgggttgtgtttattaaaagcttagcataggaagcgctttgatctcctaactcttgtagggttttgtgttattgcttttctgagtaagaactcctggattgctggtgacatgtcggtgacatgattagacctttaaggtgagtgtgtgtgcacgcacatgtagatgtgcaaatgtacatatacacacgtgtgctctcatatgcataatttttgaagaaagaggtaaagagaaaaaatctggcagcatttctaaaaaaggtgttctgaattgcctgatttccttggatggtatcccagatgcttcctatcagatgaagtagcacatagagtacagcagatgtaaaatagtgcacaaaatcttttctcttcatgaggttattgcagtggttcaaatatttgccataatcttagcaattaaagtgtatactatccacctctgcttcaatcacacttattcaataaaaacaagcctcttctgtgctttagtatattttactaccatatttaacaactaacacggacttactaaaaatgtattctttttgtataataatcaggagtcttatttattcatttcttgataataaatcctgatcttctgggctatcagcacatgggcttagtatataagactgtttattttaaaacagctcttattacaggttcagactttttgctttaaatctgggctatcggtgagtccagtctctgacccagagcaggagtttccatcacaacatccaggacaagccattggtgattgtctgactgagcacacctatttatgatacagagttcatgacttttcaagaccagcacatttctctttatgataaagttttgatttgtacacagttttcctcatattaacttcagattttcttccatgtaagttacgtggatggttctgattgtgccctagggagcaattgcagactgtctcttctacatggcagtcactcaaatatttgaatacaattattatgtcctttctaaatatcttctttttcaaaccaaacatccttgtggaagtttgaagaaagagaggaatggtaggtagcagtgtagcagaaaattgttcaagtaaaaatcagtcggcctcagacagacacagaagctggatctctttagggttgtccagatagctgactgtagctcagcacttaagcaactcacatgaagagggactgtaagtgtagatgccttatttacttatttaagacagggtcctgctttattacccagggaggagtgcagcagcatgatctcagttcactacaaccgcggcctcccaggcataagtgatcctcccacttcagcctcccgagtagctggaactacaggtgtatgtcaccatgcctgactaatgtttgtgggtttttttatagagacagagtttccccgtgttgcccaggctggtctcaaactcctgggcttgagcaatccacctgcctcagcctcccaaagtgctgggattacaggtgtgtgccaccacacctggcctagatgccatgtttatacatatttatagatacg

SEQ ID NO: 130409 - DNA, 3242 bp, Homo sapiens
aacataatgtaaaagcgtattttcaatgttccagtcagtcctggatatatttggctgatagtttaaagaaataaaatcttcctacagggttcagttattaaaatagaaccaaccacccactcattttattacattctgtggaatgtttttggatgacagtctaagtatcttaattagtctccagctgatttataacgccttgttttatgtttcacatttaatatctcaaaattacaagttacagtgccatttttattccgtgccattaaaacagggtgaacaatattttttaaacagaaaaaggcaggttccattcagaaacccaaaggtcattcatttgcattgtctcttcatttttaggtgctggtgcttcttgtctgtcccactgagtctctgtgttgttattcatctaagctctgtgtgtgcgcttgtgtgagggcattgggatgggagattcccctacagctggattctgcatccaggaaataaaatctgtcgctcatctcatggtttgaacacacacttgctcaatttagggtttatcctatgcacttctgtctctgtgcaatgcttcatgtaccatacatttatactgtggccatttgtttttgttttcataaacatgtacatgaaaaagttcctcagaattctactcatggcatcatagaaaccagacagggaaaataatcctagagtttctctccaaacctaagcctcaagtttagttgcaattttgtcattttacacatttaccatcaatggttcacttattcagaatggctaatttcacatccacttgttttgttcccaggcacagctttgtgtgtgtccaaacagaaacaaaatctgtaattaactgcatttgtttgcaaagatcttggcagttttactgtttgatctccttcatctagaagctttagttatgttgcatagcttttttcctgagaataagttagacatattggaaaattaaagtaactttttggtttctttcaatgtgatatcttgctgcccaaaagagctgatttgtctcatgaagagtatttttatattgggtcgttgtcttttatgtgagctgtttcctggaaagatttttgaaatgttgagctacaagattaacagcagtttctttggtgattaacctgagctattaataattgctctttttacatcattgatattaaaatcaaactgtgaatgattactatatgagtgtctctataaagccaacaaaattgaagaagctcgagtttctctcctaaagttacttgttttcttaagaaacatatctgtcaggcaaaaagtcaaaattcaccaaaataatattaagatttcctgaagtaacaaatttctcttcctctatggttatatatacatctcgtttattcatagtttcattgcctaggctctctctttttttgtagctttgttacctcttaattttgtccaactaatgtcaattttcttgttatttataacaagtataaatttcagatgtctgtacaatgatgcctgtttatatgcagcacttcttatgatgtctttgccatgttatttggaattctttcatccccctatttgtactggataccattcaatacatttagcaagtaggaagacatcatttaacctcttccactaatgagaaggtggccattgcattgtcttagataagcagttgctttcttcttgccaaataaaaaataacttctcagttttcattgtggtacatagagagtggtcaataaaattaatgaaacctccttaatttattgtagcattcaatattattggtgattttttgttattttcttatgcaattaattgtttttattataatgaaatatacagttattttaaataatttgtaaatatagataaagaaaggaaatagaaagcatccataaaccagccgtttggtttatggatactactattaatactttgttattattctacccatttctttatattatgctttacataaacagcttacttttctaaataatgggcttacatggtacatgatgttttgaactttttaatataataattaatatattatgaatgtatttcatgaatatctacatctagagcataattttaatgaatgaattgtattatagcatatgtatgtgccacttttttggggtttatctctcccatctgagtcttgagcccatcatatactaaacatcttcacttggataacctacagacccatcaatacttggtgttctccagataacatgtatcatcttctccacacgcactttttctcccgtgttcccatgtcaattgctccttattgctcagtacaggaagctggacatcatctttgatccacactcccataccccaccttaaatcagtcaccacatcttaggttattcaattccaaatttctctcaaatccattgctcctcccttgtccctacatatgtgccatttttagtcagcaaatattctagtagacattttggttgttttatgtatttatagttacaaatagcactgtggttaactgaattagttatatattgctgtgtagcgaacaaattactcccaaacctattggattgaaacaacatgcatcagtttctgtgggtcaggaatctgggcatggcttagctgggtcctccgcttcaggatctcttgcaagtctgaaattaaagtgttggccagggctatctgaaggctcaactagggataaatccacttctgagcacatatgattgttgcagaattcatttccggaagagtagttggactgaggtcctcagttcttaggtggctgtcagctggaagtggctgtcagttccttgccatgtgtgcctccccatataccagcttgcttcagcaaagccagcaagaggaaacctttactcctgatgtgttaaaaggatctcatgtatttacaatgctagggagagaatctgctagcacgacaggagtcacagtcttttttgtagcctaattaaagaaatgacatcccatgccatcaacttggctacattccctttgctagaagcaggtcactaggccagcccacactcaaggggaagggattatatcatggtctgcaaaccaggagcagggatctttgggggtcatgttagagtatgcccccacattaaccatcctgtagccaagccttgtgtatattcttacatatttccaagtgttaaacctgagaagaaatattcctaattaaagggtttgcatactttttgggtgttcta

SEQ ID NO: 130410 - DNA, 1051 bp, Homo sapiens
ctgagcctgtagcagaaactctgatgttcaaatatgtttgttgcttcttcatttcccagactctgagtaatataattacatgaattcggattgtccacataaagaaaaaaacacaaaccttttcatcttctgtctacctaggctggaaatgaaatgggatatttagtccagataatagctgtaaaacataccaggcatcccattgtatatgttgtgagcagtgttgactgtgatggtcattacgtgatgccaaggtcaggttttagatctcacggagcaaaaagaattttgagcatcttgaacatcatctgctccatcccccttatttgaaagatgggaaaattggttttttaaaaaaattaagactttgggtttgaataatggacttaatacattttcaaagctgatttttcaaactttaccacattttcatttatgaggcagcacttaagattcatcatgcacgactttctgtgctgatgtgctaatagtcttccttcttgtttgagaagaagagatgctactttctgctccatcctatgaaacacaccacctgcttcaccaagctggaatgtggtatttttccactgaggagtacgcttgtttttgcaggcagaacacagcagtgctgtttgaagacactgatgatggcaaaggatcaaaggtgggaggcgatggcaggtggcagcttagggagagatcaatgcaaccagtgtggtgcattgctgtctgcagacgtacaggagccaagtgagaatcctagggtgagggaggacaattaaaaatcaaagtcaggcatattttcatgtaaatctgaccatgctaggaaataacagggcacttttaccataatcagaattatgatcaatcttggaaaatgtgatgcttaatttgataggtagaacaccaaaccatttatctttgtttcttattcctgtgccttttggacactaaaagcaaatgaacaaattttgttaaaattcatgagaaagaaaaaaagtaaaaatcctacagtgaaaaaaagatatctagttttgtatgttcattcctt

SEQ ID NO: 130411 - DNA, 2480 bp, Homo sapiens
ggaacatagctttctatggcagtgtttgttgagggttggggtggcggggaggagcatccacggtaaggagggaagcgtttcatcaactgtgggccaggcagtatttagctggactagttggaactaaatagattagttagaaatctgcagcatgattcctgtatgtcccctgaagggaaatgactcccagttgtgcataactgatgtttagtacaattataattattgtgaagatgtttaaattccatctaaatcaaaggaaggttaaatgggtattaccacagttctggtcctttaaaaacaaagcaggcttcatttccagagtttgagagagcctctttagttgttaccagatactctgacattcctcatggtagctactattagagcagttcaaacataccaagtaaacatactgtaggcttggaccacagttatcacactgaatgcatttgttcatacttttttaatattgttaaaaaaaagctcattaatacatactgcttataaactaggaagtgcaacaaatatgtcaaatatgtattttaaagacttctaagtacaaaggatttattttgttacttgcttaaactgttattgattctccttttaaatgttaaccttttttctctctcctataaatagagttctgggtggagaaatgataagggataaagctggagagtcaggcttaacttggaatacttttagaatttgatttttatctgttaggtgatggagagctgttcaggtgataccgtaagattggcatttcaaaaatgtcacctggtaccctgtgggcatgaggagctagggagtgtatacaagtgttgacactgaaagcagaaagaataattaagaggcagatgtagaaatctgaaagaagtaattgtgaaacctttggccagtacaaaagcaacagagaagagggctgtgttcaagaggccatggtgaggataaagctggtagggagcatagtaaggatgaagggtactcaggatggtgtcacaaatgctggcttgggcagctgcatggaaaaaatggttggtgatgccaataaaaaaaataagaattcaggagtaatacaaaagaaagtagatatgagtggagggaaatcagaagtttgttctaagacatcttgaatttaagatccctttaacaaagacctgcatactttgagcaaaaatcaaatgaacaataaatatatttgtaaagaatggtatgtagacttagtcaaaccatagtcgtgttgtaaataaatgtactagaagtgcttgctattttatcgtattttgttttaatatatgtaactacttctctacatcttgattttcatacactggcatttctcaaggcgagctttgcttgtacagcttaattcctaaatgatgaaaagcttttgttgctctctcctgctaagggtttgttttggctggatttggcaaacactcacttcttcaaggaagctcacgaactctgctttcttaacccccaaaatagtattcatctcataatagatttgcgtaacgttgctgcccttttctaagagtaacatcttacaaggtcatctgctatttttgcatccaatttgctatcacatatttttttaaagtgaagtgtggcttttgtctgcaggatgtgagagttttgttttgtttttgaaatgaagtctcactcacttttgttgcccaggctggagtgcagtggcacgatctcagcttacttcaacctccacttcccaggttcaagcgattctcctgcttcagcctcctgagtagctgggactgcaggtgtatgccaccacgcctggctaacttttgtgtttgtagtaggacagggtttcaccgtgttggccaagttggtctagaactcctgacctcaagtgatctgcccacgttggcctcccaaagtgctgggattacagatgtcaggcaccgcacccagctggatgcaaggttttatcaaatctttgtagaaactgtatttttgttcttcgggattgattattccaggataaccctaatcgttaatgacacttggatgtgattagactttaccaaattcatcaaaggctactgaataaaacagaaaactatcttgaacactggtgactgtgaactgtttttggaggaactgttctttctaaccacagttgataaatacattatgtggttttcaaaatatcacctcaattatttgcacatgcaatgtaattttgcaaatactaagcaggtagctagtcttaatgattgtatcaaacgatcacgttgaaagtgccagacagctgcaccacatttgtaaggagggaccatgaggagcatagaattgtagcctctgttgggcttcttaaccataatagaatgcatcacctcccattaaagctatatttaagaattgtgttctccttcatgtttatttttccggactaacaagtttctcttttgactcattcctaacaaacagtgtagtcatattttcca

SEQ ID NO: 130412 - DNA, 3445 bp, Homo sapiens
agtttcttggggttggtaggaacaatctttactgtaggagagtctgcttacccctgggatattgcttgattgatttcaagggaaaagcactactttcttttttgagcgtgatttggagtaagtgcattatagagttgggtacccaaagtattcttcaaattattcaactttcctcaggagagataactacacagaaagagagggcaagagtatgtgagagcacatgagcaagcactgtttctctttagaattaaagatttatcattaacagaaagaaaattaattcctagcttttaggatcattggagagcagtaattgggttgggggtaacaagtactaaaagtgtcgatgctaattgttgggatagcaatcactcaagggctgatctctctctgagagagatgaaaatactagtttcattgatccctatggagagttgaggaaaataggcttcaagagtttaaggacaggaaaagagagcatgtttgaaaggttcatccatgtgatagcatgtgtcagtacttcattcatttgccaaaatattttatttcatagacataccacattttgtttatccactcatcagttaatagacattcgagtttggaaaagaaggctggccagatcatgttgagctatactgattgtgtgaaggatgtttaaattccatttttatgtcactgagaaggattttgtggaagagaatatggtttcattcatctcagtggaagatcactttaggtgttatgtgtagaatggatcagaggaggacaagaatcgacaaaggaagaccaatcaggaagccaccacattagtacaggaaagaaattatggtagtttagacaagagtgacagttgagatcaagagaagtgtacagaccagaccttgaggtagaagtgaggcttcttggttgtaagaacagacagtgactctggctgatttaacaaagagtgaaattttttgaaagaccatcaaggtagctcacagagttgctgggaaggctggggaaccaggtcagaaaatggacaggagggtgaacagctagaaacatagttatgttcattcactctacagaaccagtgcttgcaactgggctttttggcttctaaagtgagagacatctgtgctaggaagttctccagacacagaagcaaattcagccatgaggcttccaaaaaattgacaaatgtctattatcattagatttcttaacttccattttgcaaatgagtaaacagattcagaaagttaagtgactcacccagaaacacatatttcaccaatgacagacctaagactgggataggtttctgatctcaagtgaatttttgttccttatcatcaccatttgtgtttattggagaccattaacttattgtcatttacaaatgtaatgctcaaaatatattgataagtcaattattacttattgtccagcctctaaaataattcaacagttaagcattgttagataacctagatcattagagcctgacatttgttattctgtttttgccagacatcatggttttgaaggtactgatgcttaaattcgttggatttcacccaaacatcaattacaatttgattatgcaaagtagtaactgtcttctaattataactctaaagctagagaaatgtattagcaaaccagttataacaaagaaaaaaggaaaatttggccagaagtattcttagacctaacagcagtttattagaatagtacagattgttagtttgtggttggaagaaaacaaaccatatggtactatttgtttttcagggttttaaaatacagtgatgtcatatttatcacttgctgaataaaatgaaatcatcttctccttatagcgtgccattctgggaattatatagtttaaaagaacttcagaaacacattgacctttgagttcaaagttaggaaatgatctgagctacaagcaaaatcctataaatacgatgggaaactgtgaactaatttggctcccattttcaatggtagtgtctacattttctcctttcttttatgtactttagacagtttatcggaaagtcgcccatgtcaaatttgtaattaagtgagataagacaaaaatggtatcttttatttttgaatctctagaagcctagcagttcctggaacaaatgtttaatgtttaaatgtgttaaaaacttttcaggtcacaaactctgtaaccagtatgagactactgaaaaaaagaaaaaaggtcactttaccattttaaaatatttctttttaaaaaatagagcattgaaattttagaacatttctttttaaaaaatagattttgaggggaatataaatgtactcactcatgttagagaaatactggtactgtataattggtggactccccttaagaactgaagcaatacccataaagtagctataaagaacatcttttccaagaaacttttatccatttatctcttcccatcatttcagtaattcagggcagcaaataactgttgtctctggtttcttgctacagtctatttgctacacatttgccaaaatgttctttctaaaactcaagtatagtcatggagatgggggatgcagacagggaaatggtaggaaccagtataattgacattatgacttaatgcagcacattgtgccatcagtacacagtcaagccccatcttgctgaggatttagattctcacatcaacacacaaatcaaatacagacaaaattgttctttttaatgtcctccgttacctgtaagaacagaactcagtttgaaagacttgggatctgaaaccacttgaaaaagaagcaattctgtctcccttcttactctggggcaaaatttcattgaatggaacggtggaatggtaggtttttgtttgttgtttttaaaaatagccctctcttcctgccaagtgcctgtagatgaatttctgtaatctaaatgcacatatgctgccacttcactctcctaatgttctataaaaatgggaaggaaggtagtaaggtaagatgagaactttttccagcagttctctttcttgtactaaccctagtaacattgatgttatctcaattttcttttcttttctttttttttgagacagagtcttgctctattgcccaggctggagtgcagtggcaccatctctgctcactgcaagctctgccttctgggttcacgccattcttctgcttcagcctcctgagtagctgggactacaggcgcccaccaccacgcctggctaatttttttgtatttttagtagagacggggtttcaccgtgttaagacagcatggtctcgatctcctgacctcatgatctgcccgcctcggcctcccaaagtgctgggattacaggcatgagccaccgcgcccggcctctcaattttcttaattatagcttaggcaagcttgttttatgacacaaatttggcccatgtagta

SEQ ID NO: 130413 - DNA, 4586 bp, Homo sapiens
gattttatacattagctctcttctattaaacatgataatcagactgaaatattgaagagtttacttgaattttcttagttgtgggggataaaacaatgatgttttacattttaaaaaattagaggtattacacttttcaaatctttgtttttgtatacctgggaggcatttttttgtgtgtttgtgatgtttcttatttgcattattacagatgcattgattgtatattattttgtgaagttattttatttctatgttgcatttttcttattaaaattatacaatctttcagatgaacaggaaggacagtgtctgtaatctctcctcaccgccatctgcagtagtcgtacaaaggtgatgttttatgtgagtaagaatttctgtgtttcatttcacaggtggggagcattaagcgggaaatgaccttcacatttcagtcagaggacttaaaacgtgactgtggtaaaaaaatgtctcatcaacacgtgttttccttggccatggaggaagatgtgaaaacagcagacaccaaaaaagccagccggatccttgaccatgaaaaagaaaacactcgctccatctgtctccttgagcaaaaaagaaaagttgtttcctccaacattgatgttcctccagcaaggtaagggaacattaaatctcacatgtgtctgccccaggaagttggtggagagcatgcataatctctgccagtgtacagactctcttcagtatatagacatatgaaaggttttctgccaagaaattttttctattgcttgtgtgaaatagagcaggtggccttactcttcataactgactttgaggctgctgtagttggaactattgtagctctagaaaagaaatgttttattcaattttaataaatgaataataaagagcaaaggaataaatgcaaaaaattaggatgaaacatcatatagaggactgagcatacattaagtaggactgtagccacttcaaagcaagtgtacacagatctttggtcagaggttggtaaactatggctgcaggccaaattcagcccctgatctgtttttctgtggcctgtaacataagaatggttttactttttttttttttccaaatagagatagggtctggttctgtcgctcaagctggagtgcagtgacgcaaaggtagctcactgcggccttgaacttctgggcacaagcagtcctcctgcctcaggctctagagtagctggctgggactacaggcatatgcagccatgcccagctaattatttttattttttgtagagatggtgtctcactgtgttacccaggcaggtctcaaactcctgagctcaagcgattctcccaccttcagcctcccaaagtcctgagattacaggcatgagttactgtgcctggcctgcctttttaacggcttaaaagaaatgaagaataggcgacacagagcacaggtggtctgtaaagtctaaaatatgtaaaagaaaaaaaaagaaaaaagttggtgatgcctggtttatatcttgataatctttgtatgatagatctactttaaaactcaaccaagagggtttatctgaaatatcaaaaagcctttgtctttctaaaaacaagtaaaaaaaaaggcctttgtcacattataattttatttaaaccacacccaatagcactgaaccaaaggacaatattctggcagaatgacagtggcagtggtggcacatacatattagaccttttactttcttgcatatcatttgtctcacctagaaaacaagctccacgtcagcagggattttagattactctgttcatgctttatccctagccctggaacagtgcttaattatgttctggggactcatgaatatttgtcagatgaaaaaaagaaagaaaatgctgtagcatgagagattgcttatttgtaatatgggtgccacattttgttgccaaaaatcatttataatggaacttagagcttatagcaattgtttgagaagtcctgcatttgtccaagtggtttctaacagttaaccaggaaaacagtacctttggaagaggaataaatgtgcctttcctgcctgttcacgttttgtaattaacgtttcatttctttctatattaaatcaaaagtatcttctctagaaaattattattttctcccattgccagatttgtcagactttctaaaattataggcctcttagttttctttaacctttaattgaaaattttcacgtattcattacttctgtttaactacttggaattatttgcttttctaatgtttttcgtataaatacatgttaagttatttaggattatttccttctactgtggcatggttgtgaaacattttatcataccctgaccctcataggcatctcaatttgtatttgttgtttggttgtctcataggaaactgacatgttaacaatttgaaatgtgaagaactgtgcttttttttttttttcctaagtctgtagggcaaaagttagacttctagtgtcagtttaataccaacttgcaattctataggacttattctacataaaatttccattagaccattgtatatgttaaaagacctggaattaatcattttaaattgccataggttgttttaagtatacctttattctttaattccacctcacttggagcacttgctggggaaaataatgaaaagaggaagaagaaagatgttttctgccttttctgactctggtatgtaggatattttccaccttttatggttcactgaatgtacttaaaagtacatgatcccacgccagtgttattgtgaggttcttaaacagtgtgggaaagttaattaggttttaaatccattaatgcacagcaaaaatcccccaatgacaagatataatttagatgtattaatctattatgggaaatactacttaaggcttcattgtttggggtatctactaatatacttgttttcattgctatagtaggaatttaatcatcataaatacagtgtgccagcagttggtgagataagttgcttttaaaaaaaatgatgatgagggaatcaagcattgtggattataatgatcaaactctcaaactctatttccatttactgctaccaagtttaataaatgtcggacttcccactgtcacctaagtatatcaatattttgttttaaagaaacttctttacctgatacagtaggaagatgtaggattttccttttgtttactaagaagaaatatatctgttgacaggtataaataatgaactttgagtaaatctagagtatagtgaaatttatcaatacaaggaaatctatatacaattggccctgtgtatccatgggttctgcacctgtgggttcaaccaaccactgactgaaaatatctggaaaaaaattgtctataccaaacatgtacagatacattttcttgtctttatttcctaaacaatacagtataacaactatttacatagtgtttacattgtattagatattataagtaatccagagctgctttaaagtataccagaggatgtgctaggttatatttaaatactatggcattttatataagagacttgagcatctgctgattttgtgtctatagggaggcctggaaccaacccccatgggtactgaggaatatctgtatccatatcttataaaatatataataaatgtttaaaaatatatatatgatattttggccaaaaagcaggataatcattttaggcccatagaatgcagagttcttcaatcatttaaaatcagttccctgtaacgtttctcactttatcttttgcttattctcattaaagctaagatttttgttgaactttactttctctggtttgtaaaatgaaactcaaagtttattttctgaggtttatataataaaagcaatacatgtatttcaatcgcttatttcatgtaactagagagatctgggaaccccttcccaccttactctctacctcactgtagtttcagatctcctgcctccattcaacaggtttttcttgagtacctgctacaaacccagtactcagtaaaaatgatgagtgaggtgccagccttcctggaggttacggtggaatgagagggacagacacatatgtagctaattttaaataacagttcctgatttgctcccttcccattaggactgggggtaaatttgtaattaaaggaaaatcttttagttttaaggaagttattaatttgaaacatctatttaaaagcccaatttttttattgatatctttttcaagatagggacaattgaaatagagaaggaagagctcagtatcaatacaaactccctgtttgtttacccaatatttgagaaccaattttaaagttgctagtttcagaaaaatataaatttaagtaagttattaatccagatgtgttaggctgggtcattggagaagcaaatgccaagacaggattaaacatgcaaacgttttagtaagagaaacacctgagagagaaatgggacaggaggggcaaggacaggagggagatgcatgtcagtttagggtgctagtctgagcgcagtgatggagagagggcaggaaagttggagggaagt

SEQ ID NO: 130414 - DNA, 1543 bp, Homo sapiens
ccttctctcttgcagcatgtggattacctaccctccttctctcccctccagcctactttccccctttaaatattgaagctctcaagatcatctttggagaaaggcacaggtcacagactgttcctgtggtgtcatgttgttttcttcaagacaagttcttaaccttggcaagataaacttctaaattgattgagacgtgtctcatgcattttggtttacagtccttaccatatggttgggaaaaatatacaagtgaatttagctgaggttaaatttagtattggactttacagaaatgaatgtttctatccaagccttttcagaaaggatttaaaaaaaaatacccaagttgtgtgtctcccttgcataatgtaaataaaaggcttgaaactttagccaagcagtcttccactaccaacttttccaataactttccatcctaagtgtgctgctgactaatcttccatgcagcacgccaagtcttgctttgttgaatattaaattgtcgacatattaaagttaaaacttgctgtagtacactatttacaatagcaaagacttggaaccaacccaaatgtccatcaatgataggctggataaagaaaatgtggcacatatacaccatggaatactatgcagccataaaaaagaatgagttcatgtcctttgcagggacatggatgaagctggaaaccatcatcctcagcaaactaacacaggaacagaaaaccaaacaccacatgttctcactcatgagtgggagttcaacagtgagaacacatggacacagggaggggaacatcacacaccggggcctgtcagggcaggtggtggcaaggggagggagagcattatgacaaatacctaatacatgcagggcttaaaacctagatgacgggcggataggtacagcaaaccaccatggcacacgtatatctatgtaacgaacctgcatgttctgcacatgtatcccagaacttaaagtaaaaaacaaaaacaaacaaacaaaaacttgctgtcgtaaacccagcattaacaacactgattcctgagatagtgtagttgtgtggtttggacatatgatgccaaaacataacgcagggcttcaactctgtcatgctgaattttacttcttactccatcattgaagctgccctcacagggttaacaagaattttggacagaaatactgtaattaagcattaatttgggtttcctttgactcacttttttttgtaactgaaagtcatggaacactagatactgaccatttgcatccccactgtacctgtagataggatttctcttttgttattatttttttgagtcagggtctcgctcggccaccccagctggagtgcagtggcacaatcacggctcactgcagccttgacttcctgggctctagtgatcctcccaccccagcctcccgagtagctgggaccacaggcatataccaccgtgcccagctagtaggatttctgacattagaatcataaggcttttgctcaagatagataggacctctgacattagaatcata

SEQ ID NO: 130415 - DNA, 1124 bp, Homo sapiens
tttagggtagggttcaggtgaggagagtgtgggaccccttggcagaaactccagtggggaaaagtcaaagatagatgttctgttctgtgtccagggtccccggctctggctgtggcagtggcagtcagggggccctgtgtggccatcatagctattagaatgggcagaccatcagtagtccagctattcttcagtagaacagctgcttggcctccttcgaaaagaaataactgggtggggctcaaattccatctgcataaaatagtcaccataaactaaatgtggaagaagtaaagttggtgtttattatcatgattgttcttgactataaatgttaaaactcattgggggagtagggggctggatttcctgtgatccatagaaaggaagaagtgtttcgggcatacctggggaccaggcagctcgatggtctgcccctaacaattcaccttggaggatggaatagtcatttcccaggattttgaaatttatgtaactttaaccatgtcttgcttctgaaaatttgccttttaatctctctacaagtctatcctgtattaacctcgtggtatttgcagaaggaagtttcaaagtcccataatttaaaaataaaataaacccaattttctccataaattttattataaaataaggcttgtattcctggaggcaaagtcctccatgcactaaagttgaatactttgataaggaaagaattgagatgctgaccattctgtgcttatattaaacctatttcttccccccaaattactatttcccccagtttactatttccttctcagtagcttaggaaagtgcttttagcctgagggattctgtgatcccacacttttgcagccctaggaacttggcatctatcctccttagacttttatgagtaggtcccaccatataacatgcatctgcacctgaaactccatttatgtaataatgctacaagagtgcccatgctgtttcagatgctcttctagctcctggagatacatcagtatccaaagcaaaaaaaaaaatgcctgttatcttcatggagcgaatattctggtggagcagcttggacaataagcataataaataattatgcagtttgtaagaaaataataagt

SEQ ID NO: 130416 - DNA, 1031 bp, Homo sapiens
ttaaagcataaataaatgctttatctcaagtcatgcttctaacagacgagcagaaccaccaggagatgtgtgtgtgtctgttgtatttatgtattcatttactctctctctctctctctcattatggctggcttagcagcccagagcccacaggcaggaagacaggcaggaaggatcaggagcaggctggaacccctcaagcatgtctttttatcttaaggtccccctacagtcatctatcaggggttaacgcaattcttcttttgagccatctcccttcttatgaaagcctcagtgttgaagcaggaagcgtttctcccttatagtcatttctatctactctcttatataccagtaagacctgtattataaagaattacgtttatgataagcagatatgcaaatttattctaatatgtattgcctaatttcttgaatacactctagctgcatttattaacatattttatttagtcatctgtgcagctagtaaaaataattggctatctgtgaattagcacaatacaagttaaaatgtgagttcattagttttcaacttgagtttttaatttcacctgctgtttactgcccaaaggaatgataaattgtattttaaatgaaatgtatttgaaggaagaaccttcagcaatcaatattcttttttacttaaaatctgcttctaatctgctctgaaactttaaagatgttgtgttagactgtggcaaccactgatgaatttgaaaagttgtgtttctagttcttattgccaaaggaattagaggcgttaggttagttagtccagttatttttattgaaagaagttgaaaccagctcatatatcttaaaaaagaaaggtaaaatgcagtgagtggggtgggaatttcaattatgaaaaaggatatcaagactttaaagcccagagacagccgaagccaggcctctgggccggaactctgcaaactcagcctggagctctgtgggaagaggcagctcccactactgctggtctgtcccaggactctcctgccctc

SEQ ID NO: 130417 - DNA, 1157 bp, Homo sapiens
gtgtgacttggtttcttccaagactgtgcatccatatgatgcgtgtgacaagaagcacaaggaagacagtgaggtcgttgccatgtgcagaagagatttggcaaacacagtggcaaaggttcctggtgctacccaggcatctgtggtggaagttctagctttcagaccctttgtggtgggaggcagtgcggggtattcttgctagctcagacttgtgatgtggttggacttctctcctggctatgtgcagttgtcttgttgatcatcccagcctgattctccaggcttctaggagattgaggaactatcaataatcctctttatgtttaagccagctagggaagtctgctgtctgcagatagaaattgggaatggtacagctactataaagctgagaaaatatgatgcttcaagggagctaattgtgtttagtactgtttaaaaatggaaattgaaaagtgtttattaaacttagtgataggctcatttgtgaccctggagaaagcatggttttttggtttggttttgttgttgttttgatggaagtggaaatcagttacaataaatagaagagtacataggaggtagggaagtaaagacagcctgggaagacgactctattgataacttgactgacggggaatagagcagaggagcaatagttgagcaggatcaggggattttctcgtattggagtgaaataatatgtatgaagcaatttttaatgaagtgtcttatacttcgtaagggcttagtaactggaactgttattattatgattgttactactattattgttgtcattttgtcctctgtatactttagagcgggggtgtccaatcttttggcttccctgggccacattggaaaaagaattgtcttgggccacacataaaatacactaacattgacgatagctgatgagctaaaataaaaacacacgcgcacacacacacacacgcacacaatttcatgttttaagaaagtttatgaatttgtgttggccacagtcaaagccatcctggacctcatgcggcccgcaggccatgggttggacaagcttgctttagagtattgtgagtatggggtagcaatctcttctgtctcctgattttacagatctttttttcagctcttgcaggctggcctcattgcca

SEQ ID NO: 130418 - DNA, 1301 bp, Homo sapiens
catggaagactgttgcttgactttaaagagtccttccccattaaacctcaaagatctcctggtcatttttaaatgaactggtaatagtatcctcaaagtagaagaattaacgtgtgtgtgtgtgtgtgtgtgtgtgtgtatgaaatctctgtatttaaaaagctgggttactcaataagtctggaatgtcttttagttcttaccctctaagataaaatatcaattatgtcttaaggttatctgcttaggaaatgaatagttgctgctggaaaccacatgtaagatttactcaagagcaactactaaaaaatatcagtgaaggtgtgcaagtcattagtcaatgaattgaatacatcagtgatatggcctgcattacttaggtggagaggcaaatctctacaaaatcaaaaaactggtttaatcaggcatgattcttgagcagcattccctcataaaaatccaagatagttgagtgattcgttcttcaaaatcttgaatgttatacacaatactcagcagcatagaaaataaagcgattctttaaagagtataaaaatatactctttatttaatattactaggaattaatagtgtcagatagtttttagtatggcagaggagataggcccatccattttactttagcaatttttattaaaatcttctgaagtatatgcttccctgtcccttgatgataataaacagtggtgaattaggaatatcagacaccaacctgtgttttaatacagggactcttgcatcgctcaagccattaacatctggatcaaatggccctagattgccgtaattttgcagatattttgtgttcttcctctgtttgggggtatttgggtgtgcctcttgtgcttcagaatcatactttattagcaagtctaaattcatggttctgcggatagcttcttactgttttactaccagtaaagtccacaatctttaagactgataatttcttcgtcattgctgaaagaccttccaaatcctcaacaattgcagaaatttacatgttgacatgtagagtatttctgtccttaacagagggatgcagaatactggagcatgctaactctttttgatctgatttaagccaggaaaatagtggaagaaaggtgagtagcacaagttggatcagcactacttttatcaaatgttgaaacttcctaaatgtagccaagactgttcttatcaccagagtcagcttccagtgtgaggaaatcaaagtgcaagtgcaggaaattatctgtattggatttggcattggcattgaacccagcccaactgac

SEQ ID NO: 130419 - DNA, 1048 bp, Homo sapiens
gcaggtagagaagggaaggtgactgggactgagctctggagcacttcaaatgcagtgctacatttctctgtctgtctctgtctcttaacagttttattgtatttaattcacataccgtataactcttaaagtgtacaattgagtgttctttagtatattcacagagttgtgcagccatcatcacaatctaattttggaacacttgtgtcacccctgaaagataccccgtacccattagcatgcaaccacagttgctttggctttccattgccaataacactttattcattcattgcatttttcaggaaaaaaaagaagtggaggaaaggagagggttaatgtgttagaaaacactgggggaagtaagggaaaggaagaatccagtacagcaaaatcaaatatccaataaatatactccagtggtggggtcatcaaagctcaagggggttgtcttctgcagttcagaaataaggggaaataaaagacaaagacaagttctcattttctttcctcactctttctttttgtaaactcaagataaagctttggtttctagcagtgaacagagttgaattacattcaatctgcatgctactagacagtcttgtggctactttgacattggtcttttgcatcagcagaagagtccctgagtgaatttgatggacattcttctttcatttctttgtcacccacttcaagtttctaagtggaagacttcctgcccccccaccacccatctctcatttctgtctactctaggatttgagagcagtaaacagacctggtccatacaaatccagcagtaaaagtgtttgacataaacacaataaggaatggacttcaatcattggggtatggattggaaatgaaagctacagagctcctaatttattcataattgtatgcaagtcttttataatttggagttgccccaagaattcagtatgtacatgcatcttgtcgttttggttaaaggtaggagaggagtcaagtttttgggacagaagatcttgtctaacataggaaataagggaaggagcataat

SEQ ID NO: 130420 - DNA, 2758 bp, Homo sapiens
actcacttgttgcatggctacatcaagttacttactgtctctacgctttcatgttatcttcaaaattgggataatatgattccatcagtggctatcgtttttttaatatggcccagagacctcctgaaattagacatgggtggcaatttattttgttttgggattcagaaaggaaacatttgtaaaactgtgctcaaggatcaaaaatcctgcagttattttgactgttacaacctccttattaatgctaccaaggcatttcagagagttgcttcctgaagtgactccattcatctgagctctgtggtgttccgtcataatatgtggtgagctttaatcttccctttcagctcaggaagctgtgagtcatttatctacttgtgcaaagaggacagagacatcctatctcttatgttcatcagtttgttcagatctatagtggttgtattggagaaacctggctgttatccaaaagggtaggttggaagaggcttaccacacacattgaatatatttcttaaagctgctatggaaataaagtgatgtcaccttctacctctaatttgcatgtggctggaatctctgaggcatgggtttgcccttcccaccctcctgtgcgttggtgtctcagacttgtaatcttgcttggtgaagaagtcattctttgtttttttgggtagatggaaatgggtggcccaaagtgtacctctaaactcatatctgcttgctcccactgttagggagatgtctagacacggagaaaagggcttggtaattaattgactttgggaaattccacttaaaagtagagatacaattttttttattttataaaatatttcaaacaaagaggaaattggaagagtaatataacacacacatgtatatgtaaaagttactgactatatatgccaagggccattttgagtttctaagagggtgaatatagattgtgatatttacatatttgttggacttttttctagagcatctttcctttgggatacattttgggaaatattggtttataatttattttcttggtgggaaagacatggataagtatcttataccttgagataaataactaaaactgcataattaaagaaataagttgtcaagtgaatttcacaagcacaagggagagttaaagtgttgtagtgggtcatataagctttgacatatttttcctcataaagctgataactcttcagtattgagtttctaaaaaaggaagtatttcctgtggtaaattttcacttgtgtatctgtgaataccattattgtgtgtgaaacttaaaaactggtagagaacactacctttctcaataaatcagtacccacgatgggtctagtgtggaagacaggagggtgtgggaagtgttgttgtaacagaatttaaaagtgccaagggagaagaaattcacaaggtgtttatatccaggaaagtgtatttaataatgttttttacattctctaagaaaaaaagattgaaaatatcaggagagtctcaatgaaaagaacatacaaaaagaacataccaggattctaggactgatacattttctgtcaacgctattgctattacaagtaaagggattaagcacttgtgaatgttgataccatgtataataactctaattggatattgttcaacgtttatttccatattacccaatatttagtgcattgtaactaatagaaggccctcatagccaaccttacttgatcttcttgataaccttgagaggtggatattattatccccattttatagatgtgtaaaataagcctcagagaagaatagaagtttctgttgaaaaatatatatgaagaattttataccaaatgacagatatttgtcaaacatttcagaaaacatttggagaccggcagagttttttaaataattgaaataattggaattggtacctaagcagcaaaggaaatttaaggagaaagaatattttgaagtaaattataaattaaaacaatgtgaaatacagttttcataggttgtcataaatgctttcatgtagtttgtgcatgctttgcaactcagctgcaagtgcttacagaaactaattttttatttttaacaattttttgcaagtttttgaaaatgttttgattgtcaggttcatagacttctaactcaaaactaatgtaacaaaatattagaaaaagtggaaatattagaaaggggatcttagaatttataaaaataaatatctgaagagtacctatttgaaaaaatgtagtcttgttttatcatatattagttacagtaaaaattatcagaaaagggggggaaatggacaactgagcctatgtaaacactgaacaaacactgtagcttagtgtgggaaagaggaggtgacagtgggaaagggggggcatttgaagggttgacatgacccaaggtagagtttatagaaagacagcaaggtctctatttgcatatcttatgacatgagtggctggtgggtgttcaagaggctctgaaagtgtgcttttagccatctgctgagtgacaacaattcttttagctccttattctttttttttttttttttttttttttttgagacggagtctcactctgttgcccaggctggagtacactggtgtgatctcggctcactgcaacctccgcctcctgggttcaggcagttcttgtgcctcagcctcccaagtagctgggattacaggcatgtgccaccgtatttgactaattttttttttttttttttggtag

SEQ ID NO: 130421 - DNA, 2659 bp, Homo sapiens
ataacaagcacagggctgtgctctgcaatcctgtgcaacagtttagggataagaacacaagaatctagagggtttgataatttgctagtgtaatagacttatgaaaagcttggacacaaaagactgctagaagcctaccaagattttaactattgaaaaactgctgaagaaaggcttttaaatgagataatatatgttaaagttcccacttccagtgctcagtaaatattaattgaatggaatctgcttcctctgtgccagttcttcagggatggttaacacgtctattagactatctcttgaatatcagatgactttaagaagcctttggcaggaactgtgcagcaaacactgaattccaatttgctaacaagtatgtgtcttgcaaatggtctgtgttggctcgagcaaaaggcatatgcttaagataccagacaaagttgtcattcattgaatcgtggactgctggagttggaaggcaaacagatattatctagtaatccagtactttcatttgaccaccgagggcactgactatgcagggtggtatgcctggtccatctggggctgctagcaagtttgctgctgccatgatttgtgccctggtctgccaaccccaatttattgtcctcagttctgggttggtttcttatgctcaggaatgatctacagctcactcccttagagttgtgggttgaaaatccacaattttctgaagtggtctactacttactgcttatcaacttctatttttggaatacttgtcttttgtaaagtacctcagctagaggtggacttaacatgtggctgtggtgtgatggatggaaccctctgaatcctgcctgggccaacccccgctccctgtgagctttccaagggacacgtatacacagaggataacagatgagaaaagagccccatttcactgggaagtgagtgcccatagtccctggtgtggtgctgatagtaaacttgcctagaagatgtcattaccagtcaactgttagagcctcttctccttcaccagcattttactactggttgaccatggagggccccataacacaagcattagagaaaagaagagaaaaagcaagaagtcaagccctaccctgaatctgcttaccccctgcctcctagtagggaggagccaagccaggcctggtgcacctgtaatcctagctacttggaagctttaagcccaggagttcaaggccaacctgggcaacatagtgataccccatctaacacagcctgagagagccacagccctatgtgagtttgaccttctaaaattagtaaatctgtcccagttagattaatgtatcccccccccaaccccgcaagaggggcttagaggagtaagggagcctttccctccccatgtcattgtataatatccaaacttctgatgttcctgaaacaatcagccttgttacaatgacttgatatgtttgcagaagtcaagcaaacttgacttttagttgccctgtgccatcttatcttaaggtaaatacatgatttcccttagactttctgaaatatttgtgaatacttcaagaccctcataaccagccaaatctatgttgttgaaataaggatgattttctttgggtgtgaggtccatgttttggtcattccctctgttaggagatatttattgagccccactgtttaccaggttcctgctgtacacacaggatacaacagtaaataggccttcttccgctttcagggagcccacattctaacacattcctgccaagttgtctgtaaagaggtatgaagtcgcttttcctctttatccctaatgagatcaagattagatctgcccaaagccttttcttagctaccacaatttgagatgtaattctgaaatatacctttaaaacaactgtaaccaagtgatccatatgaagaagattctgtggtttggccaggaggtgattcctgaatagctggttaaaagatgagtttagatcactgaatttggcaaataactccagttgctcttatttactagatgaaatggaacagaatataagtctgatatatgtgttcatagaattagaatgattaaagtcttatacttcatggaagatacagttttggaaaaatctagagttacaatttatatgtaggaaacaagcttgactctagagttttcaaggagagtctgtaatgttcagactctccttgaaagtcagaactttgcagtaacacacaaggagggttcgttcatgttgcagaacaccatggagccttgaggagcaaagaagtagtagagtgctgcctgggcactgctccatggaggtctccgtgccatacctgatggtcaccagtgacaacgtttgctttacatatgttcttgtcataatggaaggttaaatgaaagtcatatctcctcgattcagactaattgtacgtggctagttgaagtaagtgaatgtcaaaagtgctccaacattttaaattaaacccagtgttttaaaaggttgtataccctgaaataccatctgataaaacctgcagaaaggataattttagttcataaatgtgaccctcattgttggcgcatcagtgagatgggagagaacaggctgagtcaaaggagatgatcctcccagctgcccccacccaactgttacttctctgtaga

SEQ ID NO: 130422 - DNA, 1946 bp, Homo sapiens
gctttccaggcagagggagtagcagttgcaagtcttgaggtggaaaggagaaaagggtgagtgtggctggaacttggtaggtatgagatatgtcaaggaggctgggaggtgcctgcaaagagagcctggtgggccctttaaaaggatagtgaaatctttgaaaagttttaagcaataaagtcttacaaggtaatttgtagttttcaaaagatccatgctgtgtggaggacagtagtagaggcagggaggccagttgggtggctgtcactacacagaccaagggagggagagggcagcttggagttagagattggcaggagatggcaaattcagaatctattgtgaggatcaacctacaagaacttgtggatgggttggttgatgggtaatgaaggaaagggaggaatccaggatgagaccatgatgtaaatgttggttgaaggtaccatttactaagattaggaaaaccgagagaacaaaaatcaggttttctgttttgtgcatgtgaattctgagatgactattggacaaccaggtggagggtgtggttaggcagatggtggtgagatggggagtggataggagaggtcagggatagtgggaggaatttgagcgacatcagtatgttaatgtcatgtaaagcctgggggctttaagggagtgcagggggccaagagaggagagcctggggcctgattctggggcacagcactatttaagtttgggtgtaaatggagaagccagcaaacactattgagaagcagcagccaaataagtagaaggaaaactagaaaatctaaagtccaataagccaagagaagaaatagttccaaaaagtgggtggggagtaatgaactgtattgaatgctgctgagatatagaataagaaagagagagagagatgttcatttggattagataagatggaacttactagtgtccttgacaagagaagtttgagtgatgtgcttggagtaggctgagcagccgatgagaggtgtggacagagggacacaggaaaaactcttttgacaagttttttggaaaggagaacaaagaggaggaggaatagctggaaggcctatggcctaggtttttttaaaagatgggatacagtagaccctagtgttatgactaaagcatcatgggaattatgtggaagaggggttattagttttctattgtagtgtagtgtaacaaattactacaaatttttttttgctttaaaacagttcttagagtttctgtgggttaggagtctaggctcagcttaactaggttttctgtgaagagtctcacaaggctgcaatcagggtgctacatgggttgagttctcatctgaaggcttgaccagggaataattaacttgtaagcttacatagattgttggcagaattcattcccttgcatctgtaggactgagggtcctagcttcttgctggttatcagttggaagttgttctcagcttgtagagctcttctccccctccccttccctacttactgctgttttttgtcacatgggactccttagcttggcctcttacttcatcaagccagcaaggagaatcttagagcctgcctgccagcaagatggagccttgcataatgcaatgtagtcaggaggaataggccagaaacttggccatattctgttggttagaagtaagtcacaggttccacccacaacctaaggagagggaattttacaaggttataaacaccaggtggtgaggatcattgaggggtcatttagggaggaaccaaagatgtagagaaaagaaaaaactacaggaggaaagtccttggaaagccttagggagggaacctgaaacccaagtaaagggctggcctttgggaaccttcctccattagattggagagaagatggagaatatgagtccagatgtgggtatattttctatattgggtgatgatcagatgac

SEQ ID NO: 130423 - DNA, 1083 bp, Homo sapiens
gcgaagtcccctgtacactgaagcgccgagagatttttccgtttgtgtatcttcaggagataaggggtttattattacacaactgactggttgggctttcaggcatgctattggacaaagcaaaccacgttgagattcatgcacggtgtatgttgctaagaagttttgagggcagcaagtggtaagcaatggagtgagtgatttttctcaagagtggttcctaaaatcagctgaataacattttaccagagttttcagaaggtattggtatttcaggaagaaaaaaaactcatgaacagctgagcttaatagttagagaccactaaaaaaagctttgggggctcaccaaaaaaagctcctcaaagcttgaagttgcatttccaaagaaatgttgaacatcggcaattagaatagccccagagtagatgtgggcagaaatttatttcctagaccaccctggaagtaccagctctgggagtgagaaattttcagcaagtagttatttgggatgatagtttttgacagctgcttgttgaaatccaaaccgtgaccacattcattaccatggtctgttgaaaagcctgcattgtatggctacaagatatagctgggtttgaaatgaagtcacatggtgtcagtgacattgaatatcaagagtagtgactccttagcatttttgtccagaaatactgaaagtgtgtcctgtggtttgaatagtgattgcacaatttgtgatagaaacaataataatttatgctctgtgatgaaaacaagcttaatatagggaaaaaatcaaatccgtaaaaacagaataatgagtgtgataattcacttgatcagtaaaggtttttcacatcttcaagtaaatttcctttaaattctttcaaaatgggcttcattttataacactctcatttgcccacaacttcagaaatttacacagaatgttggagtcatttgaggtttatcttttaaattactcttttaaagacactgtatctgaagagattttctaatggaatatcactagataattttattataatgcatatacgaatgttaacctcttacatatattcatgc

SEQ ID NO: 130424 - DNA, 1040 bp, Homo sapiens
attatttcctactaatgatattttcatatctctgaggcttttctctccatcttccttttcttacagcttttttcatgcaagacccttctggtgtcagtaactgcaatcctactcacactaaagaaaaaaaacagggcagaagaggaatttatcagcttgggtaatccaaccacacatgaacctgagcttgggaaaattagatgtggggctttaagtgatgtgtggtcctctgtctttctgtctctgtctctgtctctgtctgtctcttctgtctctctccttctttctctctctctctcagagtgtgtgtgaaacttatttcattatctggccgactagagccagatccacaggcagctctggccacacacttgtccaccttgtgaacaggtgcagaggaagtctttgctatgtgcatcagctggaaaaatcccagtgaatgatttctggatggcccagtccgaatcatgagcggacacttgtggccaagggtggatggctgtgatggatggcctgcaccaaaccatgtagttcaagagaaaaagaatgattactgtattgagcagaaaaagaacatgaaaggccaccatatgttataaatataatcaatactatcacaaatctgaaacatacaaatttgtagaagggataaaagtcacatctaacctccctacccaaagataacccctgtaattgtttttggtatatttattttcatttcttttctatgcatcatcctttttgtctcacattatttttccacctaattttataatgagagattttcttttgcacatggtggtatataacttgtagatgtttatggagctagtagggtaaaaatgaatcataaaaatattaacagaatatatgcatgaatatttttataacctctagggaatgatagccattttaaacttgataccaagtcagggccatagccaaaaggtgatatatgatcacaaaaaacttgtagactttttcacaaaagacaccattaaaaagttttaaagtaagtgaaagatagaaaatattatcaa

SEQ ID NO: 130425 - DNA, 1101 bp, Homo sapiens
atcttcagtcactccttgttactttaacccaattgggcaaatactgggaggagtgtactgaggataataatagcaacaataagagctcacatttcttaagagcctaacacgtgacaggcattgttctgtgttttacatcctttatctcagctaatcttctcaacaatctcatgaggagagtaataccagagaagtggaccctgagaactcagaaagctagcgactaaggagaaggttcaggatttgaactcagggtgtctgattgcagagctagaactacactgtgtatatgcagaggaagcatccaatgaatcatgagcattttatggtgactattattcaggtatgtatcttccatgtattgagtactactaccacatgcttaggctgggtttgacctctcatcccatttacttttcacaatcacccatggaattagggtttccgtttaacaatcaaggaaactgaacctcaaaggcattctgtaacttgcccaggattactcatcgagtaagaaaggggagtcctgaatattccagccagtctgcccttttcacccctttttagggtttgctttagagagtggattgaatttttcctcatcagactgaggattctaatgaggtcacacggatgataataattagaaatcaatggcttgtgtttctcccttcataagtagagtcttagtccctgagggtggatcacgtgggctcccacacatctcctcctgctgcgagctgttcgtgctctgtcagcccctctgccagaggaaggtgtatcatacagtggtctgtggcacaagaggaagaaggactcacacccatcttaacctcagcagtgctctgtgtgccctggtgccctaatgtctacagctgtctcagtgttctttaaaatgtaaaaaagctctttcacttgttacttacagtccctctactgtccatgagattcaactaccagtgcatggggaccaggccagggctcaacgccacatgacaaaccccattctgtatccagaatcctcctcctgtccactgactgagaggtgcctttgttccctggtagatctcattgagcctggatctttctctcctcctaatg

SEQ ID NO: 130426 - DNA, 1164 bp, Homo sapiens
ttagccaggaatggtggcgcatgcctgtagtcccagcagtggggggcaggggggtggttcaggagaggattgcttgagcccagggaggtcaaggctgcagtgatccatgattgcgcccctgtactctgggcaacagagcaagaccctggttgaagaaaaaaaaaaaaaaaaaagaacaagaagaatccacccccaaacatatcaagataagacatccattgcttcaaacactgggccaggcagctgtatgttcccgctttcgttttcaggtaagaaaaatgaagacctagaccatggaggggacttgcccagagtccaatttcaagtccagtccggggctctcctcagcatccagcacacgcttccctgactttgcgcaaaggtcttgctcctgacagggaccgaattacagattctgccactttacccgagaattactctccaaacgcactggtctctttgcaggacacagctctctgcctccatgtcaccacctttgaaggactgactgattccctcggctggtgccagtgcctgctcctgccatggggcccgcggggagcctgctgggcagcggacagatgcagatcaccctgtggggaagtctggctgctgtcgccattttcttcgtcatcaccttcctcatcttcctgtgctctagttgtgacaggtgagaaccagagtgtatatacctgtgccttaaactaatacatcccctgtacccagaagagtttctgtggaaagcctgttaggaatggaatcccgccacagagccgtcccagaaacttgtgcattagctttaactctcttctctctgctgcagagcgtctcgggacattctttattcactgaaggaaaacccatatttggttttgctagggagcaactagaagagcccttatattttaaacttcccagaatgaaagtcttgctgttctttcgatcacacccttgtcaaaatggattttgtcttttttcatgtgcgggcattttgaaatcttgtgtgatgcgcatctttttgccaccaccctgcggaagtcacagaatgtttgctgctacgtgatttcggagggattgtttatgattaaaaatgtgtagtgtagaccttcagtttctcaagaaacagattattttccaaggagaggaacatgctgtatatgaaat

SEQ ID NO: 130427 - DNA, 1101 bp, Homo sapiens
gttccatgtggctggagagtcctcacgatcatggaggaaggtgaaaggtatgtcttacatggcggcaggcaagagaaaatgagaaccaaacaaaaggagttccccttataaaaccatcagatcttgtgagacttactcactaccatgagaacagtatgggggaaaccactcccatgattcagttatctcccgccaggtctctcccgtaacatgtggcaataatgggagctacaattcaagatgacatttgggtggggacacagccaaaccatatcagtgccttagttatagctgcaaagacaaacatagagtttgtgctcatgaaggttctattctagaggttgtacatacaacaataaacacaaaggccaataaataatatgctttcagataaggataacaggaaaagacagcagggtaatgagatgaaggctgagtgtagtggagtggacgggagagtttcagaatggttggtcatagaatgcttttctgagaacacgatctttaagcaagactgaaaaaataaggaggaaccagctgtatgatgacctgaaggatgttcattccagaaaacaaacagctagtataaaagctccaggtgaggggaagcttgacatggtcaagggctagaaagaaaaagcacatgagaagtcatggtcaaggagaccaaggaaccagctgaggctggaatggttgggtccacctgccccatgagaacccttcaatgaatgttggtcaaactgagctgaacaaagtgtactgtgtccgtttaaacaatgaaggtcaatagaaaagctaaaatagcctaaatcataaagaaaagttattgtcataataatgtgttgatttattgtacattctttctaagaattatggatcattttgcaagtggatagagaaatgtattttggatcagctttgacatacgcttaaaaacagtggtatgttaccctcaaacaagtaacaggccaagagattttatatatttcttgttgaaatttttatatttgaaaatgcttaaaaataatgctattttaatttctataataaattacaatagccatataacttttgagggatgcagagaaaactacatagaaa

SEQ ID NO: 130428 - DNA, 1001 bp, Homo sapiens
cattcgcataccctgatcttgctcactactttcaacctttctcataagatcttgattcctaaatttagccacccaccaaatttcttcatgccccatatctaccttaaaattaacattttccaacctgatttcttcaaatgtccatttcccaccctgaaatcagttcctcttcctgactttcctatcccagttaatgacaccaccatatgcccaaggtgtatctcccctttttattgctcatgcctgatgtcttcaaaagggctgttcattgattatcctaaatacatacactttttgaagacagtaacctaggcttttaagtaaccaatgctgatcattctagtattctcagtccccatgtgcgattagaccagaaattcctttgacagtctgtcagaagttgctttaaggtatattcagtgagaaataactatggtctgtctctgtcaagtaagccatggaaatatgaatccatttctcgactttagatactgtttcacaagtaagaattaaagaatgctagaaagtcagaatattgtaaaatgtgtagccattactcaaatatatggaaaagaacacaggtttatgacttattgagttgtcacttcaaagttattcgtcattaatgttttaaaattaaatctctattctttattcagggcctcattggctggcagggtaagaagttaaaattctaacatcagattatcattttttcttgttcatccaaataatatattcagataatacattcatgttcattcttatcaatatcacttgaatattattccaaagcttatgatattattaactctgcattctcttttatgaatttacaattacaattatgctataataactgatgaagagcacagaagagcattgtaaaaataaataaactttgaaatacgaaaggattagtggggataataaatatccgctcattgtcttatcatctttgatcttggcatttgttctatccagcaaatattttcatagta

SEQ ID NO: 130429 - DNA, 1026 bp, Homo sapiens
acaggaaatcactcttgatgcctcttccttcaaggtctgtatgctctatctattaaatattgaatctgcttttgatttcaaatccttcggccattctcttagtttagacccttatcatctggatgacatatgttcctgtattagctagtctccattctgccagacttggctaggactatattatcaatattttccaccctcctgccagggagaattttctaacatgccaatctgctcaggtcattctttaaaatccttcattgatttttctgaacattgtctccaggtaagagatctaactccttaatgtggcatagagtcttttgcgatcagacccctggtggtcagtcagcctcatttcttgcattctgctgtgtgatctgtgttctagttatataactcagagttcctcacgtgtggcccgaggctttcataaaccactccctagagttcgtcagctgacttccctcttcaggtgtcctattctctgagaagctgatcctgattggccaaccacctcaacctaatctggtttcaatgtccctcatttgcattcccatgtgctctattacatccctttcaaaatgcctttcacactgctgtaattgctggttagtggtctctctttctcccactggactatgagcttcttgaaggccgatgtcacatcttaatatttatttcctcagtgtctagcattggatctagtctgtaggaaccaatcacttatttgtggtgttgggcaagttacatatcctatctttttaattgtcctcatctaagtaacagaatgtctcatagggttttgtgagaaataaaagagctaatatatagaaagcatcagaacagagtctggcacagaataagagctccatagatgtgttcttgttttatagtccaccccagggacatagaatactcactgaatatttgtagaatgctatcgattgataaagccaagagggagttccacaaattacctgggagagagagtagaaaaattgtgggacatgtcatggctgtatt

SEQ ID NO: 130430 - DNA, 1044 bp, Homo sapiens
catttgtgggtaaagaatttctaatttttccttgacaattaggagtaagttttatttattgtctttttaaatttcaactggcattactgtgaaatgtcaggaaagaagggaaggtgttgacataaaaagtgttacttcaggaatttaggaaatgagtttttcatcatcttcatcgagttctagtttacatgccataaaagtctccaatttcaactgaacaattcactgatttttagtaaacgtacagagctagggaactgtcaccacaattcagctttaggacttttctatcaccccaaaaagctcccttgtgcctgtgtgcagttctcattcctgctgccagccccaggaagccaccaatctttctattgcttgctttcttttctgtctcactttctgtccttatatatttgccttttagcaaatctctggacatttcatttgagatattaatatttaccaataaaaatgtagtttctatcttctttttcaagatcagcatcaccttattttttttatattgcctgtaccatacacatgctacagtgcaggttcagggactcttagttatcggaactctcagactaataaagtgaaacatgcagcaaagaagtaaagcacatgtgtaagagtggaatgtgtgcctgtttctcagctttgtccctgtttcaatggtggtcaccccctctactacttttgtaactctgtctacaaaaataatgttatagaaagcattgaaaagctgaagtcagataaatactctcaagatgtggggaaactacaaaaggattaaatctggagaacatgcctgtttgggagctgtattctggtcaaccatttcttagccaaaccctttggggccaaatgtctttcagaattcagcttttagaaaggtaatacagtgtattcattgtatattaatgtaatacccccatgggatccaggcaacacacagtaatttttgtagcaaagtagatgaatattcacatttagttagagaaaaactaaccacatgtcagttcaggtcagtttggggaacaaact

SEQ ID NO: 130431 - DNA, 1034 bp, Homo sapiens
ctggccaacatggtgaaacccagtttctactaaaaatacaaaaattagctgggcatggtggtgtgcacctgtaatccaagctactcggaaggctgaggcaggagaatcacctgaacccgggaggcaaaggttgaagtgagccaggaagatcacaccactgcaccccggcctgggcaacagagtaagactttgtctcagaataaataaataaaaataaaattggtcactaacagctttgtacttccctctcccatttcacagatgtccagctgacccaatccctaggtaccgtatcatgtattcatttgcaagtaatcaggttctcttgattttctaaaagtaccaaaaggtgtgactaaatcagcattactgtcatctgccatctccgtgttgagagagccccagggttgcatatgtaagcttttatgtgaatttattctctgaggaatgaagggtgatcagataagttctcaggcatctcgtctcactgtatttgtgactccatcattactattaaagttgcttccccctacgccatcctttcaccccaaaccatacccattccttcatcatgcccattgtggtggaacatgatgaaactattgggaaacttaagtgttgagggagctcatgttctaagtcaaaggaaaaaacacataacacaatactttttttcttttcattaaaaaaaagccagtccctaacatagctatacacaagaacaccacaccttctgcattcagcagttgggaattgcaaccagagtggccttattaattttttcctggcaccttctaaggagggctgtgagcctctaattcacatgtaatcaatcactagcagcttgtctgtgttttcagtcaaatttagtgactgaagggtcactaaatatcacaagggtggtatttattcatttatacattcaccagatatatattaatatgataccaggcacattgttagatgataagacctcaaataccagaaaatccctctctctgccctcaagaatctcagattcatgagggaaggag

SEQ ID NO: 130432 - DNA, 1047 bp, Homo sapiens
gaataaatctaataagacagaacaatcccttaccaggatctgagagaaactgagaccaacaggtagatgcttcagtgcatttcctagaagtggctatttcggtacgtgatatgataggaggaagcaagccatgtaatgctgagctgaatgatgtcccttactggtagcaccagaaggaatacaaaccgttaaacataattgtccaatttgtcagcaggagagacaatgtttacaaaatgcaatggaacatattcccagaggtgaagaaccagcacacagatggcaagtagactatattagtcggctgccgttagcaccaggaagatttaaatgggttttgactggcacggattcaagacttggctttgcttttccagtcacacagactaatgttaataatacagtcgggctggggtagggaggctgactgagcaggagtcgtctgcttgtagtggaggctgctaggagccggtcagagggattcatgcataaaattttccatcccaacactgacgacgcgtcaggaactgtgtgtctagatgtaattaatcaaacttggacagctctctatgatcttaccaatatatttgagtccttcctgccccagttgttggcctatcctaaccccatagatcctctcaatggtgaagatgcagccatgtacctccaaagaccagaagaatacaagcagaaaattaaagagtacatccagaaatacaccacggagcaggcgctgaaagagcaggaagagggtaccagggacagctcatcggagagctctatatctgacttttccaaagatgaggcccaggatatggagttgtagtagaaaaagcacctgcttttcagaaagactattgtttcctaaccatgagaagcagactataatattcatatttaaacacagcaatttttttatgactaaacaaggtttttatgaataaaagcattgatatatatatattatatatcaccctttagatcttgatttcctggtcgtttctcaacctgaggtgcatagcatattcccacattccatttggtagc

SEQ ID NO: 130433 - DNA, 1053 bp, Homo sapiens
ttttacagggctgttgtaaggcttacctgaatttcatatatgtaaagtgctggctcataccgtgggatatatgtttacaatagttatcaataagcaaataagtgaaaatatgccgcacaaagtgattacaatggaattattgcttttatcatgtaaatgataactttggtcttcctgttatttaacatgacttaacattctacaggagtgggaatagctttgcgaaaaatgggcgcaatggccaagccagattgtatcatcacttgtgatggtaaaaacctcaccataaaaactgagagcactttgaaaacaacacagttttcttgtaccctgggagagaagtttgaagaaaccacagctgatggcagaaaaactcaggtcagtcgtgacatgttatgaaatcacagaagcttctagaatgataggctgtatcaataacattttactgtttataggcaagaacttaatgaaaaagttattttatgaattgaattttgtcaaattagcaaaagtatcaacttcatcatagaattggcatcttttattagctactaggttgaaaaccacaaactattgtgaataaaatcaatatgggttaatgaagtagactcagaaaggagaaggtgaaacaaatgttgattaaggaggttatgagtcatggaaactcttgtaatgtacttggaagattaaaacgtttactttgtttttgcagactgtctgcaactttacagatggtgcattggttcagcatcaggagtgggatgggaaggaaagcacaataacaagaaaattgaaagatgggaaattagtggtggtaagtgtcaaactgctgtgtctcagtcagcttcttgtgtgcattcatagttcacataactgttctatatcattgatcattaacagaactcagtttggaagaaaaaaaagcaaaataacaagttaaatactagaacactaattattaagaaagtcctagtggagatagagaagtgacatgacataggagaggatttggctggagttggggggagttcttgctttgctgccacgtcacag

SEQ ID NO: 130434 - DNA, 1535 bp, Homo sapiens
tgctgcaaataatagaatattagcagaaaggatagctaaagaaattcaggttatacctttgcaacgagacgacgaagattaattaaggcagcctcatagtcaatcccagttgcttttccccagatttggtgactcatcaatggatatgtgttttggatgtatgatatgcttggtttaaattctctttgtccaggtcaaaaatttggaacttgtttcttattttactatgtctaggtttgcaagaattgacataatgtttgtttcactgatttaaaaaattttgcatgtaagaatgtactttaggaaacatacccaggaagtacagttgataaatataacatcaactgaaatagtcaattagcaattttgtgtttctaaatatctatggtcccctgaaattttgacttagtatataggtgcagagacacccacttagaaagttaactgtttggaaaaacatttctctttagtttcaaaaaccatatataattaaatttgtaaggatatactgagtaccctaggccaacttttttttctttgcagagaaccttttttgttttattcttcagtgttcatatagcacctggcccattacatatctaggcaactaaaaacaaacattgtaagaatgaatatttttaatgtagtaattcctagttacaatagatacataaagtaatgaactcagcattctgtacttttgcttcaggtttgaagtaaaaattatctagttaaattttttttatttcacgttaccatgccatttcacattaccataccatcagatagcatggcttattgtgggcatttctgcagtgaatacattttccaaaacagttaaattgtctgtttggatttgctttaaagtcttgtgtaagagagaagaaactatttctataataaaaagcactctcatcagatatctgacataattagatacaatataacattttactaagttcagtattcatgttttaaaggtgtttatactgatttgattgtgctggcaaatatactgtattgttaatattgaactgtttatttttctcttagtcttcttatttaattaacttcattgccgctggattctgttcagcctttaaaaatatttcttagtggtcattgctctgcagaactcaaaaagaaaattgtacttgttcatagacatttttaaagggttaatttattgttcagccttatcccttggcacgtaaacagactactagacttattgtaggttcgtttgagctttgtgttgtaaaattaaaaatgcttctgtaaagttttcaaggtagggagtgattttattattgtgtatatctaatatattaagtatgtgtgatactaaggtttgactgctataattatttgtactgttgatcacatgtacttaaaacatctgatactgtattctaagacaggttgtttttgcaattaaatttattttaataagacgatcatgaataaaactttaaattgatatttttattattattaccattatcattattattatttttagattcagggtctcg

SEQ ID NO: 130435 - DNA, 1053 bp, Homo sapiens
ttaatagagatggggtttcaccacattggccaggctggtcttgaactcctgactcaggtgatccgccctccctggcctcccaaagtgctgggattacaggcgtgaacctccacacctcgcctgctatgttttatagtactctgtgtagctaaggaaatgttatgatttggaaattgttgaaatcagtgtaaagattaagagtttgtcctacttggcttttagtttcattggtgaagaatctgtggcagctggggaaaaaagtatcttaaccgacaaccccacatggatcattgaccctattgatggaacaactaactttgtacataggtatgttttaaaatgtctaatataattactctttgcatattaactggattgacctatagatactctatttaggaacatgtacactttagaaaattgtatacttcgtttatgcttctttattctaataaagtatatataaaatgtaaaagtggagcaaaatgtattatgcagacttatcagatatggaggaggtaaagaaatactaatgtgatcttgtcctgtggtgccaagtgccccgttcaccattctttttcccactgttggcactatctaaaaagggaagcaaacaacattgctgctttgagagtgggaagggcactttgcactgcatgccattttctattctttgagtggcatgtaccatagatctatatggatctactaatatgcatctattagtagtaactatgtaaaaatatggttttttttttttaagatggagtttccctcttgttggccaggctgagatgcaatggcgcagtcttggctcactgcaacccccacctcccgggttcaagcgattcttctgcctcagcctgccaagtaggtgggattacaggcacctgccaccacacccgactaatttttgtatttttagtagaggcggggtttcaccatgttggccaggctggtcttgaactcctgacctcaggtgatcctcctgcctcagcctcccaaagtgctgggattacaggcgtgaaccactgcacctggccaaagatatgt

SEQ ID NO: 130436 - DNA, 1126 bp, Homo sapiens
agagactttgagtcagtaatgattcttggtgttcctgttgcaccttgaacacctgttctttgccagagttaactgatttcttcagtatactgctccttctattggaatacctctaaacagcacctgtggcacagataaaaactcagtgagaagttgaagtgatttgctcttgtaacaccgggttcatggcagacccagaaaaggaagtggcaatatcggactctgcttaccaccaaacccaaacatttgcaccctcaagttgggcttctttagtcataatgaagccttgggaagatttggctcactctacaggatgctgccattgtttaatgcaggaaaggaatgaagtctcaaggagatgaacttgagaactctgcctctttctgtaaaagtgtgccagctacatttatgcccacttaccaccaacaataagaaggctgttttattgcatataacttttgtgcatattatagcctgttttagaggtaagtactgatttctacttttactttgtgtctgaaaatattctgggaagttatgcaatggcaatttctaaagaaagaccatgtcattatggcttgctaaaaatgttgttggtcattttgctccttggcccttcctcttcagtttgatacacactctgacgtttgcttagtgtctgtcaagggttttcttccctttgccatctatttggatctgtgtacagctttgtctaccatggttgctcagcaaatattggtggtggttgttgttgttttgagacagagtttcactcttgttgcccaggctggagtgcaatggcgcgatcttggctcaccgcaacctctgccgcccaggttcaagcgattctcctgcctcagcctcccgagtcgctgggattacaggcatgtgccaccacacccagctaattttatatttttaatagagacagggtttctccatgttggtaagactggtctcgaactcctgacctcaggtgatccacctgccttggcctcccaaagggctaggattacaagtgtgagccaccgcacctggctgatgttggttttaaaaatctaaaaaattgaccatttccttctaggaagtggtaaaaatgtaaatttgttttcaaagacagagtgca

SEQ ID NO: 130437 - DNA, 1151 bp, Homo sapiens
acccccggagctaaggcataatcccagtttgacagatcaacactcaatgaattcagatgttcatctagctataaatacacctgacccacatttctactccttatcatcttatttctccagctttttctcttttattcagcaatgccctcaatattccttctgaataatattcctaaaactgaactgtatttacacacctggggttcacaaatgctggcttctgaactgatagcgtgttaccttcatcagattctctggagagctttttaaaaatgccacaccaggagattctgtttcaagggatctggaataaggttcaggatcttggtactcaaagatggggtgattttgaagtgtgtaatgcttggaggctagtggatgatctacagtttttccttgagtcagtatccagcaaccaaaagaaaagaagcctatgaaattattttggtatttttcatagctatgaactcatattggcttagggtaatcatcatcttctaactcgtcagaaactggagtatttttgttctagaattttgcttttagtgtgtgtgacacagtttgctgatggattgtagcaacttctagaagagcaattgctactgtttcttatgttatataatattacatctagttttttttcatgaatttggagcagtattgtaaatatttgaacatttatcattattcatttaaattccacaaggatgaaaggcaccacatttggggaaatatttacattaagcaaataatataattcccttcatttatactattttacagtttattgagtcaatcaaaataaggtagaataagttagaaaaggtattactaacaccatgattatgccaaagtcataggatttacacagttacaaggaattatggcaagagagtactgtgagcttacctacagatgtgcttagtactactagtttatttctcagtacttaggaccacttatttcaggtgattttttaagataaaagtaccagatactctaaccagtgataaataagacaagggatctaatactcagttaaaaaaattataaggtttggctttgggggtcagctttggaatgggtaagaatgatctattttgacattcgttttttgtactatgcctaagtacatgtgaatctatttgtac

SEQ ID NO: 130438 - DNA, 1081 bp, Homo sapiens
ataagatgactaaggaatacttttttacaagtagataattgaatcatattaaatatatacataatatattatatataataaattacatctgtaggtacacacatctactttgtaaaattaagcataatcagctatttctgagtttttctgttaaatatataaatatggcttcatacttatacttaaaaaatattctagatgataacaggcccccaaaatttaacaatttgtggggttattaataacactagcagcaaataaaagactcatttattcaattagttatatattctgactggtatcaaacaattaattagatttttacaaagaatataaaatagattttaattagtgtattggtatgttggtcaaatatgttaatttctcttgcccagcaattgacttctgaagcaattaattacaagagatgagaattttagtgagtatttaaaataagtcttttatgcaagcatttcttccttttttgacaactcaaggcacttttagatcatgaacttcccttctcagatttacctttttaaatattctcttgcgtgatatcctggtagcaagaattgcctcatcttcaaaaacaacctcaagctctttagaataaggagcatcatttctgttggaaaataaccttaatttcctttgcccgtttgctgtctctctggagaagagagggcactgatcagccagcctatttttctcctcttttatactttatagtattaatcaatcaccttgtttaaacacaaaattcagtccaaagttactagcttgcttatagcaatattgcacttccaaatgcccttagaatatctcttatttactttctgcaatctcattcctttttactgctttctcaggcatctgctttagcattatataatcctatatatcactgttgtgtgttggtcttcttctagattgctatttaccctccatgtgacatttaatattgatgagacctccaaaaatatggaggttacatataagattcagctgctgtggcaagcaggagtgcaaatctttaaaacgaagatgtgctctatatttgaggcttatagttcccaat

SEQ ID NO: 130439 - DNA, 1029 bp, Homo sapiens
ttaaaattctaaaatgttcaacaaaatatgatttcccagggatctgaacaaaatagatgatttgatgcaagagatcacagagcaacaggatatcgcccaagaaatctcagaagcattttctcaacgggttggctttggtgatgactttgatgaggtacgtaacccaatatgaagaatgcaggattgtggctgctataaagagtagcttcctgtcatatatagtaggcatgttcccttactactgaaagaacaagtgatatttgtaagaaaggtacttctcttaagagaaaaataaagtgttagtacctctgatttaaaggaaagatgaatacagtttggcaaacagtggcctgattaagttttcagctattaaggaaagaacagcatgtgattgtgtaaagttagtgacttttagtggttgaagcctaaacagccccattacgaggaactgagtgcttgcacatctgggcaaaacaaagtagacttcgtcattctgcatgaaacagacgtatcatgctctgtagctgttaaattagaggttaggctgcctctgtttattactcaggctatgaaaccaaataaatgtggagtggcattattaacacacacattccatttagattaatcagtccaataatacagacagactataattataatggtgatgtctgcactgtgaatttcaattgttctgctcaaagcacacacaagtaggactagtacacatttagaaacatttccaaagcttggattagcatggcaaagaatccaacttcctgcatctatgtgatattaaaaataacacatttagcaagtaagacctggttccatggaatccccaaaaatgagaatggggtatcaataccttttaaaaatggtgtagacaaggggtcagcaaaaatatggcttgcaggccaaattcttcccgtgacctgtttgtatatcccaaaagctcaggatgggtttcacaattttaatgttgtagaaaacaataacaacaaaggagactatggggcagaagaaaacatg

SEQ ID NO: 130440 - DNA, 1031 bp, Homo sapiens
tcatcttaaagagtctaatgctctctttgttgctcctctttgtcttttgggcagctctaggccaaattgtagttcacttgtatggttatgcttttctgttgtaatcatgactttattttttatcttcttcaattttttttcctatttaagtcgttctattagaacatacgtattttgggagccaggtgcggtggctcatgcctgtaatcccaacactttgggaggccgagctgggtggattgcttgagctcaggagaccagcttgggtagcatgcatggagaaaccccgtccctacaaaaaactagccagatgttgtggcctgtgcctgtagtcccagctcctgaggtggaagaatcgcctgagcaccagaggtgaggctgcagtgagctgtgactgcaccattgccctccagcccaggcatcagagtgagatactatttaaaaacaaaaaacaaaaaaaaagccttgaaagaagatcactgaatgtggaatgcacttagaaatgctagctaatggtaagctataggtggatttttgactagagcacagtatgaagtcatgatcatggttttcagcctcaaattagaacagacctcacttgtcacttgtaaataatttacagaatattagatcagtgtcatctccacacaaaataataagcaaagcaaccaatgtatactcaataatgttttattataatagatatgctgagagtaagtatagaccttaaataatgtttgcagcctagctaactgtaatcaaagacattagcagcagtcaaatagtggctaaggtgtgaaatgtaaagccccacattgcggttattaaacctataactctggaggactctagaattagctgatctgctagtccacgcttctataatagttcctttggagagcagactgttcactggctaacactacagatacttatattcctcttctgttttgccacctcttagataggaatgataaaaactaaatacttgtttttacagctgcacttgcagctagctttgagcctgtcac

SEQ ID NO: 130441 - DNA, 1050 bp, Homo sapiens
gtaaaaaggagatcactttttaccaaataaccaaaaatttttagtctgtcaaagtgcacaggtatgttctcagaacatttttcacaatgtgtatcagaaatatgtttgctatccttagagacagaaatgaatataataaattgatctgcttatttattaaaattattattctagacttacaaaaggcttaaaaagaacaatcatttaatcagtaccattctgtatcttatataacagatctttgccaaattctagatattatagtgttgcctgtctgttctaaagcgaaccagccactttttcaatctggctttttggaagattgtatttaaagttcttcaaggatgaagaaaaaaatctgttaattaggtaaaccactattatttatatttataatttacttttttttacttttataatgcattttactcccagtattatgttcatttaataaattattttttcactacaacagtagctgtgttgttcatatgttgaataccattttccccctccattttctatattctccctatcttttacaattattgtaaattgaattatatttaagtgctgaatttcacagatgtagaatgagtctgattttctttttaggtttacactttatattgctgatcattttttgaaagtctttgtgaataggtgcaatgcactttaacataacctatactaataattctaaaaattgaatgtaactgaaataacatttttgtggataatcttttaaccttttagaaataagtttacatatagttagtacaaccataaaacagcattttaaaatgtatctactacatcgagattagccatttacagcacatttatttagaaaaccatgcttagataaattatctatgtagtctagttcagtctgtgatattaaaagggaacagtggctttagatataaaaataatttggttttgaaatggattttattacttataggaacacatgagtttggggattatgataaaacaagtctgttttcccaactagcagaagaatctaaattttatcctctaggaaat

SEQ ID NO: 130442 - DNA, 1398 bp, Homo sapiens
tagattagattcttcaggtgagactttacctcgcccacctagaaaccagattgagacaaacaatctttcttgatgtttttctgtgttgttgagtgacttttattaataggctctttagggtctttgctttattcctgaatctatcactttttgtcacttacttcccaaaatgtacctgactcctcatttcttgtaccatcctggtactgcaacccaagtgtcaagattaccaaaatgctgttacagtagtatgtctactgagctaatacaaatggcatcaaccacagttgatattttttaagtgtaatcatgtatgactaggcaaaagtagattaaagagagtaaaaactaaagcagtagttgccaattattttttatcccagttctacactagagggatatcacatactcacttcaggcacactagcttactactgtaagtcttaagaaaaagaacttgtagttatgtccccctggtggatgggaactaaagttaagataccagtgacctaaaaagatgagggtagagaacaaatcatttggagtttcatactattattttgattatctgtgttctttgactcttcaataatgctcttgagaaagatactgcatttgtaattaattgtattctttttctgcatgtgtttagttttgtttgttgttttttttaaggcattctgtgaaactttagaagagacaaactaccgcttacagaaagaactacttgaaaaacaaaaggagatggaatcactaaagaaactgctcagtgagaagcaacttcatatagacactttagagaacagaatcaggtgtgttgtgatacttgcatttctactctgactaattcaacccttaatactctgggctaactgccctttatattttaatatgatttaggaattttctgattctgaaagttgtaggcttttggcatacttcattgggaaaattatgctttatttagcataattttgctaaataaattttgaacattgaaggatgggaaacatcaggaaaataagccactaactgttcaacaaggtaaacattattcattttaatcattgttaaatcattattaaataaataatcattattaaatggaataccattattttatttaagtgacatcttagtttctaggcatttatgccagcttttcacatatgaaagctctggtttgccatctcatcagcatatcttgaattgatactaaagtcattttaaattaatcatagctactgattttctctgttgacttccaaagtgagctatttattagctatgtaactacattaaggcttaacagctaaagactgctatagctacctgtattcacaacattaaacatatgcctgttttgttcatagaaaataacttgttgctataacatac

SEQ ID NO: 130443 - DNA, 1035 bp, Homo sapiens
ttacgtcaaacctaaaacatatttgaaagtttagtatgcagacttttttcctccaatttgtagcagcatcatctacccagaacctgtgagtcatctttaacacatccttcactacccttaacatttcccttgcaagtaccactcaagtctgtctacttctctccatccctgccatcactaccctagtccaagcacgtatctctcaccttaattactgtagatgctttctcactggtcttcctcctcccctcttactactatagcccagtagagccacagtgatctttgtgatgcagtttgacttattctttctggtccctgcctgcctgccttcttttcaatcttaggttttgttattcctgcccacctccccttctctgtacatttgccatattggtcttcttttaattctccaaaatcagcttgctccttgtttctcagagccttcaaatatgctatttcctgaaaaggcagcctttcacactactaccccatccaaccctgacctcgtaccttacccatccttcagttttcaacacaaactgcacttcgttaggtaactggcctcctgactgaccactcaccaccactaccaccaccaccaaacactaggtcagttctctatcacagagtctgtaccatcccttctcaactggctctgatgctttaagacaccgttcatcacccacaggtaatgaattaacttatttcctatattctaagatgatactagctatgtgccagtctcaatagaattgagacaatcacttaaatcattatcagtaggggtcagttctctcttggaatctcagttgagaaaggctaattggtacttcactttcatagcatttcagcttataattatttctgtcaatatttgtctttctcccaccagattgattgtaagatgtttaacaacaggtcatgtggctattttattcaccatccaatctaatgtttagcacagcactaacatagttggttctcaataagtacttcttgagtgaatgatataactattgatattcactgata

SEQ ID NO: 130444 - DNA, 1052 bp, Homo sapiens
actcttataacttaggcaacctaatttttttaaagggaaggtgctaaaaaatttaatacataattcaccattgaagatactcaaatgcaaataagcagatgagaagatattcaacttcatttgtcagcaaagaaatgcaaattatagccagaatgaaatggttctacacccccactaaaatggttaacattcaaaagatggacaatgccaagttctggcaaggatgtggaaagactggaactcttctgtatacacagctggtagaaaacaagaaataaaacaaggcataaaaagcttaactgaatttaattcttttattttaaacttatttcatgaataatttcatgtagtcaacaggatagattttgtagaattgatagtgcttgagttaaacattgtatttgctcttttcttctttttcagttaaaagagatgtttccaggttttcgactagcacttcctccaaaacgctggtttaaagataattacaatgctgactttttagaagacagacaattaggattacaagcgtttcttcaaaatttagtagctcacaaggacattgctaactggtatgtaacgaattgaaataagagattataaaagcattccaataactggcgtaaattaaagaataaatctatgatcatagttatttaagcacaaaaatacagggttggagtataattacttgtcttctttaacaaagtactacaagagattttcttgctttctttcaataaggactttatttgacatttcatttttatcaaagcttattttaaatagtcagtaaagtgaaaaatccagtgtaccatgtactaaaccacccaaaggtaaacttttagtattttgtattttagcaatgacttaaacaaaaccacttacatattagtaaaattttggttaatatgatactatgtaattgtaagggtaatattctttatatttctccaaagtaatgcaaaaatattaaaattgtgaaattggcttaatttacatagaaggtagagtgaaaataccaaacagcattaaaaaaggaaaagaacaga

SEQ ID NO: 130445 - DNA, 1009 bp, Homo sapiens
aatacgcatgaaggtaaagacggtaacaatagacatagacactgggaccactagatggaggaggtagaaaggggcatgtgggctgaagaaacacctgttgtgttctatgcttagtgcctgagttatggaatcattgggaccccaagccttagtatcacaattacccatgtaacaaacttgcatgtgtacccctcaatctgtaatgaaagttgaaattaaaaagggcaagtattaaatcctccaacattcaacataataaagttttagaggtaactttccattttaccacaggggctatgaaataaataatttcagttttaaaaaaatctctatttgatgtatatttttatcagccttattcttataacgtgtgcttcttagaaaaatatctggtctaaaaagcttatgaaaaatcctaactgtccttgaatgcagtgcccatattttgtcaaaccagtaaattgatctaatccttaatttaccacattctaagagaggtaataaaatatagtgcaaatgcaggagtaggggagggtgtgtgaacaatatagaaaagagtctgacaaccatgtcagggtacggcaatgcttaacttggtgaccaataacagagaaagatcaaaatgaataccttctaatcattggtctgtaccatggaagaagacatagattgttacatgtagctccaaagggcaaatcaggttatgatccttcttaaagttaaacacaaggaaggggaatatcacactctggggactgtggtggggtggggggaggggggaaggatagcattgggtgatatacctaatgctagatgacgcgttagtgggtgcagcgcaccagcatggcacatgtatacatatgtaactaacctgcacaatgtgcacatgtaccctaaaacttaaagtataattaaaaaaaaaaagttaaacacaagaaagaattcttcaataatgaatgcaatagattagcccagtgacccaggatgtggtctccaggactatcctgct

SEQ ID NO: 130446 - DNA, 1051 bp, Homo sapiens
taatatgctttttgcttgaattctttcccaaacttcagagtgggaattgattgcattcatacataatccatgtgtttagagaaaatgtttatacacattttgatagccatatgctaaataataagaggagcaacacatttctgagtcatttcggaaattattaacaggtgggagtaaggaacggctattttttcattaaatcaagatgagagggaaagaaattgatgtgtcaaatgaatgcaattccatttgtacttcccttccgtgattagataatagtattattttatatgttggaggaaactgagacttggagctcagagctccataggtggtaaagggaaatttgacatgtaggaagtcttaactgacgactcatgttttttttttttttcctacacagatatgcttcatttgtggagatgatttttttgtttcttttgtttttcctaatataaaacaactgttatgtatttattcttgatacattacttaagatgtctgtagtttggcaagttttcaacagggagtgctttccactagtgagtgctttgagcagaaacaaaagaatattgccccacacagatactcttaactggtcctgaaaggacctttctgtgaccatgtcatcacacatctcttcaagacgggttttctgaagagagccaatgcatggcatcacatttgtgagttaccactgttgctctgtggttgggtcagaagagacggttctctgtccttagttgctttgcagagagcctgggaaacacattcagcatttacttactgagtacaaaatgtaatctctactcttggagcttttgcagtgtgatgtggaaaattagtcttttgtgcaaggaaagctgaacagctaattctttcataacacagagctctgtaaatataggtgtcttgtctgtctaccaacatctcaccatcaacatcataacacctcacaattttactgttacacatatttgtatgtgacatttatcaagctcattttatgttagtaacataaaacacatataagtgtaacatattatttgag

SEQ ID NO: 130447 - DNA, 1146 bp, Homo sapiens
atacccactgcttagagttattgtgagaattaattgaggtaagaaaactgaggctcaggttgtcatttgctcaaatcacacagcaaaaccgtgatagaatgcagattcaaactgggatattaacattccaaagcctttacagttattgactactattcagcactgccttcaatatatgctgatgactgcacacaggagttagaaatgcccactgtcacttgcctgccttgagcggtttcttgtttgtataaataatccaaaatacttggttgtgttgtaagaagcaccgtgttttgtgagacatttcaaaggtaccacaaataggaaagatttcattctagaatgaatagagcacatatttagtatctacgtgctgtttggttaattttagttatttggtcatgcttttaaaatctatttttatagtatatattttcttttatagcatatcagaattatctttagattcaactcttcatgccgtcaatcttcattgcaataacatctccaagatcgaagccattgatcatatttggaatttacaacatctagatctgtcatctaatcaaataagtagaattgaaggactaaacacactgacaaaactgtgcacattaaatttgtcctgcaatttgattacaaaagtagaaggtttgtaagtgattttcatttaacacttagcgtaaggaaaatgatttaggtccatttttttccccaaaagaatggaataaatatcagaaactcttaaaaattgagtctgaaactcattatacaaaatattttctccaaaaaagtgtcaattttttaaaaattctgttttttctaaatgccaataaaattgatttcgctgttaccagactggatttacttcagaacagtctgaaataacattgtaatgctatatctctgtaattaattatttaaattttataaaggctttattttattttactttttttttttaggacttgaagaactaattaatctgactagactaaatgtatcttataaccacatagatgatcttagtggtaagtagaaatgcttatgttttctgtatgctaaatgttgtgccacatgtgataagttaacagctcagctaaacatgttggaaatctctgaatattaatctaatttttagccaaa

SEQ ID NO: 130448 - DNA, 1034 bp, Homo sapiens
aaattcatcacagctgcagtgcctagaaggtcttttggataatttagtttcttctgattctcccctaaatataagtgaagatgaggtatagtatttactttttttttcctaatataaaaaataccttcaaatttcaataagtgaatataaattaaaaggattttggtttgtttctgtgtcatagatcattgatagaatgccagtgataacagcacctatcgatgagttagttcccttggaacagtttgcaagtacaccaagtgatgctgtgttgacgtcttttatgtctgtgtgtcaatcttctgagccagagaaaaataatcatgaaaacgatttgcagaatgagataaaacttcagaaattagatgaccaaattctacaacttctaaatgaagtaactatttttcctacttctctatagacatgtttattgaagaaaacatagttaagaaaatgtaaaataaaaattatgtactagctgaccaacctattttagtgcatcagtgttcgtgtatttttgttttcctctacagaaatagggttctattattgcataatggtagtaaaaggtaacataaatttttcactcactttacttgtcttcctttacatcttcattatgtaatttctttgtcttgttctgcagtactttacattacttctattacacccaacttttatttccaccgtaagcaagggagaaactctttggactcagtgttacttaacgcaaaggaatactttggcctctactatctcttcagtggtttaatggtcaaaatcacttctacaacttatagctaaatggcaggttaatttacatagttcctgtatcaatttcattttctagtagaccatcacctaatcaatctatactttcctgagctgttaatccttctttaccctgctactgaatctctagtttttagaatctgtgaactatgtgtatgaactacaattcctagaatttactgctattcaggtctccaaccctcactccagcattctcactatcatccacagtggcagtggtt

SEQ ID NO: 130449 - DNA, 1405 bp, Homo sapiens
tgtagcaggcactgttctgcacttacctacatgctttgctaccagtaacataatttttggcccggcgcagtggctcacacctgtaatcccaacactttgggaggccgaggtgggtggatcacttgaggtcaggagttcgagaccagcctggccaacgtggtgaaaccccatctctactaaaaatacaaaaaaacagccaagcttggtggcacatgcctgtagtcccatctactcggaaagctgaggcagaagaattgctggaatccaggaggtggagtttgcagtgagctgagatcatgccactccactccagcctgggtggcagagtgagactcaaaaaaataaaataaaaagtttcactgtagctctttgaagtaggtactattattcccctgttataaatgggaaaattgaggctgtgagaagttaggtaacttttctaagttcacataactttgttgttttctttcagtcccttgttgaacagctagaccaagagagagagaagagatggagagctgagcaagccgaaaataaactcatggattatattgatgagctgcataaacatgcaaatgaaaaagaggatattcatagtctggctctacttaccacagataggtaaaaagaaattaataaacctgaagatacctcatagcataaacaatactgactttagaactggaatacattagtttcagtgtggttcaatcaacaacaatgtatgtggttttagtttgatttgaactaattttattagacaatttagcactttattagcttgttatatcaacaagaaattcaggtacatgtatttgagccctcaagcaggaaggtgtcagataaatattataagtaaagaacagcaagagactagagcagtgattaacaaactttatgtaaagtgccagattctgtaaagggcaggcattggcagcctttttctttaagcttcatgggtcatatttgatctcatcacatacttatcttctgcaatgggcttttgtatcatatagcccagtttcttaattctgatgtttttattctatcctcaccattacgtctcccattttatctgggttttttgttttgttttgttttgttgtattgcattctttaatacaggtctgtcatttcattctgtgaaaataccagttttttaaattacaataactttttttcttctgtttcctgtaattatttctaacgtcatgcttttcctcaaatgattataacatgtttagagtttcttatggtttcttacccttgaatgagcactaggtttttagacttgacatttgctaacacactttgggaagttgctcttggttccatttcttgtctgattgtgcagtggataattccccttctaaaatctgatttggataagttgatgtacacagtt

SEQ ID NO: 130450 - DNA, 1031 bp, Homo sapiens
tatcaaacaggagttgagagcatgaacaaaggaagaccagttcagagagtactctcattgaagtcaacaattttatcatttttatatgtgtaatatacttaacaccacatataacttctgctttaggctaaaggaaattatttttagagagagaaattccaaaggacaactcgaagttatggttcacaaacttcaaaatgaaattaaaaaactgactgttgaactaatgaaagcaaaagatcaacaagaggatcaccttaaacacttaagaaccctcgaaaaaacattagaaaaaatggagagacaaaaaaggcagcagcaggcagcacaggtatttctctattttaatatatgagtagcacagattaacacaaattcatagcttctatcgtgaaacaaattatactacctagaaaacctaaaagatgtaaggccatatgcaaaaattaaattgctgttaatttaacggtcacatagcctgttgaattatgtctaaattaagactactagctcttaacacaaagcaattaaaaagaaaagttgatggaaatgttgcaggtggttaggcttttattctgagagagctggctttttaaaaggctttcaggtgattgaaggaatttcattttcatgctttctgaatggaaattatcattaaaatctgtgatgcaaataagcaatagttaatgctagtgtatttgttccttccaaggctgcactttgtgtgactgtaacatcattaatttattaaagtttgaaaatcaacttagtcaccggacactgtcatttaaaaggtacttatggaaactgacattaaaatagcaggggagactattatctaaataatgtaattgtgggtattttactcagataagactgatccaagaggtggaactcaaagcttcagctgccgatagagaaatatacttacttagaacttcccttcatcgagaaagagaacaagcgcaacaacttcatcaacttcttgcattgaaagaacaggaacacaggtaaatgaaaaatgtatcagg

SEQ ID NO: 130451 - DNA, 1039 bp, Homo sapiens
aaaatacagaaaattagctgggccatggtggtgcacatcctgtaatcttagttacttgggaggctgaagcatgagaatcacttgaacctgggagccagaggttgccttgagccatgatcatgccactgcactccagcctgagtgacacagccagaccctgtctcaaaaataaaataaaaaactatactcctagactcaaaataaatggggaaacagagtactctaactttcagaaaatgaaagtgtaaaaaacattagtgatatattatcctaacctaatgttatcctaatagattctgctggatgatgaactacttacttatatctttagttaccctataatagcctttgatattttcataatactgagttatgtttccattagtatgaatgtgagccacccgagaagaaataacatcctaatctttacattcacaccacatatacacatatatatgtggatgttcttgtttttttaaggaatgcaatggaaaaacttcatagtatggatgatgcctttaaaagacaagttgatgcaattgttgaagctcatcaagctgaaatagcacagctggccaatgaaaagcagaagtgtattgattctgcaaatttaaaggtattgtaagtaaaattcacttcaataatcagtatattacatgattatagctaaataaattagatcttcgagaattataaagagaaaaggcaacatgatctcatgaccaaatagatataaagaatgttaccaaaactatcctaaaaccagggtaaaacgttggtaatacttagattaattgtagaacataattctaatttctaagcaaaacttgtacatttgattctagtgtgtactttctctgctctctggataaaaatttcatatctaactaatcttggataggagtctctttggttacacataggcagggtgagaatctgaaggtattaaacataatccatcaccaccttggaaaaagttatcagagtattagggttcaagactatcaactttattatctcaatattattaataaagtaa

SEQ ID NO: 130452 - DNA, 1780 bp, Homo sapiens
aaaaataaaaaagttagccgggcatggtagcgggcacctgtagtcccaactgcttgggaggctgaggcaggagaatagcgtgaacccaggaggcggagcttgcagtgagctgagatcgcaccactgcactccagcctgggcgacagagcaagactccatctcaaaaaataaataaataaatgcatataaatatatgtgtgtatatatatatatatatagccatgtctttttcacaagtttatgaaaactaagtagataatatattaatgcatgaaagtactttgtatactgtataaatactgtatttttcctattagcatttgagcaagttacattttactgacatttctttaaatacatcacaaatttcaaaatgtgtaagaataaattttggaccttttctttcagaatgcattttaaaaatacattttctttaagaaattaaaatgtaaaatttacatgtcgatttaggtccatcaaattgaaaaagaaatgcgtgaacttttggaagaaacatgcaagaacaaaaaaacaatggaagcaaaaattaagcaacttgcttttgctttaaatgaaattcagcaagatatgtgatggttctgagaatgaatttaattgaaatagaccagcagacctattgtaaaaatgattaaatattgtaatagtagtaactgctatgactttgaaatgtctctttctatacatttcattatgaatatatttttaaagacttttgatcaagtatttattaattgtataggttttttataataaattgttgacaattttgtctattagaaaaaactatcataactagacttacaatatttttcttgtttctgtactatacattgtttggtaattacacatttgcctacaaatttgtgaatgaaaagattagtattttcaccatatgaggtaaaacattttaatcattgttatcttattgtgatgatgaagaactaattatatttgttatttaattgatgtagctcaattcttttaaagtacttatgtagccaaaaagcatttgaaatctgtatgataaaagatgtggcattcttaagaaagtatatgtagccatctccacatcactcattatgaccccttcttttataatgcttatatcttttcattaaagattacatttaaggttttataaatattgtctgttcctgaagaggaacaccactgttccaccttcattctcccttctaataactgtatatgaagaaattctgataatgtaactggaagcagtaattcatttcattccataccaggtcattactgtattactgtttcacttttgtcacatcatatgctagtatgcagaacaaaagtcttaagtactatgcccctcttctatttctgaaaggaagaaaatatatattttcttgatatcagtactgaactaagattttaaaagtaaatagaacaaaaataatttaagtgcttcataaagagaaggccccatttcattatagataatctttgtgttgaaatttgtgagacaacatcaaacataacaacatgtataatgggagtcttagaaggggggtaaatatttggagaagtaatggctgaaaactccctcaatttgatttaaaataccctacatggctgggtgcagtggcttatgcctgtaattccagcactttggaagactgagccaggagaactgtttgagcccaggagttaaaacactagcctgggcaacatagtgagccctgtctcttaaagcacaaacaaattaaaagaactacaaatacaaggtttc

SEQ ID NO: 130453 - DNA, 1293 bp, Homo sapiens
aagagcgaaactgtgtctcaaaaaaaaaaaacatggctcaacatagaaaatcaattttaataaagctgttgtagtataacttaacaattaggaagcaatagaaagacattgaaagtgatgtgaggaaagtttattcattatctctgcagcttcacctacaccatatagtctcatttacaatagtggaggtgggatagttattatttctttattccagtgagataagaaattatatcatggttatttcaagctacgtggtttgccagtttatgctgttaatagctaatatacatcaagagcttaccatatgcaaaacattttacatgtttttagctaatgttatcctcttaacaacagtgaacatttcggcagaacagccccatttcacagcgtaagaaactgctagttaagtaggccaagataggttagataacttgcctggtgttgtacagtagaaagtgagagctaagatttgaaattagaccatttattgttattctctatgttataccatctttcagtagtcttcaaaaataaatgtatgtaggtaggtttccatttgcataagggcatggaaaaatgcatgattattcttactcctctgcccaaggtggaaaagaaggaggtactgtgctcctgaaaatgaagctattggtgacatattctgtattattgcataaattaaactaggatttcacttgttcacagttaagaatttgaacaactgttaagatagtcatgactatgtatctgtatgttgttttgaaaattcctattaaatgtaagttataactaaagttctacattttatttgccattttggtgtcagtatgagcttttttaagcatgatgaagattgcttatctcttttattataattctttaacttaataaattacctgaattatacctgaattaatgtgataaagtatggtgcgtcttatctgacaggtccctgatgcatacccgtttatgagcctgatttagatacatcctgggataaataaataattgaagacactagtttggccgggcccggtggttcacgcctgtaatcccagcactttgggaggccgaggcgggcagatcacgaggtcgggagattgagaccatcctggctaacacggtgaaaccccgtttctactaaaaatacaaaaaaattagccgggtgtgatgactggtgcctgtagtcctagctactcaggaggctgaggcaggagaatggtgtgaacccgggaggcggagcttgcagtgagccacgatcacgccactgcactccagcctgggtgacag

SEQ ID NO: 130454 - DNA, 1038 bp, Homo sapiens
tccccgatcccagtgctgatgagagaataaaaatcaaccagaaggaaatgtctaacctttctccctacctggtctactaatgtacctatatctgtacccaggtactctgctggacttcagttattaatatgccctgttattatctaaggacagtcctcacttattgaattcacatcctgccttccctacttattgccacctctagcagtcatcccttctctcttctgcattgttaatgattcctctttctttaccagatcattcctatcagcatactcacatgttgaaatagctcccatctttaaaaggaaaaaaaaaaacttcctggagaccccacagttccctaaaaatattgccccatttcttcttacctctttgcagcagaactcttcaagagttgtctattctagctttctttccattctttcttgaaatttctccattaagactttcagccccacctctctgccaaaacagctctgatcaaagtcacccatgatctttccaaaggcaaatcactgatcagttctcactaacttgctctgacagcaatacttgatatggtcacactttcttacactctcttcccttggattccaagaccccacactttctgattttcttctgacttcagtggcaggttgctccctcatttcctggaccttaaacttccccagagttggttcttaaccttcccttatatgctcacctcctatgtcaaactagtggattccatcttgtggtataaactgtctattcgctgaagactactgaatttatatctctagcttggatctctcccctaagcacacactctcgtgtccagtggtcttgctttctccctgtggatgtcagaaggttcaaggccagtttctttatttccagtgctccaaactggttccttctgtagtataccttatttgtaattgctcttatcaaaaactgaagtcatttctgattcctctctagggacctgctgcttgccataccttcaaaatatatccagaatgttaacatttttcaccatcttcatagcta

SEQ ID NO: 130455 - DNA, 1034 bp, Homo sapiens
ttcgtttaaagatgagatatgatgtgtccacaatcaatccttgatactttctgcctaacatgaaccccaaaatagttcctactggagaacaggggtctaagtcgtgtgtgcctatcaacaatatatattgggggaaaaacattattatatataatacatataatatcatatataatatataaaatatatttatatataatatataaaaacattattatatatataaaaacacatatccatgtgtttcttacaaaccaccgtcttctctcaggtatctgtgattctcttagtttatgaacttacctgtactcttaaagaaactaaccacattttaccttgtagcacctcatgaaattttgactaatgtatacaatataatttacttttcacattttcatgtatttggtgaacaagtccatgatctcatttgttatttcctttgtatggatcagagccccttaacagtttgagaacaatgggagttttcaagctgtgttctgtggagctctgaaattcaaaagccattaatctattttatcttggacttcgctgccctgctttacgagatgctggccattcccattgccccaaccatggttatgtgtgatatatataaagttttctgtatattatggtattttgacatctccataaacctttctggctgaggagagactgcccatcctgggactagccacttcttagaaacagcatgggctcatgtcctttttagggtcatggatgacgctggaaaccatcattctcagcaaactatcgcaaggacaaaaaaaccaaacacctcatgttctcactcataggtgggaattgaacaatgagaacacatggacacaggaaggggaacatcacacaccagggactgttgtggggtggggggaggggggagggagagcattatgagatatacctaatgctaaatgacgagttattgggtgcagcacgccaacatggcacatgtatacatatgtaacaaacctgcacgttgtgcacatgtaccctaaaacttaaagtataat

SEQ ID NO: 130456 - DNA, 1145 bp, Homo sapiens
tcactgcagcctcaagtgatcctcccacctcagtctcccaagtagttgggactataggcacgtgccatgaatgtctggctaatttttttgtattttttgtaaagacggatttcactatgttgcccaggctggtctgaactcctgagctcaagcaatccgtccacctcactcagcctcccaaagtgctagaattataagcatgagccaccatgcctggcagataatgagtcttttggtcttcgtctggagtttggaagtttaaaagtaatgccaggcacagagtaagcgctcatgaaaacaacctgtccacaaagtactagtactttaaataaatgtgcatgtcagtcaagctgctgctgtgactacttgtgtttaaatatgagtatcttttactgttaacagaaatataacaaaactttattactgtttccagcaggatctattagtggagatatcattgatgagttaatgtcttctgacggtaagtaggttaaaattttactaactcacttatcagtaatgcttctgtggaatttataagtgaaacatgatttaaaagaaatgaacatatatttgctacctgctttactatgaagattcatgaaaattctcccttaacacttacagtaagtaataggcaaccttcagaatttatttttctttgcttgcattttgagggaaaggaatccatatggggatacttctcaccttcattgaaaataaactgttagccctttccactcctgaaggatctggtccaagaagagtaaaataacttgtctaaatcaagcaactgatctgaacacctgcctttgtaaatacccctacccaggccaatttcaagctgccaatgggaagtcactgaattagtattaatattaaccatgttgtcatctaacctgaaaaattattaaatatcagttagctacaatatgctaattactttaataatttctctccttctgtaagttcttggatcagagtcctactacctaacaaataaagtagaaacctacgaagtggtagcagttaagttagcaaatgttatagtaactagagatgtactaaacatgtatgtagaagcagagaacatcagcaaactttgtaagtccagttcattcttctgtttgcaaagtggaaaacaa

SEQ ID NO: 130457 - DNA, 1048 bp, Homo sapiens
gaacctctgcagaaagaactggtaagcagaaatcatttgcttttttttatggctaacaaattgaggctaataaattaaactcccaagttttcaaagcctgtaagttgagtgtaatttttagtacttggctctctagtactaggctctatagtataaatagcatattcagactctaaaacattgtcagaatatacagattgttctacttccaaagatatgactagaaaaattaaattgaataacagcttatataagtcatttgtctgctattgttgtctgtgtttttaaatataatactttctcctttcagattcctcagcagcgtcatgaaagcaaaccagttgatgaagctacaagattaatggctctgttgtaatatactggtgatgcatctaattctccacaaagaccaataaattgaatgttttatacaattttatttttaaaaatcttgttaatgtacaggcattggcacattttaaaaacaaactacataaacagatctttcctataacctaggaaagtggaatgtcagaagtcaacaaaatgtgataaacttaaagtgctaaaacagaaggcacttcacaaaatctgttcactgaaacagttatatatcctcgtttacatccttcactttacaagtggcagtgaacgtctgtttggatagaaggacatacagaaatacaggcagtttagtggcagtaaaaatataagacaagtaatgagtccttggccaacttgtttttgatgacctgtagtgtcctttaactttcctccttaagaagaaaaaacagaaggattcacaattagaagaaaagttgaaatccagaatatagttacttttgggagtggggacgtttgtggatattaaatcacttatcccctaaagcaatcagagccctttgtttttatggttgaagttttgtgaagtaaagaaagtattagggaagaacacttcagaatcagtgaactaaaaaaggtgttacattcattattttaaatatttaggttattaagaagtctaaaatgttacacagttagaggtaga

SEQ ID NO: 130458 - DNA, 1003 bp, Homo sapiens
gtttcagtagtagatggagtcagctctccaggactcagtttaattataatagtccatagaaatctaacatttcatctttcaactttcatgagctagcggagttaagctttttggttgaatagttttatgattttataaatgctaagaatgaaattaagcagatgatgggggttttggggatgacagtttatataggacggtcttcatagttgacacattgaaaccaagactagaatgacaaagagctagcaatgcaaagagctaggaagtgttgggagtggtgggttcgaggcagagaaaaatagcaagtgcagaggccctgagctagggaaaagcttggtgtatttgaggaagattattttatttggacaggaggtactagaacttttatatatgccaccaggtaggatctaagagagagatctatgggtaggctgcataaggtgcaaaggaggtaagggttttgaaggagaaattgtttggcagcagcaacagtgaagaagaagagcaccacccctacctctgttaaactcaagaggaggactgcgagggaagctgtcatcaggggtcttccattaagacaagaaggtccaggaaggattcagagacgtattgttatgttagaagggactaaaagtatttgatccaggtttcttgtatagatgcgggatgacagcactgtagcctagaaagattttggtcactgtaaggatacaggaaaaaagcaactcagtttctcttactctcactctcatacggtcactcaacacttccaatactagatttgtggggcagttcccccacacctaacaattctgcagatgaatcttcagcaggcagcagctgggtgtcctttaattaaaatctgacactgctgacctggagatagcgtcagattccacaggttgagagttgagtcctaagcctctccccaacttccagtgacaatcacaagtcccagatgttttacctgtgcttctcaccaaccagttataaataagtg

SEQ ID NO: 130459 - DNA, 1028 bp, Homo sapiens
acctccggtgcggcggtcttcactgtgcagtctcagaagcacctcgggaagtttctgcacaagtacccacgccagcaaggggagacttggctggctccataacgccccaaactcgcttgagctgaggataagtctgcaacaccgcggaagacaagggatgctaatgagactggacttccgaacctcgctctatgggtggggcttcgctttttcactgcaccttgctccttagacttggctctatgggcgggactacgccaggtgggtgggaactcactctatgggcgggacttccgcctatggacggggctccgttcggtgggcggagctacggctcgtgagcggaatcctgactggttcatcctccccggaacttcctagacgccgtacgtgccagatggtgttacctggagcttaaaaagctgcacgcaagtgttaaacttctggtgagagtttaataaattaagttttctggagggctggcgtgaagtttgcaggggtcggggttggattgggccggtctcgtaccgctgtggcctgtaggctcggttccgtcgcgctctgcctcaggcagccctactgggtagcaggcccgaaaccccggtgcttgttgggctttcatctcctgacggggtcccagttttgggctgtgtctttcatgatcagtttctacgtggttttcagagaatttccctccactcgcacacccccactagtgtattactttctccacgaaccttgctcaggtctacagctctagtaaacctctccacttgtagactgtctgttcatggtccatgtgtatattataggtagtgtcatgtacaatatacctatcatgtctgtgtatgttccgtatatatactgtcattatttatgttccatatatattttttgtgtataaaatataggttctctaccacacgtggcatatagcaattgatttatactagatgaatgattggattttggttactattgtaattattttattttaatttttatttatttatttttgagactgagtc

SEQ ID NO: 130460 - DNA, 1052 bp, Homo sapiens
agaagtgaaatatgactcttccctccgaccacttagtatcaagtatgacccaagctcagctaaaatcatcagcaacagcggccattccttcaatgttgactttgatgacacagagaacaaatcaggttggcttttctttttttgtgtgtgtggtggtggatgaagggtttgaatgattagactatactctttttttttttttttttttgagacagagtctcgctctgtcgccaggctgaagtgtagtggcgcgatcttggcttattgcaacctccgcctcctaagttcaagagattctcctgcctcagcctcccgagtaactgggattacaggcgcacgccactatacccagctactttttttgtatttttagtagagacagggtttcaccatgttggccaggatggtcttgatctcctgacctcgtgatccgcctgcctcggcctcccaaagtgctgggattacaggcgtgagccaccgcacccagaatacactctctaatctttcatgttttgtttttgctagacctggaatttgtcaaattgaagcatatttttcttcgtgtgaattaagatatcttgttatatatttgaaccttcagataatcttaccttaaaataataaagagtatttggaaaaggatatgttgcatgataatttaaaattgaccttagcttgttattataacttcacttagcatttaccattataaaaatattaaagtttaatagtttttatagatatttcatgatttgtttctgcaaagttttagccgtaattattttagcattatttgcaaacctataatgccatttaagtacctgctttaatagaaaaagtttagtttaaaaaaaacttattctcttattttaattgccaaagtaatatccactcatagtaaatgaaacaatatggaaacatataacaaatattaatgtctctttcttcccacagtctctcctgaagtaactaatgttatttcttccataatatttcggtgcttagttatgtatacatacatgtgtatcatccttgttttgcattttcttatt

SEQ ID NO: 130461 - DNA, 1839 bp, Homo sapiens
agattttaccagtccttatcttgtctgtgacttacagactctcctttcatcttcgtgttctttttttaaaaaaatttaattttgtagtttgctccttacctttacgacctttaaatgatcagtcttgttcacagtcctttctttgctctgccgatttggagttttctctgctgtggtaaatatatgaaaccttcattaccaaagaagagtagtgtctgttataattttgacatttttactctttcagaataaaatattttccaggggcttgattttgccttctttttctatttgataagtttaacaaatttttttctgtgtgtgtgtaggttaatgtggaacaagattttgtgtttctgctttaaaatgttactggtaatagtagtgggaaaaaaaatcatgtccaaaattatctttgttttccccgtttggtgtttttacctgaaatagttggtttacagttacctgcattttttttttttaacaagagttcatgtttatgtgtaaatccactttacctgcctcaccaaatctgtgtgtattatacaagcaaaatgcaccttttaaagaagaaagtcgttcttttattgtgtgacttgtttttagccatcaagtagtaaattagctgcaactagaaatgatcatttttcataaatggttagtattttaaaaaatggaaagtgtagtggccaagtattgggagctactcagattgagaattgtaaagtatgtggaatagttctttgggacatagcttatcaacattttcagatagttcttaccttaaaatgtgaaactgctggtaagatctacatcagggttttgaaaagcaataattatgagctaccggcataatacaggatgtcgcagataaagtttctgccttcaaagagatggtaatctttgctgtttaccccacggtggctgaaatttcctttacttccttgtacagttgttaagcatttactgcataattgtgggaggtattttgggaaatacaaagatgaaccgattagcaatttctgccttcacactaattaggtagatagtgctatacacaaatgccttatttgtcttttaatatataagtttcataaatggtaccaaaatcctctcagaagtcaacttcaaagagagtagagctcagatcttacttggcaaggtagggataagagggttagtttgtagagctcctggcttctgaaatcgtggttttgaaggacgattatgactttggataggcaggaaaggtaatcctagcagagaggtatctctaagagagcacagagttcctgtttggggaaaggcaggtaattatgtttgggtggaacataaacttatttgtaccaggataaagggtgataaaacttgaagtaaaaatttggaccagtttatgggttgtttttaatgccagacttatgaccttggatttacccggtggtggggcttccacagatgattttgaattgggagtgaaacaatttgaacactttgtttcagaaggattagtgggatagaggtctgtagtgtgaactgaggtagggagaccctggaggtagaaagacctcccagttgttgtagtcatggatagtgaggatctgagctgtggtgcacgcgaatggaaaggaagaaaggaagtcgaatagccaaaatttgatgagagggcaaatgaaagtaaaaataactgattctgatccaggttggttgggagaacagtggtaccattttgagcaagatcatgaagctttaccctcagcatatgtgtgctactttacaactttttggagattactaattcttggtaaaatgctggcctggaaaatttccatatgcgcctat

SEQ ID NO: 130462 - DNA, 1046 bp, Homo sapiens
aacttttgtaccgtgtagaggtaaacttgtcagttttttcctttgtgttaaaatggtaatctcactgcagtggctattggtaggtgatatttaaatttgtaagcattgtaccacagaatagttattctcctgtcaaggataaagcaaaagttgatttcttatctggaaaagtacattggtgaaatgtagatatttatttttttgaaaattttgaatttaattctgttgcttttacagatgaagtttgtgtttcccttttataaaagcttagtcttcaaaaatttacattttttgaggatataaatgaggatctaatttccaaaatatatatagattgggtatccctaattcaaagtttgaaatgctccaaaatgggaaactttgagccacctacattactcaacagaaacattcactggagtatttcagattttggatatttggattagggatactcaacctgtatcatgatattttattatttttgtattagatcataagctctaccattgaaaaaaacccaaagatattaaaaagccctccttagtggatgcttcaattcatacatttaaacaacttttttagggaatgtataatgtaaaaccatacgtcagatggtttttaagttataaggaagactagcatggtttttaagttataaggaagagtagcatttgttgatttagtcttgacatttcttttttctttttttttttgagacggagtttccctcttgctgcccaggctggagtgcaatggcgcaatcttggctcactgcagcttccgcctcctgggttcaagagattctcctgcctcagcctcccaagtagttgggattgcaggcatgcaccaccacacctggctaattttgtatttttagtagagacggggtttctccatgttggtcaggctggtcttgaactccagaccacaggtgatctgcccgcctcagcctcccaaagtattgggattacaggcatgagccaccacgcctggccgtcttgacatttcttaaatctacagttcactcacagcacatactggcg

SEQ ID NO: 130463 - DNA, 1057 bp, Homo sapiens
agctactcttccttggagaggtgtcattatagtggagagaattctctttccttctagagactggaatggtaatcctctcttatggaaatacaatgaataaggtgctgcttctcctttccaagaacaggtagattcattgattgctatctgggtttttctcgcattatcacttaaccttatccactatcgctttattttagtcttagcagtattttttgtttgtttgtttttagttcaagttggctgctaagtaatgccatggttaaaggtgaaatgaagaaaatgagtgtttagtttttattacattatagcttctgagtggagtagtgaatgcatttcattttaagaatttaggttattagtgcatagctgcgaagcatttttgaagcatttcatgtacactaaaaaacgggcccctgcatcctaatgcaaatctctttgcaaatttctgaaaatagtacattggctgttgcggggaggagtttggtaattggatgtactgagaaacatgatttatagaaataggaaaggccagggcacaaagaagggcacggatagagttacatgaaggtgcttcttgatggctgtcctccctaccctaaattatttgggtagttaaaaaatatcctagcattaacagaatgtaggtatgatagccttttaggaaacaaggaaaacaagttcttttgatagctgttcagtatactcataaatctgattgactgggctgggtggaagctgactgttgagtcctgacttgaaattaggatactgtggttacacattagccccaacttgccaagatgtcctactttttgtctgtgtttagttagactggggaggagaattagttaaatgaacctgttttgtataaagtaggatattctttaccttagaagtaaacaaactagattgttcttctctttttaagtttttaacggtagaggcacttttggcatacaggttaagagtcacagtttaaagtcaggcagacctgacttctggtagtattgcttaatggcaggattgcctcagtttcttcttttgtaaaatgtaa

SEQ ID NO: 130464 - DNA, 1048 bp, Homo sapiens
ggatggggccatatgagctagtgaatggaatggagatcagcaagatacaggaagggtgagttgttggcatagatgcagaggctgtgatggcttggggtatgatggcatggggatgatgggtgatggcatgggccagggaagaacagtagcactagttggaaatgtctttgattagggagatcagtggtgatgatatggacagagagtctgttaaaagtaaatgattcggagggctaaaagaccctgggtattgagaaagcctcttactcttccctcttcccttctcctgacatgtagttccagtgatatgattttgagccttagtgatgagtagttcctatcaaattggtttttcctttctgaatttgcaggtcacatggaaatgaaaaatctaacagaattatatttttataacaggattccactagaaaagtttctttgagatacatcaagagagctgtctaggcagttagagccattacactgttcactaggattatcaaaaatcccagtttggccagaactgagaggtttcccaggatgcaagtttaaaacctgatgctcctgagcaaactgggacgagttggtcaccctcctgtttactctttcattttataaattcattgaaatgaccagtatttctatgtagaagtaatattactatattcgtatatataatttaatttaaaattaagtcctctattttgtagtttacattttaatgaaatatttattttatgctttggagttgctctattgaggggggagactgcatggttcatccatttttatctttgccacattcattgagttttaaatttggtgcttgataaaatagctttgcctaagtgcaggctttctaaccttttaggttccacatttattgaactaaactgctctgttacatatcatcctatcttgttactgagtttttttcttgtgtattagtgttgtcttcaaaattagactcagtattgaagccaggactttgtcttctaccatttctgtatccttgccatacccactttataaactaggcagccaataa

SEQ ID NO: 130465 - DNA, 1042 bp, Homo sapiens
ccatcctatagtcatctggtcaaagaccttatatgtatcctgagtttttctttcatggtgccaatgctctagttcagataagctcactatcttaaatctaacccccagagcttccaaagttatttttccaaaatgcaattctcatcactgaaaccatcaggataaactttaaagtactatgcatggtatattttaaatacaatataaactattccataggatcctatgcagtttagaccctctctgtttgcctgatcacgttacactgtccttatgttccattgtccactatgcaagcagttctctggatgtgccgttctttctgtaattctctcttgaagaattacacacttcaagacgcagttctctcagaggttatcttctctgtgatccctttcttgatccctgaaggctggattatctactttctcttgtgtgccccagatgtagtactttaccttttgcatctattttaggaattatcacactgaaagctatttatttgtttacagggttgtctcctcacagactatgagctccttgaaagagggaatcgtgtcttactcatctttgtatccccagtgtctagcagttcctgatacatagtaagtggttaacaatttttttaaaactaagactataattaatagtcagacttcatacattttgatagttaattatgtagacctagtaatacgttgtcataaaaaatatggctatagacttctaatactcctgaggctcagttttctcatctctaagatagacagagtgcctccctcctcacacagtgttactgtaatgctcagatgggagaatatatgacagtaccttatcttttaagtgtcatacaactttattaaatgaagtgcggagaataattgttgaaattgataattttatttgctgtatctcttcacttttaaggcaagatggtatcattttttaactatctctcatggttttagtttaaatttgcagttactgcttaccagaacatgtgctcttgagtctggggattgggtgatatgaaagggtttat

SEQ ID NO: 130466 - DNA, 1050 bp, Homo sapiens
tccattttctctgactgttttggtacagaaataaataggactgcaaattagtcattcttaattttggcatttcaaaataataatggcataaatttgtgtatagtaaaagtatcatgtaagtctttagacatttgttcaaatacaaacagtgttactatgaagtctcagtaagactcctgtgttggtgttttggcttgctgattccaaaaatcctcatctagttattaaagtcctaatgtatttgaaagtaaaatatttttatttatgattcaagtagtttcctgtttcatacaatatttcttctcaaataaatgaaattcacggtttttaaaacattactgaaataaatgctttaataggaattgttacttattaatagaatgacaacgtctactcctgtatttttgttaataattttacccttccagaaatgttacgccacagactacattggaatttcaagtttggagccatcgcactttaaaagcagatgctttattaggaaaagcaacgatagatttgaaacaagctctgttgatacacaatagaaaatgtaagttttttgttctgacctttatttccttataagtttattttagacactttgaacatatcctgaatcctaaaagcaaaaacatagttttgtatccataaagaacttcagttattgcttgtgattgattaactttgtggcattttatgaaataggaaatatttaccatggcctttctgcattctgcagatttacaaggtaatctcagtcatccacaagtaccctattatcagtgactatcagtcatttattatttgcttattattatattctttaaaacttgagaaaattatcattacatgaccctactctattttgtcacttgactactaacaattttatttgggtaaaataaattgtaactcttaagttttcttttattattatataattagtttattgtaaaaaacatgaagaagatagacaattatagagtaatataaaaattttctataattttactatccaaggataaccaatcttaataatttggtcac

SEQ ID NO: 130467 - DNA, 1088 bp, Homo sapiens
attaccttggctgtgtgcagtggttcatgcctgtaatcccaccactttgggaggctgaggcaggcggatcacctgaggtcaagagtttgagaccagcctggccaacatggtgagaccctgtgtctaccaaaaatacaaaaattagctgagtgtggtggcacgtgcctgtaatcccagctactcaggaggctgaggcaggagaattgcttgaactgggagacggaggttgcagtgaactgagattgcgccactgcactccaagcctgggctacagagcgagactccctctcaaaaaataactaaataaatatataaaaattatctctgtgatttaattgagtaggatacggatatgctcaggaaaaataaaatttaataaacactcatacagtcagtagatggcttcagaaattttagtagcatcctgcacacctaagaagtcggtaaattagtttgcaagggctgccataacaaaataccacagactgggtgccttaatggaaattgattttctcacatatccagaggctggaagtcggtgattaagatatcagtggggttggtttattgtgaggcctctcttcttggcttgtagatggacatcttttccctgtatcttcacatggtcttccctctgtatatgtgtctgcgtccaaatttccccttatcaggacaccagtcattggattagggcctaccccaatgacattattttaacttaattacctcttcaaaaatcgagtctctaaaaacgtcacattttgaggtactggggagtaaaacttcaacatacgaatttggtgggggacacaattcagccccaaacaaaaggtaaataaatttatttgaagaattaaatctcatgatagtatcataatccttttacaatagaagacatttatgggtattagttttagtcgttcattttatagacaaatgagtaaaataatttaaagtaattaaaattagattttaatttaagtaagttggtcaagagtatacacgtaatttccgggttgtgattaaaacataagttttctgattcttagctgcctaattttgattagaagtaatataaaattaataag

SEQ ID NO: 130468 - DNA, 1385 bp, Homo sapiens
ccttttaccttcatctctccatttctctaagccctcactaatgactattaatatatagtctaatatatagaagtctaatatatcgtttaatgcatagtctaaatatatagtctaacatagaagttgaagcaaaatgaccttgagtttaaataagaactagatgttctaataatgggaaggaagtatttgtccttatataaaaatgataaacgattgtcacaatatgtagcatttatcgagcacttataaactgtgcctcagaagtggtgctagggctgtctgtatggttttgcatttggtcctcaacactgtccctttagtttgaagtccattgtctccattttgtaattaagaaaccaaggcttaaagatgtttgaataagttactcaatacacagccaataagtagcagaactggaatttgaaaccaaacttaatctgactcttgtgcagaaattttgcctcaaccacaagagtcatctgtggtaccttgagctgaaaagcaagtttagacaattgctacacttattatttaaatgtatttatatgttctccaaaatttataatatgcacagaagcaattaaaggtgatattgaaagcgtgggattgagggggaaagaggaattacttaactagttgtcaaaggcatgcaaagaattccttccaaatgtcaagtactgaattagagtgattcttgaaatgtaggtttgatttctgaagcatttttatatgtggcaaaagcttttaaattagaatattcttctttctagtggaaagagtgaaagaacaattaaaactttccttggaaaacaagaatggcatagcacaaactggtgaattgacagttgtgcttgatggattggtgattgagcaagaaaatataacaaactgcagctcatctccaaccagtaagctaactttatatgtttgtaaaatttcaaggaaaaagaataagcaagaagtatataaaaacctagtttttttctttcttgttgttcagtagaaatacaggaaaatggtgatgccttacatgaaaatggagagccttcagcaaggacaactgccaggtagaatattttatttgaatatgggtggcgacatgatgtggaacatatttcctgaataagaagttttatattttaccttagtttagaatttgccacacagtttagaagcttatgtctaagcatgtcatttggttaattcttgtgaaagtagctttttaaaaaattacagctttattgagatatcatacatatatcatgaaattcactttttaaaagtatacattttagtcgtttttaatatattaagagagttgtgttaccttctctactgtctgatttcagaatattctaccttgaagagaaaccatgtatatacat

SEQ ID NO: 130469 - DNA, 1036 bp, Homo sapiens
ttgggggtcaagatgggaggatcgcttgaggccaggaatttgagaccagcctgggcaacaaagggagatccagtctctacaaaaatttaaaaaattagctgggcactgtgatgcacgtctgtgatcctagctgatcaagaggctgaggcaggaggattacttgagcctaagaggttgaagctgcagtgagccactgcactccagccttggtgacagagtgagatcctgtctctaaaaaaaaaaaaaaaagtttacagtagtttatacttgatttttatttttatgattcatataatttcatgaactttttgaaactactttcagagcttttaaaatagattaatattaggcttaaatatttaaaatgtacaatttgaatattattgtgggagaccgtatttattttgacttagtatgtttgtatatctcagtatttttttatctgcagaatgaatacacttagaactgaaaagtaattaaaactttaatataaaacatgtcatatctttgttcattactctatttacctatcattttacttgaaacataaaaactcaattgtttggaaatagaatctaaaaaattttaaaaaagaaataacaaaaaagaaacttaagagaatttagtaaatcctatgaaaattctcatgaaatgttgttgaattatacttaaatgattgaaataaggcatttttttttcaaggttggctgttgaaggcacgaatggaatagataatcatgtacctacaagcactctagtccaaaactcatgctgctcgtatgtagttaatggagacaacacaccttcatctccgtctcaggttgctgccagacccaaaaatacaccagctccaaaaccactcgcatctgagcctgccgatgacactggtaagcaaggctatttatgacaccttgtttaaaggaaaagtaaatgaagtttatgtatccatccatgcctacacttccctttttgtgtagtcttttttttgagacggagtctcgctctgtcacccaggctggagtgcagtggtgcgatc

SEQ ID NO: 130470 - DNA, 1053 bp, Homo sapiens
tgaggtttcagattaggaattgtgggtcaatactaaggggtttaagacaaacgatatatttctgtcaaagacattattatatatgagggcttccacctcccccacctcctgttcttttgaagcttgagtaaggggatccatctgacggtttagttgctatgaagattggcaggtattccaggttaaaatgggaggcagtcatgatgtagtaaaaagattagatttagcttctgacaggaggtaacgtggtgtctcagctcaaccacttgccatgttaactctgtaaccttggacaaattgaacatcctcaaaatttatgaaaagaggataatatgcgactaccttataggacagttttggaggttaaatgagataatctaaaacattcataatagtccttggagagtggtatttaagaaaaatatattctgttccactttgttcctctggtcataacttctagtgtcaaataactttttctaatatatagttgttattttattaataaagtagatcagagctcagtatggtgagtttcagacagaagtacatgatatcacaagtttattatatttttttcttagctctttattctgaagtaattataaataaacagaaagttgcaaagaaatgtatgggaaggtcccatgcacccttcaccagcctcctccagtgttaacatcttgtataactattttgtacaaaatcaggaaattgacatgaatacaacccatacagcttgttcacatttcaccatttctacctgtgtgtgtatgtgtgtgtgtgtgtttctatacagttttgtcacacatatggcttcatgtaccaccagttcaatccaggtacagaactgtagcatcaccagaagactccctcatgatgtaccctctttaaagctacatccactctcaagtgtgaactgaatgttaaagaaacttgctgtgtatatgcaagcagtcatttctcatgtcatagttttaaaatggagtaaaaatggtattcactctagtatttctacttttttcttctttatttgaatgtacttttagggtg

SEQ ID NO: 130471 - DNA, 1061 bp, Homo sapiens
actggcctcagacagcactcactctagactagaagctaatcagaaggcaggtgcaatcatagaacagctaatgagcttgaacgttttaagaggagatttatgcaactggaaaagtatttggggtttaacgataagaatgtagacaataagcaaatggaagtggagataatttttctagctaatagtattttttaaaaaaagaaattggggtatgttccatggctcatctgtggggagagtttacatagtcataatgataactgtaagggaaggtacaacatatgtgtatatttggaatggttgggaggagggtaagtgtagatgtgtatgtgtgcaggaaagagacctgcagcttcacctttcctaataaaaagtcaatacattatgtttgaaattaaacaaatcacaataagtcaaggaagttaataagtaaaagaagtaaataccaaaaaaatggactgaaacagttgaaaatgttgccttggggagtggaaaatgaagtgaaagagacagtaggtactgttgttttttgcaataagtctcacagactgtatgactctgtttatgtgaaggtatatataattatatagctatgaaggtatattttaaactatctgaaagtatatgtaattttgataaaaaattaaagctaaattaaaaatagtaaaggatatttgtgaagaaacagttgaaaccaggaaattttgctgtaggacagcaataaaaattcaaggactgcttatgggaattattacctaaaaatagcaaaagtgaaacttgatcaggtttttaggtattcatttggttttggtagttaagctttcatacagaatagcccattgttacatgttagacatattcctgacaggcctttaaaatgaaattttatatttaactccttctttcccgtgagctttttatataaacaaataaagtaaatcataactttcagattgtctgattttagtgaaatgctttataagaaatatctaagtttttacagtactgaatatcatgagtgttccagtgtaggatataataggcaagtttaataatttttg

SEQ ID NO: 130472 - DNA, 1116 bp, Homo sapiens
atcaataggcaagagatccaggctctgtcactgtgagtcaaaccatattgtaaaacctgtattcctaggtgccgtgccaccaactctgccttttctctcactgaccacgtgaaccgtgtgatctggatgacaatgttgtttctaggaatttgattttgctttgcttattatctccaggaatatttgtttgggttttaggttaggcttaggatgtggtagaatttccttccacgtctcttctgtctggagcctctgtcctccttagatttaaggattatcgaagattttctttgaaatagtctgtagtagactttgatatttcatttaactcactaacaaaagatccagccataaatacaatgtccttctttgtgtatatgtgtgtcctgttgctgtaatagtccccattacttgagcttcttttggcccaccatgtatgtatacccttctctcccagcagaaatcttcctgtggtattttgttggactttagtacactctgattttatactgaatactaaatattcaactttattatgagttaatttggtttatttttgtttttctttagaactaaaggtggtccacaaattgcttatgaacgcggctttaggtggaagcttgctcacttccgttatttgtgccaggtactatagtggtaaataaatcttatactcaataatttagtcttctctttatacaatacatatactataactcagatgatattatgatattatttttgtttttagtctaatgcactacctagtcatgtaaagatcaatgtgtcccggcagacattgtttgaagattccttccaacaggtaaggaggattttagcagaataaaacaccatttgtctcattgtattctgtgcatctaaagaaagtcagggttttagagatttttaaaccacccagaacacagctataataataatgactgccaccaccacttgttgagtgcctttgttttgttttgttttgttctgttttcttaaatagagatggaatttcgccatgttgcccaggttggtctcaacctctgggctcgaacgatctacccacctcggcctcgtaaaatgctgggattacaggcttgagccactgcatctggc

SEQ ID NO: 130473 - DNA, 1386 bp, Homo sapiens
tttgggtctaagttttatattttgatagttttaatgaatatagctagttcctccataacatgattttttattcctaaattttttatttaattcatgtattggtgggctagattcatcaaatggtttattaaagagtttacaggattgatatattcctacagtctttgcataatgttctctgttgcttttacatataaacaacaatttcactagatataaatttctcgcacacttgtttttccaatactcagacattgctttactgttttctagcattgaatgttagtactgtgaagtgtgaggccagccccttgtaagaaccttatttttcctctgggtgcccacacagtcctttttcctgaagttcaataatttcactgttgattgttttgtatctttttttaggaatatattaagatcttccttaatgtcagggaagttttcttctattatgtctttgaatattttttctgttccatttgttccatttttcttcaggaacatcagtcatgggtatgtggaatctcctttgtcagtcttacatgtctgtcatcttttctctgatcatttttatctttgcacttttccattttattttgatttttctcaagcctatcctcatgtcactgtttgcagtactgccctacgttttgctgcttctaatgtgatttttcttcattagtggttttactgttttcttcattttcttctttaggctctgctagctcatctgttgtctcataattttttcaacctcttgtgtctcttcagtttatttgagagtattgagaagaatatgttgaaagttaattcttctgcctcttgctagttaggaatttttcttccttttctgctagcatcagaggaaaagagtagatgccatgttttagccattcttcttttgaattgattgagttttctctgggctgttgtttgctaaaaattatctgaagcatctggagggtttattcctagttttatatatgtgtctaaacacactctcacaagacctgctccatcctcttacctggggtatgtcttacttcagcctcatcatagagggaagtcacttggttcaactactactatgttacaactggacttagttttaataattggtgtttactatttctagttgattttgttgaggacttccttctctacccttcaggcagtatcagtgattgtgttttataacctttagaaaaacgtttattaacaggctgccaggccagatgtagcctacatagaggtggccctcattgtgattttacagtttttaaattacttgatgacatttgaaaatcattagattatgcttaagaatgaagatttctgacttctctttaaaacactcgacctgcaatcctgccttctcatgtggcg

SEQ ID NO: 130474 - DNA, 1125 bp, Homo sapiens
ttatcttgtaatacctttatctagttggatttcgcatattggactttaaaatgggtggtaaaaggttagagattgcttatcacatttaaagatttaaccttttaaattttagtttcatttttaatgcaatgacaataaagttaaaagtgttaaatagcagcagtgctgtgtatctcggtatcacctgcaaatgtatattaaaacctgttgtatatacatcctagagtgcttgtaagagttaagaatacaaaaaaatacatggcttttgcctttgagaaacttacagtctgatggatggggcaagtcatgtgcataaaaatgaattaatattgtgaggttgttacaacagagtattcagtgactgatattaatacaaatacactggaaattgcctcaaaaaattgttgaaatgggatttaagctgaattgaagttgaggagacatacccaagcaaaagtgtggcatacaaataagcatgttatatctatatgaggatcagtgaatttgtagtttggccacatcgaaactagcaggtaacttaaatggagagccagatcatagaagaacttggatagagggccaaagaattgggcagtggagttcttaaagactgttgagcagaggtatgatgtatatatgaatatatttaagatctgtttttaaattcacatattaatgctaaaaaataaccttgacttattttcttatagagaatggtttttcttgctttcacatgaagttttgaacccaatgtattgcttatttgagtatgcgggcaagaacaactattgtctgcagataaatccagcatcaaccattaatccagaccatctttcatacttctgtttcattggtcgttttattgccatggtgagttcctgactttattattatttatttaagtttgttacaaatgtattagagaaggcttttaaaaaaaaaaaaaaggataagcattatatttgctattcacaagttttgttaccaagaaagtttccctggagagtgtaaaaatatattttttgagtacctgtataaaatcaagattatgaatatgaagattatgtttatacagccacttagtctttaaaagtcctttcatttttaaatttaaaacccatttat

SEQ ID NO: 130475 - DNA, 1143 bp, Homo sapiens
tatttatttacgtatttatttacactttattatctattaattcattcagcaaaaatttattgacagcctactgtaatgccaagcactgttttaggctccagagatgaaaagaatacacagtccctgctctcagggacctaaattccattagatagaaatgagtaatcaatagatatattctgaaggaaagagtgtgttgctttttttatatggtatggttagaggaaacctcactgatggatgacacatgaacagaaattgaagaaagctagggactgaatcatgcagatatcttggagactattctaggcatagggaacagcaagacaaaggctctaatgtgggagtgcattcttgattgagaaagagaccagtataattgcagcagaggatatgagagagaatgtaataggagatgagattgagagatgctgtgtgggacctttaggaaattcacataagagttgagtagggcaatgagtgacctgatctaactaacatgatctgacttaaattttattaagcttgctttacgagtatgtagaagacagactataattgggggcataggaaaacatggatagaagcaggaaaatcatttgtaacaatccaggtgaaagataatagtggcttggacttgtgtcttctagcagtggaggaagtgagaagtgatttggattctgggtatattgcgaagttagaactaacagttttctgacagattagatgcaggggtgtgagagagagtcaagtatggcaacaatatttatggccagcttgtctggttgcaaattttgggtatgggagaaatccagaatatttaggtttggcttgttaagtttgaagtagacatccacatggagatgtaaaagagatagttggaggtataagtctggcaatgaaaggatatttagtttggagataggcatttgggaattcttggcacatagagagtattaaaaggcaatatgattgtttatagagtgagtatggatgaagaagttgttcaaggacaattatagtcagggagataagtaaccaacaaaagatctgaggtagtagaatcaaataggagtggtccccagaggacaagggaagaagaaagtgtgtttcaagaaggaagacatggtcaaccgtcatatg

SEQ ID NO: 130476 - DNA, 1281 bp, Homo sapiens
aggagcgaaggcacgatggggttagtcctaaaagcctcacaggcagcagtgagagtaagaaacgaacgagagagctgccttttcaggtgcacagggcccttttatatttccttatccagttaggttaattcaatttataaaacatttaggaagattgaggcagggtatggtaatagaagtcttttatcatcctatacagtttttgatatatgttatatagctatgtgttataaaatagattgttttaactttgtttttcatacctagcattttatataatattttagttttcatgatttatgccattcacttactgaatgctttgtttacttgtgaagtctcatgatttttcttttatcattgttctctaagaaattgttattttgcaaattttaaataaaatttttcatttttctttgcaggcactatttcatggaaagtttatcgatactggtttctctttaccattctacaagcgtatgttaagtaaaaaacttactattaaggatttggaatctattgatactgaattttataactcccttatctggataaggtttgaagattttgttttgcaataagtcatttttttgaaacccattttgtttcattttgttaattagtgtatatatatttatttcacccagagataacaacattgaagaatgtggcttagaaatgtacttttctgttgacatggagattttgggaaaagttacttcacatgacctgaagttgggaggttccaatattctggtgactgaggagaacaaagatgaatatattgggtaaggtgatataccttattaagcttaatttctagaacacttcagaactaaatcctctctctgtacccttaatttcatccccttttcatgcctttgggaagttcttctcaccagtaccaatgttcttgaaaaaagagaatatatgttgcttcattttcccactgccatttgctgtaaccattctaccatttccctttccatgtcattttcccttttttaacttaggcttttaaatagtgctcaccacagcctgtttcttgaaactcagtgttttcttgaattccatgatcctatgtcatactgattttctttacattctcttgttttaaatttttgtttttagagagagtttcactctgtcgctcaggccgtcgtagtggcgtgatcatagcttactgcagggttgacctcctgtgctcaagcaattctgccttagtctcctgagtagctgggactacaggcttatactaccattcccagctaatttaaaaca

SEQ ID NO: 130477 - DNA, 1050 bp, Homo sapiens
cttaataaatgacaaaccctacaacctctttttagcacatctttttttttttttttttttttttttttttttttttttgagacagagtcttgctctgtcgcccaggctggagtgcagtggcgtgatcttggctcactacaagctccacctcccgggttcacgccattctcctgcctcagcctctcgagtagctgggactacaggcgcccgacaccacgcccggctaattttttgtatttttagtagagacagggtttcaccatgttagccaggatgatctcgatctcctgacctcgtgatccgcctgcttcggcctcccaaaatgctgggattacaggtgtgagccaccacgcccaacctttagcacatcttttgaaccaattcagtgttatttaatttcttcaagtgtctactactttcatgattgaagatagtttagcatttcatattaaagtacatttaatttcattacagtttgtgaaagagacagacaatgaagtaagaatgcgactattgcagttcgtcactggaacctgccgtttacctctaggaggatttgctgagctcatgggtaaatgtaatttcactgtaatttctctgtacgtaattttgtgataataatggcctttggacatacaatagacttgattgaacctaaagattactcttctgtgctgtaggtagggcttcatttagaagaaagaaaaatgagtggctaatatcaaagcacttgtaagacaaaaatgaatgtgtcctcatatagctgaggtggccattgctttgctccctatggtgactgtgaagggagcgacattctgtagagagagttttcttcccaatgatctaattcttattgctggatctctgcaacaattttcttcttcaggcagaagcagcttacattgtgaatttctttattttgtatcattcatatgactgtgcaacatgttctattatttaagcagttgtcagaagaaaaaagtttaaaggaccagataaactttgtcttattttcttggtgtaggaagtaatgggcctcaaaagttttgc

SEQ ID NO: 130478 - DNA, 1553 bp, Homo sapiens
atatttgttaattgactgtctctaccccagaatgtaaattccatgaagacagggattttagttttcttcactgtatcactagcttatcagttatataaaaaattctcggtaaatgactgatgaatgagtgactgagtggatgaaagaaatggactcttatcctaagagaagttaagaggactcatgacacatgtaacaggaatagtaaaaagaaaatggatttttttttttttttaaatttgtctttatccatattgctacacttattatttgtaattccattttcctcttggagatgttaaaatagtttttatatgtaagtcttaaatttagattactctaaatacttctggcaaaattttaacatatatagtatacatatatccattcagcatttctatgtgctttgaaaagtattctattagatttttttcattttattgaaaacatctgattttgtttttgtttctgttcagttttaatcgcttggatctaccaccatataagagttatgaacaactaaaggaaaaacttctttttgcaatagaagagacagagggatttggacaagaatgaatgtggcttcttattttggaggagctcttgcatttaaataccccagccaagaaaaattgcacagatagtgtatataagctgttcattctgtacagtgaattttccgaacctctcaaagtatgttttccgttcttccacagaaatatgcaaaacagttcatccttttctactttatttattgttcccttgaaatgactgaccaggaaaaagatcatccttaaattttgaagcaagtgagagactttattaaaaatacatatatatctatataaacatatatgatagtggctctagttttatagagctccaagtgtattaaacatgacagccattcattcataaagatctggatttgctttaccttgttaatattatctaggggaaaaagtgcaaattgctccatgttcttctctcccttatgtaacatctcctgagggtgtttagttgcatggctgttcagaaaggtattaagggcttaggccaaatcttactttgagtatgttaaaaaaaaaaaaatgctgctggcttttctgaagacaggtgcttgaacttgtcagtttgttttaaataaatacaatagttgaaaatttttctctgttacatcagtaatattgttaaagtaatggatagaaccataacttacacatgaaagtcatatactagatccaatactatttagtttattatcgaaattggaaggattcattgagcagcatagaagtttgtttacatgttactttgagatgctaggtatttgtggaattaaaaagaatcaggctcttttgtactttgtttttaaatctgtgatgcttttcaaatttaattcataataaattgatgcaatttcatacttaggaacatacaaaaggtaatgtaaactctgccacttttttgtgttcaaaattttggtttttatgaagccagatggattgaagagttacataagcatttgaatgctctaatataaggctaatgat

SEQ ID NO: 130479 - DNA, 1762 bp, Homo sapiens
atatgcactgtaaatttcattaacttaaacattttttaatagccatggaactgacttcttaaaatctgttgcctataaatatttcactgctaagtacatacagaaaaacagtaattattgttttgccaaaattttatttttctacatattgagagtgtgttctccattttattcagaattcatagtaaagacgaaagaaaggcagagatctgcttggttgaatagactccttttccaaatccttattatgaacactctggtaattttcaagcctaaagaattaaaaaaaaaattctaatgtatgtgacaggttatgtgatagagggaaactggccttcaaaaaggactgcgtataccataaaagagttaagtattagaattacaaatggtaccactgctgtataaattttgccatgacagaagttattgaatatcattcattgtaggtatgatttagcagatttgactgaagaaggcagctttccagttcgttttcagggtgctggtctccctcaagtaagaaattacgatgcactaggtgaggctacacagaaccctacaagagacaaaaccagctttgttttggagaattcatcagggtcttccacttttcatacccaattatagatatccaagacctacaggcagagctcttgatttatctacccagtagcagtcagaaaaactgtagaaatatggtcccccactcaccttctccccttcttcccttcccattcctgttctgtgctggactaaccgaaagaaattaggagtgcaagactctctgtgcccaaaacacagttcatgaggaaacagacaagagggaggctcagagacaggtttatattgctacttcattttggtgactcccccacccccaccaccagtaaatggcccagggaatagctcacaggcccaatacaattctgtctgttagatcagttaagcaacacaattctatctgttagatcagtttagttgtttgtcttccagggaaagcagcttaccagtgttttttttgtttgtttgtcccgccccccccatgtacttcccaagtagttgaaaatgaaaaggttaacaaaaccttttcccctgatgacttctgttaactacctagctcttcctaccctgacaactaaataggatggtatgtgtcaactgtatttattgccatgcagctttgcttttggtaaatatgaccctgactggtaagttgcatctggactgggaaatctccagatacacgacagaaagccacagctttgggcatacctgagtggaaaactcttgtaactgtatgtcctttaaggaggaccgtgagctgtcacctggggagataccatttcatagattgctgttagaagaccgtcttctgagaggaggttcaaaattgtcctgctggtgagctgtgtggttcctgtcctatagccttctgagtagactggtgccaaatacagcctattgtagacttattaagtctgaatgtttggttgaacctaagatgatgtggtggatgttgcagaagtaaaaatcttcctctgttgaaataatacacaactaaaagttctcctgtaacactcagttggccttaaaagccaagctttaggtcaactgaggatttgatctaagtccaaaagtgacatctcctatattccaaaatttctctcctcaattctcaaccaagaacaaaatcagagataatagtagttgtatttactggtattcatggtaaatcctttacataaattattctcttgatcct

SEQ ID NO: 130480 - DNA, 1058 bp, Homo sapiens
ggtttgttctcagtaatgggtctcacccttagtggggaaacgtcacggaccaatgtgacacgtggggaatcaggctcctgggaagtcaaatggaagagacttagtgcacagaatcagaatcttgggaaggcaccatgtcttgcagaagaaacctaaccctcagagagtaaaggggaaaaatgaagataaaaggacccaggagccacactcctgggcatgtatcccagagagataaaatctatgtagacataaaaacctgcatataatgctcatagcagctttatttgtaatagctaaaaatcaggaataacctaaatgcccctcagcatatggttgatatggtatgcccataaaatgaaatactagtcaactgtaaaaagaaacaaactattgatagaacttaggtctcaagggaattatgttgagtgaaaaaaagtatcacagggtctcactgtatgattccatttgtataacattgttgaaataacaaaattatggagaacagattagtgctgtcagagttagggatgggtgggggagaggaggaggtagatgggtgtgactgtaaagggacagcactggggatctttgtgatgacggaacaggtctgtatcttgattatggtggcagttaccaaaaatctacatgtgatagaattgcatacaactatacacacaagagcatttaaaagtggtaaaatttaaatataaggtctgtggtctgtaccaatgtcagtttccaggttttgctattgtactacaggttatatgagatgttagcactgggataggctgagagaaaggtacacaggatcttttttttttttttttcaatttgtgaatctatgattttttgaaagtaaaaatattttttaaagttctaataaggaatcaggaggtaagacctccataaaaagctttattattgaatgatacctgatctcacaaaaaacaaacaactaagcagaaaatattcttgaactaacccagaccctttcttcccatttgatgacctagtattgctggtaactcaacataaaattacatccctagggaaaa

SEQ ID NO: 130481 - DNA, 1062 bp, Homo sapiens
cctcctggaggagcccgggctcggggctcagctccgggccgcaaggccccgcctgggcctggcgctcgcgcacctggggctggggataggctgggatccgccctccttccctgggcggagagggtcgggcttgtggcccagagaagggtgacaggtcccgaaatcgctgcagcaccacgcggggagagggatagggtacccacaccacgtccgtggtgaagccaatgcccagttgagcggggggcgcgcgcttcagagcacccgagaagctggcagatggagtgggaagaggtgactcttgatttcagggtaaacaaggagattgtgagaagtagtctagcagctcccgtttctcctccagcttcaagattcttctgtctagtgttttgggttccctacaccaggattgtggaggaagcgcacggccagaacccgttgggaccgagcagatcaaccatttatgttgcacttaatgatcatctgcactttttgcatatccttagtgttgtctttgtgaggccacctctataatggataatcaaatagagggaagggcgggattgaatattgtgacttgatttcaatgtcccacaacaactgtgctagacagtttttatatgttaggttatttaacgctcccaagcacttattaaagtgatgttactctgtttcattctccaggaaactcaggttgaataattcatcaaattacacaactggtaagtggtggcattagggtttggaattcaagtccgtatggttttagggcacaggctttattgcttaatgtaaaagaacattattctttgggataagccagatacctaggtttcaaatctatgctatgagggctgttagctgtatgaccttgggcaggatacttcaccttttagggcctgtttctgcatttgtgaaatagagataaaatgtcacaaggttgctatgagaattaaattagatcctacttgtaaaacatttagcaaagtgcttgacacgtagttagtggtaagctatatatagccacatatatcctgatgtcattaataagggtcagcaaactag

SEQ ID NO: 130482 - DNA, 1040 bp, Homo sapiens
ttggtactatcactgggctttttttcttactattgttagagttttctcttttttcctccctttcaaatgttctttagtcagtgatttattatgctagaaagtatgcctgttagcaaaactataaaagttaatgttagatgtgaaaaatgattatatgtcatttgaccttcaaagattcataatgccaccactgctcaccaaagcatgatatttcaggtggatcttttagcaagactcaatgtcacttccattggtggtactcagtgacctgcaggagtcctaactagagcattcctttactgtacccaccattaccttcagcctacaatctagcttccttcccaccaatattttcccttcttgttcttgcttgtgagtgggaatcgtattggggttttttttggagagactatttattcttttaatataacagcttagcagtatgcaatcataactttttaaaagacattaaaattcatcagtattatggtcacatttaccaatatgaattaggtggatagcatattagtaagtttcctcataaaaaaaaagaaggaaatactacatactcattttagtaaatcattttgaaatgtctcttgcaaatggttgtattatatctagttcctgtgaaaattaccagagcaactgtgtggttttctggacacattgttatccggctatttcaccttccctggcttttagtttaccacgcctttagacttcaaggtgacggtcagtacctgttaaaagaggtacctgcaactgtaaagaggaacttacttatctgtccacattttcatgtttatgtgtcagaattttttaaaaagaagtgaaaattaagacaaatacttcctgatggtattgtcaaaacaattttataaaatatgtaaaattgcaccccaccttcagtacttcttgttctccttctttattgttccctgtagcacttactgccacctaatatactatatatgttacttatttgtcttcattgttgtctgccttcctgcagtgtaactaacctctccctgatgggg

SEQ ID NO: 130483 - DNA, 1488 bp, Homo sapiens
tagagacgaggtcttgctgtcttgcccatgatggtctcaaattcctaagctcaagccatccttctgcctcagcctcccaaagtgctgggattacaggcatgagtcactgagcctggccaagaagattagtatgtcttattagccatcttaaaagctgtattttactgtcattcagtaaatgaattttatcctagcaagagaatctgatgcaggcagtatcattggaatgagctaatagacacccacatcctgaggaggtgcatataacagtctgattctggcaagttcactctataagcctattgtgacaattggtcttaagaagtcacctgtttttgttaggaatgagtgtgcttcttaaaggcactgttttacttgctttctctttttattggttttctcagaactcaagacatggctgcccagtgtgtcacaaaggtggcgctgaatgtttcctgtgccaatcttttggataaagatatagggtcaaagtcagaccctttatgtgtgttgtttttgaatacaagtggtcaacagtggtatgaggtaatgtcaaatactttacctaaaaagtaatctgaattacccttttaacaatgtgaagagtttttttaatgttaaaaataacaacactatctcatctgttaatggagttttttgtgaaagtttgtccttgattgtagaatttttcatacacatatagaaacttcctttagttgtcatgcctatgtttatgtttagtatataaagatgtgaaaatccaagtgcacctttgatctgaagaaacttttttgtttttgcggatgggtgtaggttgagcgcacagaaaggattaagaattgcttgaatccccaattttccaagacatttattattgattactactttgaagtggttcagaaattgaaatttggggtttatgacatcgacaacaaaactattgagctgagtgatgatgacttcttaggggaatgtgaatgtacccttggacaagtaagtataaatagccactgtactctattttgtctaaattttaatcaatgaatttggtggtgtttttggtaagcagcatttaatttttaaagttgaaaaacatgtaatcactttaaagacagtttatatattaatatgattggcttgaacattatagaattcatcttatattttgtatgggcaggaactatgtatttatgaaaaagcctgttaattcttttgagtaagggatgcttcatgaggcattttattaagtaatacctccgctttagctgctgcagagttctctacggttttgttatgttcaagccataaatgcattcaagataacagcaacttctctgatcttctaactagtgagactggcacctgctgactcgcaatgccccaataccatcccctttacctggcttgctcttactcaaccttattccccctgataaaccttctctgaccctctagattagtttggaatcctttcctgagctcacttgg

SEQ ID NO: 130484 - DNA, 1882 bp, Homo sapiens
cagctaatttttgtatttttttagtagagacaggttttcaccatgttggccaggctggtctcaaactcctgacctcagatgatctgcccgtctcggcctcccaaagtgtggggattacaggtgtgagccaccgcgcccagccatcctctgtagttcctaagtgctccttgtaataggtagatatattttccaaatagttttctacttttcctcagaatgtatcacaactggacaatttattacatttttcatgtagcagttgtataatattgttctaggtagtttttttgtggaaatagttgagttgatgaagaggtggaggacgaatggtgagagtatagcaagaacctaggaagggcaggagcaaaatgttaatgaactggaagtttttctaacagctttttgaaaccacatttttataggttgttaaaaacaacttgaatcctgtttggaggcctttcaagatctctcttaactcactgtgttacggagatatggacaaaaccattaaggtaagttgaaattatatatatataaaatacttaaatatacccatgttcacctattttataaaattaatacataagatagtatttaaagaaagtaaatgatgtaagacacctacagagttaaattttatgtgtgtagaatactaaaatagaaatgtcttctggtaagtgacacagtttgaggagtaggcatgtttgactaatctgttgacctaatgcttagtcaaacagtgtcgtttctattttattctgtattttaaaaaataaaatgtccagtttaatatttttttccttttaataagattcctctgctctgctaataggaacctcgaactacattatttgcctttggtatgtctgttgcagatagaagcagatgttaccgtaagaactcagagcttgcttctgcccttagcaagggagggcagtattgatggcatttttcttccttattttcagaatgagataagtaattaattgaaagcttttagaaggctttagttttagagtatcagggaagtggagtatgaacagcaaatagcagatgtcagtatttttttaaatgtttttattcataggcatttatttaaaaaaagagtaaaaatataaataaaagaaaactcatggagtggtgttgagaatgaaaaatatatacatacatatacataaaagaaacttttgtactagaattattaactttacatgattacagatagaggtcttttttatgttcagacttcagtcgatcaaagggattttttggtttgtttttctctttttctgataataaatatggtaaaagcaggcaggataatgaggagtaagtataagatttggagtcagaccacagttcaagttttgacttagtcctttaactggctaagggatcttgggcaggtaaccacacttcttcacatttacttatttatttattttgcttattagtaggaagcttcacctggattcttcacttttataatagagttaagaatttctaccttccagaaaagcaaaaattaaattagcagaagtgaaagttttgtaaaaattttgtagaggtgccattgttactgaaaaactgcttcatttttgccgggcatggtggctcaggcctataatcccagcactttgggaggccgaggcgggcaaattgcctgagctcaggagtttgagaccagcctgggcaacatggcaaaatactgtctctacagaaaatacaaaaatgagctgggtgtggtggcgcatacctgtgttcccagctacttgggaggcttaggtgggaggatcctttgatcctgggaggaggaggtctcagtaagccaatattgcttcacactgcactccagcctgggtgatggagtgagaccgtgtct

SEQ ID NO: 130485 - DNA, 1035 bp, Homo sapiens
aaaaaaaaaaaaaaaactgcttcattactgagatccataaaaaattgcttccagtttgtaaagaactttaaaaatcaatctaagtatgatttgtaaggtatttgaaacagtagtgaaaatccaggtccgaaataaatagttgaaaattagctataaaaattattttttatcattttgccaaatccagacttttgcttttcatattaaaaatagtaaacatcattagatgtcagaaggcaggtaaatctaggggaaaatgtctaagccataactatttgattgtgtgtaatgatatgttaacaacaaaacaatatcttttaaacttttttgctcacagtggcatgcttacagggctattttattatagtaagtaaactgattttctgagctttctctaatgaatgtcttccattcttaaaactttcttggtttgtttttaactatacacaacttggtttgctacgtcatcactgactttatttcatttagttctgcatttctttgcaatatcaaaaagtcatacatttgtgattctcttactgttcgaaaattgcttatagggatagtaaagagttatagagcagtgaatagagtcagaatcctcagtagtttctttgccatgttgtgttatcattctagcatgtattattttcattaagatcaagtgaatacgaaaaataatcatgcatgctgccactttgcctaaaatgggagtgccttactgaatgtagtatctgtgtggtgtgtgcattctctttcatatatacatatgcccatgtgtatatatgtatacatttatttatttattacacatatgtttattatgtatactatatatgcatgtgtatatgtatattatatatccattaaatgtatatgaatacatgtatatattatatacttgcatatacatatgcatatgtatatatgcatatattgttatgcttaccattgtttaaaaagccaataatactggtctttgaattcttgaaaagagagaaattaaatgacacgaattgtcttacctcataccgt

SEQ ID NO: 130486 - DNA, 1043 bp, Homo sapiens
actttgtaatgaaattttcacaatctgtttagcatagtcctcttagagtcctcaggcaggttgtctgggctcatcatgaagctctcagttttgttgatgagatctcttcctcctgagagaaagcagatgtatacaaacctacaaactagtggttatcctgaactaatttaaggactagaaagcattagtgagacaaccttataaaagacaacccttaagcttaagtaatggatacaataattcattatttaagccatctagaaaagtagaagcatcaggttgtttcacatttaggctttacttgtttaattgtctatggaaatagtggtaggcatttgttaggaagtaggcgccaggatgcatgattgtatcccatctcttgaagttttcctggacatcaagcacaggtgtccctgccttctccttactaagggctgcaattgttatttggcaggtgggagtggacttcactggctccaatggtgacccaaggtctccagactcccttcattacatcagccccaatggcgttaatgagtatttgactgctctctggtctgtgggactggtcattcaagattatgatgcgtgagtatgactttggaaaaactaaaatacatgttttcacaattccccagaaagggtagtttgtttcatcggctagcactctgatataggtggtaggttgatgatgctttctccctaaaatccccccgtcttatcttctatttttctccttgtggcaatcttgctgtttaccttagatctctaatatctttctgtgattagttatcatatatggcatgtactttgctttatattacatatagtttgctacttacttcctgactgaatgtcagcaaggctcttgtttctttagtctggtttccttggggcttattcattaggcataagttgtatgagtgattgaagcccagatgacatgttttataaatactgtttataaatactaaatattatttatgttaaatactaaatactatttataaatactaaatactatttatgttaagaaataaaaa

SEQ ID NO: 130487 - DNA, 1053 bp, Homo sapiens
ctagaattaatattaggtttatcgccatctggtatttttgtagaacctctggccatatatgcaaatgatttttcattttattaataactctttcttacctttcatcatcagttgtatgatgtgaaacctttttcatggttttctatcagagccacattcccaacatgtattaaaaattaagcacagatgtaacagtcctaccgtagactaataagtaatttgactgagatgaaagtaaatcccttctattgggggaggacagagcttataggtttttgcaatggatcatacctatggagttatgtaatacatagcttagaggaactactgcttatagaacttttgactatttaaagcactatatgttgatacatataatcaaattagccagtattgtgaataaacacattgtgcttgagaatttttagtactgttttttatttgtttgtttgttctaggaatccaaggcattgtagaggcgtatcggtcttgtcttcctcagataaaactctatggaccaactaatttttctccaatcataaatcacgtggccaggtttgctgctgcagccacgcaacagcagacagcttctgtaagtgctctatggccagggaatgggaagaatgtggattggtagcagctcctggtgccatttttctatgtttttggtttgtcataatacaaagtcagggcaagatacaataacacagtcattcttggtttgggagtaacttttgttgttgttatactagtgatcgttaaaaataagacaacagcaaaacaacacttggcattcatgagtcttttatccttggaattaactttcttagataggttctaccaaaaaaaaaaaaatgcctatcatctacctttttgaagtagacataacaaattaagcttaaggaaagttaccacatcagatgctgttgcaagatttcttattgtactaaagatatttgaatgaggtaaccattacctattggaccgtggataccaaatttctcttagcctcagcatattcagaagtaagttaggggaaactacctcatactg

SEQ ID NO: 130488 - DNA, 2271 bp, Homo sapiens
aggatattgtagatgcacagatggtaggttgtcctgaattctacattattagattactttaattgagatttgttaaaacggttaggactgttttgtccaggaaagataagaggaccaaacatataaggtgaaattcagaattccgtttccttctaactaatgaaaaactgcttactaaaaaaaaattttatactttccttgctaaggtcccatatattgatttgtacagatccacttagtcattttctcctttttttaagaaccattttcatctgatttttaaactcacgataccagttatctgttaatcaaaattgcattttacaatttaataatgtgatatttcctatgtctacagcataccttattaggtataaaacctactgcaacttagaaaaaggaaagaaaaaagaaaacttttccaactgctgcattaagatagggtggattttatgtgctttttttttttaagagttgaatttcttttcctgacttttaccttttacagcgtattacttagtgaacattacattttcagaatagatcctaatattttattgagggcctatgtgctaaaaactatgcatatctatatattggccaattatctttaataatttaccttttgaaattgcatgtttatcatatatccttaagtggacacatacagtgccatgttgatgtgcctctcagttttattgaaaagctgccccacagcccatgtctcttgttctctgcaatgcctcaagggagtgagctctcaaccacagatagctgtggcttctcagaagcagctcattgccaaggccaggctgagaggggacctgcttgctgtggtggttgcctagcccagatgagcatttacctaccaccttcccacttggctagctgtcctttggatatgtgctgttaactggggaaggcatctaactagtagcctgctactccatagtatggctcaatagatgacacatcattttgacattatcaataggagaaaagaaaactaacccttcttctgattgtttggagccatagttgtctcagatgttctaattctctttgtatgcttggaaacagcatagatatgttgctgtggttttcagaattttctcttttaatcacaagaagccttttaaaaaatgacttacacatattctcaatgtacagtaaaacagacagaagtgagcttatctgtttgatgctgtggcagggtcccagtcactgggcatatcctccttctccttaaccagctccacagcagcccctgagtcacctgcacaaggtgcttgggaactgctggttatgagcattcctggttttcttcagccaaataacaggtaatcactgtcaattggatttggtcttcattattttatattctgattttatcagaattattctattttaaaattgttttaaaatttaaaacatttaattcatgatcatgttcatcagtagatgctattattcataagaactgtgattccagcaaactagggtaattggtgcctttttacagttttgaataaaagcatttacaatttctaaattatcagttttcacagtttcagcactcaacctcatcatacgctgatttaatattgttttacattaaaatagtccttttccctgttgtgccaccattcatttaagtgctgtttgttcttaaaatgcatttaaagaaaaattacccatattgactttcacacctcatataatcagatctattacaaatatatatcggagtgacggtgcccaggatagatgtaatatttcttacagatgctggcacagaggaaataatataccagctaatctagtcacctaaccttgtggttagaattgcaattttaagaccagaaaaatttgaagtctgatcagagatttacaactgttcattatagtggtgccttaggcaatctttccaaagtaaattcagggccccattgctacttatgccatatttggacatactttttttttcttcaattttgtaaacttcctggaaagctgtcttcactaagtatcccctagtctctatatatgtggttagtagtcatggaaatgacacataaagtacgccagaagtttgatggaacgtgttagaaactgttttgtgcttttatggatgtcatacttgacaatacatgtgtaagttactaatatatgaattgatgctaaatatatcttacatttgaattccttttggataaagttatttcttgatgtgacagagtagtgtgttttcatttttattctttacatgtg

SEQ ID NO: 130489 - DNA, 1133 bp, Homo sapiens
gaggataagtttcttgagagtagggacagtattcgattcacttatttatctaccctaggaacttagagtatactcaagaaatgtttgaaggagtgaatgaatgataatctcagttcgaggattttatttctttgaataattatttaatctgcattataattgtttcaggtaatattattttaaaatacttcttccatctgtcctgtgtaaaattatgaagtttctgtgaattgtttatcagaaggagtgaatacgggttgcggtgtgcggcttggcgcaggctcacaaagagctgcagtggcgccccatgctcagctttgcggactgagttggcggcggcggcacggggacagcagcgcaccctcgcagccctgcacctgggccagtctcctgaatatttacacattgccgaatctcctgtggacaagacaccacggaggccaggactgttccatgatgggttgagcctcttctcgtgcctagagattccaagaatcctatccatctttttcaccaatatggtttgtggactgtgatgacccaaatctgacatcagttctggaacgtccagaagatactgagaacaacaattaccttcgtcagcaattgaagtggttgatatgtgaactctgcagattatataaccttcctaagcacctggatgtttgagatgctagatcaaccactacccatgggtcagaatgggaaaatagaagtgacttcagaagaagaggaagaagagatggctggagatataaaatacttaaatcactgtaagatgaagaaagaagaacttattagtgggaaaaagttggaggatgaaggaattgaaaaagaaaatttggcaacattagagaaaattaggaagactcaaagtcaaggccatttaaatgtgatgtggtgtttgggtcagtgcaagtttcagatggacttatgaaagagctcagggacgtatgcagatcatggagttataaaacataaaacaggtctgctggaatttttttgtcctcttcctgatagagaattaactcttacatgatttttatcttctggcaaaagcaaagcaatattgcttgaaaaggatttattcagtggaactcgtaaatgacagtacatgactggcatgttaaact

SEQ ID NO: 130490 - DNA, 1154 bp, Homo sapiens
tgtgaaagctttcctattccaatgcaatcctttgtttccatcaaattacaaaaatgactctgtcatcattattccatttgaaagtagtgaaattcaaaattatgtacaaaatcctcttcatgcttcttgtgtgtttgttgtttttgttgctgttttaattctaagccaactaaagagtttcacttccatgtctttcagagcctacatcatgtgtacagctgctataagcttgatgtgtcttccatggtaattaatgtagcttctgcagcactttaaagatttggttttaccccagccttatacttcttatgcttcccatcactttgtagtcctaggaaattaggaacctgcatgaaaatattgcagcaccggtattacaacacacccaggtcttagaaccaaatgtggccagtatagcagtttattactcatgctctgtacagcagcatttctcaagcagtggacatgttctcactatccattacgaatcttatattttatacctatgttgtacagcttagtgttagctgggaaatcaagttaaacaaagatattagaacagccaaaaatacaggtttcaggatttcagcttcagtagtgatggtttataaagtaagagaccaggaggaggagcagacttaaatgatccaagatgacagtttgtctttggccttcctggtcttttcgttcaaatatttttagccattttgcctgccatgtatagagtttcagacacatgtaactagcattagagccttactcatcgaagatgccaaataaatttttggtaattcagtgcaatcagtagtgctggagaagatcttataaatacccttcaaatatcagcatatcaaatgttactgcatgaggaacacctactgttgaggtagggcagacctgtcttatttagtttctcaaaagttcttctgaaaatgcatagacccaatgatatagagctaatcttatagatgaaaagtaagtgtgctaaaattattctttgcatcactggtcttacacacagtgcaggcttagtagagatcaaaaattcattccttgtcaaatacagcatcccaaaagtaaccaacttgataacctaatttttagtaatagttaagtaaccataattacccttatggtttacaaaggcacttgta

SEQ ID NO: 130491 - DNA, 1575 bp, Homo sapiens
aaattcatctaaatgctaataaaaattatgtattttgttaaaattggtaaaaaatataggaggtaaacaatggaaacaaatgatgtgctgcatggagctcatttcactctgctgaattctaaagtatgcagtaaaatattttaagtaatttcagtgtcttttaggatttcccatactcccttgtcaattaaatattatttctgttcttacattttgtcttacatttttaaaaaataaagtaaaaaataaggaagcttttaaatatttagttataagatactgtataatatgtgcataagatttacaactgaagcaaaactgtacaggacatatcaaaggcacagaatattgtcactgataattctttaggcacccattgtattggacataaatatgttttctttgcaattatactgtttccatgaaatacttcttttagtgatcagcataaaattgtataataattacctttacaattttgagatttagtgtatttcttaatttaaggatgctacctttagggcattattaatacaactgtataaaccagaattgtaaacaatgaccagtgacaattgcatgagatgtgagtagacttggcagctctgtgagatgtaggaagcacatggtatcaagctatatgtcatgaaaagtaaggtgtgcaaggtacacactcattgagaatatcagacaaaaaatgcctctgctcaattttcaaaaattagtctctcttttgaaatttgtaatgttatattaaactttaactcagtatgtattgctcctagagttatttggctcagcagtgtggaatttaattttgtaagaagttgggggaatatacagaaataaaatattaaaatatattacattttctctggtttgatatctaaatacagtgaatatacaaaaagatagttgacttttggactttttaaagaggaaatttcttaattatttgctcttgtcccttacagattgcagattttggtttatcaaagtggcgcatgatgtccctctcacagtcacgaagtagcaaatctgcaccagaaggagggacaattatctatatgccacctgaaaactatgaacctggacaaaaatcaagggccagtatcaagcacgatatatataggtagagtaaagttgcttctgctcagatttaaccttgtctcagacacaaaattagtcaaccagaattttgaagctacattttaaactgtgatttttattcttctctcataattgtggtgaaaataaacttgaggccccacggtgattaatatttttcaaattaaggaaatttaatgatttgctttaagaaacttttacatcctttaagaaattttaaagcatctcttcttatcctatcaatttataatataatagttaaggatttttatcatatgtgacttggaaatgcagagggaaacagtggttcctaacattttagctttaggtttctcaacctgttcaaccttttagcttttgatatctatatatctttttagataaatagacaaactcttaatcacactggggatatttctatttaaagaatccctaatatttgtatat

SEQ ID NO: 130492 - DNA, 1015 bp, Homo sapiens
gtaataagcataacacattgttattgacactggttatttaaccagaataaaaggaagatgattatttacacaggtttaggagatggggacattcacctcatgtataagttactcttatctcttttaatatactaatgaatgcaaaagcagactctctaagtttgctctgaacacattttatagtcctttaaatggctttttgccatctttaataaataatttgttaatgaatcattttaggaatgaatgctatatctctaccagaaaactatatatttaattaaattgcatattccttttcttcaaaagcattttaatttttgttatttctcattaaaaccaaagccagccaatccattttagtggctgcactaaaacaattcatacagtgtcttttacattcacattgtatgaatataagaaactgtccttttatattttgttttctgatatttttaattcattctgaatgatgtactgaggggaggagaaatgtatttatagcttcctaaggtagagatcatgttctacccaacaattcttaaagctggtttgattctataaaaatgggccaataaatctgccagtcattcattttgtgaattttccctttatgttcaatttcaatattctctgtcagggaaaaatgaggaaatattattccttcatttgggtaggaattccctctgtactcctcgctctccctgtaacacaaggtgttagtagtaataaattctatgtgtccattttgaatgcatggttaatgttggggtgtggcaaaattcttatatcctatttaaccatttattctaattataaactctatgcagcttaaccctgtaattgacatctgaagttaaactgtaggcaagatatttctactaccaaagaagatagtgctgagagcagaaaaaaggcagtagaatagagctccatgagacaatttttttcttgttctttgttctttgtgaaaaataatatcatttaattaaagggcatagcttatctgggtgtc

SEQ ID NO: 130493 - DNA, 1008 bp, Homo sapiens
agacgaaagttcaatgaagacagaaaatgtaattgcgtggatttgggaatagaggggatgattaagtccctgaggctcagtgggattgccagaagagaaactagaaagacagacatcatatatagatttagagaacatacttaaacttcagaaggagtaagaagacacacaggaaaaatatgggactatgtaaagaagtaaaattctatgatttataatttacacagaacagacaatttctgacagaaattgtagtgaaagcattccatataaacccttttttgttttaagaaatatctacttgcagaattaggtttctgaaccagccttaatattagtggaaactaaagacattggagcctaccttctgtctgctcagatgttgacatgttagccaataggaatttctaaggagtattctacttctaatgaagatgttgtattttgtaggaaaagctcaagactgttattttatgaagctgcatcactgtcctggaaatcacagttgggatagcaccatttctggatctcaaagggctgcattctgtgatcacaagaccactccatgctcttcagcaataataaatccactctcaactgcaggaaactcaggtaaatatttactgtgaaacaccttgtaagtgatgccattgaccttacatatctgtgttcagtggatttaccatacaatgaggtttgtctttatttcctcaatatgataaatacataccttcttaagtaggaaaacaaatcccaggagatgggaatgatgacatggcccaaatggtattctatgaacatctaaatagggaggcagtgctaagaggaggtattaacatattactaatggtaaagttatttttgtttatttaaaaaatttgcaggtatcttttatatttgaaataaaatggacatcaaacaaaactgaacaaatcccagaagatggaaatgatgacataaagtggtttttgccccgtgatttataccataggaaaaggcaatgccttt

SEQ ID NO: 130494 - DNA, 1035 bp, Homo sapiens
gttgctctccatctaacatatagtatgtagacttcgtaatgtatctcaccatactccaatctagcccttattaggtttcttgtcatattcctctttttatctctgacattctgtgctctagcatgcttttgttggggagtccaagttcattctcagtctcgaagattcaataggattcacaggactcagtaaagatggtgtacttgtggttaaattttactatagtgaaaggatacagattagaatcagcaatgggaaaaggttcacagggcaaagtccaggagaaaccaagtgtaagcttctagatatccactcctagtaaagtcactggtgcgtggtgtcgagggatgttttctgtggggtcagtcatataggccagcagctcccatgtgactcacctctgcctcccagagcaaaaactggtattcacataaatcacattgttaggataaactctcatggttacactggtatagcattgccaaggccttaggcatgcaaaactcatgctcatcaggtagagtattcaggggctcagaagttatttctaagaaggtggcagccaagcctggttctgaagacaggcttttgttggtaatgtaaaaggttggaacaacgcaggcctgctgagttaatcctttcaggcacaaggctgaatttcttttgactccttgaaggacactcatatttgctctctttattaagctgccacatggatttttatttggcttggaatattttccctttctaatggtacactcctctgcccatttgtgtccttgaagaaccagatactttctatatgctcctgcatacttctatttagtttgcatcctttaatactacagtgtccatggcagcttgtattcatggcatataggttacatggggaaaaaagaaagataggagaaaaatgaagagatcaaggcattagggctctcaaccaactggaagaactggtgcagtgggaataatgttaaaaaattgttgtcagaaagtgaaatagtagtgtcttaaggttttagagttacaggt

SEQ ID NO: 130495 - DNA, 1047 bp, Homo sapiens
cctcccacctcagcttcccaaaatgctgggattacaggcgtgagccactgcgccaggccctcagttctactcttatttttttttattaaatatgttccttcatacccaattagccaaccataagccagattctagcttatccatcattttaaattatcaatcataaaatatacaatctttatactgaaagtcaaacactttaggtatgcagagtttaggtattcatataagagatatgcatagataaagttatatatcaatgcataaaaataaagtatgaaaaataatatatggatggatgagaaagtaactaaacagagagtgatgtaacaagacagtagataaacccatgattaacaaaagtcacaggaaaccaatctgcaataatcccttagctctgtgcttagttttataacatctctaaatgaaaactagcatattataatcactgcttcaaggacacatttttatttgaaagacgtacatttatattcttcagccatgacaaaatcacaaatattttgaaatttttccacattctctttttcaacgtacaccaaagaattttaatacagttcaatctttaccttcgtttacttgatacccagtccttaaatttaagtccaggtagttccatccaacttccaaagctgattgtcaacatggagccttccatattctattagagtttaaaaaaaaaaatgtaccgtcaaaaaacaagaagtaacatggttttttttggtctgttttttaaccatatccatctcatttacaataattatgactctggacaaggtgcgctcctgcagtcctaaatggttggctaacttacctcaaaaacattactccaataaactttcatataccttcatcacttgatattatcccgacaaccttctttcatatagttataaatttataaaacaaatttacaatattatccaatgcctacacaatgttgataactttggtctatgatcaacataattcagatgtacaatattatgtcagggaaacaaaaattcagtatattcattttttgaacaa

SEQ ID NO: 130496 - DNA, 2088 bp, Homo sapiens
ttttacagctgcactttttaagcgtatggcatggcttaaactcttctccttgattaattaacactgtcgagttttgtttgattaattttagatgggagaagttgagagaatgatgatacatcatacagctgctgacttttttctattttttttttgcttatttcattaggaattagatggactgtgttctagatgatttcaccaaatcacttctctttttgctagaatcattttagttgctattggtaggacttactctataacagacttgacttgcttttgctgcatggctactgcttatttatgtaaatgttctgtactgccatctcatttccctgtttgctgcagctattctttttctatattccctccctatttttctttttcatcccttctttctctacctctgctgcagacccaccagtcttgattttcataatcactgcgtcagttcctgaagttcccttgaatttaggatattttcattgtgtacatcaaacataaaaattatttgaactgtatccaacctgatttgaatttgaaagactgtgagtagtagttatctcagacctctgaaaaatgccagtaatatgaggcatttctgtttcttaatactattttatatgtttttactgaaatatatgaaataaaactgctttctcctcagtggtttttccttactatgctacaactttattccccaggcaacctctaagaatgtttagaaaaatgttgccagtagttattttgacagctgttttattaaaatgatgtcttcccatttatgttttgctatccctattagaaaatatgaaaagataagatgtaattttgtttcactatatgatagaaaaatcagtctgtaagatcgaatccctgcaagtcactcttgtaggcttgctctagagattcagaagccctgaggcagcctcgttaagagctggtgctcttaataaggtagacctggtcaaatcccagctattccatctgagttcccctatcttctgcaggtttacctaacctaagtctctgttacctcattggttaaaactgagataatagtataatagtaatgaagttacatgaagattaagtgagatttcatatatatatatacacacacacacatatagagagagagagagagtttaagatagtatctggaagcattcaaatgtaaattagtaacagtaaaaataaacacagtaagtccttaacattgtcagtaggtttttggaaactgcaactttaagcaaaattacataaccaatattttttctcattattacaacaaaacaacatgattcaaggaactgctgtatgtcatctcacttacagttgcagtttccaagaaatatcaaaaacattaagtcaggacttactctatctgtatttaaggaacttctggtcttttagagaggatagggtacaaatataaataattataacagaaggtagaaattgataagcatcctgggaattctgtagctgaagttttgggagagttcttcacagcaggcattatttttagaagaaggggatcaggaagcctttgctaaagaggggaagaacatgttccttgaaacatagtaggcactaaataagtattgaatgaatgtacctttaaagatggttacatgtgggaagagggaaaaaaaggaattaacttccttggcagagggagaaatatgaacaaaagcagatagagggtcacaggatatttattaggagatgattctggggttttgttttggttttgcttttttcttttttgtgtgattcagttttaaccggcatacagagtccacgaagaggaggctgagaagtgattaggaaagtaaaatggaaccaggttatgaagagccttgcacatttcagcgggtcaaatgcaagggcttgtgttttccttggtaggtgggagaagtcacgaagggtttcaaattgcatatgataagggcatagctagactttaggaagatgcactcagcacagggagtttttgattctgactctgtaaggtgctgtagaagtttagtgagtttgtatttaaaaggacttcagaggagaggtaatttagcagcagcttct

SEQ ID NO: 130497 - DNA, 1185 bp, Homo sapiens
cggctcactgcaacctccatcccctgggttcaagcagttctcttgcttcagcctcccaagtagctgggattacaggcttgagcatctttttttatagtttcctgatatttttgtttatcaagttccaaacataatattgtgattgttgctaggtaatacattaagtttttaagttaatttgagggaacattgactcctttcagcattgctttccctttagaaaaatgatgtagccttctatctgtttagataacctttttttctttttctcttttttattgtattttaaattttgttgttgttactcctgaaacaccatagttagataacctttgatagccttcagtgaggctttactgaaaacacaagtttgacatatgtaaagttgactaacatttgaataacaaaggtgttttatttaatatttgtcatacctatatcatatacacttacatgtatgtgtgtgttcgtgtacatgtgtatgtgtctatcaacttatctttttttaaaaaaaaatttatctcaggagaaccatacagacttttgactggcgttgagtacgttgttggaaggaaaaactgtgccattctgattgaaaatgatcagtcgatcagccgaaatcatgctgtgttaactgctaacttttctgtaaccaacctggtatgttactaattttatttcactagtttccagtaagggggttgaaatcacaaaatattctcttggtttgtatgtgagagagagttcacaggatttgtcattttatagagctgtgtagacttttttaatgttaacaaaattaaatacttatattgtggcagtggtaccagtggtatttgttcattttgagatttgaagtttctatttcagtaatttactctttgttttagttagaaactcagaggaagtaggacatagttatttttatttgcttactaaacatttattgtttactattagtttggtgcaaaagtaattgctgtttttgccattagcagtaatgtgtttttatgtgtcagtaactgtgccaaccctgcgaatagaacaatgaacagaccttcatgactctggctcttaaagaggttatgtagctgtgtggaaacgggcatttctcatataatacaagtttttgcaatgggaattgatttgttttattagggaaatgcttacttatgccccacagct

SEQ ID NO: 130498 - DNA, 2075 bp, Homo sapiens
tctttattccctattattatttatctttaacagctagctacttgacctttctgtgcttcagtttttttcatctataaaatagaagtaacaattgaatttaccttatagagctgttttgaggactgtatggtaaatattgaatctactacttactgttgttatttccttctagtctttttttctaagcatatatttttatttgtagttaaaaacatactgtatatttgtttcttttttttcatttaacatcacattataaacattttcttgtgcaatttccaggtgatgaacagcctccttctaaatcattgaccacatttcttattctttcctgaggataaatttcaagatatcctgaaccaactgatgacagcctatttagctacaggaatactctggaaggaaatggtagcttctggagttttaactggagtgttaatcttgccaccatgacctaatggaatatcacataacctccctggtgtgaccattaagcttagcaggatctcagagaatagacagaggaatatgcaagctggttatcagagaaggctctggagcctgtcagtcagtttgaaccttggttctgcaactttggcaatatatatattttttatcactctgagccctttctgtacaataggataaaactaatacctatttcatgtggttgtttggaagattaaatagtttgatatgtaatcctggcaggtggtaactacttaatgaatgttagctcctattgttcattatattagatacctaaagtttgttttatgattaaatgcgagagaatggcagtgatgttcgcatgtaatgtgagtacaagctgttaacatataaaatagggcaatacaaatattttttactccgaaatggattgattttcctcccatttaaaataaataacagaaatattctgttttatgttttgtggccagaagctagcatgggaagaggcatttgatttaataatccttatagagaatttttaacaattttcttcagtaattcaaaggtggaaagtgatttttgtccagattattcttgttgaaagacaaaaatgctttatgttagttttttaaaaattaaatttggtcgggtgtggtggctcatgcctgtaatcccagctctttgggaggccgaggtgggcagatcatgaggtcaggagatcgagaccatcctagccaacatggtgaaaccctgtctgtactaaaaatacaaaaatttaacggcgtggtggtgtgtgcctgtaatcccagctactctactcgggaggctgaggcaggagaatcgcttgaacctgggaggcggaggttgcagtcagccaagatcatgccactgcactccagcctggctacagagcgagactccatctcaaaaaaacaaacaaacaaaacaaaacaaaacaaaaccaaaaaccaaaacaaaacacaacaatttaatttaagcaaaacacctgcagctaataatggtagcatttgtagtgcttactatgtgctacacactgctctaggtgctttacctgtaataactcatataatcctcacaatgccatatgaagaaatttattttattgtccccattttgtagatgaaggaactgaggcacagagaggtcaaataacctgctgaaagttacatagcttgggagaaaattctgtgctatgtagtccagctccagagcctgtgctttttaaatcagaaaacaaagaataataattaagtacaataccaatatgtttgcagtgagtttgtgttaatacaagaatttgattactattaaattcaagagcatgttttaaaaaattcatctgttttttggaaatatatgtatgcaaatttaaattcattttccccttttagtttttcagttatgggacaaaaatattatatcaaaacactgaagctttgcaatctaaattcttttcacctcttcaaaaagcgatgctaccacctaatagttttcaaggaaaagtggcattcattactgggggaggtactggccttggtaaaggaatgacaactcttctgtccagcctaggtgctcagtgcgtgatagccagccggtaagtc

SEQ ID NO: 130499 - DNA, 1052 bp, Homo sapiens
ccattggagcatttgctttgtatttgccacttttaaagcagttttttttcttttgtaattttgctataagaatgatacagttagcatctgttgtcaatgtactgtaatggagcccactaatgttctacatccctcctctttcatggagtacgattttggaagcaaagtaattttcagcaatctgaaaggctgtttgatatatagaaggagttaccagaatgattaacataaccattcttattttttcctatcctcaaaatggtactcctgccccctcttccacccccgtgtttcccaggatgtgctgagttttctttctactctggaacatgctgagagaaagagaaactaaatatatggagcagagaaaaaacttatctgaatattcttcaaaatactttccttgtagtccttcaaatttaaatttctaaaagtatttgctgttatgtaaaagatgtaaacttattttgatccttttgcaaatattaagtattgtcttatcccgtgttatgaataaataagaagtagagaaatcactgatttctcaggacctaaagattacccttttaagcctttatttgtttatttatttatttgtttgtttgtttatttatttattttttgagatggagtctcactcttgtcacccagactggagtgcactggcatcatctcggctcactgcatcctctgcctcctgggttcaagtgattctcctgcctcagcctcctgagtagctggaattacaggcatgccctaccacacctggctaatttttgtatttttagtacaggcaggatttcactatgttggccaggctggtctcgaactcctgacctcaggtgatttgctccccttggtctcccaaagtgctgggattacaggcatgagccactgtgcctggccttattcagttaatttattgagaacctgctgtgtcctagacactattgaccactgtatatgcagtatcactttgtaatatagcttttatacaatcattttaaaaagaaatttagaaaacaagaaaaaatattttatatttacctaca

SEQ ID NO: 130500 - DNA, 1023 bp, Homo sapiens
tattacagacattgtaatccaatgtacagggctatgagtaaagttataatgaactttgtaactacaagactgaactccagaaaatgtgagggaagggcatgaagcactcacgtttttatgtgaataatgaatacctactctaaaaatgtgtattgacattggacaaaagtatatattctaaactacaaatggtaggtggtgtagcatagtggttaaggacactaaaatgtaaaggttaggttgtacagtagagtgactaagggtacagactgaagctagacctcttgagattgacaaattggccatatgacatagagaaaatgatttaacctctctgtgccttagttacattatctgtaatatagggaacaataatagtacctacctgttggggttgtaatctctggcatgtagtaagcatctagtgagtctcagttattactgtctttaacatatggtataatatttcagaatgtatgttgttgattttaatttttaggtctcttgcagctgaatggggtaaatatggaatgcgattcaatgtgattcaaccagggcctataaaaaccaaagtaagttgtattttgcttgttatcacattgtgaatgattaaataatgaaacactgataggtatattctggttgttgtgtaaaggactttccagagatgcctaggtttagagccctggttctagggaagaggcctttgcctttattcattatcgaatataagaaataaggaggcgggcaggaatatagcagctatgcaatttcttcataatgtcaatttcagtgtcttaatcgtttgggatcttttataccatcaatgttggcactttgtctgatttgtttcagtggtctgttattgtcctgtatttgttaactttcatgacattttaaaggctcctacattgtctgacatccttttttaaaaaaaatcaaggaaatgtaactatatttttagtttgagagatgctttggtaacttattatataggctttgtcttgttataggtaggtagca

SEQ ID NO: 130501 - DNA, 1858 bp, Homo sapiens
tttcttcagcatttccagcatccaagtaaacaatagtcccttatagtcctgctacttgatgggtaaatttggttgctgggtttttaagttgcactcacaataaatcgtgcaaagcattgtcatgccttatttactccatttttaatcctgcatcccagatttatggcagcaacacatatctacaggatacttttatgttgtccaaatattgctgtcagtcatatgtacttataaaatgtctccactcatgtatatttatagaaatgaaatgtcaaatttctcagactgttaaagtgcagtataaagttgcttaatgcacacttaaaaatgatatataatttctgaatcctatgaaatatgtgttcttttttaattctttgggagttttcttaagttttacatgttttttggtttattgttaatgattttgtttactctttgccaaattttgtcatgtaggttattttacaatagcacctttaaaaaaaatgtatatgctaatttactaagcatattcatgtccatttttatttgatcatctgatttgtgaaataacttgaaatttgtactgtttggtttgtgaaaataatattaccaaatctctgtcattagaatgtgtactttatgttcagaagtgactgtgggtttattcagagccagccattctctcccttgatgcactttgtaaccagctacacatgcttttaggtggcttttccctgatagggtcaagtatatgactataaaacatttttcttgtgaagctattaagttcattagttactcttatttccccttgttgtaactaagtggtgcaggtataagcatatccccagcattcctgtgtgtgtgaatgtgcactgctgatttggactgttcttgagaaaggtgctgtgacatatgtcaatatttgttagctctggggatatctttagaatgcttgagaaagttgctaggtgtgtgccacattggtgcaggtaaatccatgctgttcacagccaagcagcatttgcagagaaaaggagagttttacatagaccccaggaaaaacagtactaacctggttgatggccttggtggtggaattttgtttcagccagaggctactcattatatcagaatgatgttcagtataacactatctgatttttagattggtcgatttctgttgtaatcaagtatttaggatgtaatctttttaaagtcattgctttaatctgaaaagccattagaagggagaggaatcactgttccacaggatatttaaaactcaggagttcaaataacctcacatattgaacataaactgttaacttattccacaactaaattctaacctgatacttatgaattgcaaagtgattgctgcaaactttttctaaggtggctgaagatttaaaatagatcattctaaagggaaatcagtaaaatgtcttgataattggtatccaaatcacttgtgtgcctgagaaaataaaaggtaatattttactttcttctcgcttttctttctttgtctttatactttaatgcatgtagagaaaagaccctacatgtcatgtagggtggattcaggggatatcctgaatcccctgaatcactccttgattgaggggatagggaggatgtactcctaaaaatgagaatgttgataattgaccctccatggggtgcttatggttcttgaagaagctttaaggagaagttattctgacgtcttaaattggcactcactccagtttttttctatatctttaagtcatgaaatgccaactgccaaacagttgttagtcatttgtcccagccagtggcaatatttatgatgcttttcataatgtcaaaggactttaactaatct

SEQ ID NO: 130502 - DNA, 2481 bp, Homo sapiens
aagtggtctgtaatacttttaattttgtcttcaccaggtagttcattgcaaatagtagtgcttctcactaagtgggcttagaaatacctatggacatttatagtcatgcaaaggtataatactacattaattataccaacaaagtttagccagctgttacctctattgtagacattttttattccttgaagaaagctttttggtacaaagagacaggtttggcttgtatcaagtgaaccaaaaggaatgtgtgttttcctaataccatgtcatggttacctgtagactttggtcctccactaccaggagaagcagcaaaggaaagaataaacaataactgtgtgtaaactatttaaaaatgtataaccctttacctaccatctttgagaagcaccctgtttgaagcatttctaagccaaatatttattggatttatttcttttttttgtataaaatattgataactgtaatgttttatttttattcacagattattataagtataggcctcatgttttatgtagttcatcgagctcaagtggaattgaatgcagctattgtagcttgtgaaatggaactgaaatcttctctggttaaaggcaatcaaccaaataccagtggctcttcattctacaacaagaggaccctaacattttctggaggtggaatcaatgttgtatgattctaatgagatacgtgattgtcaagagcctagtgtgctatctaaggtctagcagtcacttcactagtgggcagagacaagttctaattgtattacagcacaaacaaaactgactagtttttaaattgcacaattttttttttttaaagcaagaatcattttctgggtatgtaagtgtaaatgtagatgcaaatttggctgcacctctttatcatgcctgtattggcctataggtctgcactttagtgttttttaattgttttatttctgtgtatttacgaacagagaaataacccaaatattatttctgcttagtgtctttatttataaagcccatgagtagtttgtatgcatctttcctacttgtaaagatgagtaaaagtatgcagttttaaatttataatattattggatgttctttgctttggtagtctttccagaaaggataaacagtggtttttgttttgttttgttttattgtttaagtgggaccacttagcttcccgtttccttactagttaaagaacagacattaattttcagttgaatgtatttttgcaggcatcatattgttacagggccatttacacctattcacaaagcttaaatcctaccttgtgggactgaagtgctcttaatataactgtttattttcactgtgtaatatgcaaagcaaaagggaaattatttggtggatggtagctcaaaattggaactcttgttctaattcagttacattggctttaccctccttagatttttcatcaaagggctgtcccattgcaatcttactaaaacattttgttaaaataaactcttttcctttttatattaataattaggcttttaaataaagatgttattcctttaaaatggtgggcttaccatcattgaagatgtcactcaggtggccttgtttgatcaaaacgccttttttaaaaaccaagctttaaaaacatgtttataatttcatgaagtacatatatattgttcccatagtcttcagctttaaaactataaatatgcccaaattttgttatttgccctactttaagtaggtttattgtgtttgttttttcagtacttgtttttctctgataagactcaggaattctgaaatgtgaaattgtctcaattctttctcttgtagcatgaatcaaatgtatttattaatagcacttatgactatagaatataatttggcatatgattcatattacatatgtattcgttttatttttaaaatagtttataaacttaatgatttttttttacaaatgaggttatagatattaatgcaaattttctggtaggtatctctttttttgctatgatgattccaacttatcagagacctcccatttgccttttcattacggtgaaagctttgccctcatctactaaagtacaaaggaattctttggaagcagattattctagtcttatgctagagatgaatttgatcattttaatgtgtgatctttttgctctatcaggtataattgttttcctttcctttataatgggtaagttttctcacctttgagtaacagtaaagttcatttatatgtccatacctagaagaccagtgcaaatactttgagagcacctgggtctacaggacataattggcatctaaatcctcatttcttgctattagtaggaaaacagatatagtattgtaatacccttattctttttgaatcctaattactcatttcggttttttttctctcttttgaatctagttgctggttttcgtttaatgattttagtttaacaatcccaaccaacaatac

SEQ ID NO: 130503 - DNA, 1382 bp, Homo sapiens
ttagccgggcatggtggcgggcgcctgtagtcccagctacttgggagactgaggcaggagaatggcatgaaccggggaggcggagcttgcagtgagctgagatggggccactgcactccaacctgggcgacagagcaagactctgtctcaaaaacaacaacaacaacaacaacaaaaagtagcggtgtggcggcatgtgcctgtagtcctagctacttgggaggctgaggcagaaaaattgcttgaacccaggtggtggaggttgcagtgaggccagatcgcaccactccactccactctgggcgacagagcaagactctgatccagacaaagcaaaacagatatttagagacagagtagcatattgaattatcagcaccagaatgccattctagggttatctggcttcaaagctcagcgaccacactgctaattaagaatgcttatgaagaatgtttaatgatatgaggaagacttacaaaactgtttttacaaagttatcaatgtgtggattttatttacatgaaagaaaaaatagtcacaaatgttacctttcaatggtagtataatagaatattaaaatttacttttatttcattctaaattttctacattctgcatgtattctctttataatcattttgtaaactcagaatactgttgtaaagatgtcagctccttcccgaggaaataccactagttagacttaatacacacatttttttatgttgaattgaaattttacttggtaatgaatcattccctttaatctactcttctagattactgatctctcattacccaactatctgatggcatcttcggttggactgcttcctacccagcttctgaattcttacttgggtaccaccctgcggacaatggaagatgtcattgcagaacagagtgttagtggatattttgttttttgtttacaggtgagtttaaggccaagggttgtctctttttttctctctgtttctttttgtatggcattgctgatttgacagatttcattgaaaataatcagagggtttttccattttagatttttttcttggttctttcattactactacatattttgacaacattaaaattttttaattgtgtggatatatgcaagtgtagaactgaattgatacagaaaaatcctcttaaagaggcaaaaaagaatgacaaaaatagggttatttttgcagtgattattttcagagtcatcacaaatcaaatactgtattttgattttgtgtgaagtgtatctgaaaataatttcagtaagattgggcagagttgagtgcttatcttatttatattcaaattattgaaactcacctatttgtattttttagtgttatgttgagagtgtaaatttctttcta

SEQ ID NO: 130504 - DNA, 1532 bp, Homo sapiens
atctgttcttaaattaccaatttgaatattattgatgtcatctatgaatgtcaattatgtgttctatttagagaagcttcattacatttaaaggtaaaggttgtggccagaagtgttgcattctgaaatttttgaactgagatatttattttaaagataacttccataatatgtaatgttttgttattaactgcaatataattttataacattcatttttgtcatatgttctcattttctttatttgacatgtttattctaaagaaatttctctgctcctgtaagtgctctaaattgaagaaggaaccttgctcagcttagctccattcacatcattctttgactagactccctggtacctttcctctgagtataggctccttcctcttttatccaaggccccaacaagtatcaccccatgtagttttcctgtctttattttacgggatttgtgtgtgtcgtataaacaatcctagctgtactgccaactttatgaatatattctgtactttccctgccattgcactctagcctgggtgacacagcgaagagtccgtctcaaaaaaaataaaataaaataaaataaaataaaataaaataaaatgatttggaagctgttcatcttttgttcattctcttcttgaaacacctgccttcctcatcctatctatctttgcttgccaaactcatactaggctttcagtgtctgccttgaatccctctcttcccaaaaagttacgctttggtttccacttctacaactaattttcatcctttattctttaatgctcagcatgtaggccttctcaatgctccccattctgcctgtttctgaggtagtttatgtgtatttgtcagtgtgtaaatccatcagtggtaggcattgtgtctttttatctcttccaagcacttcttggagcatctcgcatgagcagttgagtcagtgatcgataaggtggattgttaacaaccagtcactgtaatattctttccaaatcagcagtgatgcatctccagttcattatctattaatatagttgaatgtagttttactgaaaatgtgaaatgatttttagatttggttgtattaatagttatagattcacctatagctgattaaagtatcagattttaaaatttgtaaaaaagtttaatatagtggccagtagctttcttatataccagtaatactcagatggggatgtggaaaagttactttcaaaatcagtagtagtggcaacaataataacatgaagtgcttagaaataaactaacaagaaatgcatgagatatgtgaataaagtgaccaaactttagtaagaggtataaaagaagattttgagtaattatagaaaaatttctggataagaatacctaatattgtagagatttcaggtctatccagattaatttgcagatttgccttaatcccaatatgaaatgtactgattttttttgagtgacagaatgatctgcaagaataaatatggccaagaacagttatggccatttttaaaagaagcgtaaagaag

SEQ ID NO: 130505 - DNA, 1845 bp, Homo sapiens
gtgttactggaatacagctgtgctcatttatgtgtgtgctatgtgtgtctccttttaagccaaaacagcaaattgagtagttactacagaccctactgcctacagagcctgaactgtttactacctggtgcttcatggaaaaagtttgccaacttctgccttagagtcacaccaacaaaacagctaccaaggctgagcccctgcaactgtaggaagaggcccttaatttctcacatatatcttgtatttttatttaacagaaaaaaaatttttaaagcaataaatgggtactgtgtgtaaaatgcaaacaaaatagaaatgagtaaattttaaagtgcaagaccttacccatcaccctggctcacttcttagggaactgctttatagaattgaatgttaccaaactgccagttactttggttatttatatgagcccaccataggtttgaagcaacaaatagattctttgttttggagggagccggggagctgtgaaactggtactgactgaaataataatagtgaaagatgtcatcataactttaagcagatataactgttctcaagttttctttgagtttgcattgagctatcaagaagataaattacttttactaatttagtttatatttgaactgaaatttattacaactaaataaaagtttttggcaaatgactctaagaccacaaatacagtatagtcttagcttatgctatggggtcttctggttctgtcttagctcctttgtagccctggcgaagtgatttaatgattctggccttcagttttccttatttgtaaaatgagagggtacagatgaggtcagagtttgcttttaaaaagacaaatgttctgagcaacagtgtaacattaccttttattttttaacagtttagtgatagtatgtgttataaaaatacacattttctcattttcttgagttcttattctgtaatatgttttcttattttcttaattcttattctgtgctgtagatagagccatagattcaaaaaaagatatgatcggtcataatacttgtcactgtatcagtgtatctaatgatgatttcttcttactattaaagtgtaatgattcgctgccagtggtacagttcaggcaaaatagaaaggcagacacagtctgtgttttgaaagagttggagtctggcccttaagggtcagataggatgaacaagttgtgtaatgtcatctcagtgcacatcctgagacctcacaataccactgaatgcagttgacctttatttccttgaaactgttttcccctctttgtgtctctttagttatctcatcagcttctgcagtttttgtgtcatatgtaggcttacaattcactaatctatatctctagcctgttatattaatgtatatagagtatgttttattaacccttcctagattaaaaaaaatttgtttaaaagcaacgaggttattaaaacatgttttaacaatgtttgttttttctgtctgtatgtattcattgtaaaaactttgaaaagtatagcaagtacaaagaaaaacatcattaacattttcgtgtttatttttctctttgcattttattgatatgtattttaatataatattgagttaatgatttttgtgaccttcttttacttgaagtaatgaacatcttgttattacgtgtattacaacatgacttttaatgactgcacagtcagctgtagttttccatctttgtatcttttttattctgcttagaactgggtcttagatatatatagaaggcatatgatacatgttttagtacaaataataaacctatagtatgtcagactgtatgaagaaaagcttttcaacttg

SEQ ID NO: 130506 - DNA, 1025 bp, Homo sapiens
ctatagtatgaaatataaacttgaactttgacccagtcttgggtaataataaataaactgtcccaggactttgaaagaaggttgggctaaggaacctaaatagattgattctgttagtttgtgtttcaatatagcatgtatccttgggccttttcttgtccatctaccgtgtgccaactactgtcctcggctctttccacatatttctgatccttaaaccagccctgcagaagttaattatgcacatattatagactagtgtctactagttgggagcacagggctggtgttgtgaaatcctgctgtctgcttagaatctagtgaccttgggcaagttgtttattctctctgggcttcagtttcttatttgtaaaatgaggaaagtaatgatacctacttccataggattattgagaagattacatgagatgaatacatgcagcagagcctggcttaacaaacacgtgttggcttttgtcgtttctgttgttatgacccaaggtcaccaaggtactaaattaatggtagagtcaaactttgaaccatggtctgatggcagtgtctcaaccaaccacctctttatttcttgaatatatatttaatgcctggtgtagtcatgggtaaatagtaagggctcattatgtatttatcgactgacaataaggtaggcttttcttttgattttgtctcttacatattaagtatataactaagaggttgtattttgtgcttggtaataatttaaggtaatcatgtagttgaaactgagcttgacaagggacaaatctcaatttagcattgtgtggtcaataaaaaagaagggaaaaaaaagaaaaatggcctcttgcaataggtattattgtcaccatttcactgagaagaaacagaggctcaaccatccaggaacttcttcagtcacccacctaccaagtggctgagctagggtttgaacccaggatcagctgatatggtgcatcttactgtaaaattttgactcagccatagcagggtggactgtgaagccc

SEQ ID NO: 130507 - DNA, 1015 bp, Homo sapiens
cacaggacttttgtctttcatttttgcctttttatttaccatttataaaagatctggtctggattatggaatttaatgtttatcagctctatgtattcctttatagaggcttgaggaagtatttcacataacatgttttataatacttaaccatttatccaaagatatatttacattgggttgtgcccctttcccttagatcatggtaaatttttcttattgaggtaattatgtactacttatatttgaaggaagcttatgacattttacagtagctaaaatgttgagattagaggtacttttactattcttctcaaaggtaactgatcagataattacccaaattattcaagaaaatagatcagaaataaagaacaacataattttctaagaattcattgaaatttatggaatcagctctcgcactgcccatctttgcagttttgaaaaagaaattgcttaatcacaaatgttctacagtctttaaatgtagtagaattagacagtgagatcatctgagtaaattgattggtgattccagagataagactaatattttaaattatttatgatactgattagtataaaaacgtactcatcacagaatttgaagcaaaatacatgtacacttcaaagagtaaatgacaaatgtataaatgctgtagctcaggattatatgtacctttaaaaatacactaataaagattattgttcaaaaattaccttgttttattccattaaaaataatgtcacttccagagttgccttgaaatcttgctgtaaagttttcatgtttaggaatgtacctgtttctttatataatattcatttatgttttttgtactattttcaaatggttttatttttaaaatatagtttttaaatccatttgtaatacacttgatgttaggtataaaataatcttacttcttttcctaatggttaactagttgtaacagcattgtatactgaataatccattctttccctcattgattggaaagctcacattaaa

SEQ ID NO: 130508 - DNA, 1484 bp, Homo sapiens
attatgagcaatcagaaacccaatccatggacctctttttgattgaactcgcccatccaagtgaaacggtgtctttttacctccaaaagtccttactgttggggattttatcatctatttagcaaaagcccatttaaaaaaaaatcagtgccagaactaatttttatggctatggggtctcttattattcaaagcaatattcattcagctacagagatctaaaaaaaccactcttctctttatccaaatcaagcagagatttattaccaatatgaggatggcttgtttttagagaagactggagctaagcagttagcatggggattatgccagaagaggaagataatctctttggctgccatttccatgctcctttgtttgtcagtacaactagtcccttattattagcaatgtcctattgtgtcccatgatagtaagaagttacatggattaaattccttgtagagataatatagtttagtgtgcttttttgtttacttcataacatttatagttactacaagtagcagtatggtctatcagttgcagtcaacagatacacctactcttataaggactttgtgtattcggtctgggggtatatttcataacaatcacatgtaagctgatacaagttccctaagcagatattttttaaagtttctaatattttgtttttatattgctttttattttaggttggcaccccagattttgcaaggcgatttcgagcaacctatgtttcttgggcaattgcttatctcctaggattgatctgccttatccgagcttgttattggggagccataagagtcagttatccagaacacagttttgcataagcttgtttatgattcagtaatgcaggtgagagtgtctagcagttcttggtaagctactctggacatctttaaattatttatcctaatggattccattctggtttatgtataatcgtttcaagactttgggagtcttttatgaacaaatgctcattgcactatattatatgcaaattgttttgctgctaggttttcaaaatttgaataataaagccttttcatgttcttttacatctcttatagatatttttggatttgttaccaaacattacatttactctcacccttttattatttttaaataagttatttcattacttgctgatacatgagtattcctaagtgtttataaatatttctataatagtttcacatttatatttacattttaattaaacagtatcaaaattgcttgcttaaaacctaagcaatatgcattttgcttgaactgcttactgtaactttaacctaagattatagtgaccttattcaggaaaaaaaaaaaaatttagtgtaacttcaaagacttgacattcttgtcagaggaaaaaaaatttctagatactgtttgcttgttttttgttgtttgtagaaagataaaatattttggtagtaatttaaaatacaagaacgaatatttat

SEQ ID NO: 130509 - DNA, 1049 bp, Homo sapiens
cttttgttgcagtttcttttggtgtcatcatcatgaaatctttgcctgttcctatatccagaatggcattgcctaggttgtcctccaggcaacctatataactataaatgttatagtttacatttaagtctttaatccatcttgagttaatttttaaatttggtatgaggaaggagtccagtttcaatgttctgcatatggctagccagttattccagcaccatttattgaatagggaatcctttccccattgcttgtttttgtcaggtttgttgaagatcagatagttgtacgtttgtaagtgtgtggccttatttctgggttctctattccgttcaattgatctgtgtgtctgtttttgtaccagtaatatatattgcatgtagataccacatatgtactaaatatgtaagagattttatgattaataagtgcttgttggtcattgccttatcctgtgaggagatggcacttgagttgtggagtagcagtaggttatttttttcagagaagatttctcagatgtagtgactatttaatttgagtgatgaaaagagagcacaggttttctaagcagaattcatgcactgaaattaatgtactaaagtgtattctcttggctcacagaaaagccgctctaatattcacttagaaacttttgacttattcagtacataattttaataagcttagttggcttctaataaatggtatattacaaactgccaaatgcagatgcacaggcagtgataagaaacaacaaccagatgtgatgtataaggcaagaaaaaccaccagtggatgcatagaaattaaaaccaaaaatagactagggctaaatgttacataaaagcaatgaatcctgcatgccctagtaactctagatagcaagctgtacaatatagtaattaatggtggtccccaggtcatccagatgtttgtgtttgggctcaagtacccaggaaaatttacgatgtatatttgcaaaaaacttcatcagtttttcaaaaagatttggaaattaaaggaaataattttgtatgcaaaat

SEQ ID NO: 130510 - DNA, 1024 bp, Homo sapiens
gatcttatagaaaagaaaaggcagagacttctttttttttgagacagagtctcactctgttgcccaggctggaatgcactggcacgatctcagcttactgcaacctccacctccggggttcaagcaattctcctgcctcagcctcccaagtagctgggactataggcacacgccaccacgcctggctaatttttgtatttttagtagaggcggggtttcaccattttggccaggctggtctcgaactcctgacctcgggtgattcacccgtctcagcctcccaaagtgctgagaatacaggcatgagccactgcacctggcctgacagagacctctgtggttagcagactgtgtgctaagcagagtgatagttgctttatatatacatatatactagctgtaatctttacagcaatcctgtaatacagggatgatttttgtaattttacaaatcagcaactgttaagagaggttaaggattttgctcaagggacttgcttggttaattattttcgtacaatggcaatatttttactactaataaggaagtattgaatgtctgaatactccgtgatttgttaaaatatcacaagacagtgtattaatatgaagaagaatttgtatcaactacttagggaacaacttacatagaaattcacatggaataaatcagcttaaacattattctaagaggaaggtttgtagaatcagagtcacatgctaaacatgggaggactcagagcattcattacttatttgagtgcaaatactgtgaccacatgaacactcctagctggtatctagatttattttctttttgaatgttttccttcagagcaaaatgatgggtcatctgttggagtaagattctgagacagaattttttttctttaaacacaaatatcctaaaattagttttaagttacagaagttggtaaatttattactgtgaaacaagtgtgttatgtgcttttatctcacaaaatgtatggggaaagcttcccctagagctccaaagactgag

SEQ ID NO: 130511 - DNA, 1047 bp, Homo sapiens
ccagtaagtcatttcaagtatctgaataacattcatgtgaggaaggtagcacatttattacttagatttacagggaagaaaattgtactaagcagtgtgtttttgttatattgtataagcaatgacagaacaggaaacagttcccgactttttagtttatgtacttggtgactttctcacataagtagaataaatagtttaattttagtaatgaatctaaatattcaagtatttaaaaggccagccctcaagacttaaaagaaaaataactttgatggtatatgaaatatgattgtattcgttggaagtgaactgagacttactgaacaagatgaccccaattatggtattacattcagtattcatgtaaagcaaacctagattgcgtcagagcattggaaaagtcatgggaactatttcagaggaggatctcatattgtattttaagagagggagagaagtattggagggaaaaactcatgtaaccgtgagaaggtgattgcttctgttgtgatccctgatgacatttaaagtaaaagaaatgtcttatcagattggatagttttcagttgttttcttttcaattcctctctttgtttattttacagtggatggaactgaggttcaacactctggcaaaatgcccacactgcaaaaaaatgtaagttccctaccattggaaatattattgagaaatacttgagacaaatttgaagagttcagaattttcacttaagtagattttgattttaaaacatgctgtggagtgaatccatgccaatgtatttatgctttttaagactaaaaagatatcctaaaacaaatatatcccattttgaaattaaaatgattaggcttgattatcatcatctaaagggaaatcaatttctattataagaaagtgaaattgctaaaaattatcagtaacctggttaggatattataatctgttacaaataatctaaaatttacatttataaaatgggctgtaatctaggagaaaactcaaattgttctggacttcataattaggtgattgttggcctt

SEQ ID NO: 130512 - DNA, 1057 bp, Homo sapiens
tggcttctagattgaggaaaaatttgaataataatttatcaaaaattttctgacttttataaattattcttggagcaaagggaattaacactgttacccataattagataaaaccattagataaagaataagaaagtataagtaatttgatatgagcaaaagttataaaagtttttgttttactacttctaacttaaacttagtttgattttttttaaagttaaattcataattaacttaccctgtcaggaaggataaggacaggttttcttttattgttcagcccatataggagacaaacattttctttagaacttgaatatgaaaaatatttatcagagtatacacatgggagtctaaacaaaacctgctgtcactaagacatgaatgagcttaagaaaatataagtggtttgcttttttttatttgtaattttacttttattaaagaactttatgtatatagttctaaatgtcaaatgggactgcaatcttctcatctagctgacccctagttactgttcccaaaatgctttcaactctttcagctactttattgatagtcacttctatgtgtttattttttataatttttaaatttttatttatttattcatttattttttgagatgaagtctcactccgtcgcccaggctggagtacagtggcgtgatctcagctcactgcaacccctgcctcccgggttcaagcaattctcctgccacagcctcccaagtagctgggattataggtgcacaccaccacacctggctaatttttgtatttttagtacagatggggttacataatgttggccagacttctatgtgtttaaattgcttatcctttttctatttgattaagcaattttagacattacccactaaatagtaaactgcaaaatgagaacttagcacttatactgccctcccactcatattcctttccttgctttcatactcccagtcaaattgcaacattttgtttaattaatacttagtgtttacaatttttatgattaggtaaattttgttcacagctgaaccaagcaatgtggt

SEQ ID NO: 130513 - DNA, 1028 bp, Homo sapiens
gtaagacttggcgaatgggcataagggttggagtaacaattctgagcatatgcctttttacatgattttcatttttgagccatgccaatatattactaataaaaatttaatatgtaataaatacattaaactttggctacattatattattggtatttgtgaagtttgtcttggattagtacctcaaacatgttaacaaagccatttttttaggctgtgtccccacatctctgtataggtccttgcagttgcatatgttatttcatcctgcttgattactccagcctataaagatattaataggaagaatcctgttttgagatggaagatctattactatctatacacttttccctaagaccatactcattgcctcatacacttattagccatttatagtcttttccaaatgagatctacttttttttttttttttttgagatggagtcttgctctgtcgcccagtctgttgtgcaatggcacaaatgagatctactttttcttcctataggtagatgagtaggaaagggattcttaaaattgtaacatttaaattctacacatttgctgaggctcctttctttcatgcagtcttttctaatttctgttgctggaatatatatgttcccaaaacaatacctcatatttgtactatatatctttttgtttttgtttttgtttttttgagacggagtctcgctctgtcgcccaggctggagttcagtggcacgatctcggctcactgcaagctctgcctcccaggttcacgccattctcctacctcagcctcccgagtagctggaactacaggcgcccgccaccacgcccggctaattctttgtatttttagagatgggatttcaccgtgttagccaggatggtctcgatctcctgacctcgtgatctgcctgcctcggtctcccaaagcatttgcactacatatcttaatacttatctatgcatatgatcccataaggagagacaaggagggagacaggattcctgtctcatcagggagctctactata

SEQ ID NO: 130514 - DNA, 2314 bp, Homo sapiens
gttagttcccacctccaagatgaaatagtccatttcaggttgaaagtcggtggagtgtttatttctagacagattattaataatgtagcagggagcagttagtattgtgtgtttggttttagcacaagaaaaatcatgtgtggtctgtgtaacaatccatgttggtttctaagtggagcatgtctagtgttctctactgtcagtattggattcatgcataggaaattgcttctctcctgcttgcagtgcttcgtttaatatacttgccagtttttgtttaggtatagaaattaaaattaaagagagttttaggctcatctgaaaggagattggaagaaataccacaaaatttacacagttttgatgtattaattgattcctttatacatctgctaattttgtagttaggatataacaaaagaatatgacctttgaatttataagattttttctgtgaaaattgtttatatctggggttgtctcattatgtattcaatatggaaatgggattatatacttcactataattcataaagggaaaataataatttgttatacagaggcagacagtttgatttacttagtttattattcagcaaataaatatttgagtaccagccaaatctgtggtaggagaagaaaaatagtcatggctcctcttccagtgtagtgggggtattgagaaataaattatgtaatcacacaaacagatgcaaaatgcaatggtgatgaagacagtgctggaaatatatgcaataccttgagagtataaattaagatttaattttgttgagggagtcggggaaggctttcttgatgcttgaatgagatctgaaagttgagcaagagttaacttggcaaaaggtggactggaagaccattataggcaaagaaagcagtattggcaaagtgatcagcagggtggagtatgacaaatacaaggaacttaaggaaggccaacgtggctaaaatggaaacagcagtaggaaatgcactgcaaaatgggactggagagataggtatggtggatattctccgaagactctctttccccttcaaagaactatgtcttctgatattcagtttcctccccttgaatctgggctgatgccatgacttgattttgacctctagaataaggtagaaaatatgctgaatgactttggagggtaggtcagaagaggttttacagcttttatcttggtcttttgtaaagtacactctggggaaagtaacttgtcatgtaagaagtggaacactctgagactgccatgctttatggaacctgaaactagcctggtagagagaaagatgcctgaccagccctcagacatgtgaagggagatgccatcttggatgccaagctcaattgagccttcacatgactccagccttagccaaattcttactacaaccacatgtggccaacttgttctgcagcaacagatgaccagaataatgaatatgaatcagcccatccaggatattgttggtcatgttaaggaatattgccataagcaaagggatgactggattaaatctttattattagtttttaaaccactctatagattagagaatgaattagaggattggctagagtagacaagaatagatgacttccttgattattgtaataattcgggcaatttaactgaactatttcagtagcttggactcaggtggtggtagagatggagagatgaaggatgatgttaaggaggtggattgaacagggcttgatgatggattgcacatggaagtgagggagaagtgtcaagggtatctcctagaattctggctatgcaacgtcatggtgtgattaccagaacaccagaagacggagaacaccagaagaggaccgagttttggggaacacggataatgaacttagttttagacatgatgtatttcagatgctttcaaatatccaagaagagatgtgacaattggatctacagatcccatttctggcaaaatgggacctgtagtgtagatccggttgtcatatctcttcttagtcctcgtttcttaggactaagaaacggggcctgggctgaatatataaaattgtgtgttatttgcatattggtgatagctaaatacatggatgttgattcagaacttcccagggccctaccataagatgtgctgtgatggaacatacatgtgctaaggtagtgattaaagccttcaggccagaggcctccagtttttttggttttgttttttttttcttgagacaggttcttactctgttgctcaggccggagtgcagtggtatactcatagctcactgcagtcttgacctctc

SEQ ID NO: 130515 - DNA, 1011 bp, Homo sapiens
tcagttgcttttcttagaaacagggaccaaaatcaaagattaaagaggtcctctgaagcagggaatgaaatagacgttgaaaactattcccgttacgccatctctgcgcgcctcacgtcagggccaagagcctagcgcgtagctttatggctgactcggctctggcgctctagccaattccgaggctgcaaactccgcttctccgctcgcagtctggttcctcccctgccgccccgcccatcacggcagggtcacggtagcgcgcacgcgcagcaccccatttaagtttctcgtctttgcagtggctttgcttagatccggtgccgccttgaaggcggggctgggtcccagccgtagccaatggagccccgggtgagggttgaggggtggaaggtgcctactagccggtgcaggtttcttctagcgcgtgtgctggggtacctggtcgtcatggaggcggtattgaccgaagagcttgatgaggaagagcagctgctgagaaggcatcgcaaagagaagaaggagttgcaaggtgaggcggaaggaagtgggaatctggaagccgccgcgactgggggaagggcgcgtggcgggtcgattctggggaatctcaaggcgtgacttatctggatcaccctagacttcccctagtagcaagtggcctcttctctcttcacctaccccggcggccctttaattccccaaccttcagaggcttccccttctgaggcctgcggcgtgccccctaccccgcgccgccgccggggtgcaggtgtctgaaaatacctagaagccgccgtcttggtccgctcccaaacccacgatgcctcccttttctatacctgccccagttaccgatacttgtccctaatgggtgtattttgaatggacccgcctcagtttaggaggttcagaaaggataccggaaagatttaaaactggctacagtcaggtttttttccttctcttatctcgccaaacaaccgaaacatattcaagattttgttaatg

SEQ ID NO: 130516 - DNA, 1049 bp, Homo sapiens
aaaaagcttgataaaaagggtgtctgcctgtacccttttaaaggctgtgtcatattaacacgttactggtggactgataagaagcctggattagcctgggctttaatataataataatgtgctttaaggcctaggataactcagtcttaagagaatactttgaaatcagtaagtaaggtttttagaaacttggcatgtagcctttaagtagactttaaagaaaaattagagggctttcttaatgtccagtatagagcaaggtgctggaaacacacagatgagtaagagagtaaggagctcaccttgtagaaaattcttgagatgatcaatgtgatagtgtttgtgcgagaagggagaataaacaccggaaagttttgagacctttacatttcccttcccttaataaatgagaattagtccaaattattatgaattaactttcatgcattctgcttttcttaggaaaagaaagctgcattggaaaaggagcgagaagaacggatagctgaagctgaaattgaaaacttaacaggagccagacatatggaaagtgagaaacttgctcaaatattggcagctagacagttagaaattaaacagattccatctgatggccactgtatgtataaagccattgaagatcaactgaaagaaaaggattgtgctctgactgtggttgccttgagaagtcagaccgctgagtatatgcaaagccatgtggaagactttctgccatttttaacaaaccctaatacaggagatatgtatactccaggtaatttatttttctttactatgttttattgttgctttgttgtagttgtttttaaataaggtgcttcccagcactgagcgtaagaagaacccagatgatccttatgaggaaaaaacatcacaagatttaggcagaattattttctgtaattttaatagatgttggtgtatttttctctattaagatttcttaattacttagttattttgtaattataatatgctaatcattttatgtaagatagaagtaggaataagagtcatttttgaaaaaa

SEQ ID NO: 130517 - DNA, 1073 bp, Homo sapiens
catatggccagaatgggttgcagagagaaaggttaaaattgactttcctttagtggagtctgtcctccatggaggaaaggtagagagtgatgcagaattgataagaatgagcattggcagtcaagtgtgtctcctttagtgtgcatggcttaaggtatctgttgatagatttcaagaatgacttaagcataatctaattctgtagtgaattaatttcccatagatgtcatattggaaatgttaacttatctcttgctgttttaggtcattgctgttttctacataaacagaatttgctatgggacataaaacacatttttccatatattttgatatatgcataggcaatgtgataaatgactcttctgtcatttatctcccaaatgattactgaatcattgaaactccccaattgcgctagttgtagggcatagaggaggtggcagttcagtatgctgagtcagagaaaaacacaaaagacttaattaattatctccatttattcaaccaatattaattgaaggccgctgtgtgccaagcactactctaggcactgttctgaacgctgaggatttaacagggtatgagacaaacacatgagacatatttttcttctagatgtccataatttctttccttccatctctgtagtaaggataattgttttccattttaacatactgtgtaaaaaggtgtatgcacaaaatatacccattgtaaatttagtgattaggtcttttatttctcagggctgatgtgaaaagccttttccttggttagaactgatacttatgcaagtaatgtaagtgcttccaaaataacaagtggaggcactgtttgacgctatctctggggaaggaatttcaattcatctgtacttttactcgaattctcttcgtatatttcccagagtcttacagtaaacctgattatacaggaactacattttttttgtctttcatggtattcctttggatgcaggtttgggcttcaaaacacatgtcaagatagtgaatatggtggcaatttttggggtcaacgcttggggtagagtgaggtaggtttgttatata

SEQ ID NO: 130518 - DNA, 1099 bp, Homo sapiens
aaatacatatgtgtaagtcttttcatcgtgatagtagtattggcaatacatttgattttctggacttaggaaaatgaaaattttactgaagtaaagtaaaatttagcctagtagctcagctgatcaaagtcactattggaaaaatatcttttttacatcagaaatggaaaaaaaaaattatgtgaaattataggccaaatcctaccacaacatatatattaaaatcgtattttgaattcctaattgatagtgactgacttacttgaaagcagtagttggtgcattaaattcatatgtaagaaaacagtatgttcagtcacttacaggaagttatcaagattactttttagctctaattttaaaaaaatcttactgttaactttgttttgttaaaaacaaacaaacaaacaaaaaaaacaggtaggtaggccagatggtgatgaagcagcctgggtattaaataggataagaaagaaagttctgggttcaggtcctggcattttcttccacccctctgttttgtggccacaggggagtcagccatcctcccaagcttgagtttcttgattactatatggccataataaaccctctctgtgtattcagttgagcatttttgagcattaagtaaggcagagagtacctgcataaaagtttgtaagctgaagtgccagatggatgaacctaggcagtacgattagtaatatataatgatgattaatcatcatgaatagtctgtggctctaaataattcactttaagaactgcttcatttgaagatgcaacatgaatgttgccccaaaatctttttcttagtactgctgtgtatgtgcatttccaccagagggaactgtatccattagttttgtatgcctcggaaactcaggaaatgttcatagtagctttgttactactacattaggaataattaaaaatgcttgaactttcttaaaaggatcattcatatgagtattagagattaaatcaagaaattaagaaaaaccttttaaaacatcttttgagggacacttatacatttttttcatctgtgaattcatttgaagtaagagttgcagttttcacaatagagtaaatttaa

SEQ ID NO: 130519 - DNA, 1012 bp, Homo sapiens
agtaatgctaaaagtttcaacaagtgttaaaagttgaaatacattcatgttgcctgtttattccttagatttatttttcttcattttatgaaaatatcttacatgatttagaaatctcttctgaaatacagcatgcagggtttgctattggctttagtattttttagctaaacctattaagatagtcatcaatggctagatgacaatttaagctgattgaaccttcagcatctcagccttttcgttttaccccagtgattgaaccagatcttgctgactgctgccacttttcaaatggtgttgaactcttaattaatatgtccacatagtctattgagtgaaacccatgtggactgagtcattcagaatcattggtttatatatatatataataagcatatatatatagaaaaattgctttcatcaaaactactcatttctttttttttttaatttcagatatatgagacatgcatatggcttaggagaacattataattcggttacacggttggtaaacatagttactgaaaattgcagctaatttatacaatgttgtacaattatgttttaatacagtgtgctgaactgagtatttctaccaagtgttgggttgttctaaatgctactgaaaaacacaactaccttatatcagttttatggcaaagctactaacaggtgtttttagaaatatgtcagagataaactttaaccagtgtcttcttagtggaattttaaaaatttgttaagttcattgtagagaacaccattcatagaccaagatggtcccctattagctgatattttcatttatgtaagatcctggacattctgttttgtgttggaacaaattttcaatgtttttaattctcccttttctgcctgttcctaaaaactttcaaaataaccatttcaatgtaatttgtcttgaagaagtttacccaatatctttgtcattgcaataatgtagtatggtgatggtcaatttaattattgcttataaaatgaactt

SEQ ID NO: 130520 - DNA, 1057 bp, Homo sapiens
ttattttattagccttattaatgtcacctttccttcaactcaaatatttgagaaattttatgttacatatatgaatgaagttgaaagctactgtttggaagctaagacttgtatagagtagttttgtatatgaatggttgttctagctcagatttcaggttactcacaacagtattctttctaagaggatatatacaaatgtctctcataatttatgtaaggaaatattatgaaaatgagacttttttagtttgatgtgtgtttcccaaactagagataaaactagtaagatttagtatcgtttataacatttgaatttttgctccatgagtacaactaatttttataagtaaatattgggtttatatgaaaaatggggtgtcagtcttttcacacgcccagcaggtaacaatgtgggaagctggcagggtcattgatagcaagtaagtacttcctgaaggctttccagttcaaaagattacaagccattctgcctgccaaacaaattatattctgaagatgcctgttttgtaacccttgatgtgaattttttggtgtctgaaatttacaaaagaatgaaattgaaattgtaaaacactaaatgctttgggtttattttgaagtaatctgttactttaaaatgtcaacattaggaagccataaaacaagatattatgaaacccagtattataaatgttatctacatctaaagtattttaaaataacttattggcagctttattctttttttccttacaagatttagaatctttttggttatatgtctatttttcaattttgttatatttttaatttaagtggccaatgtggttatgaacaagatttgtatggtcagcttctgttctttcctaaaacttcagataaatatcattttagctataacctaaaaaagtgtttaaataaaatgacagatgttaatttaaaagcagcatatgctaatttactttttcatatgatgatggtctaatggaagttacatatgctttcttttgtcctaactctgaaaagtatatgtcagagttctggaatatgtctt

SEQ ID NO: 130521 - DNA, 1038 bp, Homo sapiens
ttacttaagaggtggtgattgtcatggattttttttttttaaacaaagccttgtgatcagtttgttttgatagtaacagctttattattcttaggaaacaaataatatcaaagtaaagaagacgaagcataggtttggaagagggaaggcaaacagcagtgattaagaagctgaaaaattatctttctagcaactgaaagtcactattagcatctcttgatttactgttatgatattgatattcattataatccctttaaaaatttaatgatccttttttagaattctggcacttgattttactctcttactggaagaggtcttgtctctaatagcattctctcagtgaggcctttcctggtcatcctatttaaaattgtaaacttctcatttcccacactccctatttctcttttctgcttagattttcccccttggcatcaaatcaccatctaacataatagatttacttatctgattgcttttcttcccctactagaatggaatttccttgagaacagaaatttttatctttttcattcactcctgcaacagtgttgactatgtagtaggtggtcagtaaatatttgttgaataaataaataaagtgatttctgaatgccaaaggaaggattgatttctgttcagatcactttcagtgcagaatgtattttataatgttcaagtttttggaaacccacatctaagtgtgtcacatacatgtgtaatcctaatgcctctaagactcatcctatctgggtgctagtgggcttgtgataataatcaaatgttactggccacaactcccctccctctcctttttgtcaccgtttaaatcttttatttggaaatttttaaacatatgcaaaaataacaagactaatataatgaatgctgatatggtttggatttgtgttccctccaaaatctcatgttcaattataatccccagtgttggagactgggcctggtgggaggtgattagatcctgggggtggagttctcatgaatgcattagcatcctctcagtgctgtttt

SEQ ID NO: 130522 - DNA, 1013 bp, Homo sapiens
taagagatgtagaaatacgacaatgtaagaaacttattgttcttatattgatgaaaaccaaacttatttgcaatgccagtcatttacaacacaattcattagatacactgcagaatcttaatttaacagaatctagataataagccatacactttatctaatgaaatggaaatcaatgtaatgtaaaatagttttgaaaacaatctgaggaactgtattttttttttcaatttaggaaataacatcaagatttgtaatgaatcagctagcagaaaataaccctttcctaatggatgacatagaacggtacccacaagtcaggagcatgatctctcagggaaaaacatgtgcaatatgtggacagtactttataaccgtatggctggaatgtgttcgatttgttcctccaccaaaggtaaatgatgctttttatgcgaatatgagcataatactgattcctatcctttgttcttatctaaatcagttaatactaactagatttgtacctatgattggcttataggatagtatactgtaaattttggatagacaaatttggataagtgtcggtaataatcatcatcacccattctatttacattcatagactcccaaatttatcaaaatacatggattctagcaaaatttcatgaaagttgaaagtttttaatcagtaaatcccttttgttcatgaatattaataataaaaccagaactaaattcttctcagaagaagaattggtcagtagtctgtcatggaattcttggtgtagaaaaggtgaatgtgctggctagtttatatcatgatggtgttctagaacactaaatacgcatgaatgtgcacctgcaacattatgttacccaggagttgtgaatcccagggcagttcacatagcccataaggcgtgttctagaccagagctcagcaaactcctttttctctaagcggccagatagtaaatattttaggccttatagacagtgtgatctgtgtgactactacttgactctcc

SEQ ID NO: 130523 - DNA, 1020 bp, Homo sapiens
taaaatcaaaaacaatccattagctttggggcggggggtggggggagggttaaatgtaggccttggaaacagttttaagtggcttttaagtatctgcatagaggcaatcctaaggtttgctttaagtctcttaaatctaacatttttaaaagcatttcttccctgtattttcatatacaagttggttttaattttgtttgggtggtgttattttttttaaatgactttttagtttagaaagttctgatgagcaaataaatacatctatctacatgttggaagtccatctgccagcacacctgcttaaagtgaaatgaaagcacataaccaggctctgaatgggttatattttatcatggtgctcccagaatcctttgacctcactctgctttctagtctgcttgtgacactggacagtcctttcttacagagctattatatgttctaggctacgaagggttaaataatcccaaaaatgaggtatgtcatacccacacgtctttatctctagaagctgtgatgtatgtgaaacagcactgttattcttaacactagtgtgtaaaataaggattagtacagtacgtctcattactttttaattcagggcaccctgagtgaaaacaaatacaaaaaaaaatccctaactctgagctctatctctgattcctcttcctccttcccctcttcctcctcttcctctcctcctgttttgctacattctcctcagtggcaaaaagtttcactctacctctgacagcatgtatattgcaccagtagctaacaaaaactggtctagtcaaaccaaatgggcacaaaagaaccaggataccaaaagttaagctcatacagctgcaaaccatatcacttcttggtaacaatgcagacctcataaacctaaagaagagaaagaaaagaaaacttttgttactttccttttttgcttgtcacttatatacaggctatgtgagaatataatttgtaggtataacacattaagaaaaagttatcttcattggatag

SEQ ID NO: 130524 - DNA, 1638 bp, Homo sapiens
acaacacaaccaacgcgaaaccaattcctcatcctcagatgctcaaagttgttttttttgtttgtttgtttattagatgaattatcctatttcagtacttcagcaagagagaacctaactgtatcttgaggtggtagtaaaacacagagggccagtaacgggtcgtaatgacttattgtggataacaaagatatcttttctttagagaactgaaaagagagcagagaatataacatgaaatgatagatttgacctcctccctgttattttcaagtagctgggattttaaactagatgacctcattaaccgatgctttaccaaacagcaaaccaagagattgctaattgctgttgaaagcaaaaatgctaatattaaaagtcacaatgttctttatatacaataatggaaaaaaaaaaaagaggaaaaccctcaagggcatgagcattggatacagcagtagacattttaacaagaagatgaatggcgtccgtgggttgctaactgaactttgaagacccgctacaaaacgcgcagatgtgcagcagattggaaggagacacagatgttcggtttttttcctgtttctgaaaagaaataataatatccaggtcaacagaatgaaaaatgaaagatgatttgcaatgggatgtatgaatacagcagcaagaaaaaaaaatgccataatacaaaaggctccatatatatatatatatatatatatatacacacacacacacgcacatatacacacacacacacacacacacacacacacacacacacacacacacacacacacaagtaagagactcagcctgcagttaattagcattctggcagttttgacatcagccagctgccctaaataacccttcaacgtttcttcacttttgcaaggttccacagagtaagacattgggtctattccagctcattcattttatattgaaaaaaataattttaaaaatggtggcttcagctccagcccctttccaaaatttttcaaccccaccctgtttggatttttaattaaaaactagtagttctcttggtgttaaaacacttctgtcctgtgaggtttcccaatggtgtttttcttgtaaatgtgttggacaaatgtgaagatgcattgtagtttaaccatatgcccacatttagtctctttattcctagttggtgagaaacctgtatctttctatgctgcttttatatctgtatgtattagtgatatttctctagtagttaaaaaaaaaaaaaggaaaaaaagactctttttggttgtcctcaagaaaagaaaagaagaaaagctatctttcggagctgctatttcactctcttataggatttttttttttcctgaaaaccagcatgcttcacggaatgctaacatattggtgtttttgtaagagggatgtacataaatgtattttgcactgtcacaatgactccctaggcatgctttttgtttttttttttttttttttgagcaaattctttttaaatatgctagagccatttcatcaagtttagctgtagcatagagtagtcgtggaatttttcttttttttttttttaaatcattattagggacttttttaaaaaaataaaataacaagatatcctactttaaaaaaaaa

SEQ ID NO: 130525 - DNA, 1908 bp, Homo sapiens
aaaataaaagcttggtgatcctttgaaggcattgtttttcctgctatccttgaaaaaaaaatgagcgagaatatctgaagtagaatataggatttgatttctaaattgatatgaaagtcacttgagagaaatgtttagatcttggaaaggaattctcaaagccagatcggtgggctactgttctattgtgaaaaggtcatttaatttataaagtaatgggattagtatttggagaggtggatttactggctataatgccttcaggtgaaatttcccttctgactcgtgttcataacacttatcttctcattcccattgaattttccatctattggctctgaatttcaaatctagtcatagaaaatactagactgaaaccttcagggataaaattgcttccttcattgtcctgaaatggtttgtttcactactcagcaaaatctttaattgtgatgatttatatgctcttccctattctcccctttcccaaatagctgttaaactgcataatggacatggtagaaaaaacaaggcgatctctcaccgtactaaggcggtgtcaagaagcagaccgggaagaattgaattactggatccggcggtacagtgacgccgaggacttaaaaaaaggtggcggcagtagcagcagccactctaggcagcagagtcccgtcaacccagacccagttgcactaggtaacttttcttcagatgagtatctcgaaaacacatatttcttatgctgttaatgctgacttcatttttatttttaaaattaaaggatatgcaaggaattttaagacaataaacaatttacatatcctccaatatgtcttgtctatctgttaggaatttgggcagattggcatagacagagatagccacaaaacttaaattccttttccaggtgagtgtattgagctgatggcagcgtttcagcactgaaccagattttcatgtgcataactaaaacttgtgctccttcgtaatgcctcaaaacagcaaaaacaatctcagggagtgggcctggggcttaggcacttccgtcaaggtctctagtgaattctgccactgcataccaatgttatcactgcacatggggatgtatgtttcaaattattaattcagaaaacagcctgtaagacaatcttgttagttgaatcatatatatatatatttatattttaaacttttttctcaaccccccgcctccaggaagagagacctagaagctatatattttgcctacagctattttaaaattaatgataaagatgtagcacccttcctgtgatttgatcttaacttagattacttaatcatgattatattaattctagttttatctagttttataataggactcataatatagttgtgccttagaaatggaatgttagtatgtaactatttcttattgatatttgggaattgttggggttacagatagaatataatcccatatatgttgaaagaaatcttcaacctgaaagaatttttgtgtggcctgtgaacttttacctaaattaataatacggttttgtcattgacattgccacccattacgtgtgaatactttttgagtaaacttacgaaggtggatttctgtggattcttgttctctcatattatcttatgcgttggccccatacccatctgctaactcaagttactgtccatgctgcaaaacgtgcagattaagttcataattttggcctcattagtaccatggctgattatccaaagtttaaaacttgaagtatattatctgttgatcacattactgttttcaatttgttcccagccagtgtagtttcctatgcacttaggtttgtagatttctgctgatctctgaatgccgaatgcctattatcataagtattaaataatgaaagagtctaaggcagt

SEQ ID NO: 130526 - DNA, 1049 bp, Homo sapiens
actttctgtgatgatggaaatgttatgtatctgtgcagtccactactgaagccactggccaagcgtacctgttgagcacatgaaatgtggctagtgatactgaagaactgaattttaagctttatttaattttaagtaacttacattttaagttaaacaaccacatgtagctactgtattggacaacacagttcttagatattctctgacacagaagtcagataccaagtggaataggtgtaccttaagtgttcatcaagagagtagtgatgttttaccttgatgaatcttcatcaaatacagtcggtcttagggtaacttgttagaaatcaagcactgttttttgaatgaaaatgttatctacaggagtcttgagtttcctcttgtttgtgacttaaccacatgagcttcaactgaaaagatatttgctaatttgatgagaagtgaaggattttttcctgtctgcaggcttgtgatcatttaggtctcgacacaggtctcagtgaattcccgtatgttttctgggaagctgagtttagaaggtttctggccaataaaaaatattctgtttttattccaagctcaaatatgagtgactgaactgtgctggtttctgaatagatgatgaaacaaactcttgttttttccccctttagaaccaaagaaaatggctttgacagagagcctttgcactcagaacatccaagcaagcgaccatgcactattagcccaggccagcggtacagtccaaataacggcttatcctaccagcccaatggcctgcctcaccctaccccacctccacctcagcattaccgtttggatgatatggccattgcccaccactacagggactcctatcgacaccccagccacagggacctcagggacagaaacagacctatgggtaagactgaaggacctgttcacttcttacgggattgggtgcttgaagacttgcaccattatttctgaacttaacttgaggcttgaaatctgtgatagggatgaagattctcatatcttgctttatattgtctcctttatga

SEQ ID NO: 130527 - DNA, 1038 bp, Homo sapiens
acattctggagtaatctctcattctgctctcacataccacatttgttctgtttttaatggtaccttctgtatacatgtcctgtatgaaagtatagaagtcttgtagctccaattaaatcattttaatggtaaagaattaaagtctgccctaaataataatcttatggaaggttgagggaccatgtttctctcatctttgtactgccactgaagtgcaggatagtgcattacacatactggggacctaaaacaaagcaaaacactacaaacagaacaaaaaccactattgaacaaataattcaaattaaacttaatgcagtcatttttagtagtgtattaaatggtctctcttccaggcatctttatttttttgtttagttaaaaaatgcatctctgaaatacaataaaaacagccacagacagcccaggaaccaaatgctgtgattggttcactgaccagaaaaaactggagggctccaatagaaacatacaggtgacagattcgaataagaaagcagagttccaaacagcaggagcagcaaaaattgaatgcttcagcagtggcagagattagaaaaggcaagggaaacagccagtaacagcctaactgttgagcagatggtcagcttcagacacgtgacggaagcattccaccttctcgctgctggagggaaggctcagatggctcccccaacctgcatattgcaatccttgaaggtctgggcatcacgtttgtgtgtctggagtggcacgtatccatctgcctcttacttacttctaaaggtattagcacactgctcagaaagttctcactgctaggtggttgtttagcaatggagagattaaaggtgcttctctccacctggcccaataatgatggtcctgtggcattcagctctctgttcttcatcatctaaatgtccccctccctctagagtgatagcaaaacagagaaaccactgcaggttgtcatgaagaattaggtttgattttctttttaaggacgctggggaatttgtaatgtattttgtttcaata

SEQ ID NO: 130528 - DNA, 2020 bp, Homo sapiens
cgtcagttgttattttattctttctattactgaagaaacttcggaaccccttctaaagagaataaggagtccaattgttttgctctacctgtaccttcaaatctatatttttaaataggaaatttcttatatatccactgtttactcatactaagtacttggcaatgtgatacgttctgggactgagttgatatgataagaattgatatgtccccatttccttatgggacactactctctggcaggaggtgttagacaaataattatacaattatatacaacagttgtggtaagctctacaaaaacagattaggtagtacgatattgcttataatacagtgggtaggataggggagaggtcaaggacgccttccttgagtaagtgaatttgagctgagatggattttctagggagagggaaaggccctgaggtgagatgaagtttgcagctgattaaaccaatgaggcatgagatgagataagagaggcccatattaaatctatctaggttgttggtcatttgaaggtttggattttatactaagagttatggtaaaccattgaaacactttaaataggggaatgacttgatcggatcattagaatgtaaagttcttgagtgtagtgatttttaagaatttttgttcactgacctgtccatagtgtttaacagtacctagcacattttatatagctcagtaaatatttttgaatgaatgctttttttaaaaaaaatgagtgaaacatttggttttacaagaagttttcatctgttgtttcatgtaaacagattgcagtgtggtgtgagaggttgtaaagtccaagtggaagatagtggtggcttgtatgctagtggtggcagtggaaatggagaggcacatggaggaggcagaataatttgatagtggcaagtgtgggagacgaagctacttgggatattttatacacgaacagcacagtaccattgatgaagttgaacttatcctgtcctttttccaaatacttcttccagctgggttttggcattggtttttaacatcaccatgcacctctcggttcctacttattcgagggcatcttactgagctgtgttaacttgagcaatacttctgaaatatctcctgaattttccccttttctccagtcttacagccatttccatactgaatgcctgtgttctatcttgcctagactattgctatccagtactcctgccctgttgccacttttatcctattcatactgtgctctcagatacactatagaaatgaacatctcatttggctgcctaaaatctcagtgccttttcattgcctataatgtaaagactaaactaacagtactttttttccccctagagtacattcaattaaaatcaagaaatgttcatttaaactcctgctgtttgcttgtctacgatttagccacaggtacataccctgggcaccttcctgattgtctctcttgatttgctaattactatctggatgatcataactgactctactgagtgtctgtgctaccgtttttctgcagcagctctctgaaccttctctataaccttctttatccttgtcaaataagacaaatgttattagagtaataattgtcagttctttagatgataaaaggtttggatcactaatgacttgtttttgttttttgtttgtttttttttactttccagaatgaactacagtttgacaacaaaatgttaacatacatgcttatgttcagttttggggcccttgtgataacatgcatctttctcttctctttggacaaggaggagtgacttctgttatttgggcaacttagttttccttcctaagtattgttaaccttaagtagacatttgctatttgcctgtgccaggggctttaaacttttctttgttaaacaaggacccttatttttaaatgagatcttaaatagaacaccagggtgtaagtcagattaacctggaactagcctatttgaagtgtattgacttcacctatttgaagctatttgaagtgaa

SEQ ID NO: 130529 - DNA, 1037 bp, Homo sapiens
ttgatccctcaaaacagaagttcccaacagtttttcttgctgtcactcaaggaatgttgacattgacgatcacagtggtcttctgtgatagtgttgatcacattccaaaaattctatccctttgccttttagggaagtactagtgatattatcataggaatggttttggatatatcctaacttgagttattgttagtaacaagttaataacacaatgaacttagaaaattgagaacactttcctgtatatttagacatttattgctttcataattaatttatctgacaaataatatcaagaaggttgtgtttctgaaaacaaccttatagatctttagcaagcaacatttttcatttatatgtggaatgctctttgcagttgtccatcaatgtttggtttgattctcgccattataattcttcataagctcagagaagacatctctagtgctatatgaaatataaatgattcctagtaagtggatgggaatttagactgtcatcttaatttaataacatatatacccatatttacagtataaatagaaatgaggctacattaagaacttactaacattaaatttatgtatgtgttcacttgagacacttccctggaacttaaggtggtgtctgaattgtaaaaatgtgtcattcaaattgtaactagccagaattttatggttctaggttccccaatggttttcctggtattaaaaggtatgcttgcttttacattgtctggaaatatggaaggtgaaagtagacttacttagatgcttttgaatatatatatatatatatgcagatatttcctgctaaggcaatcttgattttctgtccttagggaatatttattagcaattaattatttagggtaacttctctgaattactttattaagtaaggtcatgggtttccatgaaaagttgtattatgcaaagtattcactgatgtagaaactctattaagaaatgataaatatgaaattgaaacaaccgtataaaatatatggagttgatctccctttatattgacca

SEQ ID NO: 130530 - DNA, 1055 bp, Homo sapiens
gctcactgcaacctccatctcccgggttcaagcagttcccctgcttcagcctccctagtagctggggctaaaggtaagcgccaccacgcccggctaatttttgttgttgttgttgtattttagtagagagggggtttcaccatgttggccaggatggtctcagtctcctgatctcgtgatccgcccgcctcccaaagtgctgggattataggcatgagccgccgcgcctggccctgtgctgaatgtattttatctttagctttgtgacttgggtttatattatgagcaattaatatattatattttatgaggccatctatcaaaaacacagagcatcgagaatgtcaatgcctgattgtgaatcagtgctcttccatttacagtctgccagagtttcactctctttgtcttaaaagtagaaacagttattctgccttgctaactttcacaggatggcaatagtgattgtagatatgctgtgtacctgtataaagaggttattaaacctctttatagacagcgatgctgtctggagttaaaaaataggagacagtgtttaaccccccacaaaacagtgccaagtgttatgcttgatgcacattgtctaggttagatgaaattttctgagttttgcctatgcttgataggattttctgcctcatctttatgtcagcggtttaccccttctctatcagtgtgccacccttttacacatcccagttatttgcaaatgtggaaaccagataaccaaacttagaatggtgatcacataataaaacacatgcttaagtgagagcctgaaaagcctgtcttttttttttttttttccaggtactaataagtggcacttttaatttgtggcatcaatttacatcactgagtctgtcccccacttcttccccaccccacccctactgattttcatgtttctttgtaggtggttttgctggagagctgaattctgtataaccttttactccacttctgtgttatcccaagatacagcttcttttcttcactgtttaaaatagacattttaaacatcatcaactccc

SEQ ID NO: 130531 - DNA, 1037 bp, Homo sapiens
gagtgtcagctctccatctgtctctgcctggcaggcgcacgcgcccagcaccctgcctccggcgatgccgccccagcccctctgatggccctcctctctgctgccactcattccagaacaggaggcatgagcccggaacgcgcttgcttttaggagacagccactttctgtgtggtacgctggattcaaggatgcctggtgagttagccctgttctgtgttctctctgtttttccaatgaagaaagcttactttctattatgcatggaaaataccttctgccccacagcgtgttgtatctgatgtgggcaggaagaggctgggggtgacagaggtgtgattggaaggtagcataaagagaaccacaaagatcttgatacatggaggggtacagggtgtggagcccttgcttttaaaatttgggagatgtattttaaaggttgagggggtcgtacagccacggatgtttgtcggagtaatttacttgagggttttagctcaagtaagaagtattgtttctgttcagaattttgtgactatcatctgtacttggtgtcctggaaatttcatctgtggagagagttttcagattatggcagaatcctggaataagatctctttaaaaagctgtttatgtcagagaaagtgaaggaagctttggaactacaaggaatttcagtcttgtcctaaatcacagcccttagatgtcatcagacaaataattgaaatcagttaattaaaataaaaagcctgctgaattagtgaagctcttgtcctggaaatttagtgcatgtcagtttcctctgaaaaatattatttttggagcctggagtgtttctgtgatcgttgccagtgaaggctctgcttgtggagaaggctggccggggaaagggttgtttcggctgttctcaagaactgtctaaattgccctgtgcctaatttggagcttcctatcttcagataaaaaagacagggcagatagagatcctccagctggccgatttatgtggattatttgggtaggacaggcagaagagg

SEQ ID NO: 130532 - DNA, 1064 bp, Homo sapiens
tttattaagtaaaattgctgcttttagagagtatctgctcttatttttagtttttcttggtcatgtttgaggggtctgatagcattaatgggctttaccccacatggagctttgagcttattgtagcactgcacactgatcccaggtcagtgtgatgcgtgaaatcaatttatttgaatctctttgcctctataggaatttggcagcatgccagttgttttcatttaatgttctttgtgttgaacacagacaagcaggcatgcttttgtattcttctctcttttggtctctgtctctttcagccaatattttactgtatggattttgagatgaaagaagagtatatcatttatatgattctaatcattgtttaattatatatatgtatataaatataccactttcttatcttttaaaggatatgtttgatattcctgagtttggtgactttgcacacacaaaatattttagagttttgtttaaataaaatttttggtgaaacataataaaccagatcatagatggtatttgcttacattaattaccactatcaaaatttaaaataacaatgttaattatgtaacacaacaaatgtttaatttgtaaactggactatcaaaatcatttatttcttggtgagccttctttgaatttgaagatttacactttaatcaagcatgttaaaaattataattatttgagtacaattttctttgatccatcttgattaagataccagcgttttacacagatttgctgtatatgaatttttatgaagtttctgccattaaggtacttttttgttttttaaaatttggagggtaatgactgggaatagcatagagatttttatgacaaataaaatcagacctttctctggatgtttttataggcaggacttgtttctgggtcagctttaggaagaggtggagaaggaaatgagagagagtgagaggagaatgttctgttgatgctccgggcagttcttgcggaagttgatatgcagaaccatggagccgcagcttcggggtcaggctcatacccagcagccctgcttccttgtt

SEQ ID NO: 130533 - DNA, 1053 bp, Homo sapiens
gggcttctgtgaacagtacctggcaggtaaaaggttgcagagcctgatgtagacccaaagtactatagtataaagaagagaaaaagatcacaggtcacagaagtagccacggaaaggtttgccaaagtcatggggattgaattgggcttttgtggcatttcattgagtgggattcatttgtttttcttttcatttggggctacaactaggttcctagtccagttccaaatgtggagggtagagtaatgagcaccccccagatgagaccctagctctcacagagcttgcagtttgggtgggggagggagaaagataaaaaagaagttactaagattatttcatgtagtgctaaatataattaagacaattaagaaacaatgttagaatgatgcagagggtggggggacatggtagtgagactttatttcaaatggttggggaaatcatctgtcaggtggtgactcttgaactaaagcctgagggttgaggaagaactggccgtgcagcagtctatgggaagggccgtgaagtcagtgaacgaagccaccagcatgagaggaagtgttccatcagggagtttatccagccagagaagagctgcactctggaagggcgtggttggagtggaggctgaaaactgtagatgagtgccaagtgatggagggtcttgtatgtgagattaggcaagaataaggactgtgtgtttctgtgtgtgaatgtaggagatgagtagttagaagagagaaggagaatctggatgagtgtatgcatggaagcttaaggaagcttgtgaaactaggataatgacatttagttcacatgacctgcgatgaggggcacccaaatcacacagtgtctcagttacttcctgttggaagttgagtatagtcctgaagtgaggcatagatggtgctctgttcactactccttcaaattagagggacacacaattgcttacaaagaaatggtgaagctttgacaaaggtaagctacagtccagtgccagaaactgtacttaccaaggtaatatttcctaagtcagatatgctataa

SEQ ID NO: 130534 - DNA, 1059 bp, Homo sapiens
ttttgctgtatgtcctttggtactctgagtcattttacaaatcttttgcctgtgtcgcccaggttgactggtctgggcctctgcccttccagagggaagtgatgctgctcttccctgccagaaggcagtcgagtatagtgatgaagagacctaactcccaagtgctttaccatttatctcctttagctacccttttcatctagaaataattttcatctggataataatggcatggcctcatagggtggtcatgaggatgacgtgatatgtgtgaagcacaaccttcagtaaagggttgctttttcttggcatctgacttgatggctatggaactgttcatcacttccttctctaaaccccagtagtctctctttggctgcttcttcattcagcaaatgcttaatagacgatctggccctgatggacactgggggatatgaggatgttgaagacaaatgacaccctgctttgccaggcctttcctggacctctctctctcagccttctctaaaaccctgggttgcttcacgtttggacacctaagctctttctgcagggaagccaagcttggctcactttgtcctctcctaagcctctggtgacactttcatgacccttcctccccaaagatagaatttattacatccaactctgctatcatccgtgcaattcagacttctctgctggtttgtaagaccttcaaaagtgggagtctggaacagttggggtactttctaatgctttgttaaataattattgagagctcatgccttgaactcaagtgatttacttgaaactgtcctgaaatatttcactgctgagactaaagtgaaatctttggttccaacagcatgttgttttttttctcaacctctttccaccttggtcgctttcattgcgttctcttgtcaaagaatgcacaatttattgctgttatattttggcttataagttttggcaactaaaaaacatacaataaaacaaaagcaaaatccacccccacccccacctcctactccaaacaaaacaccccatcttttatttttatttttattttta

SEQ ID NO: 130535 - DNA, 1430 bp, Homo sapiens
aagctccaatgtgtgtttaatgaatacaaagccgcggtctgggtgccgcctcggccgcggccgctctcccgcgctcctttgccagaaggtaatctccgtgaacaggggagggaggcgagcagggaggaaggaggggtggccaggaggaaggggggcgtggggaggcggcttttctctctccctctctccctttccaaatgattcagaagtcgataagaccaggagaagtgaagatgtaacatgttatctgtcgctcctcttagctggcggagagaatttacatttaaagattagcagagtgagaaagagaaatctgccttttgttgtgtggggtgaggaggaggcatctacccctggccttgacgctatctcccatcacctctgctatccagacaggactcaccgaggtgagaataccggagggccttatctttaattgggtttagttttgccagtctgaataggtttaaagagactcgataaagggggaacaatagattatttattgactggacgctgaagcctttagatgaagaagggagagacaaagctgcttaacaacttgattagttcatttttattttaaggtgagactgtctctcttttggtggaaggaagggctagagaactttggtgcaatttgaatgacttaaaatgtcttatttcctctcccgacaaccccctacccttctcagcaccatgcacctccctgatttaacaggagtttcgtttaccccttgcatttaggattgatgaactgagaaaagagggtaaaggctttgggattgatcattaatgtttggttttgtgtgacttgttttaaatgcgtgataaattgatgctgacggtacttgaatgagtaagaaaagcaaatgaagcctacttttaatatggaattagttgactttatagtatggctcaactcagcctagaggagaaaaaaaaatcactacaagtctgttaggtagatttgtattttggatttgaaccatgaaatcttttggttggagctagtttaaaaaaaggagaaaacatgtcttattgactcacaagtatttgaaacattgtaatatcaactttagaaggttcttaaaatgaagaaaagtggaaaagatggttgttttgccttctacacattgtcaaaataggtgttttcatagatagatagatatgatccagtaactaaaagcctaattaaaatttgtttaaagccaggggggcatgtttccttgttgacagcagcagatcgattgggtaagacaatagagtcccattattttacttccattgactgaacatattgacatttcaggtttgctgttgcctcagtgagcatgatgaaacactgaaattcacagaccaactggccagagtggcacatatattactgtatgtcatttctgccttcaggttaccttatcacccagaca

SEQ ID NO: 130536 - DNA, 1140 bp, Homo sapiens
ggggttggaacattggtgtgtgtgtgtttgggtggggtgggggagagggggcggtgctcaactatacataaaaccgatttttggccaagtgatttggaggggagtgcctgattaaacaatgcttctcctcattttctaaagggcctcttaaaatatggttcccttaaaaggcaggggctagttctcttgctattgtttttttttctactcactagccttacccttcatccccattttattcctttctagggagaccccctgcataaaactattttataacctgaagtttcacagcagctagggctacagtgcacaccatgaacaattgtgtaatttattggctccttcattctgaactcactcttgatgctgtagtgagagcttcttaaccaagcttcagtgccttgaaacacagcacaaccaaatacttcccctcccccaataaaataacctcctttgctgcattatctgcactccattaaggagctgatcagatgttcacattgtctgatgggtgtatttaaaagtgaaaagggactcccaagggactactcaggtgtgtctccttcctgaccctgctggggagggggatgaactctggactgacggacaagcattagcccttgcttgttctctgattgattctctggctctgggtgggtgaagagccatgaggcagctcaagccgagattgattgcctcaatttcagattcccacctccaaaatagactctcagatgcacacataaggagcctcctcccccaacacaatttctggaggtggagcaggtctctaagagtcacctgtggctaccaatcacaagtgttcctccttatcacaatgatgctggctgcaggagtcttcagctgggacacattaaagttcagggacagaagctattttatatctctgagtgtgtgaatgtgcaggggctggaatttaggagtattggggttagcaaagaaagggacaagaactccgacttgaggttggtctggaaggcagcttaactgctctatagactcagtaggtttgttttgcaaaatgtggctgtttggatggaggtgagatggcgactgtctccttaggctctgccaaaagagagctcttgatcctcctctgaccttgacagaatctcg

SEQ ID NO: 130537 - DNA, 1052 bp, Homo sapiens
acatagccccaacctgagtgtttatgtcagctgtgatgtgtatacacagaagcaaatttataattctgtggatttccctctcttttatccttaaagtctagtttgtaatattatgattttcagataataaagatagggttatttgatttcattttcgtttttttcctttactgatttttttgtttgtttcagagaagtctgacaatctcacccaatagtaatcagggaatcttggtttgatccgggctttttttgcagccaggatggatgctgaagaagttgaagtccattatttcttgtgctgtgttcagcattttatattttgttggtttattattttaaaagatgaaattccaacaaaacaaccaatcagtcttatactgggtgcataaaaacggacttttttaatactgaggttaactttttattaaatatttttgttcagtcattaataattttattataaactagatagcagtgactttatttgaaaagctaaatattgcatgggagaatttcaatactcagtttctccagtgtccagtttatacctaataaaagcagtggagaaaacagtctattttttcttttatgtttgtacaactcaaagcagactagaagtctttgaaatgatattttcctttgtggacttagtctctgtggtccgttaatacctgctaataatttgtgttaaaatgatctttaaaaggtcctttctaataaaaatcattctatgtgcaatacaatacattgcactattaaattgcaaggacagtatttttgcagctatgggactgcagctttttaatatttgcacaattttcttttcctgagaggagtaaaatattgctcttgatgttagtatttgatgatgtgctctcccattgaggtgttagtctaaatatttgtagataaaagagcacttcataaattgcaaagaactacacacatttaaggtgccattataatttattttattgtcaaatcgaaccgtagccaaaaaatcttgcatttctttaaacactgaaaaaggatcacaagaaagaaatgct

SEQ ID NO: 130538 - DNA, 1042 bp, Homo sapiens
ctgaaaaatttcagatgaacaaaactcagtctattttgaagatatttgctatgttctagctggaactcagtgggttaactcaaagccatctggaacattcagctgttcagaataactcattttcagggagctctgtatagttgaggacttactatacgtgttttcacataatgtgaatagaaatgtgactatttgtaacatttaaacacccacaatttccacaaatgaaagaaagttcagcatgatatttatcatgactcagttttttctccctcctcagaatggcacttgcatcttttggggagcttttgaataggcgctgctgcaaaatgcagtaggtgacagttaaacatactcttcagcatttgcacaagatgaatcatgttctttcgcagtcatttggcttttcaagatctctgttaaagaggagatgcaaaaactctctcttgcgactctttcatcagtcatcaaacttgtggcttttagagcacattggttttgagaagcttttcatgaagcaccttgaaacagcttgccatggaaatagaaaaaaaaggaaggcagatgcctgaaaaagaaattttttcttttagttaacatatcacaggatgggccctatgcccaaacttgagaattcagaattctcattgacatgaaaaggagttttctatcattttttgtaaagctgctggattagtccttaattttgaataaaattttcgctcttcttgctctctttcttttcttccccacttttgttttataggcattttccttaaaaaaaaaatctggatatctctcttcatgttgaataattatgtctctgtagatggttccagaaaagttagatttaatgggttcctaagaaaacacacgtaatagtaaccttcttatcagacatgaagtggtagaagacagagttagggctgtctttcatcaaggtaatatttatagctaagcaaatcaacatttcaactctgcaaattctaaatttgttgccagacagtatctggagattgttttgtgtgttttgattaaatac

SEQ ID NO: 130539 - DNA, 1018 bp, Homo sapiens
acagccaccctatacatggtacatttagatgaaatgggaaccagatcctaaatttttcaaatgtcattgccaatttatgtgtataattccatcacttcctgatgagtaagtctatttttgttctatatacatcataagttagtatatattcttatttacagaaacatgctcaaatcacattcagaaagaacaaaaagtcatgggaaattttttattttacaacaaagccctgctttctttctggacgtattttacatcattagagagactatctgcacatacatctaccataatctttttccttctttgccaactgttcagtgcacatgtgctgcatcagaaatggcacctggatgacagaagctcaaagagtcacatatgtctctaaaatagagttcttttcctcttgggctgtctgaactggtgtaaatagaagctcagttgatcttggttttaattaacttattactctattaatataaccttggaattctattctaattatgttgttctggctgcttgtagtatcagttcgcccctcttgttagggagatatgtaacaatctgtcatttaattgagcagtctttttcacataacagtaatagcaaaaatcctacctactcagaatcatcttcttaggttgtctcctaaatctgaacaatacagttgttttataaaattacattttgtctcttgagatttaatcaattagaactctttagggagaaaataaataatagaagaaaatatatgcctcatatttcatatgtaattatctgttgatataatttttcaatgtattttgtatttgtgggagcataatgacctgtacattcaatatttttactggtaattcaatttttaaatatgtttttacaatgcttgaacacataaaccttagaaaactggaaaatacgtgtccacagaaagagttattagctactaccttatgtaaagatgcatagaaaatgaaattgttggaaacatgtgcacaaagtgttttatattatatacatt

SEQ ID NO: 130540 - DNA, 1386 bp, Homo sapiens
tttttttttttttttttcctgaggcggagtttcactcttattgcccgggctagaatgcaatggcgcaatctcggctcactgcaacctccgcctcctgcgttcaagtgattctcctgcctcagcctcccgagtagctgggattacaggagtccaccaccatgcctagctaattttttgtatttttagtagagacagggtttcaccatattggccaggttggtctcgaactcccgacctcaggtgatccactcacctcagcctcccaaactgctgggattacaggcgtgagccaccgcgcccggccacgaaagaaggctttaagataaagtccaaacttgagtgtatatatatatatataaacactgttgagagaggcataggaaggatttttgcagaggatagaatctgtattaaaagaaaagtccagtctcttaataactagatttttgtactgttagagataacatggaggtctttagaataggctctaaaaaccttttagaaaaagtagaggtgacacacgtagttaaaaaataaatgagccaggcgcagtggctcacgcctgtaatcccagcactttgggaggccaaggcgggcggatcacgaggtcaggagatcgacaccatcctggctaacacggtgaaaccccatctctactaaaaatacaaaaacaaaaaattagccaggcgtggtggcaggcgcctgcggtcccagctactctgaggctgaggcaggagaatggcgtgaacccagcaggcggagctcgcagtgagccgagattgcaccactgcactccagcctgggcgacagagcgagactccatctcagaaaaaaaaaaaaaagtaaaataaaataaaaaataaaaaataaatggtagggagtatgacacataaaggagaaatatggttcaatcagagattattattatggctagtaatgtgaaaaaattagaaaacaacacttaaaaatattaattgctttaggcagtttattcattgaataaaagttgtttgctttcaaaaaaatctcattttctgatctgagctaaatagggcaattttaaagacaggggttcagagtagttcatcgcctttttattacattcatttttaaatgccttatttgaaagggaatgtcctggtttatgagtttcatactttttccctttaagaaagaggcagatggtatgaaaactggactcccttatttaaagggaatgttgatatttataaccaagcttatctccagcaagatttgttttttgcagctgttccaggttggaaaaaaatattatattaaagctctggcttgtttttctttccatatttagggggggagatcttcaaaatgtgaaaaagtgatgtttgattttaaacatgaatgcaa

SEQ ID NO: 130541 - DNA, 1120 bp, Homo sapiens
aagcctctgtccatggggcctctgcgccgaattccgaccctgagtgggaggctgcacggtccccgctgtgacctggggcctaattccttgggctgcagccaccgccggcggcgaagaggagcccggggcccggccggctgccacccacccacgccaccgggtctcgggtccccacactgccgcgggcagtgcggaagcctaggaggcagccgggcgcccaggccgcgctgcgcggagcagccggagcagccacctccccagttaaggccaggcccacccggcctgggccttttcctgtgcctacacagtccggatagtgaggtcaggaccccatggagagcagtccgcgccgggagacgctgggtcgttgatgggtttacgccttcaaagctgcagaatgcccggggaatgtttgcatgttaaattaacgtgaagccttctcatctctaacgagaatgttttgccttttgtgtcaccttttccctaggaacgctcaaacgaaacaactgcaaacagctgtctcaaatgtggagaagcattttggagaactgtgccaaatcttcgctgcctatgtgcggaaaactgccaggctgagagacaaagcagacctcctggtgaatgaaattaacgcgtatgctgctacagagaccccgcatttaaagctgggcctgatgaactttgcagatgagtttgccaaacttcaggattatcgacaagcagaggtatggagtgagatcacagtgtcattgttatgaatgagccatgaagtagtggatgaaggaaccgtggaaactttcacttgtaatctacctaactgcagaggtggatgcaaacttgataaaacgtacattttcataagactgtgtgagtctattaaagagaagcgttctgtgttttattttacccttttcaagctaacctttagggcatcttgaggtcttgaatttccccactttatttgccaacttttggccaaggggtggctgtttactgggggtagtgggaatagtacccagggggaagaaaataagcataacttaatgtcttgtgtggcacataagtacgttttaaagaatgactggagatggaaatgttgggaatggtaatgtggatggataaa

SEQ ID NO: 130542 - DNA, 1022 bp, Homo sapiens
gatatataactttaattttcaaatggataaacagttctcttacatcctttattgaatatcctatacgctggagagctgtcatttcctctttgcgaaaatgttcttaaaaccttttcgttaaagatctcttttgttaatcaaacaagatggatgctttactgttagtcattacatccaatttagctagttgactttgttgttcttgttgagacagaagtctccaaatgttgcccaagctggtctgggacacctggacccaagggaacctcctccctcagcctgccaagtagctgggattataggcacatgccattgtgcctggctagtttacttcttgagcattaaaaatgggtgtattggcttgtcatcgactcttcgttcagttttccctctaggagtttccacactcaagaaaacctgactcctttctggtttgcaactatcataaggacactaacaactaagagtaggtcccagccctggtcagaagccattcctcctctaaggtattcctgggtatctagagatactttaatatgaaatccaaaattgtattttagcataatgccgtttatccatcagttgccagcctggtatacctgagccctctataacttacatgaagtgacagtaagggtcattgtgaatcatcgttacaagtcttttttacctaggccctgtcctctcagactgacgtatatcactgagtagcaatcagagcctcttaatgctcccttaagtgtttttccaatcatctaggaagaatggggctggaggaaagaatcacaggccactgataagtatctatatggctatcctccaaagtatatgaccactcctttctgggttatcttaggagagcagggatgaaggaaaatgtgtatttgactactgcctactaatataatccatgcttgagtattttctgccttgttcttattcagcccagttctctctacattgcttattttgttataattaacaaaatgataagatcatatttattaaaaacttgcctggtt

SEQ ID NO: 130543 - DNA, 1025 bp, Homo sapiens
ctgggcaagtcaatatttgtaaactagaacgctctatgcaaatatatggtgttatcatcagtggcaggagtgtcattactaccaagtaactcctttatgtttagagaatacaagtagcatacagtgtggaacataattcctgtttaaaaaacgttctcctgtttaaacatcagttggaattgctaaaacaccagcttcataactgaactgctctaatacttaataagcatatggtattaaaattatatagtagcatacattttagtcagatcttatgttattataaatgtcaattactaggtataaagagaactaactaaaataaaaaataagagggaagtggatggtgataaaggaaatactttgtattatttgaaggtttggcagcaaaaggtcttcacaactgtttttcagttatcttttgtactttatttaccctatagaaaaacagatacttctgtattttataaaataccaagactatagtgaggaataaagttactatattcataaagaaatttaaatcattgtttaaattcaattctttggttttttttagactatattttctgaatttatcacaatcgaaatgttatttcacggcaaagctttagaggtctacactgctgcctaccagaatatacaaaacattgatgaagatgaagatttagaggtaggactatgtctatctaagctcagttcttctgttaatgtggaaatatttaaaagagaacattagtatgtgattaatatcttttttttttttgagacagagtctcactctgttgcccaagttggagtgcagtagtgtgatctcagctcactgcaacttccgtctcgtgggtttaagcaattcttctgcctcagcctcctaactagcttggattacaggtgcccgccaccatgcccagctaatttttgtatttttagtagagatgcagtttcaccatgttagccaggctggtcttgaactcctgatctcaagtgatacgcccacctcggcctcccaaagtgctgggattaca

SEQ ID NO: 130544 - DNA, 1065 bp, Homo sapiens
catcatcttctgcttgttgatcctttcttagtcgacaagtggatacctgttaaaagttaacacactttttaaaataaaaatactaacttaaaaaaattttacattcttggtatatttttatgctattaaagggcacacaacaaatatttcaaaaaaatgtccatgtcataatttttagtagtgaaaattccctatgaattttaagctcagaagccagttttttcattcatcacatttttttgaataaaaatgtgtaattagccatttgattttagttggatagccatcaatacttcaaaaacattaaaagtatagactctatattatgaatattaaaaataaattttgggtcacagaaacagcatttgagaatcataaaatggatggcaaaaatagaaggatatttcagctaggcagtgggacagaaatactgatgtaaaagtagtgtgatttaaatggaatgagttgagaatctgaattcaccagttttaagttgcctgactgccgccacgtggggcatattgcttaaaacttctcttgagggtgattatatctaacccaggggacatttgggaatgtctagagacactgttgtttgtcagtattggggctgtgtgtttatgtgtgctactggcatgttgtaggtagaggcgggggatgctaatatctgcttgatgtcgtcacaatatacaggacagtattccgtccccttcttcctccctggtgggcccaattatttgtcccaaagtcagcagtgctgaggttgagaaaccctgggataatgcattctgaagtgctatacaagtgttagctaaggtgacattattagttgtagtcaaaactttatatggactataaaagtaaatttatggaatttatgttcaaggcacttaatgccggaataaaaaaaatacaattgggttgggggagagatacatacatataaaacaaaataaatgcttacaggagaatcaaatgaaaatagaaagtatggtatcaaatttacctaaaagttgtatcttgaaaataagtttgttgaattttatattctgaaggctagatatg

SEQ ID NO: 130545 - DNA, 1063 bp, Homo sapiens
actcattccatttaaatcacactacttttacatcagtatttctgtcccactgcctagctgaaatatccttctatttttgccatccattttatgattctcaaatgctgtttctgtgacccaaaatttatttttaatattcataatatagagtctatacttttaatgtttttgaagtattgatggctatccaactaaaatcaaatggctaattacacatttttattcaaaaaaatgtgatgaatgaaaaaactggcttctgagcttaaaattcatagggaattttcactactaaaaattatgacatggacatttttttgaaatatttgttgtgtgccctttaatagcataaaaatataccaagaatgtaaaatttttttaagttagtatttttattttaaaaagtgtgttaacttttaacaggtatccacttgtcgactaagaaaggatcaacaagcagaagatgatgaggatgacgagttagatgttacagaagaagaaaattttcttaagtaaactacacatttccattttcatcataaatgacttgaaatccacaatgactaaattgtagaactttatactcactttgctatgttaagcctcaaagtgaagtccaactggaaacagaaaaataattaaaggaaacttatgctgaccaaaaatgaaggctttaaaaaatattgcataccagtcatttcaacatcctacctagtgttacatgatttttgtgtaagtgcctttttttttaaagatggtgtatttcaaagtatttcatattaatgtactatatctacttgaagttccaatagtacattatgacagaaaccaaaagatctaacaattctgcttagctttttggttaagactccatgctttcattaccagaaaagggtcttacgtagtcattatgattcatggaattctattccatgaagccttaagaaaaaaaactttttttaactttccctgaaactttatcatttgataagtaaatttacttttcaagaagagtataaccaaagagtaaagataatgtgacactaagttatcaatgttttatgaa

SEQ ID NO: 130546 - DNA, 1401 bp, Homo sapiens
gttctgctggccaggctggagtgcagtggtctgataatggttcactgcagcttctaactcctgggctcaagctgtcttcctgcctcagcctcctgagagctgggactacaggtgtgtgccaccttgtctggctaaattttttattatttgtagagacagagtctcactgtgttgcccaggctgttctcaaatttctggcctcaagcaatcctcactccttggtctcccagaatgtgttgggattacaggtgtgagccactgtgcccagccttgtattttgatttttaaattaatttatatgaatatttccttttaccctataatgtatcagggcttaatatttttaaacttcattataaaaagttgattacagaaagtggtatcttctagttgggagccatctttgcacatctctctccaactctgcctttagtgatatgtcaataacaaattggccatggcaggagtattttacaccatggaaagtgataaatgcagcaaatcaaggaattcccctcctgttgtcccctcagaaagccagcttcccagcacctcatcaatttcaaatataaaaaaagaatagtaaattttcatgtacacatcactcagcttcagtaattgtcgtctcatagccagtttttcctctcctatcctcaaggtataccaggtacactggaggtgtattctctagcctgatacccagtggcatttgtcttaaagccaaacatttttgtctagaaattatctaaaaaaatgtagatcatgtctagaaagtcaatcccacaaccaagagataggtaaaaatcatgttaggagtgcatttctattaatttactgagatcactgttaagagcagtgattcttgatccatatatcacctgttaagtagtgaccttgctgcctctgtttttgcagtaaatattagctgttgtttattgagctgtattagatactatatgatgtataattatgtatgaattaactatcatttaattctgataatcctagtaaatgtactacaggttgagtattcctaatctggtaatctgaaatttcacatgctccgaaaatcacaaactttttgagtgccaacatgatgctcaaagaaaatgctcattgcagcatttaagatttcagatttttgggttaggaatgttgaactggtataatgcaaatactccaaaatctgaagaaatccaaagtcttaaatacttctggtcccaagcacttcagataaaggatactcaatttgtattcctattttggagataagagatggagacttacaggctgggttggttggattggttgcctgttttttgttgttgttgtagtggaagctaggaatggtttttcacattttttaagtgtacttaagtcttacatggttacatagttacc

SEQ ID NO: 130547 - DNA, 1019 bp, Homo sapiens
gagaacagcacgagagttggatataaatatgtactagatttttggattttcatgtggcaaaatgattgaagttcttttttttttttttttttttttgaactttgggtattgagattttacttgtagaacagttttttgaagtagatgtaaaacttgtgtacagcaaaatgtatagaccctaaggatagaattcagtaaaccttgataaatttatacacccatgtaactactgctgcattcaaaatatgtaacatttccatcactcctttcttcgtgctacttccaatcaagagcagttgttaaattttcggcaagtttcaaatttttaaataatttttatatgtctatttggatattgtatctcctttttgcagaaggatgattaatttccccttggaacaaaagaccattttgtaacacccgtaattgtggttccttattctgcttcacttttgataggtaattctgaaatggatatcctactctggcgttgtttaagataaattacagggttcaaggattaattatatttcattttctttccacagttaagttgcttttacagagttaacaggtctccaagaaattttaaaaaaggtaagatatccagagtttaaggctttgaggctcaacaaaaaacatgtgaagtagaatagtacatctaggtatccatggcttctgttcttttttttttaaaaagacagggcctcactctgtcctccaggctggagtgcaatggcacagttgcagcccattgtatcctgaaaatttcaaattgggctcaggcagtcttcctgcctcagcctcctgagtagctgggactacaggtgcatgccaccatgcccggctaattttttctttttagagacgggctctcgctctgttgccaaggctggtcttgaactcctggcctcaagcgatcctcttgccttggccttgcaaagcctggaattacaggcatgagctatcatgctggccctggcttttgttctctgtgtctggccagtggtaggcaattt

SEQ ID NO: 130548 - DNA, 2545 bp, Homo sapiens
actcggcagcagtggtgtgtgtttattgccaagtgcgaagcagttcccctcggggcgccgggggtggggagggctgggcgaccaagccggaagaacggggaaaggcgggaccggcggccgcgccagtatctagcgtagctcctgccgttagggcaccctcttttcttgctaaaacaccgactcttcctttcccgtcagcttccatgtggtggtgtatgtgcgcttcccagggatcttgagagtgaagatctcgaaggatttcataggtatatttttttctttgctatgtcatcgtagtcagtggtggcagaaaagcgctgcaggcccagctcgttaggcttgagaagggcaagtgttttcagttagatctgggggcagttcaccctctggcgagttagggtggaatgtttgcccttgagacggcgtaacggaaaggcacggaggttgggcggtccaggttaatttgaaggctgattttggctgaaagtctggcgacaacatcggatcccacgtagcaactttggcctggcgcgaaagaaggaagctctgacccctgggagttgtggacaaaggctttgggctgtagaatcgatgccttcggatgattcccgtttgaggatgttgggagaaatcctgtgccatgtggattcgtcttcatttacagttcttcctagggactgtggctctcattggtcattcctttggtttttattttaaacatctacattataaaaggtggatcatcgtaaagaataattatgggttggtgtagattattttctgcaggggaaactcacgtttagagtgtgaatatgctacatcatgaccttgggctttacgaagtagtcgcagagttaaaaaaaattctctccctcaccatatctggaaaatgactttttcttcgctagttaaaaatcaaatggatctgatgagatattacttatttaaattctgtctccctcccgtttccctctctgtatccccttaagtcttgattagaagaggcacgttacgtattgtttagttataatggtgattaagtgggatgaatcgttggataaaaatagcagttatttaaaatgcgctttaaatttcactgacttaagtgatcttttagggacccactcttcttttcatagaaattttaacagattattgtcttcaaatgaacacaaaggcacaaaaatactttttgcattcataactagaaaaacgcaaaattttaattgcagactacttgagggtaattttcgtgttttgcttttgtgtaatttagtgtgttaagagttgaatttctggagaatttgcttaaggaaatatagcatgttggaaccacagaagtgcccattttgagagctggtctcttacagttggtctccaaggtgtgttattgtagaggcataaatggtacattaccctactgtctcaagggtagagaagtttaagcattagttttgtttaactgtggcaaatgagaataaactttctaaatagtctgcttgaattggaattcatgagatttgtgctcatgaaactacttggttaaaagatagtttttaagtgaggtaggataaattactagagtttttttgaatttgagatataattattccttgaaacgtctctaatttctcttgtagatgaatttatgttcccagggtaaatcccgttaaaatttttttaaaagcttaggagagacaagaatatgtatagcttatggtgctttctaaaatatcttaaaaagagtagctaagccaatttgcataggagggagtcttgggactttaatatggataaagtaagtattccagaagccatttgtagtttttgttgaagtgttagtatggatattggtttgttgaagaaaataggctttttttctttttttgttactgtgcaaatactttaatagcaaacctgattaatatttttcagatgtagaatgtgtgaagtaatttgatgtctttgctagtttagcttctggttaatctacgtacccttttttaaaggaaaacagacctcagtgaatgtatcttcagacccccactttggggaacagtggtacttaagtgtaagtactggattctggattaacgcaacatttatttgtacattaaagacatgtaaattactccaggcgcagtggctcatacctgtaaatcctagcactgtgggaggctgaggtgagctgattgcttgagcccatgagttccctaccagcctgggcaacatggtgaaaccctggctctacaaaaaatacaaaaattagccgggtgtggtggtgcacacctgtagtcccagctactggggaggctgaggtgggagcattgcctgagcctgggtaagtcgaggctgtagtgagccaagatcgcaccagtgcactccagcctgggtagcagagcaagagagaccctgtctcccccaccaaagaaagtgagtgtaaattataattatttatttggcaagtcttcatgaaatagtttgggtatccctgaaagtattaaacgcaaacttctttaaaaaattacattgagatttttcagta

SEQ ID NO: 130549 - DNA, 1338 bp, Homo sapiens
caatacttaaactttttttttttttttaatcatgaagggcacggtagaattcaacagtgaataaatgaaacctgaattttatttaaaaacctcacttccataagcataaaggcatgaatcctagaagagccttagatagcatctgctctgttgatgttcctttacaggttagaagagtgagactcaaagatgtgagctgacttttccaagattatttgggagttggtggcagacctatgcccgttagcctggcaaattgccacagtggactagagaagcaagttttgcaagaccatctactggggtacaggagagaaatactggaatttctttttttatttaattatgtagaaatttttctatatatgttacaatgcatattactgtagtcatatatgtatatgatgtacacgtaattcataaatacacatatgtttggctgcctcttaacatttttggtcatagccatgtgtaatcatgccaaaaattgaccacaggtctatgtaaagggtcttcataaatggaagaagtccctgtgtaaaatgggagatttcaaggcattttttaagaatagggagggagaaggatgattggtcaggtagacggctactgcataatgttatataaccttcatctcctcagctttccccagccaaatctgttgtacattctgcacagtttgtactgcacaaaggacgacaaagaaaagagaaaattgaagtttgagtataggagccaggagttcagtcgtggttccacgaatgattgggagttgtgcctgccagaatataccctgtagaaatagtacatgatgtgtgtataaaatgtagtaccttctagcaaaggcttaacatgtagattgacttgcttaatatttgttataaaggcaaagctagattaagtatcctgaaatgtaactctttcctttgtgtacatctgtctaatttgctgtctaggaatcccagtcagaagttccagcctgccactgttctctgatgccatgccagcaccaactcaactgttttttcctctcatccgtaactgtgaactgagcaggatctatggcactgcatgttactgccaccacaaacatctctgttgttcctcatcgtacattcctcagagtcgactgagatacacacctcatccagcatatgctaccttttgcaggccaaaggagaactggtggcagtacacccaaggaaggagatatgcttccacaccacagaaattttacctcacacctccacaagtcaatagcatccttaaagctaatgaatacagtttcaaagtgccagaatttgacggcaaaaatgtcagttctatccttggatttga

SEQ ID NO: 130550 - DNA, 1013 bp, Homo sapiens
ttgggaatgtgatgcagctttggaatcactgaatagggaatgggtttgggaactgaccagaaacttgtaaggtgacaagcaaaagtacacgcctaagcattgtacacgactcagctctaaattggcatcctcttcctttccccctgtttccagtccctgccagggaacctgggggatagggaagggagaagatcaagctgttttctattaagcctcatccactcaaagtaaatatggtccaatcggtaaatcagataacatgtagcaagttgtgcaatttggttatatttgtctaggaattgaagttttagtcatgtgtttcaagcttattttagaattaaactctgttccttgtacaatgtggacacttaataaatggtgaatgattagccaaacgcaagcaattgaggcttttatagctgtccaagttctgcagaagtcattgtttagaagaaaatttgtcaggggacattgtctgcaggcactcagaatagtccagcatttggcatagcgacgtaggctttcctacaatacagcttctaacaaaactaggctgtcctgaacccctggtaatagaattgttcacctttataccaagaaggttgggaaagcaccaaaatctgcatgtggtgtgtacccaggccgacttcgaggggttcgtgctgtaagacctaaagttcttatgagattgtccaaaacaaagaaacatgtcagcagggcctatggtggttccatgtgtgctaaacgtgttcgtgacagggtcaagcgtgctttccttatcaaggagcagaaaatcgttgtgaaagtattgaaggcataagcacagagtcggaaagctaaataaatacgaaacttttttgagtaataaaaatgaaaaaaaaggagaaaatttgccaagaagaaagagtcctttaaatggcaacaaattcacctgtaccccacctgtgaagacctctaggatccgaggtccctgttgttgctgtttcttctctcttctgaggtcataccctcct

SEQ ID NO: 130551 - DNA, 1015 bp, Homo sapiens
tgtttggggaggaaaatcaatcaagaatgccttttttcaaatattttatttcttttattataagacatataggtaaaaacttgcatattttgaaaaagatagaaaatggtaataaaatggatatttttcttattaagaaatatgttcataaatatgctttatcaaatgttaaaatggttattttgcaaaataataataaatagagcagagctgtgacatacaagggtcaaccaaagtactggaagtttttatgctatatgttttataaaaattcagacttctgattatacattaaaaattgacattttgcactacagggtatcaataattctgattttaaaaatatttttatgatggctccatgaattcaaaaataataaaacataaaaggtggtttgactaaatagaatctgattcaaataatttccccctaaataagaaattgtaagatataatttttgagcctataagggacacatgtatcagttcccaattctatatgtcttggtgggcattgaacaaaaattgtttgctaagcctttgtttccagcaaggtccacatcatttcttttcacagtttgatggagcaataatagtcacgattctgatgagcctagttctacaattctagctccatggatcttagattcgtagaaagttttccctcctttgaagaaactcattgacagctttcttatatttgtttatgactcattggcctcaaagtcacatatcagaacactgggaaaaatttttaatgatgaaaagttcttgttctaggcattctttgtaagctttacttctctactatccaaaatagaagaaacacatgtgaacaccaaacacatcctctaaagagtcttgggtgttcaaatagcaaggtcaggcttttcctggaaataaatactgactttttacaaaaatctttcatttcccatgcatcatgttgcccacaaggctaatacgctagctccctgctacaatgggggaaaccacatctaacttaagtattcaa

SEQ ID NO: 130552 - DNA, 1063 bp, Homo sapiens
gaatatgtgaccccatcagactgatgcctcaaatgaaatttcagaagccagggatggggagtaggagagtaggacagtgtttctagggctcacaggaaccagagtcagccagagtagaattctttttcctcaatgaaactctttctcacagttcccctaaatcagagttccctatcctccttgcatgaagatgctactttcatttccctgtactcttgggaattccaggaaactccttaaaagcgggaggattagtatcctgcaggtagaccagatggacaagggagaacaactagtgtggaggagacccactgggactgtaggagtctgagaaacacacctaaaatttcatatagcatcttaatgagttcctagatccagcctcgtggaaggagggaagaacccgtgtctgaaggaaaacacatgtgatccagcgattgtttctacagtattggctctgctcctcttacctgatacagacacttctcggcaccgcactaagtcacttttgttgccaaccaaaattatgggaatgtcctctgtctgccgggccctgcggagctggattcgcagctcagatgccttctcgaagctcgctcggtctgtgattgagtagacaatcaggtatgcgtccccgacctgcatgcagtggtcatggagccattcattttccccctaatgaaacaataagatcttctgtgagttcagttaggcctggggaataaagcatcagtttgcaaagaaacaatatgtgtatcctaaagtacacttgctgataggaaaaataggaaaaaggaagaaaatcgcttccaactccctaaaagcattggtcttctatgcctataagatgtctggtggctgtaaagattgctagcctgtccagtatttatgccaaaaagttttcacttttcagtatcttctacagcttgatttgataaattacacaacttctctgccaaacagcatttccaatttctatttaatctaccaaaaatgagccttttctgacttcccaaaaactcccttttgccttttccaagtgatgagattaagaacacttttg

SEQ ID NO: 130553 - DNA, 1052 bp, Homo sapiens
ggtgaagaaatggaggcttacaaagtcaagtgactttcccagggtgaaaaaactagtacatggtatgaccaggattcaaatctagttgtgattgaacccaaatcctgtgtcttttcatagccccctgcagccccaggatttagcttccaaatactaagtatgacagcacattgggcatcagccacacacctggctctggcctaagctctgggatacaaggcgatggatgaggtataccatgccccctagtaatgagctaagtgttagttgctatgttgcagagcagggtcacattaactaatattttaagcagtaacgatacagtgctttgggcgttgacataaggaagagatggactgggagttgttttttgtttttaagagggaagaattgaaaaaagttagtggatagtagactttcaaaaatgtttgtccattagaatggagttgtatgtatccagagggtaatattcccataggcataaaatgttaagaagactgactcatacctggaatttggaaaggtagccttcccagatattttgggaacttctttgttgagagagagagagagagatgcccaatatgacagcacattgggcatcaggcatatggctgatcctggggccgcaggggaccatgaaaagacacaggatttgggttcaatcatgagagaaagggaatcctttccctagcttcttacacagagaatctgtaggacctgctggaatcactagttggttttgtttcccaagaggaaggttttctaaggcacacccctacatttttttttttttaaatcagcattcactgtaagaaaaaaaatcgacataatattctcataatgatttctcctaataaagatggatattgttacagttacactacagtaatcttatgactctctgtatacactgaatgccattcattcattcattcattcctaagaagttactgaatgtatagcacagagcttggtgaggcactctggggacatgcaaagagtcatggggcttcttctgcggagatgctcacagtatgcaatggagcata

SEQ ID NO: 130554 - DNA, 1052 bp, Homo sapiens
ctttcaagtcctggtgtaatggctttggagttagagttttttttttttttttttttttttttttttttttttccaagacagggtctggctctgttgctctgttgcccaggctggagtgcagtggtgcaatcatggctcactgcaacctccgcctcctgggttcaagcagtcttccagcttcagcctcctgagtagctgggactacaggtgtgcaccaccacacctggctaatttttgtattttttgtagagacgagatttcttcatgttgcccacactggtctcgaactcctgggctccagcgatctgcccgcctcagcctctcaaagtgctgggattacaggtgtgagccaccgcatccagccagaaaaatggttttaatccctatttctctttcgcaaaaaaacatacagttgacagaataatcctgttgtttatgttgtacagaatttattcataatggggtcatattttctgaggcacttagaagcataggtcaccatacttctcagtacttgatgtaagtgctagtgctgcttaagtaaagctgaaaatttaccctccagaatagacaccattcaaaaaggaactagatcaggagtaggacttgagcaatcaatgtctagtagctgaaagttacttgatgaattatattaagataggttgaagaagttagactatataagactgagatggaagaatttagattttatataaacataaatatattttatataaatgtttctcttctatggaaatgtttctttatataaatgtttctctttaggtacaatagaagcttattagtttattagttatttgtcatataaattatatatgattatatttattagttatatgtcatatataaatatataactaataactaaatataataaatataatcatgcacaatatataattataacaatatataatatttatggtagttaaaatatgtatatatttttattttttagtgggtagaatttaaacttcatagaaatgttttcagattttcttcatagccattttggtaattaaaaatattaa

SEQ ID NO: 130555 - DNA, 3148 bp, Homo sapiens
ccttccttctcaggtaccttagcaagattctgtggtgcaaatgaactttcatttgtttcttactggaatctccctctttgggcatgtaggcatcaccttatgtatactcctaagcaggtgactgcttcactatggtttttgttttcaaatatcttcagagttagtttctgttcatttttgtattttgctcattctcttgctgtttttagagtgaacctcagagagatgaagaaggcagaaaggtctttgccgcactgtcttaaaactggaagtttagatattgactttaaaatggaatatgcaggaatacctatgttttaattgtacaaggtcattgttgcatgttctctcaatgtcagtgataatattattgtggtattttctttcaactaagaaaatctaatgctgcctttaaatttatctaaagaatctttctttttgattgacagggtggtgttggtatccaactatacacaaaccttgaacattttacaagaagtatgtaagcgtcatggatatgcttatacaagacttgatggacaaacaccaatctctcaaaggcagcagattgttgatggctttaacagtcaacactcttctttttttatttttttgttaagttcaaaagctggtggtgtaggacttaacctcattggaggatctcacttaattctctatgacattgattggaatccagccactgacattcaggtaggaatatttatgcattaaatagatattattgaatgcctgaggatacaatgcctattgaggatacaaagataatgatgatatataatatccactgcataaagagcccttattttgcgtgaggcactctcctaagtgctttccatctgtttaatcctcctaacaagcctacaaggatggatattagtagtcccattttacagatgaagatatagaagcttgttctagatcccacagcttgtaagatgcagagccaggattcagacctaaacctgtatgtctccaggttctagtttactgcagagttggcctttagggtgttcatgaccatcaggtgaagacaataaagttacagatgctatgattagtgtttatgcaggctatagtaagggtataaaagtaacatatttaggaaaatgtttgagaagcctttggttttctttagagtacagcccatctttttgtatcttgagttttctacctgtaggtttgcacctcagttggtatgtgcattgggggatcccaagacaaccctcaggtttaatgattcactagaaggactcaactgagaaaagcagctatactcacagttatgttacattatagtaaagaatactcaaagcggtaaggaaaaggtactgagtccagggcagagtccaagagagaccaggcacaagcttccagttgttctctgccagtggagttttatggacaacacttaattctgtcggcattggtgagtgacagtgcatatagaatattgtccaccagggaagttcatccacgtcttggtgtccagaattttgtttggggtcagttctgtagtcatggaacacctgcatgactgaccttagttaatcagtctttagcctccagaaatcaaactacatgatccaaggccccaccatataacattgttagcataaactatctggtgtggcccaagtgtctggtaaacagacactcatatcaggcaggacattccaaaggcctagagatgatctcttagaagttggttgaaggccagatttttatttgaaatgtgcagggtttgaacatcaacactttaatgcacagtatcattgataaatctttaaaccacagggatccacctagagccttagctgattacatgtatcctaggtagttctcaggggcaaatctttagctatttggactgagaatgaacctccaagcccatgctacacttggttctttccattcttgctgtccatactcactgtcccattgatgaagatctattctctcactcttgcatgatactcttgtagttattttacagtaccatagtaagtgttcactcatccctttctttctgccaagaaaaagctatgaagtagggcatgcttcacacacctgagatttgttttctgaagctgtatgtaaaatatagaattccgaattttaaaacatatttctgcaaattgcatgtgtggaaggggccattagtttctactgtactctcagaattctcacttattttctataggcaatgtctagagtatggagagatggtcagaaatatcctgtacatatttacagactcctaactacaggtaacaacccttcagtgtgacaaaaatgtatactctttgaataattaaaattattttttgttagcctgtgcttcagtgtcaggaatatattgttattttattaactagtatgttactaaacattatacccaacaaaaataatgaacataaagatctgaaggaaatctaattaatgttttctctttaggtacaatagaagaaaagatctatcaaaggcagatcagtaagcaaggtctttgtggggcagttgtcgacctcaccaagacatctgaacatattcagttttcagtagaagaacttaaaaatttgttcacattacatgaaagttcagattgtgttactcatgatctgcttgactgtgagtgtacaggagaagaagttcatacaggttagttatattttaattctgttactatgtagtaaagttaatttatttcttgttagcagttgaaaatatttaaagaataactttataatatttaccatttgcatatgttagttttatttttttctcagctcatagggcagctgccagatagagatatttgagaaaatattcagtagaatcttttttttttttttttttttttttgagacggagtctcgctctgtcgcccaggctggagtgcagtggcgcgatctcggctcactgcaagctccgcctcccgggttcacgccattctcctgcctcagcctcccgagtagctgggactacaggcgcccgctaccacgcccggctaattttttgtatttttagtagagacggggtttcaccgtgttagccaggatggtctcgatctcctgacctcgtgatccgcccgcctcggcctcccaaagtgctgggattacaggcgtgagcc

SEQ ID NO: 130556 - DNA, 1134 bp, Homo sapiens
atcattattttgttatttaggagactgtgacttcacttaattaaatggttatgctaaacatataaatagatcatggttggtttttctgtccctatactcatattttatttcttttaaaatttgttgggaagcaatgagtaaatggtttatcattatgaaatctttaatgttcattttaagtgtatttttgtctataacactttcatttaagtctgctatttttccataggaagaaaaggagttaggagaaagaagagcagctgaacttacttgcctcactggactctttatccttagaagaacccaagaaattataaataaatatctcccacctaaaatagagaatgttgtcttttgccgaccaggagcactacagattgagctttatcgaaagctgttaaattctcaggttgtcaggttctgccttcaagggttgttggaaaatagtccccatctaatatgtataggagctcttaaaaaactgtgcaatcacccctgccttttgttcaactctataaaggtaagtgcatagtatctgaaactgtgtcagggatatgagggttctatagtatatgaatctaagagggcagacagggctaatttctgaggttgcatttgtgggttttcaaaaagctctgctggctatctagtatggttctgctgtagagcttatccagcctttcatttgttcttcagagcatgtccacactcctagagctgaagtagggaagagatgagtttgaggtactgccttctatagtttgtgcccaatcccctttggcaccttatctaatacttggcgatcgtctcccttcctattttatgttaatatagtctgtcagttttgtttgtttggtgctgacaaatacaaaatgtgccattaaaaataatttatttttttctcattttgaaagtgatacatgattgtgcataaaatttagaaaattcagaaaatcacaaagaaaataaaaatcatcttaagctcaacccatggaaaatcacattttggtattaataatattagctaacagttattaagcactaattatatacaggttgagcattcctaatctggaaattagaaattcaaaatgctccaaaattcaaaactttttgagtgccaacatgacatca

SEQ ID NO: 130557 - DNA, 2799 bp, Homo sapiens
ctggatcaaattaagaatataaaatttgatcttctaatctgtgacgaggggcatcgtttgaagaacagtgccattaagacaactacagccctcattagcctttcttgtgagaaaagaataattctaactggtcagtattcagtttggggaagatattttggaatttttgcctagtgaacatacagacttgtactatgatgcttaacattcaaataactggtggtgttggatggaatttatactaataaacctgtgttaattaactcttggtaggattctgaatcttcaaatccatgtgtaattttctgtagcccagactttggagttttttaggaataaacacaatgatatcatgataaggaatttaggagatcagactggattgcttgtgcttggttcccgagtctgacatagctgtacaacttggagcaaattatttagtgtctctgtgcctcagtttttttaaatctctaaaataggaatgataataccatctaactttgtagagttctcatgagggtcagaggagttaatcaatgtaaagttcttgggaaactacctgacacgtggtaagtgtttaatatcagttatttataactacctgacatgtggtaagtgtttaatataaatatcagttatttttatatgtatatgctacatatgcatggtttattgttggacagagcttctggacccaactgtctggaaaggtggaatggatggtaaatacgagaatcctcttctacctttttatttaaggcctagactggagtatgatctaagtagctcaatgtagcttttctcccatatctcatcttggtcttgtatggcccttccactttgccgttgtgtcagcagaataaagaagagaattgtattcattactaatatttacaattcccctattttctacttggggcttcattttccctaccatcttcagcccttttggaaggaatggtcaggatatgattattcttactgtgtcatcgtcattttttccttcatgtgtcgtttatgcatgtcacagctctctgaagttaaatgaagagagagaaggagtatgaccaaaaacttgtacctccttcctatactgatagggtggaaatatgccccagaacaacagagaggagaaaactcctcctcttctgttcttactgtgttggggtggggaagactatccacctttaagaaattcctcatgatttgacttccaatttgtataggaggattgtattaaccattatcaaaagcgatttttaaaatgatctgtgctttaaaaaaatgattttgggaaatgctaaatgacctttttattttttgaatttaatcacgatgataaagacaaaaggactagggtcaaatttcatagttatacccccaagattttctggatgcccaatgaatgtttgtcagtaatagtgaagtggaaaccaaagaataggaaaactagtgttgaatatttataaaatgccatttttaaaggaaaaaatgagtcagggaaataggaaccatactctgaatgattttcatatctttggctgtttgagaagctgagtggattcgttatacttgatttccagtgctgcagttcagatttctttactggcctttgatcttgagatcactggagccagaaaagtaatgaaaaaaaaaatgagttagctgaatttagtaacactgagttagaagagaaaaagactgtttcttcttactgcttaaggatgggggtcagtattgcttatttaaagaatagttgcagatataaagtaaaaatgtttagcactagaagggagaagaaaaataaataaaaaagaagagtgagaaataaaatatactgaaaagtactgaagataagaaataaaagtagttcccttcctcacttgaaaatcataattttctgtagcaaaaatatataattttattgatatactcaatgataagcaaatactaatttaacattccaaattaaatttaatctgcagtagaaaattgatctaggatttcattcaacaagaatgtcttgatagcaaccagtgagattgtttcatttgaggcattagtattgtcctctgtatcctttgtcaatcttagcttgtttctgttttgctgtccttatcactcttatcccctgagctatgaatttaggtaaaaactagccctaactaacctttttaatttagaaatactcatagttggtttctgtattcttagaattgcctgaatgaagtctttgcttttatgggcaggacgttttaccccaagatgatttgttccttattatgaaagtacatgtttgtataggagtatgtacagtgatatatacatgataggtgctcaataactaagaatcaaatgaaaataattttgattttgtttcctcatattatctagcccagtgctgtggagttaatatttactggaaaatggttaggattcagtttgattgatagaggggtattagtcttgtagcactgccatagcaaaagaccacagactaaacaacagacatttattttctcacagttctcgagactggaagtccaagatcaagatgtcagcaggtttggtttctattgaggtctccctgcttggcttgcagagagctgccttctccctatgtcctcatgtactctatcctctctgcaaatgtattcgtggagtatctctctctcttcttagaaggacaccagtcatattggattagggccccatccttaggacctcatttaaccttaactgccttcttaaaggtcctatctccaaaaacagtcacattgggggttagagcttcaacat

SEQ ID NO: 130558 - DNA, 1056 bp, Homo sapiens
cattgctttcgaagcacttttgggtatatgaagtttggaaggctcttcgtaattctttgcatgaaatcgttcatcagtaaggcatgagattttctttttaaattttgtgcccttgggtaacattactgtgactaaattttggacttttttggccacaaatgatggcaaacatttctatcttagggtaatgaaaacaagataatgttggttgctgaaaaagtgaaattacaatacttgtacttttatcattttttaagattccctcgttatgccacgaccagataagaatcaccagtgggtattcaataagaactgtttccctcttgtggatgtagtgattgatccttaccttgtatatcatcttcgaccacatcagaaagaaggaatcatattcctttatgaatgtgtaatgggaatgaggtaggaaaataaatcatttgtttaatctaatctgaattttgatttaacctgtaacacaataatggttttctaagaagatcctaatataatgagtcctgagggtacactatgaatttcaattggtaggaaaggtgaatagtgcttactgtgtgcatttattccaaaagtggttcttgatagatgccacgtgccaaacatactgctaggaggtgggcatatgggaatcaggaccacggtccttacttttaagtggcttttaaagtatttgagtaaacagataaatgcaattgaccttaatgtggtataataaaagcttaccgactgctagtgtggtaaagggtcataagagcaagtgaaagaggcttttaattctggttataagaatttttttttttttttggagacggagtcttactatgttgcccagactggagtgcaatggcgttatcttggctcactgcaatctccatctcccaagttcaagtgattcttgcatctcagcctcctgagtagctaggattacaggcgtgctccaccatgcctggctaatttttgtatttttagtagagacggggtttcaccatgttggccaggctggtcttgaactcttgacctcaagagatccacccacctcag

SEQ ID NO: 130559 - DNA, 1656 bp, Homo sapiens
gctgaaagcaattcgcttacggcatgatctacctgaatataacagtctctaagtttttttttcaatcttgcaatttgataattttgattttggccaaattactttaatttgggaatatcctgaaacagaatacacgttcttgaaaaatgttgttaatctctattatggaaaaactttttagatataattttctaattattttcttttgagatattaaaatttactggttggttggcatggttatagtttttattgtcttcttttttttttccctaagtttaattgttgaccttacaaaagatattttattctgatcactaagatatacacaaatgcatatacaaacacatattctttcaaagttctgagtcttcaacatttttagttagaactttgaaagctataattagagatttttaagtcagtctaatttaggagctatactaacctaataccaagaagcttgtctgtatgacattggtttttatgcttttatcttttgaaggagtaaatcctaggattttagagatggaagatatttggagaacactttttttccatctctgcagtttaggggtaatgaaacaggtccagggagaactcaatgacttacttagggtaacaaagctatttatggcagagcagagaccagcacttagtttttctttgtgtaatttccatcccgctattcgatagaagtaaatatccactaaaacattctctagatttaaatattagaagcatttctttcattaaaattgcctttaaagattgttaggttgtgaaatcaggataattacatcaattacccccattctctctctatttttgttccagcaaaatagataaggtattccattgaagctattatatattttggctgtgtgatttaaagacatgtcttaattcattttgaatgtcctgttctggaaaaaatttctttcacagtaaaaatcagaatgaacaaaattaaaattttatgtattttataagtattgttattttagtattcatggaaataaaacctcaattcttaaagcatacatattaaatttatattaaatctctaatatgtatgttacttaagaatttctatttttgctggggttttgttgagaagggatttttaagccaagttgtagaatggggtgggtgtaatttcagcagtgaaggggaccatgggtgtttgaagtcaagagtgagacgctggaaaaaagacaaaagaatgggaaaaagtggattgagtatataagcacaaatgcagtgctaagccattgattttaagtgaatgtagagagagtcaatttgggctgtagtatcctggactaggaaggacatctccctggactaggtagggtagctgctgtttagctccagcagaattttcacatgcggggataaaccagaaatctgcattttttaatgaggaatcttccaattttaaaatgtttgcaaataacacaaaatgcttttaaaacattatacagacaacatgtgagtgggcctcactgagccattgggcttccactttgtggcctttggagtagaccaatggttttccaagtatgggtcctgaccagcagcatcagcatcacttgagaacttgttagaaatgtaaatccatttccaagtgaattagaaaccctgggggtgtca

SEQ ID NO: 130560 - DNA, 1475 bp, Homo sapiens
acacaactaaagggagttaatgcctaattagggattcagtttacttaataaaattaaaagttttttgttgttgttgtttttattccttaatagtctagtttcactttgatcttgggtcgtataggaaagagtaagctttctcttactgctttgcaaggatatcaaattatgaattttaaaatacccctaagagcaactgggtttttttagagttagaagcaattttttggttaaacttgtcttctatgtaactatttgccttggaattttcaaaagtattatcttgccactaattcagattgtaacctctggcaaaatataaaaatggcagctacattcttattctgaaccatttagggtaatttaaacaaattgtaaactccttgttagtttgaggagcctttcaaacaaagctttacacaatgtgcttttctattggtggaagaggcattatataagcaaattattgattactatgaaatccctttgaaattaggagagaagcagaaaaaaaccactttgtagccaagtgcatatgttattttggtaatttactaggaaagtatttttgagcctagcttcttaccagatactgcttatttctacttgatagcacagtaaaaaaaatatcaccagtgggaatccaggacatgaatacacagtggattaattcttggggccactggttaaaatgttcactgtgatgacaaatgatgaaatcccaatagctagatatccagaaaactacgcagtaaaattgttttatactgtgctacttatgcagaattttctctcccttgaaccatggagaaaagtgttttttgcatcgcaggtataaaactgtaccctttggttagtaggtataggtttttataatttgaaaacgacatgtagaaactgtaattttagttagttgcatattttaaaaataacagtgagtagaagaaaaataatatataaatatacaagtatctggttacattttgactatttgtgtgtgtgaatatttacaatattcacacacaaaaaatcttttgggatatgaacatttctctgataaaaatgagttgatttgtacatttctatacctatggcttaaataataccaatttgttaggttttaaagggaagaatataagaaacatgccttttaaattcttatgttactgtgtctacattgacattttctctgtattagcttatttctttaatatatatatttaatgtgcttatatttatttgattgatatcatccttgaatcttaataatctcagaagtttataattattctataatcttaactatacttctacataaatatgcctgttaatcttaccaaactcttcctttttaataaggaaaatactagtgtttgcgttaacatacttaaaaatatatacctgttttgtaaggctatttattttctgtaactcacattgacttatgtctttatttttacctcttcctaatatca

SEQ ID NO: 130561 - DNA, 1475 bp, Homo sapiens; identical to SEQ ID NO: 130560

SEQ ID NO: 130562 - DNA, 1060 bp, Homo sapiens
aaaataggtttgtcttgcttacattattatgtatcatatattttcatactggggttaacaaatatattctaagcaccgaaactggtggccttgaaaatggctagactagctgtttcctttcatagtccaaactgtgtgaatatagctaaataaaaaatctggctctattataatagcaaatgtgattttgtatgtggagtcttaaggcgtgattatactgtttctcaccatgaacagtgattttttacacatgataaggcaggctagcaaattcacatacattacggctagaataatccattgctttaaaaacatgatttttacctgctttttagattgagtgttctataaaaattttttcttaagtgaaaaaaatatgcagaggctaatgtagactgtaaaatgaaggagaagcttagctttactgtggagtctgggtctgggtgtaacctaactagctagaggatatgcaattcctgattgacagcagatccagcattatgcagattttgtaagggagaacactcagctcagaaacagtgatgagaggctctgttaggaattactacattcactactcatatcttttagttttctgtctactggatttgtaaataaatagcacaaaacagttcctcttttgtttttattaaagtgatactgcaatgcagttcagtctgtcagctaggcatacatgtgtgaaatttgatattctcactaaattagctaatttttagctgtgttccatgcttatctctagacctttgtgtattaaatcctgtctcgagctgttccctttatacacaagtgtgttttgcttgtgccttcctgtcttcttcagtgagaagctttatgtaggtcaggcttggcttaagcagatttcctgaacctgcgtcagcttaagctggaggaattttaataaaccctcccctgtaggcgtgggcctaaatgaggctagcctagttaagcctgatctttttctgtttgtgaaaagagctgagcagagctgaaggctgcatggtggtttcagaaactgcctacttaatttgaaaagaacaat

SEQ ID NO: 130563 - DNA, 1041 bp, Homo sapiens
aattcacccgcctcggcctcccaaagtgttgggattacaggcatgagccaccatgcccagcagatattaatttatttttaaatatctagttctagtttatatatataaccagtatgtcctgttttaaattagaatcttttatgtaaaaatacagaaaatacagaaaattaggtttgagttctgatttaaatatatatttgtttcttttagggtgttgcaattaataacacctttctcccgtcacaaaatgatcttagaatatgcagtttaaatctgcctagtgaagaaagtactagagaaatcaataacagagataattgcagtggaaaatattgttttgaagcacctacactggcaacattagatccacctcatacaggtaagactgctttttattgataaggtttatgcttgaccaatagtattacagtattctttaaatgatgttttaagaatgaatatgttatattagaaaattgttgatgtaataccactacattgttggtagttcaggttttttgttgtcataatttatctttagtgattggattaataactgtgtgattaaagtgctttatagtagatgtatgcttaagactgttgattataaacttggtcaaatgtgatcttttcctcaagaaccaagattgtgtttaaagataggatttatacattttttttctaaaaagcatgttaataggactaaaattggagagttgaacttgaaagtagttacttgttaattcattagagtctggagtacttcaaatcagagttgaattattatgatacatacttgcatgaaaaccaagcatttaacaaatgctccatccctctattgttgaactgagttaaaataatgattatggttctttttgtatatgtaagagaacactatttgttaggtaactaaaaaaataattaagatggttcatagatgtttatttggtcttgtgaaagccatcattagactgtatttttccaaattacattttattcatgttttggttgaatgaacagattcagccagccggccccatc

SEQ ID NO: 130564 - DNA, 1046 bp, Homo sapiens
ttagagttcagtcctgtttcccctaatctgaggtctgtgtgccagtagacagtattttccatttggtggtggtctggatttctgaaaaacaactcaaggacatatgttaagatgttacctttagtttctagagggaaccaaacattttgtcaatctaacttccctcaccattattttaagctattaccttcttgctaatcatattgctcatgtacttttcagggctagctaagtgcctggaatttcctttgaaggaactgaagattttccttttgtttctatgcttggggggccaggcaggcccataagaggggtttctgttccatcttagttgtagttttgagctatttttatatttgggggtgattgtaattagattcgtggatagttaactgttttgggtatttttcaggtcacgactgctgaatatgagacgatctgcagcaccaagtcagttgcaggggaattccttcaaaaaaccaaaatttatacctccaggaagaagtaatccaggtctgaatgaagagattacaaaactgaatccagatataaaattatttgaggtaaggcaaaaaaagactcatgatatagataatatagagaagcatgtatgtttaagaaaatgccatttaaagagttaacagtattttctgcctgtaggaattttcagtatctctgaaaacatcttctaaaaaccttggaaatgaagattacataatttttttttaaaaggaataacaggctgggcacagtggctcatgcctataatcccagcaccttgggaggcagaggcgggaggatcacttgagctaaggacgtcaagacctgcctgggtaacatagtgagaccctgtctctacaaaaaataaaaatttagtggggtgtggtggtgtgcacctggagtatcagctactcgggaggctgaggtgggaggatgacttgagcctgggaggtcaaagctgcagtgagctgtgattgtgccactgcactccatccagcctgggcaacacagcaagaccctgtctcattcaatcaatcaatggaata

SEQ ID NO: 130565 - DNA, 1022 bp, Homo sapiens
acaataaaaataagacattgaaggaccaatttagacttagcagttatctggagacatctgagagaatatttttatctgaagaaagcagaatttgtttgatacctaacaagatttcaataaaaatccaaactttgtatgtacgtttgtatatattttcccttttttgtatgactatttatttagaaaatttctaggtgaaaaactaaatgatgttttgtatttttcttgcctatagcacagatattctcaaactttctcagctcatgacactatttagtgcctcagtacttttttcacagcatacctggtccaaaagaaatatctaatacttgtgtttattaagcagttagatccaacagcttaataagaatgtacatcatcaccactagtaactgtggacactgcatgtctcaaaccttggaatcagtatcattttcttttcctctctgcttcttgcacagtactttttatcaaactgctgaaaacccagttttgtaaagatatgttgttatagaaaggaatataatgctatttaatgttgaaaatgtaaactacctcaaagtagtagtttatgtgatgtccaacaggtgttgctatgtttttctcaaaaattttaaaatattgtgtggcacccatgttaatttgctaaggtgccctgctacacagtttgggaaccatggctgtaccaaaagaaacaaaatactcctctcctttgtattagaaatctgaactttgcatttcagctttggacctactgacactattttattatacaaattatttaaagcctaaaataaggaatatcctaatactattattttgggaatcagaaacatctaataaagctggactttatacatagaaataaagcttacaactttgagaaagtagccatattttccccaagatacgtcttaacacactgagtctatataagtggcgtaaaatacagagttatcttaatcagaaaaggagtgtatgagtctcattccatccttttatcaatctctgttttggagaac

SEQ ID NO: 130566 - DNA, 1025 bp, Homo sapiens
agtaggtttacagacataagttttacctgcaccttcttattctgcctttatttgtatctaggaacattcaaaagatgatgacaatctggattctttgttggacagtgtagttggacttaagcagatgctggagtcatcaggtgaccctttacctctcagtgaccaggatgtagaaccagtactttcagctccagaatctcttcagaatctgtttaacaataggtaaaatacacaatgttttatgattgaatagctgttggttttaaaatggctgtagtctagggggtgccagcaaacgtttttttctataaagggccagatagtaagaattctaggctttgcaggccatacagcctctgttgtgtattcttctttagttttttttttttttttttaatttatacaaactatgctagcttgcaggctgtacagaaacaaactagcagataaaatcagggcattgttttattttactgaaaggtcaaaacttgttacagcagaattagttttcaagttatttgtttttgaggatacttaatttttaattgcttttgggagtttcttttttaggtactacttttaataatactttagaaagtaataattttaattgtaccttccacagattttacttgaagataagctaaaagactgggcatattggctcacgactataatcccagcacttcggaaggctgaggcaggaagatagcttgagctcaggagtttgagactagcctgggcaacatagggagaccctctctctacaaaaaaattttttttaattagctgggtgtggtggtacacacctgtggtctcagctactagggaggctaaggtgggaggatcacttgagcccaggagatcaaggctgcagtgaactgtgatcgtgccactgcgctccagctgggtaacagcaagactgtgtctcaaaaaaaaaaaattgaaatttgattttagaattctgcttttcaccagatacttttcttgttccaggactgcctatgtgcttgctgatgtcatgg

SEQ ID NO: 130567 - DNA, 1050 bp, Homo sapiens
ctcgctgcaacctctgcctcccaatcgtttaagtgattcttctgcctcacctcctcccgagtagctgggattgcaggtgtgtgctgccaccccccgttaatttttgtatttttttttagtagagaccgggttaccctatgttggccaggctgctcttaaactcctgacctcaagtgatccaccaccttcggcctcccaaagcgcccggattacaggcgtgagccaccacacccagcctcttgtgttaaattttataaaatgattatttgggggaatttttttttaagatcttgaagcttagctttaaaaggagttggtaactattgacggttctttgttatatttgtgtacaaagacacaccaaagtacttcttagcatttttaaaaatgatggagtaagttttattctgtctgaagtgagttcatttatcataccagttttatatgctcatattttaagataatatcttctctttattttctttatttacagttctttaaggaaaaacagtagtgctctgcatagtttactgaaacgagtggtcagcacatttagtaaggacacaggagagcttgcatcttcatttttagaatttatgagacaaattcttaactctgacacaattgtaagtatgtgtgtgtttgtgtttgtgtatatatgtatgtatgtatttggtgtttcttaaatttgaaatctttggccaagtacgatggctcacatctgtaatctcagcactctggtgggctgaggtgggaggatctcttggggccaggagtttgagaccagcctgggcaaaatagtgagaccctgtcttgaaaaaaagagaaatactttgccgtaagttaaatcactttatatattaaatatccaacataaaaaagatcactttagttcattttattttattttattttattttagatagagtctcactctgtcatccagactggagtgcagtagcacaatctcggctcactgcaacctccacatactgggttcaagtgattctcctgcctcagtctcctgagtagctgggattacaggcacct

SEQ ID NO: 130568 - DNA, 1109 bp, Homo sapiens
tctcaaaaaaaaaaaaaaagaaaaactttatttctctgaaaagtttctttataaaccaaaaaagatacaaatgaataaataatacagtaagttaattattttagtacaaaatactttttacctttaacctattgaaaacagaaactatacttactgcaatactgaaagaaaaaaaatttgaaagatgttgttttaaagtaaaagtaaatcaaaatatttaaatatttattcctttaggtgtgtatccttgtattaacttttttaaaagggaaaagtaatttcattattcttaatgtgtttatatgtttgggatgggacagtagcaacaatattttaatgagatagttattgaatattaattgctatgtatttctcaaaagtgctaagtgatggtgataattatttaaaaaatcgatttttttttccctgctccccacaggacattgcacttatcttaccaagctcttctgaaggttctatttctgaactggagcagctctccaattctctaccaaataaagaattgatgacctcaatctgtgactgtctgttggctacgctagctaactctgagagcagttacaactgtttactgacatgtgtcagaacaatgatgtttcttgcagagcatgattatggattatttcatttaaaaaggtaatgatttgtctaatttaatatactctcagatttaattttttcattctgtcactgctccttcaccccacattaattcatacctattgtagaaagttgaagaaatgatttctttcgtgggagaaattttgtgtgtatggaaaagattaattagcaatgaaaggtcatgctaataatagaatcttttggattaaagatataaaatgaatagatacacaaattactgtgggcatggtacagtatctggaaggaaatctcactgttccagggatggtaattcatgccttaaggtctttgtttcgttgttgtatcctcagaagtgatggatgctagagggattttatagaccttaaagctaaaatgcagattctgtgtacagttcctcagtatctatggggaattggataccaaaatctacagatgctcaagtccattatataaaacggtacagt

SEQ ID NO: 130569 - DNA, 1625 bp, Homo sapiens
ttcttaaaactatgttaacggaactcctgagaggtggatcctttgagtttaaggacatgcgtgttccttcagcgcttgttactttacatatgctcctgtgctctatccccctctcaggtcgtttggatagtgatgaacagaaaattcagaatgatatcattgatattttactgacttttacacaaggagttaatgaaaaactcacaatctcagaagagactctggccaataatacttggtctttaatgttaaaagaagttctttcttcaatcttgaaggttcctgaaggatttttttctggactcatactcctttcagagctgctgcctcttccattgcccatgcaaacaactcaggtatcacttccatataacatgcatcttataaatgactgcagtaacactttttaaaaagccagtgattttgttaaaaaacaaaaaccctcatctcccttcctcccaaaaagacataaaataaccggatgagggggagataaaactgaaacaagttggtcattgaggaaatatgggggtaacattttaaataaatttttgttaaagtgagttttattttgctgttatgtatgtttgtacttacatttttctgttattttaaatcctttcccccacaccttaccatgtgttagaatttgccaataactagattgcttcaccaatggactctgctcaactaactgctaacctgagaacaataagattttttagactcattgaattcaagcaaatgtttaactgtataatagaaaattaaatgttttaagcatgcagtaaaaatgttcttttcataacatttcttcctgaacagtttttgtgactataaataaatattaaaaaatctacgtacacacacattatacttttttaacaggttattgagccacatgatatatcagtggcactcaacacccgaaaattgtggagcatgcaccttcatgttcaagcaaagttgctccaagaaatagttcgctctttctctggcacaacctgccagcccattcaacatatgttacggcgtatttgtgttcaattgtgtgaccttgcctcaccaactgcacttctgattatgagaactgtgttggatttgattgtagaagacttgcaaaggtattttcattttgcattaaaaattttttcctcaaattatttttgacacatatattttttcccttacaatttggaaactagggtttggaatgcccagataacatatatacatgtaaatatacacatatacctacatatgcacacatatgaatatatgaatacttgtagacttttaaaattagaaagctttatttcatcatttcatgtgcaagatatcttgaaggtcttgatttgggattttcaaatggtgaatcctaaagaagtactctgatttaagaaaatatattattagaaacctgaatttataaaatttttgcagtcattgtaaaattccagagaatttgtcattatacccaaggaattaaatgttttatgcaaaatttgtgtaagttgatgtgtattgagaaataaatactagttaaacaatgccttaaggtcaagaactttgtttactaaatgtatcgattttatttcagcacttcagaagataaagaaaaacag

SEQ ID NO: 130570 - DNA, 1039 bp, Homo sapiens
gagaagacttgccactcacattatgttttcagttaaagcagtatattactgaggataaggattatggtcattaaaaatttttatcagtgtcttgtctgaatattgagtaaatgaagaatgctttgcactgacttgacatgtatcaattaactcttccacagatatcttcacagtcatcacttcttggagttggttaccttgcttctgtcaattccagtaacaagtgctcaccctggtgtgctgcaagccacaaaagatgttttgaagtttcttgcacagtcacagaagggtcttcttttttttatgtcggaatatgaagcaacaaatttattgatccgagctctgtgtcacttttatgatcaagatgaggaggaaggtctccaatctgatggtgttattgatgatgcatttgccttgtggctacaggactcaacacagacattgcaatgtattacagaactgttcagccattttcagcgttgtacagccagtgaagaaacagaccattcagatctcttgggaaccctgcacaatctttatttgattacttttaatcctgtgggaagatcagctgttggccatgtttttagtctggagaaaaatctccaaagtcttattactctaatggagtactattccaaagaagccttggggtaatttcctacttactccttaaattttctatgatgttagaaaatcagattaactaatggtctagtttcttaaaagaaggtgttattttgagagggaaaaactatagttttgatataacacaaaacttgttaattaaaggttagagtgacagaaatctctaaaatataagatgtggctataaagtaatacagtggactctttagcaccttccttcagttaacccatggtgttaaagattgcaactgtagtaccccctgctgttttatgcagaggggaattctaaggcacaggaatacgtaccttaaggtatatattccttttattcctcttacactttcttgctggctcctgcccttgcattctaaaccatgctctggattcagaa

SEQ ID NO: 130571 - DNA, 1064 bp, Homo sapiens
gatgaggacaagagtacaagtgtaggagtttggttttgggcaggagaaagggaatcttgtaagtatgcaaatataatacatttgtagtcttggagattgtaaagaaatttaaatacttcttactaacaactttatttttagtagaataggtgatgttttcagtcactgagaagaagctagtaattaaatacttactgagtgtttttttcccaccatatggaggaggtatatttgggtatcagacaagaggaaataaagggcccagaatggttgtgctaaggaatttggattttatttgtagaatatggaaaggtattgaatattttggagtagcagatctgatatgatcagagtaatattctcagattttgtgttgcaagatgtattgcaatggaaaagaaattagagttactaggaagataagatagtctgaggtttctaggtactgggttttaagtactttgcccttaacaggtaatggaaaggcaaatattgtgcttatagtgacagagattgtgaaatagccattatattatataatagtactaggacttggcaacaggacctagtaggcgaagggaagtgagaagaagctagagatttctagccagggtagcaattggagctgtggttttattgacagaaactggtaaattaggaaggagagtgaattttgaaaggaaaaataattgtactttggagggtttgtttttgaagtggtggcaaggctctattgtcctatgtcaggttccccaagagcaccaagattctctaggaggactcacaaaactcagcatataatactcagcaaaggaaaaaggtacctgggaggaagttgggaaaaccagttgcaagcttccagagtcctctcacagtggagtcacatagtgcctgcctaattctcacagcaacaggttgtgacatgtgtgaagtgttgcctgttgaggaagctctttagaaactcggcacccaggcttttttattttttatttttaaatagcaacagtgacatgttttgatacatgtatacattgtggaataattatatcaagctaattggcatg

SEQ ID NO: 130572 - DNA, 1055 bp, Homo sapiens
cctttcaggaaaaaaagaagtttgtccataattctattagaaattataaaatgttgtaaaattgtgggtaagatgttggggcagaagttggttttgttgaggaaatcatttttaatgttttattaaaactatttcttgttcaatcagaatttatgtattagacaaagatgatgtaatacttaaatattattcatactaattttcaggggatgatggttatgaacaaatttccagtgatgaagatggaattgctgacttggaacgtgaaacatttaagtatccaaactttgatgttgaatacactgctgaagacttagcttcagttcctcctatgacatatgatccatatgacagggagcttgtaccactcttatacttcagttgtccatacaagactacttttgaaattgaaatcagtagaatgaaggatcaaggtccagataaagaaaattcaggggcaatcgaagcctcagtgaagttaacagaactcttagatttgtatagagaagatagaggtgcaaaatgggtaacagctttagaagaaattccaagtttaataataaaagggttaagctatttgcaattgaaaaacacaaaacaagactcccttggccagttggtagactggaccatgcaagctttaaatttacaagtagcgcttcgccaacctatcgccttaaatgttcgacagctcaaagctgggaccaaattagtgtcctcactagcagaatgtggggctcaaggagttacaggactgctacaagcaggagtgatcagtggattatttgaacttctgtttgctgatcacgtatcatcttctcttaagttaaatgcttttaaagctttggacagtgtcattagtatgacagaaggaatggaagcttttttaagaggtaggcagaatgaaaaaagtggttatcaaaagcttctggaactcatacttttagatcagactgtgagggttgttactgctggttcagctattctccaaaaatgccatttctatgaagtcttgtcagagattaaaagacttggtgaccatttagcagagaaga

SEQ ID NO: 130573 - DNA, 1885 bp, Homo sapiens
agtgagactcttgtctcaaaaaaagaaaataaataaaaataataaataaaataaaataaaaataagtatgtactggaaaagacaaaaacgtgtatagttacttaaaagctaaaaagaaagggaatggcttaacagtatactttattattgctcactgtagaagttgtacagtgtatactcaatattttttaaacagtgagtaattctttttttttaagggtatttataaactatatcaaccaaaatattaagtagttgccatatccagtcttgctgccttttgtcatttaaaccattaaaatagtctgtgccttaaatctcaatttttcagtgtctggtgacaaggaagaggatgctcctcatagagaagattactttgagcccatttctcctgatcggaattctgttccccaggaagggcaatattctgatgaaggagaagtagaagaggaacaacaagaagaaggagaagaagatgaagatgatgtggatgtagaggaagaagaggatgaggatgaggatgatcgacgaacagtagacagtattcctgaggaggaagaggaagatgaagaggaagaaggtgaagaggatgaagaaggtgaaggtgggttatgttagctaggactttggggtttaagtactagaaactaactcgatacagctttgaaaaatgcaaaagaatttctagcaaagataaatgggttccaagaaacccagggtcagaatgtagctaggcctcaaggcatgactagaaatgagatttccatctctcctctgctttgtgtgtttactttaatctcccctgtttaaccagccagcctaaactgcctgactgtatctcagttttctgtttgacttgctacagtatgagtttccctttgacagcatcagcttttgccaggaaaacagggtcatgtaacaaatacatgttggttagggatttggtggctgttttcagagtaaggagtggtaaagctaggtggaattcctaaagatgtctgccacctagatattttagcaaatgctacattatttttaaaaattcaagggaaaaatctcaattacacaagtacatgtggcagtatgatacagtcctttaattaggctttatttttcctttgaaagcaaaaagtgagagatactcaagctaattggctcttaatttgcccaagaaatggcatttaatgttaaagcatttatgcagaataacagataatctgccttggcttttttctacagatagtaaaaatgaatgtcatttcagaatcataggggctcttttaaaaaatatcaaatagctagattatcatgtgatttttttttaactttccccattcacagattatcaaataattatttctagatttattgtatttggcaaaagtagttaaatgttaggcaggcagttttctttttttctttctttttttttttttttttttgagacaaagtctcattccatgacccagactggagcgcagtggtgcgatcttgtttcactgcaaccttcacctccagggttcaagtgatttgtccctcagccatctgagtagctgggcttacaggcacgcacccctacgctcaggtaatttttgtatttttagtagagatcagggtttcaccatgttggccaggctggtctcggactcctgacctcaagtgatctgcccggcttggcctcccaaagtgctgggattacaggcatgagccactgtgcacagccatattttaaatggacacattttctatcaaaatataatggagacctacaaaactgtgtgataggtaaatgcagagaaataaaaattctggaatgtgaaattgttataaaacgaatctacaatggttttgctgaaagtatttggtttaacctgatgatattagt

SEQ ID NO: 130574 - DNA, 1035 bp, Homo sapiens
gaaactctgtaacaccgtctcaaaaaaaaatgaatagtgatagcatgcaaaaagtacttgattaaaatttgatattcagtaatacttaaaatcagctgttggctacttgagattggatgtgaataaaattacatacaatatcatagttaactatatttttgttatttaaatcttaggaacatcatattctaattctagaattgctcttaactttgtacttactatgttatttgttttaatttaggaagtgtttgttacaaaggctgatgtttcaactttgtttcatttacagagagacatctccccatacatttcaattagacttattcttcaacaatgtaagcaaaccaagtgcccctgttttcgataggttgggaaggtatgtacctgctaggtaatttcaccagaaactcatgagttagtaagcaacaccttttgattgattctttagatagaagaaaaggatgtatctgctggtagacccaagaacacagggtttaattgtgtcatggtggtattaaagaaatgtcaaactcctaaggagatgctaaatttataaaataaaaatttaaatgtgtgaaatagccattgtttgttaacttgtgactcgtgcatgtgtttcttatatacatgatactttcacacatgatagtaaccttctaatttggaaaatatctttgattcttaaattatatagacacattgagagctaatattttatgtgtgtctttcatatcacactactgtgcaatttataattccatagccacattttgtaaaatgaaacttttgttagtagatacccccttttttgattatttagtacatgctaggtagtttttttcaggttaggtattattaaacctgttgttgtgatgtctgcaaacaaatgaccattcaatgggtttacttagaactcataaaataaaaaaaactaaaggcagcttaaaaatgagaaaatgtctgtttctgtcaggaattaacagtttcttagacatcacttattctgttattgacccctctcttatttattat

SEQ ID NO: 130575 - DNA, 1063 bp, Homo sapiens
aaaaaacacttaacattacaaatcaagaatgcaagataagccaggtgtggtggcatgtgtgcctgtagccccagcctgggaggctgaagtgggaggatcacttgagcccaggagttgggaggacagcctgggcaacatagcaaacgcggtggctcatgcctgtaataccagcactttgggaggctgaggcagggggatcacgaggtcaggagattgagaccatcctggctaacctggtgaaaccctgtctctactaaaaatacaaaaaaaattagccaggcgtgatggtatgcgcctgtagtcccagctactcaggaggctgaggtaggagaatggcgtgaacctgggaggtgggacttgcagtgaggctagatcgtgccactgcactccagcctgggcgacagagcgagactctgtctcaaaataaataaataaataataaaaaaatataaaaaagcacactatatctctaatgttaacatatacaatattagaaaaagttgtttaagttaaaatcagatttaagcaaggttatttggtaaacaagtatatgagtggaaagctattgtatttgtatattcctgttgatgagtgaattaatttcctttctgtatctctccctattgtaatcagcttttactttgtattttacactgtaattaacagctgtctttatattaatatttttccaaatcctctagtgaatattatgcttaaatgtatacacccgttgcccacgttaatattacaatactgtaatactgttttgtggtttcgtttttcacctaacaatgtgttgtacatctttgtgaatcaagaagtaatacacctatataatatttcaaaagtaagcttatttttttaaattttctttttttttttgactaggtaatacatgtatgaggtacaaatacaaaaggtacaaaagagtatgtggtaaaaagtaagtctcatcactgtcccctaaccatcttgtttctctccttagatattctatataatatccttttttattggctgtgtaatattctttaagtggtaatgctatatatattttttgaaa

SEQ ID NO: 130576 - DNA, 1067 bp, Homo sapiens
cctactgaaggacatcttggttgctctcaagttcttgcaaatatgaatagtgctgttataaacatcacgtgcaggttttcatatggacataggttttttaaatcatttttatttttttttgagacggagtcttgctgtattgcccaggctggagtgcaggggcgcgatcttggctaactgcaagcaccgcctccaggttcacaccattctcctgcctcagcctcccgagtagctgggactacaggcgcccgcccatggctaattttttgtatttttagtagagacggagtttcaccatgttagccaggatggtctcgatctcctgacctcgtgatccgcccgccttggcctcttaaagtgctgagattataggcgtgagccaccactcctagcctaggttttttatttattttggtaagtaccaaggagtgtgactgctggatcatatgggaagagtgtcattttttatatctcactgcaatttttgtgtttaaggcagacttttttccagggggaatggtgagggaaagcaatgaggccttgcatttaaaaaaacagtatgtggaacttgaataatatgcagtatttcaaggcatttatggaagatgaaagaaaattatagtgtggtcttttttttttttttttttttttgggcaaagtctcacttttgctcaggctggagtgcattggtgctgtaatgctatcgtggctcactgtggcctcaaactcctgcaccctaggcaagtagttgggactgcaggcctgcaccactgtgccaggccaatgttgtgtatttctaatggaagaggacactaaaacccaagttgtagagtcacaaagtctgagctgagtataccctgctacacagcagctttgctttcctgggagttacttgtgtctaccgagccaaactttaatcttgagtattccaaaatgaaagctttgtaagtgaagtgctatgtaaatgaaaaagtaggaccattttgatgacaaaagggtttaggaatttttttttcttttttttgagatggagtcttactctgttgcccaggctggagtgcaatgat

SEQ ID NO: 130577 - DNA, 1027 bp, Homo sapiens
ttagaaaattcagtttttagttagaagactaataaacttttctctttttttcttgctgtattttatcagctactcctttgttcattagcataggtattataagtctggcagcatgaaattgtgttactatacaataaatgaaagtaaacaaaaggaatggatttaatgtcttgtgacatttttcttatggcaaggaaaaatggctttcagatgacacttcaaattggagtaattataaaatagtttaaacttgtctgagttaatgtattaccttattaaaaacttagtttaaaaagatatttacaagtaaaaattggatgttctgaaaccagatgtgaccatttttaggtaattgggaaggataactttttaaagtagataagctaatattgataaaccataaaatttctctctgaattatatcctcagctaatgtaagtgtggattaaatcctcaagcctgtttcaccagtggtggtcataaggaaagtgtccctcctgttaatatatagaccaagtctctctagactcctctaacatgcatataaagttttacttgctcagttgcagcctgaaatgatgagttttgttcccactgcctctgcctgtacccttcctcatttccttgaggcatttctcatttgtgaagctggctaagcctgtttgtactgttgtgactgccttgagggcagaatgagtaagttgcatgaggagctataaattaggaggcacagactcatctttcctttcctcaagatcagacgtgcagcaagtaatccaatatatacttataaattgataagggaaagaattgctactaaaactttttttctcattcctctctgttactcgttttcagtgatgctaaggatcatagattgaagaaactggcctattgaggctgtgtgcgtgtgtgtgtgtgtgtgtgtgtgtgtgtgtgtaaggagatggcttgggcattcaggaggttgggtgacttttacaagttgttacacagctcagcaccactcatcctggtgtgacgctga

SEQ ID NO: 130578 - DNA, 1044 bp, Homo sapiens
acataacttttatatgtagtgggaaacacaaaaaattgtgtgacttgctttattgtgatattcactttaatgcagtggtgtagaaccaagcctaccatattttcaaggtatgcctctatttgatggaaatacatccttattttagagagattcgcaaaacttcatgtgaattcctggtttcaccctcaaaccaagtttgagctatgtgtttcaaagagtatacttttggtaaagaagcacattggcctgtgttggctctgagtgcttgaattgtttccaaaatttgctgtctagaactagcatctgctgtcatcaaaggtggactatcctacagggctccaaaagtgttctataatagaatttctaagcaaaagtggcattgtggaagtaatgtcacatcaataatctgtggtgtccatttcaaacattaggccaaaaaaaaagtcatttaataccttgtagtgttgataatgtcaccatatcatgaagtcggcatggtcattgccttgtgtgtgctgtaaagattcagaggatgaaatattctaattaactttgttgcatactttgattcaaaatgaaatgaaaatgctcagtattcatttgctacaactgggtaaataaaaattgtattcctggtaatatctcagcactggattgatttgcctcttttacccaaaagggcagttggagcctaagttgaatgactgactgatgggaggcagccattctgagatttctaaaggaagctcagctagatccatcttcttcctcttggcttggtataggtttaattttgatttagaagtaacctgattttacctttccaaagtgtttccttaatttaatctcacagatttaaattttgagaagagtagttcagtctctcgatatggagcctctcaagttgaagatatggggaatataattttagcaatgatttcagagccttatagtaagtattgcttttatagtagtgcagtcccagaattcatactatttttctcttacctatactcaaatttcctcctacaactttgtctccct

SEQ ID NO: 130579 - DNA, 2243 bp, Homo sapiens
cattctataagtacatttatttatttatttattttagttttgagacacttgctctgttgcccagctggaatatcgcggtgtgatctctgctcactgcaacctccgcctcccgggttcaagcgattcttgtgcctcagccttcccagtagctgggattacagatgtgtaccatcatgcctggctaagttttgtatttttagtagagatggggttttgccgtgttgaccaggctggtctcaaactcctggcctcatgtgatctacccaccttgacatcccaaagtgctgggattacaggtgtgagccattgtgcctggctatataggtttctactttaaagccaaggaaatagctggggagaagtatgaagtggtgtctgttagtgatcgcaggtagacctgtttgtaaatcactctaatgaattgagtgtgtgcttggtctctgaagtgaatagaaacttctgacagctttgcccatagagagagactttgaggccgattagttgtggagaaagtgacttattaagaaaatgtcctaggagaactgaaaatgtgaacgtgggagggataagacatcaaaaggtgtcaaaatatataataagtgatttgcaaatgagtcattaaggtgtagggactcacaggcatttctatggacattctctgggatggctccctggtttgatctgggggatattttaatggcagacttcctaccatgcacacacattcctcatgtgggttaattgtcagctttattctgatcctaaattcggctgctaaactggatttaaaccccacatgtatactgtctagatttgagaatgaattcaaacctatcttttggggttctaggaactttcaggacatgagggtgccaagcaaacatttcctcagctttttttttttttttttttttgagagggagtcttgctctattgcccaggctggagtgcagtggcacaatctcagctcactgcagcctccacctcccaggttcaagtgattttcctgccttggcctcccaagtaactgggattataagcgtacaccaccatgcccggctaatttctgtaattttagtagagacggggttttaccatgttggccaggctggtcgcaaactcctgacctcgggtgatccacctacctcagcctcccaaagtgctgggattacagacataagccaccacgcctggccttcctcagctttgatagatagatggtttgctgagtgagctagctgtgttgggcctgcacaggcagccatgtttctataatgaaccacctaaacagtactttgagttgtacccacataatttttgaggttataaggaaaatcaagtagtattgctagtctgtctgaacaccaaataatacatcctgtgtaactaggcagttgtcttgcagggggtaataggtgtctgacttgctagcatttatcatgcaacctgaagttttgcttcatccacagcagcaagatggaacttattgatgataacaccgtagtcagggcacgaggtttaccatggcagtcttcagatcaagatattgcaagattcttcaaaggactcaatattgccaagttggttttcttaaatatctattttacttaacaatcccaaagggataatggattttctatcttttttttcctcactgtatttttttttctacctgctgtctgttttattattctcaaaggggaggtgcagcactttgtctgaatgctcagggtcgaaggaacggagaagctctggttaggtttgtaagtgaggagcaccgagacctagcactacagaggcacaaacatcacatggggacccggtatattgaggtatgtcctcaaaacctgaacccctggacatcgtgaatgagaattaacataggacggaaggctcagaaacactaacttctctgtcttttctcaggtttacaaagcaacaggtgaagatttccttaaaattgctggtggtaagtgccttttacataatgtggctttagttaataagaatctaaaaattttgcatacttaaatttagcaagagtaggtgaatagggtcatgaatggtttttattttctaatggaacatgggaatagattttcttccccagaggtagaagcttccgataataacagtgagcttaatgtataacacttgtcctaaggcttgagccaacttactatagttaaatagccattaaaaatagtactatacaaaggtgaaaaggtgatatgaagttgtat

SEQ ID NO: 130580 - DNA, 1048 bp, Homo sapiens
ttgtctaaaattcgcctaacctatcatcatccatttccaagatagctgaattccatgaatctagaagatattcaagatcttttgtcttaccactgtctcaaattcacagggaaactaaactactattcatctttacggtcaacaaatgattcttttcaggtctttatacccacccattctgtcttgtgctattattcagcattatattttaatataatccaaagtgattgtttggcctgtgattcttttactgggtcattctctatttctttggtttggaggtggagtatgaaggtaatgaggggaatactgtgtacttagtgaaatgatatatttctacttttgctacaaaagtccacatttagtgatatgttcagaattgtataaaagtggcagctttagggataatatccctcacagatagtgatacattgttacaggtagacactaactgtttaagtgttttgtgttgtgtgtggtgtacacctcacagtgtatttgacaaaaatgagtatcatgctttccctgctggaatgcatgaatccctttctccattacttctcaaacttgcatgtacttctgaatcacttgaagattcagttcagatgaagattcatatttattaggtctggggtgagctggattctgcatttctaacgagcttcccagtgatgccattgctgatctgcagaaagcaggggagtagcacagctctaaattacttctgttttgctttgagtacaggtgctgaatcgattctcctcggcccctctcattccacttccaacccctcccattattccagtactacctcagcaatttgtgccccctacaaatgttagagactgtatacgccttcgaggtcttccctatgcagccacaattgaggacatcctggatttcctgggggagttcgccacagatattcgtactcatggggttcacatggttttgaatcaccaggtaagaaagatacttagtggaaaacttatttgctttttctcactacatatgagaaatatctaatattagatattagataatctat

SEQ ID NO: 130581 - DNA, 1462 bp, Homo sapiens
agctgtaaggagtgagagaagggctcccaagcaaggctgatgatacatacagctctcacaaatcatcactgggccttgcacctcccaaattccttgcccccaagccacattccaacctaggtctcagggatgagggaagattgaaagggatatggcaggtcagtgatggactggaactgagagccaaaaaagaataccggttcagtttcctgtaggagggtacctaaagctccagtgctggttctgttactagcttttctcaattgaatgagatttaatcgaatttttcagaagagaaaaaaactagtatacgatcctatattttgaagcagcagtcacaaggagaccctttcaaacccttgtaaatctgatactaattaacagaagtgaaaaaggctcattttcagctatgagctctcaaaactgtttcttaaaggttttgttggccattctggtgatcaggtgatgaaatgcaagtcaggttccagcagatcacaccatcacccggattttgtggctaaaatatctgtattatgggtgattgtcactttgcatgttttgtaagcaaccatttccttgttgaaggagacagtctccttttgtttttattcttcccccacacactcagggccgcccatcaggagatgcctttatccagatgaagtctgcggacagagcatttatggctgcacagaagtgtcataaaaaaaacatgaaggacagatatgttgaagtctttcagtgttcagctgaggagatgaactttgtgttaatggggggcactttaaatcgaaatggcttatccccaccgccatgtaagttaccatgtaagtttttcttgggtcttggcgctattctacgctatatgctggtaggtgcttaagctgctttcgtaactttctgtgcccctggttctttctgaggcaggtgaggtggttatataaggctctcccatctgtaatcagtagtacctggtaatcatttaagaccttggttgtggacacccataattagagatgctacaaatacctcctttcaaattatattcctgcttttccagtgataagcacttgatttctgaagcttagtgtgctccagataagcactgactctgggaggcaacctggctatatagataattttagtacgcatttaaaggcaaaataaaagtatggctggattctttttattttattttttaaaacgtattaacctttaagaagggcagtttgatgcacatgttgcatttaactttttgagcatcaagtatttttttaacatttttgagcatttctgttgctctccaggatatctggaatgagcaagtgagcaaaaacaaaaaacaaaaacaaaaaaaaccacatagattaattagccaaagtttccattggatcacaggatcagtgcttaattttaagccatgctctcgctcattggcacctgggtgcaagccatctggaat

SEQ ID NO: 130582 - DNA, 1032 bp, Homo sapiens
tcctgtaatgaaccgcttgatagttttgaaatcagaatatgaaccgggcgcggtggcttacgcctgtaatcccagcactttgggaggccaaggcgggcagatcacccgaagtcaggagttcgagaccagcctgaccaacatggcgaaaccctgtttctactaaaaaaaaattcaagaaatcagaatatgagcacaggctgtataactttctgtgagacttaggtgcctcaatttgtattgttggtcttttgcacagtttttgatgagtatgaaagaggcactcaagttaaatatgagatcaatatgttagtcttttttctatacgcccatatttagcttgctgtcttattcatctccatggaaatgtagaaactcataagaacaaaagacaatttgaagtcagcttggagatttttatgggaaaaagttatttcttgggcctctgctgattgcaaaatgtggtggttctaggtatgaagcttaaagtcagggaccccatattcattcagcatctcaacttaactcttctattgggtataaatggcccggatagttgtgttcattccacaagtgaaagctagtgaccagccactggtcttctgtttctaaacctagaagatgtttgataaccagaagacaatgcagttggggcccattttttaatttaatctgagccagctttttattagttgattcccaggaagacttaggcatcaattcctttgggactatttcccaggttggatttttttctttttaaaggtctgaagatataaattagcttcaaagcccatcatgtggctagcctttaggtgagaataatgcagaattgatctgcttgtttcttttaggtcagttccttctggcacagtctatgctttgacctaatatgtggtagtggccaagagaggtttatcataacacttctcatttgatgctgtactgacgggtaggtagcaagagggagtagaagcataacttaaaatttaaaatatttagtagcctctagtatgaaacttaaacatcagttcc

SEQ ID NO: 130583 - DNA, 1041 bp, Homo sapiens
ttacaggcatgagccaccatgcccggctccttattgcttcttattaagtgtcttagaaattatttggaatttcttatactagaatttaactttaaaattttgtctaaattgttttgtttattttggtaatgatattgaacctctaaggaatgaatgaaatagtctctccagaaaggagctgagctgagcagggagtcggaaaccatacatgttaaactaaacacatgatactacaaagggtaggagtggtgcagaacgccaactactgtgtaaaccatggaaacttccttggctagtgctgtactcccaaagcccttgccatgtaaatgccaactatgtctgtgtgaaataataacttggaccatcttaaggctttttttccacaaagtccttgtggaatttgaaatcatttttgtggctgctgagaatgacatttagagactataacatttccttttattcacttttttttttttttttttcagtgtttgaaagatgtatggtgatcttgaaacctccagacacaagaaaacttctagcaaattcaggggaagtttgtctacactcaggctgcagtattttcagcaaacttgattggacaaacgggcctgtgccttatcttttggtggagtgaaaaaatttgagctagtgaagccaaatcgtaacttacagcaagcagcatgcagcatacctggctctttgctgattgcaaataggcatttaaaatgtgaatttggaatcagatgtctccattacttccagttaaagtggcatcataggtgtttcctaagttttaagtcttggataaaaactccaccagtgtctaccatctccaccatgaactctgttaaggaagcttcatttttgtatattcccgctcttttctcttcatttccctgtcttctgcataatcatgccttcttgctaagtaattcaagcataagatcttggaataataaaatcacaatcttaggagaaagaataaaattgttattttcccagtctcttggccatgatgatatcttatgattaaaaacaaat

SEQ ID NO: 130584 - DNA, 1028 bp, Homo sapiens
cgatggcagttctggagcaccgggttccacttctgcctctgaccggctttgtgacttccaccacattagatctgagtttcctccatgtaaaatggggcgggaatggaggctggacctgggaggtgtcgctgatgatcgtctctgactcgctaagtcgcggagtcacaaaagtggcggaaagcatgccctcactttttgggaagagtaggacgaggggcggggctgcagcgagacccaccagtctcgctttccagggcaggcggcggccaggagctacagctgtgggctgcactcccggcgtggagtctccttcctgcccgcgcaggccccggcgccccagcgaaacgctccggccgctcccctctcccaacactctggttcccgggccgcctgcggggacgcggttggcggcgacaccggaggggggtgggtcaggaagtgggggcgcggcggccaggagcgggcccccggaggccgaggggttcggcgacgcggagggagggagagtctgggccgcgcgggagccgcagggcgccctagccttcgcagaaacgatggcggaggaagaaggtgattgccgcggggtccagcgcgccaacggctgccagtggtctcgggaaggaggggcgggggcgctggaggtctgggttggagctgctggtggccgcggtcgcggtggcggccgcgcgggcagggcgggaaggagcgcggcgcccaggagaggactgcggagaaattcaggagagcggagcaaatggcccgaagttttgtcggccgaattgggaagcaaaggtggagctgaaagttgggaatccgtagcaagagagaaagctgtgccgggagtggttgggaaagagggagggtcctgatcagattcttggtgaagtgggaggcgcagtttggtttcgaagatcaggtttaggtactcagtgcatatttggaatgcgatttttaaagggctgtggatattgacaaacccagaggcacagggggcgagggaacattcaccacggggataaagaggcagg

SEQ ID NO: 130585 - DNA, 1026 bp, Homo sapiens
agggtagatacaacaagaattgaatactccattcctttaagagaaaactgggcactaccatattttgcatgccaaattgctgcacttacaggctatttaaaaagcaacttaaatacttatggagaggtaagatacaaatctgttttatctgttgcagctaattctgatgtattgcaaatgtggcacataatagcaaataaattttagtcctagtaagaattaaatcatatttaatgaagcctggttactacataataaaagatatagttaggtagttttcttacaacactgttactctgtaatctgattaacagtaaattaggagaaaggagatgttttatcattttaatatagttaacttgacaaatatatgaaacatatcttattttgaaaatctgttccactgttattttatcacttctcggacttctggaacattgatggccttcaatcaccatgatttaaagatatattaaacaagatgtaaagagtgaccacaaatgacaggagtgttaacttgaatggcagcactgcgtattctgtttcttctcatgttttctgtgactgaggtataggtaggttggtaaaaatttcaggagactgtccctggtagtttagattcttacattgttattgttattgttgttgccacagcccttttggcagttggaagaagcctgtggagtctgtctcaggataatgattttaggccagacatggtggctcatgcctgtaatcccagcactgtgggaggctgagaggggcggacccacctgaggtcaggagtttgagaccagcctggccaacatggtgaaacctcatctctaataaaaattcaaaaattagccaggtgtggtggcacacgcctgtaatcccagctacttgggaggctgaggtgggaggatcccttgaacctgggaggcggaggttgtagtgagctgagatcacgccactgccttctagcctgggcgacagagagaccctgtctccaaaaagaaaaagaataatgatttaaaatacataaaa

SEQ ID NO: 130586 - DNA, 1012 bp, Homo sapiens
tcaggagtttgaggccagcttggccaacatagtgaaacctcgtctctactaaaaatacaaaaaattagctgggcgtggtggcttgcgcctgtaatcccagctacttgggaggctgaggcaggagaattgcttgaacccgggaggcagaggttgcagtgagccaagatcgtgccattgcactccagcctgggcaacaagagtgaaactctgtctcaaaaaaaaagaaaaaagaaatgttcttactacgccattgtagtttatgcttcagcataaggtcatgggattgatttatgtcagtaaatctccttgcttcatagtcataccgtatattatttattcatatttttgttttgtagtcttgttgtgttttctgtctctagtattggggaaagcatatgtttgtaagcatagctaatatttctttgtttaactggtgtttttctcttctagatgtttgtcccacacaaagaaaatgggcacatgctgaaattccttgaagtaaaatttggactaaatatgaccaagtaagttttagattatgtaagtttacctaaatcgataccacttagaaaataaagataaaaaatactcgatggccgggcatagtggctcacatctgtaatcccagcactttaggaggccgaggtgggtggattgtgaccacttgagtccaggagtttgagaccagtctgggcaacatggcaaaaccccatctctaaaaaaaagacaaccaaacaaacaaacaaaaaacaaaaaaaattagctgggtgtggtggtgcatgcctgtggttccagctattcaggaagctgaggtgggaggaccacctgagcctgggaggtggaggtcatagtgagccaagatcacgccagtgcaccccagcctgggcaacggtgagaccctgtctaaaaaaaaaaaaaaaaaaataccacttagaatgtatttgccatattgttaaattttaacattttgttctaaacccagtgatttgaagtagacattctcagtccatca

SEQ ID NO: 130587 - DNA, 1050 bp, Homo sapiens
aaatctcagtattttcaggacaaatagtatatgatactatgggcctaatatttgtggttttactactttttgaaggatatcaagagttgatccaatattaacatttcagaaagactgaaaagctttattatctaataagatccagagcttattatctaataagttcagaaaaattatagtaaaaagcaccacataatccaaacatgagttttgatatatagatgaatatttacatttatttataaaaataaatatatttttcatatataatcgtacttagaacacagtagatgcttgatgtatagtttcaatttactgaagttttaaatgtcctttaaattttattttaattatattctttcagttttattttaattatattctttcagatctaccaaatctattcaaagcgatctgctgaggatatttataaaatactgacatcttacaaagctaattacctaattgtagaggatgctatctgcaatgaggtgggacccatgagaggctgtagggttaaagatttattagacattgcaaatggccacgtaagtaaccatttggaaagttatatatatgtatatatatatattttttttttagaaaaatgactttaaacttataatctttaaactttatttttagaacttaactaagaatataattgagttatgtaataatggggaaagcttcttaaaagtagtttggagtattttttcaacatacaaaagaaaatctgggcatttttgcaaaaataataaaaaataataatggtattaccaatactggaattccttattcattgcctgtacttattcaggtttcaacattcataaacaaaagatggcataatttgatttgaatgatgattttattttattataataatctaaagagcaactggttaccttgttatattcttatgttgagaaatttcttgtaatttgattcatatctagaaaaattgcatgctaaattaacacagtgcctgtacattgagtccctattatccacaaaaacgaatgtattaaaagccatgttagttgttag

SEQ ID NO: 130588 - DNA, 1249 bp, Homo sapiens
agtaattggtgctgtcttgctatctgctctctgaagcctttctattctgctctgatacccacttttctgctgttttgaagatcagcttacttctcctttcatgtcatgcctggcatggacttaagctaatccatccttttaaagttggctatctgacatctttcatagccattaaaatattacttaattttttttataaaaacttcttcaagctaactaagctatcttagtgaacatcattcggtgaaattgtaaaggtctgcactaagtcacgaaagtttccttgcttactaaataattctacacgagaagagtgaatatatttaggaatataatatgttcatttctcagccttggtagggtgcatgataaggtcttcggagcgatgataatggattatggaaacactgccttctaaattttaggattaaatcttttaaaaattggaaacctttgtgctggtttctcagtgtcaatgagaagttcaggagtatagtgggcatggtgactcacttatgaagaaggcttctatttgctaacagtgagatgttttatagacaatgtttagcaataatgtgttttttcatataaatatactcatttgtatattgattgcatttctgctataagcttaataagctttttaatattatgttttatatcttttaatagatggtttgtgaagaaggtgacaagctaacctactcaaaatatgggcgattttgtcatgaggtcaaaattaactattctccatatgtgaattatttcactagagtatactggaacagatcctactttgtatataaaatcaacactgtgatatccttccagtcttgaaaaataacagagccttcatttcaaagactacctgaagtaaaatgcagttttcttctacctactcggtgtcttttgcagatcagagtatggacatttgaaatattgctgcttctttcccccttctgctgttaactggatccagagttctgtgggaaatagaagatcaagcattactgtcctttgattaaatgtgatatctaccactctgcaatattccagacaggtgtcttccttaccgttacatggtctttaacacttttactgattgcaatattttccccataaaatcttcattctattataatattgatcttgaatttgaatatgtgcaaggtcagatacatttctcaaacataacatttaataaataatgtgatataattatttaatagaaagaataattccgaccttc

SEQ ID NO: 130589 - DNA, 1111 bp, Homo sapiens
aatttaaaaaatacgtagtctctattgttgctgtttactaatagttttagatcccaatgtgtattagaattatagctacaaaaagttgcaagtaaaatttagcaatttcctattcaaacaggatctcattagtatgttttttaatgtgtagaattaacactttaaaataaacaggtgtgaaaattataaaggaatatatatgacaattattttctgtacattaatgtctaaacattatacttactttttcataataaaggaaattttggaaccaaatttgctgagtttagcataaaggcgtctttgaattatttctgagtttcctaaaatgtgcaacattttaatcttggcatatctaatcctatgtgctgttctgtaagaggtacactggacttctaaccactatatgtatttagtagaataatggtatcacaaaggaacaagaattccaaacttatagtttgaaatgtctcataaacaaccctttcgtattttaagttagtagctttgtatagctatttaacacagatgagtatagttagctttatatatattatcctctgagtcttatctgtgacaatgtgtatttagattaaatatgttcctcctgtaactaaagttgcatctttgcaaaggatcaaagttcatttcagcagacacaaattctttgaaagatttgggctataaactaacacttcaaattttgtaataatcaatatacttttatcaagaaggaaattatttcatgcttaattaccctccttattttgtttccataataaaactattttcagaattttaagttattttatttatacatgagcttttttggtgacagcttcgctgagatataattcatataccgtacaattcacccgtttaaaatgtataattcagccgggtgcagtggctcatgcccgtaatcccaacactttgggaggctaaggtgggcagattgcttgaacccaagagtttgagaccagcctgggcaacatggagaaaccccatctctacaaaaaaatacaaaaatgtagccggacgtggtggcgcacacccgtagtcccagctacctgggaggctgaggcaggaggatcacttaggtcagggaggt

SEQ ID NO: 130590 - DNA, 1074 bp, Homo sapiens
agggtcaaagaaaagctcgaaacaaaggctctcctacccccggaggggagggcttggtgctgtcatcctaaaccctttggtcctttttacgatttacctttttactgttggggttttagaggctgcgaggcgggtcttgtggttgcttgggtcggggaggctgaccagacgcctccttcaaccccaagctgaataaattcagggagctggggagaaaccagctgttgggtgttgatcgtgacgctagttattatcttaggttttatttaaacatttttttcttcagtgagggaattttattgactcttattccaaagttgggctgtaagttaaaagaaaatctttgaaagtaggaactgctgcacatttgcaagatggctttgtatagtgatgataatgattaatagcccagttaaatgggtgtgattgatgggggaggaggaaaactccaggcattctcaaaaaaggtattggcacaaaaaggtaagttcctcggatagcatttctctaaattcaaatctagatatggcttgttcagtctcagactggccttcactgatagagaccactgtgtaagaagttagtgtacttaggcagttttggcacctgtataatgcccttaattcattccttttgaaagataatttgttgagtgctttccgggtgccatgcactgtgcttaattgctcacatccgttacctcctttaatttaatcttcaaaatgatcctctattttgcattggaagaagcaggtacggagaggtcacttgatggaggtccccctaattaagtgtcaaaataatagttctaatatttatatctcattcttctaattggcagtggttatttgcagaaccagaaatctatgactgttatgttcttccccgtaaggtgcttttttttgctttcttccactctaatctgttacccttcctccttaccactcttccgcatctcctttaacccccaggcacacttcttacatacgtattccttagtcattttaacagcgcagctgtttggattccttttgtggcaaaaaaaaaacccaaactccccccccccccacccac

SEQ ID NO: 130591 - DNA, 1034 bp, Homo sapiens
tcagcttcctgagtagctgggattacaggcgtctgcccccatgcccggctaatttttgtatttttagtagagatgaggtttcaccctattggtcaggctggtctcgaactcctgatctcgtgatctgcccgcctcggcctcccaaagtgctgggattataggcgtgagccaccatgcctggccctcctgtttttcatattttctaacctcacaataggaacttatttcccttcatttaaggtaactttatttcaacaaatgtaattgtactcttgctgtgttaaaaatttttttaatagcttagtgtactgagttactaaatagactgtaaatatttttggttattataatcagttgctatttttgtatttttatttgtttattgatttctgtagctcaaagaacaagctgctgattctattttggtactagaagcagccctaaaattaaacaaggatctttatgtccatacgatgagaactctagatttattggccatggaaccaggcatggtaaatggagaaactgagagttctactgctggattgaaagtcaaaaccgaagaaatgcagtgccaggtattcatttgatacttaatttacgtagggcaattttttggaaaatcttaatatgagatcatcctcctatttttaattagaatttatttctgcctttgtctcttaagatgctattaaaactgcattgtatttaatttatacatttataagatttgacatttttctaaaagaaatggaagagaaattttatgtcatctgttgtctctgaaatagtttccggattgtatttaggagacagagtttaagtactgagaatacagttatatgtaattgatttacagttctttcatattatcagaaatctgatcagaccaaaagaagataaaaactaatattatgctagactttgaaaaatctagacctcaagagagagtgtctagcttttcagggatcttaagtttgccctctttctataactctgggccccttgttcctttcacagttttcagttgatgc

SEQ ID NO: 130592 - DNA, 2172 bp, Homo sapiens
tgcttaaatctttgactaggcattataaatgtatcatattatgtggaagtactctgatttacttcatttcccttatgtttgggcatttaggtttattatacagctgcaatatttgtatctgcaagcctaaatttttcttcagatttcagatatgtttaagttcctacaattattgccatgtcaatggttatgtatttttctaaggctataatttatcaaaccacattactttccaggtacatttctcacagagcacttcagttagcagtgagtgtttaacaaatttttatttttatttttttgctaacttgattggtgaaatatagtatcttttataaacttggctttcattaattcctaatatgggtaaacatttttactgtgtttatcatttgcatttttcttttttatgattcagatgactgaattgtaaacctagtatatctataactaggtttttatatggctggtgcctggaaaaattcccacttcaatctgctgtccttagtagagatattgattaaatgccctagaggtttaaatgctctgactattctagatagacccattagaaatactcattttactttgctaggaaattaatctgctttctaattttatggtatttcaggtatagtaatttaaaacaaatattttttcaaactttttttttttaatcctgtttgggtagaagcatttctattctttccaattgagtgatgattatgctctttgctcgctcctttaaatctctgctggtatgtgtcttttaaaacctttaagcttgtttttaattttaacactgtttgctctttgttaatgtcttgtcatacatacttggtatgataatgatgtccaccttttgtatgttggcctgaaaactctaagcttcagcaaactttctttgtaaagggtcagttagcaaatatcttaggctttctgggccacattcagtctctattgcatattcttaccatttttttggtcccctttgcatagtttacggcccacaaaaattgttcttagctcaagggacgaacaaaaacagaccataggctggatctggcctatgagcaatagttttttgacccctgttctaaacctttaacctttttgttttttgattcttccagttttaaatttttcttttctttttttttttttttttcctgggacggagtctcgctttgtcacccaggctggagtgcagtggcgccttctcggctcactgcaacctccacctctcctcccgggctcaagccattctcctacctcagcctcccgagtagctgggactacaggtgcccgccaccatgcctggctaatttttgtatttttagtagagacagggtttcatcatcttggccaggctagtctcgaactcccgaccttgtgatccgccagtctcggcctcccaaagtgctgggattacaggcgtgaaccgctgtgcccagcccggcttgaatttttcgttagcatttccttgtactgttaaaacatgctaagggggtgctagactattgtttatattacatgaatggataatggtgtatacctcttactttacagataggttcattatctcttcattgtaccatagatgagaagcggttagctggctattgtcaagcatgtgatgttcttgtaccttcttctgatagtacatctcaacagttgactccatatagtcaagtccatatttgtttgagatctggcaactatcaggtaaggtgtatgagggggatgcagtgaagttttggaagccagacaaaactaagttcaaatcctcgcaccatccatttaccagttacgcgttttggggcaagtcatttacactgtcatactggcctgtaacataatggtaataattatcccatttcctaagattcttatgagaatctagtgagaagttatagtgcacaaattctaaggcaaagcattatacagatgttacttcatcattgctgttatcttaaaggtatagagttggtctatcttaaataaattttgtaagaaatgcttgtaagcagaacttttaacatttaaaaattgcaggtagacagcttttagttgtgtgtgtgtgcatttgtttagcagctgggattgttggctgctaagatattaatagcttttagttttacaaaacattaagtcttgtgtcttttggatgtg

SEQ ID NO: 130593 - DNA, 1888 bp, Homo sapiens
tacatgcaagtgccatgatacccggctaatttttgtatttttagtagagacgggatttcaccatgttggccaggctggttttaaattccttacctcatgatccacctgccttggcctcccaaagtgctcagattacaagcgtgagccaccatgcctggcctaaaatttttttctaataacatagctggattgcctctcattgactgattcctttcttacctctcatttttggtctgtgatcttcagttttaaaaaaggggtagcagggctgtttttgcccttaatcaaattttagaattttaggaagaaaaggttttcatagtaagatatttttgtgattgtttttcaacttgtattttccattatagaaagacttgtttaaagtaaaaaaactttaccatgatttttgaaatgggtgcaactttatgtgtgtgttctaggaggtaatacagattttcattgaagacaacttaaccttgagtttacctgtccagttccgacagtcagtcctaagagaactctttaagaaagctcaacaggggtaagtaagttgaaaaattacttcttgatttttgaataaaacagcaagtgcattctggtttatcaaaaccacattttcaaatttcctatggctctgtgacattattttcatgttgttaatataagggaaattaacatagggtggaggaacactctggtgttcctccgtctagtctgttttaaaagtgcttgcagggccgggcgaggtgtctcatgcctataatcccagcactttgagaggccgaggtgggtggatcacttgaggtcaggagtttgagactagtctggccaacatggtgaaaccccgtctctaccaaaaaatagaaaaattagctgggcatggtggtgcacacctgtagtcccagccactcaggaggctgaggcacgagaatcgcttgaacccaggaggtggaggttgcagtgagccgagattgcaccactgtactccagcctgggtgacaaagcaagactccgtctcaaaagaaaaaaaaaaaaaaactgcttgggagaaaaattatacatagcaaaattccattctgttgtctaatatgtaactacattgtcccttgataaattcaaaacctattctgctttctttctccccatgatttggtatatatttattggtatgcttgaatattctaaaatcttacctcttaagaataaatggctcattcttgtgaatatagttgtataatatacacctttcttttgtagtaaaaataacattagttgatctacttttgtattctacagaaatgaagctctagatgaaatctgttttaaagtttgtgcctgtaatacagtccgtgatatactggaaggcagaacaattagtgttcaatttaaccagctatttcttagaccaaataaagagaaaatagactttcttcttgaggtatgacatgtttttctttccccttttgatttataatttgctttaagcttaccagtgacctcttaattgccaaatccagttccttttttcctgtctgccttgcgtttctgtgcctgacaattggcacttttgacagactatgcccttccgcctggtcttctgctgtagctctttttctagttcgctccatgtttcttcagcatctttattggattctccttagtccttcattgacttctctattgctcttcctttagtatttctgttcatagaacttttgtccttggctcactcatcattttttatttacttccaaagcttcactcatctgtttcatcacctgtttactaagaactcccaaatcaagcctcttgtctgtcatgtgtgctgtggaatctgtgtttctactggatcactctacttctttcttaacagtcttaatgttagaga

SEQ ID NO: 130594 - DNA, 1756 bp, Homo sapiens
attgtttactttttaaaccttggttacctttttaactattcatgaatagctcatgaatatagaaccattagttctatattcatgataaatcacttactcttttcaattattttctttttggttttaaaaattttttatttttttaactcttttctgacaggagctactgatttctatggtttatcacttaatataatttggcaacatagttgataaattctgtgagaactgtatagcatggtaactaggttattctttgctacatgtatacacctgcacttattaaaatggtcacattccattccctctttgtgatggattgttattccttggtctggtctcttctgttaagttacttaactaaatctgtgattggtacattgttgaaaaaggaaaattcagttgtttttaaatccagccttttcaaattataatttacatttttataagtacccatattcaaatgaaaattactcaaattcctaggtatgttcaagatcagtaaatttagaaaaagcttcagagtctttgaaaggaaacatggctgcttttctaaagtaagtacctttcttttcttttttctttttttttttaactttgaacttagtcctgtgaacaaaatatctgtattatcttttgtttttgtcttgggtatcttttaaccaggcagtaactggtgtttgagaacccattaagttcaaatttgtatagccacgtgagacattaggattatatagttacctttttttaatattgtggcattgacatcacaattttaaataaggaccaaagggaaattttaaaatctattttaaaatatcattatacagtttatgtaatggtggctttttaaatggcttattaaaattggttgatatgattgtttttctcaaactaaattatacacttttttgttttacaatatttcttactgatctaggaatgtgtgtctggggttggaagatctgcagtatgttttcatgatttcttcacatgagcttttcattacattgttgaaagatgaagaacgaaagctacttgttgatcagatgaggaagagatcccctagagtaaatctgtgcattaaacctgtaacttcattttatgatatcccaggttagctctctagtcggccagccaaaatgttggcatgttttgcccctctattcaaattaaccttgaaatatatttgaggattctctcttgttttaattaacacttgtgttggtaattaatagaaattcacctgtcttccgtatcagatttctgtataagcagttatgctctggagctctgccaagccaatgattagtacagattcagtcctagatacataaaagattttagctggggaaggctgggcgtggtggctcacgcctgtaatcccagcactttgggaggccaagacgggcggatcacgaggtcagcagatagagaccatcctggctaacacggtgaaaccccgcctctactaaaaatacaaaaaattagccaggcatggtggtgggcgcctgtagtcccagctactctggaggctgaggtaggagaatggcgtgaacccaggaggcggagcttgcagtgagccaagattgcgccactgcactccagcctgggtgacagagcgagactccgactcaaaaaaaaaaaaaaaaaaaagattttcaccggagaaatagaccaaggtaacactgctgccagtatgttcatggaggtaaaaacagaaagcaggagaggagtggtgagaaatgctgggacc

SEQ ID NO: 130595 - DNA, 1008 bp, Homo sapiens
ttttatatatgcttctgttaacacattatattcaaaagtagtgtataagttgtgtataagtctgtaagttaattattttcatatattccacatagttctttgcatgaaatattgatttttatcttgtttatattttcattatctttatttttaaaatgcattcatttattaaatgtagatatagtaaaattttgttaggttttctgtgtgaggataaagttaatgtgtaatttatacaatgttgaatgcatcagttctcaagatgatagcagcttttaatttatagatataatacaaaatacataattttaagtaaattgttattctcgtgtatatctttgaattaaatcattgaaatataaatctttttttagcttcagcaagtgtcaacattggtcagttagagcatcaacttatattgtcagtggatccttggaggattagacaaattttaattgaattacatggtatgacttcagagcgccagttctggacagtgtctaataaggtaaaccctatgtcaagaacagataagaaaattgcccttgttttctgaggtaatttaatagaaaagctgttccctgacctttttgataataaggacctcttacttaacagttttaagaccttcatatgaacataattgcatttttaacatccattgacagagaaaataggaaatgtcagaaacaaaaagataccattaaatgagtaacatctaaaaatgagtttttccatttgttgacaaaatatacgcattttatttcattcatttgttttttgagacagaatctcactctgtcgctcaggctggagtgcagtggtgcaatcttggttcactgcaacctctgtctcccagattcaagtgattctcctgcctcagcctccctggtagctgggattacaggtacctgtcaccatgcccggctaatttatgtatttttagtagagatggggtttcaccatgttggccaggatgatctcgaactcctgaccaccagtgatcta

SEQ ID NO: 130596 - DNA, 1026 bp, Homo sapiens
ctatctcaaaaatcaagaacaaaccaaaaatttttaagatgaacaagtatagcatgatagttatgataggggattctgggactaaccgcgtgcttaagcttgaatgccagcttcatacttaaatagccgtataatcttgaacaagttatttaacttctttgtgttgcagttttctcatttgcaaaatgacagtagtagcataatagtacttaccttgatattgttgtgaggattacctgaattaatatatataaaactcctagtctttgtgtgcctttttttcctaatagtaatcccagtccattatttattacttgttgattgtagcgaatgtgttcattttcgttagtgttatattatggctgtcattttcctttctctttaagagacgacccgtgagttatttgttttaaatgcgattgaagattgttgaaagattcttatctagatttggcttcctctatgtgtgcatatatatatgtattttttgtttcttttagtgggaagtaccttctgtctatagtggtgttatcctgggaattaaagacaatttaacaagagatttggtttatattcttatggccaaaggtttgcactgcagtactgttaaggtgagtaaaagtgtgtatcaaacacttgttaagaatatgctttatggtcaggtgccgtggctcatacctgtaataccagcactttgggagtctgaggtgggcagatcaactgaggtcaagaccagcctggccaacatggtgaaaccttctctctactaaaaatacaaaaattagccgggtgactataatctcagctactcggagtctgaggcaggagaatctcatgggaggtggaggttggagttgcatcattgcactccggcctgggtgacagagtgatagtccatctcggaaaaaaaaaaaaaaaaagaaaagaatatgctttactaattttagcaggaagtcaggaaccagaacttaccttttcctaatcttttcctaatctttaaagtcacagtcataggcctaaaaggat

SEQ ID NO: 130597 - DNA, 1071 bp, Homo sapiens
tgaccccattaggcccctgaagcatctcgaggggagtcagtaactcttgcaagaaggcttaaggtggatgtaaggccacaaggcaacattgtcagtgtctgagtccttgatttttatgtaacttctcatagataacagaacttaaaaatcatttgggggccaggtgtggtggctcaggactgtaatccccagcaccgggaggctgagatgggcagattggctgaggccaggagtttgagaccagcctggccaacatggtgaaaccccgtctctactaaaaatacaaaaaaaaaaaaaaaattagctgggtgtggtggtgagcgcctgtaatcccagctactcaggaggccgaggcagaggaatcacttgaacccgggaggcggaggttgcagtgagctgagatcgtgccaccgcactccaacctgggcgacagagtgagactccgtctcaaaaaaaaaaaaatgataataataatttggggaaattttatgagtctcttttgttgcccataaattgtgctaagcagaggtaagggttttatctcactacttctgtatgctttaaacatttgtaaaagaggcaaatacactttcttggtgcagccttgtctacctttgacattctgaagaaaagagaacaaaaatcagattgttttcaacccctcataaaaagcccatcacactttcttagacttagttgtgttgatagttcttataatacatttactcctagtatttagcattatatttatgttcacctaaatcttggctgagtttttgtttttaataaatacatgcatggaatttaaagttgacttttaaaatagagattaatgttgtgtgtctttccttttagcctccagtctgtggactttgaagctgtggcaatcacagtgaaagagctagttcgatatacactcagtataaatccaaataaccattcttggttaattatccaggcagatatttactttggtaagtgagatgtttagttgctttgtgttttgtttttatagcactttttgaagtgaaagtaaatatataacctattttatttcaatacttaagtttt

SEQ ID NO: 130598 - DNA, 1057 bp, Homo sapiens
cctattgctgtcttgattcccccaaaacacctcaaattcaacttgtccaaactgatttgtgtctgtctttaccataaagtaataaactcctaatacactcctaataaattcacctgtcctttcaaaaacaaaaacaaaaaacctgcaaaataccaaacatttttgtttaaccatttgagtagttcaagcccaaaccctgactatcatttttggcttttttctttactgaccctcctgccaccatccagttagctctcacatcttgtggattctatctcctaaatccctatttttttttcctaatttctttggtatatatttaagatatacagaataatgttttaatatacacagtgagatgattactacagtcaaacaaaaaaacatatccattgccttccttagttacccattttttgtgataagagcacctaaaatctactctcagcaattttttagtatacattatggtataatgaattctagtcctcatactgtatatcagtttgctagactttttctatctaattgcaaatttgtgccatttgacctacttcttcccatttcctccccattcctgcacctggtgtcaaattttgtccgtttttttttttgatatgcattgccatttcctctgatgtaggctaccagtaccataacttaaatgatattttaaaaatacttataatggctttcaaaataagattgaacatttattagatttttggtttattttttacagcacttttaagttcacagcaaaattgaataaaaggtacagagttcccatatatcccccgttcctccacacacagcttcctcttttgacatcccataccagagtgacacatttgttagaatccatgttagctggtttttgaaaataatgagaattttgcttttgtaggtaataaaacgaatgataaaatgttgttctttgctgaattgccacacacaggttagtttataatattatgaagttgttttatttttacatatgttagagtttataataaatataaagcattgaactggaaattagcttttattttccata

SEQ ID NO: 130599 - DNA, 1323 bp, Homo sapiens
tcccatgtataggaggaagtaaattacataaacaccttcagaaaagggggacagttgtcaccagtgtgcaatggaggcattatgacaccaccgaagagcactgaaaaaccaccaggaaaacactaaagaagataactaagcaaacaagttggaattcaccaagattgggtagaactggtatcactgaactactaaagttttacagaaagtagtgctgtgattgattgccctagccaattcacaagttacactgccattctgattttaaaacttacaattggcactaaagaatacatttaattatttcctatgttagctgttaaagaaacagcaggacttgtttacaaagatgtcttcattcccaaggttactggatagaagccaaccacagtctataccatagcaatgtttttcctttaatccagtgttactgtgtttatcttgataaactaggaattttgtcactggagttttggactggataagtgctaccttaaagggtatactaagtgatacagtactttgaatctagttgttagattctcaaaattcctacactcttgactagtgcaatttggttcttgaaaattaaatttaaacttgtttacaaaggtttagttttgtaataaggtgactaatttatctatagctgctatagcaagctattataaaacttgaatttctacaaatggtgaaatttaatgttttttaaactagtttatttgccttgccataacacattttttaactaataaggcttagatgaacatggtgttcaacctgtgctctaaacagtgggagtaccaaagaaattataaacaagataaatgctgtggctccttcctaactggggctttcttgacatgtaggttgcttggtaataacctttttgtatatcacaatttgggtgaaaaacttaagtaccctttcaaactatttatatgaggaagtcactttactactctaagatatccctaaggaatttttttttttaatttagtgtgactaaggctttatttatgtttgtgaaactgttaaggtcctttctaaattcctccattgtgagataaggacagtgtcaaagtgataaagcttaacacttgacctaaacttctattttcttaaggaagaagagtattaaatatatactgactcctagaaatctatttattaaaaaaagacatgaaaacttgctgtacataggctagctatttctaaatattttaaattagcttttctaaaaaaaaaatccagcctcataaagtagattagaaaactagattgctagtttattttgttatcagatatgtgaatctcttctcc

SEQ ID NO: 130600 - DNA, 1469 bp, Homo sapiens
tcccagctcttctcccatttctcctaccttctggaccaatgaggacaaacagaattgaagtttaattccactgcacaagtatcttctcaaatctgtgaaatctaccccttttacactataccattccactgctactagttcagctcttattgcctagattatacagccttttaactaatctcactgcttaataaacatgttttcttctagtctgtctgcttcactgcattctaaggtatctttcttaaaatggaactttgatttaaaaatcttccagtagcttcaagaatcagcctataaaattctgacttcttaaagaccctttgtgatccaatctagaccatgcctctttctagccaccacccctcatctttcttgataagaaatgaaggtactccttatttatttttcaccttaggagttctgaactgtgaactgagttccaagtaatgtccctatacctagaacattctctgcctcctactcttcctggctcccttatcttttaagacccatttatggcaatttgaggccatcactatcttttccaatctggattaggtgcccttcctgctagtacatgtcacactgtattgcaacagtccttccttgtctacttccttcaggttggtggcttgttttttttttttttgagacggagtctcgctctttcgcccaggctggagtgcagtggcgcgatctctgctcactgcaagctctgcatcccgggttcacgccattctcctgcctcagcctcccgagtagctgggactacaggcgcgtgccaccaagcccagctaattttttgtattttttagtagaggcggggtttcaccgtgttagccaggatggtctcgatctcgtgaccttgtgatccacccgcctcggcctcccaaagtgctgggattacaggcgtgagccaccgcgcctggccgggtggtggcttatttatctctagatccctaaggttttagcaagagacatttagtactcatctttctcctaaattgcttgtacttttgtttttcctgttagcttttagatctgtgtattctagccattgattcattagagttccagtacagaatactgactgctgctgccttgtgccattttacctccattgaagtggttaagaaagcctcaggtaagactctctatttgttgtcttcttaccttttcacaacttctaatgggactacagtctctgaactttaacattctgctaaacatgcatttaaaactttggcaaaaaaaaaattagctgttcagtaattatctttctgttagaagtactttccaatcctgaatgtgtatcaacaaaaagaccaaatggaatttaaatacagttgaaatgaatcaacattatagttctgctttaagagttctttgggatttgaccatttcaatttcatatgtagaaggtactggttaagaagttctgaagtcctttttcccttcaacatagt

SEQ ID NO: 130601 - DNA, 1141 bp, Homo sapiens
gtctctgtatgatggaaacatatttagctgtaaatgtgctttctatgtactctcaagagtttattgttcatccccaggaagctgtcttttttgaggtacttactgtagttgattgcacccaaagtggaaagtgactctataagagtaaaaccatgacaaagctactacatataactaaacccaattcagaattcctgttacctgtggatactgctgtgtaccaaccactttctgggtgccacagatactcaaggtgaatggaatgtatagttgattaggttttgaattatgctatacaaagtgaagaactagaactaggcttcagggccctctgaagtctttttctgtattaacaaaatcatgatgatgaggaatcctgatttctatatcctaaaccataatgagactatggatatctggaagctctacgccctctattgtccagataccttctctttattatattcttctattcttttccgaaatataccattaatttaaaggaatagtgatcctgaagcccctatagatttgtgccagatttttctctcttgtttaggtccattccctttcctctggataatagctctaaaaaagtttctaaaattattattaaggaaatcattacttatgttgatgacaaactgatttttcctccaactcttggatatttgctctgtagtctgtctttaagacaagagatgaagcattctaagggaaaaagaccatagactttttggaggaggaacacatggcagaatagatctcagaagctatcagaacagtttttaagactaaaatgttatccttttgcatcaggtcatctttttccttattctgactagaaggaaagattgtattttaattgtgggcacaagaaggcattgggttttgactttttctgactgtctagtgatcatggaatcaacttaagcacaattatgttaatttttaatttgtttcctttttgttatactgatattcatccagtggttatccaattcaatttgttcctgtttttacctaaatatgattatgtatgcaacagcatacagaatatatcaaatccagcagtgttaaactctatcttagtgtattcttcagtctaggaatgcaaacttgattcaacatttgaaaatct

SEQ ID NO: 130602 - DNA, 1057 bp, Homo sapiens
gttggccaggctggtctcgaactcctgaccttaagtgatccacccaccttggcctcccaaagtgcagggattacaggtgtgagccactgtgccggccactttgtggtttttcatatatgcatacccttgatagcctgggcagtttcacgagtgttcttacagtgaacacaaagatttgaacctcttgatttgcatgattttgtggggttttccaggtaaagtgaatagccagctattttcacagattacttcagaccacttatgggaaaagcaacgtggttatcttttaacagcaacctttgtaaagtataaataagtggaactagaaagcactcccttgaaatctgcaggtttggatgatcatagtccaggttcccactgtgttacttcaggcttctatttattcatgcaaaggaaattgtttccaaaaattaaggcagaagttttttttcttatttactttaagagcttcttccaagttctaattaaaagttgcatttcaatgtctgaaagttgaattttatctatgtgaaacagagtttgtatattacatggattgcacaatttaaattatgttttttagccgggcatggtgggtcacgcctgtaatcccagcactttgagaggctgaggcaggtcgatcacttgaggccaggagttcgagactagcccagccaacatggtgaaaccccatctctactaaaaatacaaaaactagccaggcttggtggcaggcacctgtaactcccagctacttgggaggctgaggcacaagaatcgcttgaacccaggaggtggagattacagtgagccaagattgtgccgctgcactctagcctgggccacagagcgagactctgtctcaaaaaaaaaaaaaaaaaaatatatatatatatatatggtttttttcctctctttccatagctggggatgttcaaaagaagtctggctaaacatgttaaaaaaggagagcagatatgttcatgacaaacattttgaagttctgcattctgacttggaaccacagatgaggtccatacttctagactggctttta

SEQ ID NO: 130603 - DNA, 1015 bp, Homo sapiens
tatgttagctaaaattatgattctttagacatattagctttcatttatgaaagatccattacaaaaactaaggttttccttgcacaaattgatatttttctttttttttatgacagaattgttggccacctgtattatctggggggatcagtccttgcattatcattgaaacacctcacaaagaaataggaacaagtgatttctccagatttacaaattacagatttaaaaatctttttattaatccttcacctttgcctgatttaaggtaagaaaaatttcagtaattttatttcaaagatataaagttgtgctgatttaatacatggcactattttgtcttttgctttcataaagtagaaaaacgtgtaaaaattgtttactaatatttaatcatatgtcattttatctgagagtagtgctggttgcaaatgatatgggtatttaaaacactgattctataaaattattttcatttgcttgctgagtactataaagacttaacaggactgaattagttttttgttaagatagaaacatttttacatgtacagctttttcctttaaaatttttattcgtgtttcttgcagcttcaactcaaaggaagcttttccaattgatgtatcaaccctatttatttcttaccaaacttaataaggtctatacttaattcttttttctagtccatgagtgtaactaagaggtacagcttatacaaaacatgtactgtattaatttatgattggccttaataagcaatttaatggaatcagacacttaaactcaccaatccccctttccctgcattctgtcccaccttacccaccccataggtgatcctgctgtagatgatctatttagaggtgattgagacttctcttgactgtgatcacatgccttatgtgtttaacttttttgtattgctcttgagaaaacattttttttcacttttaattgcatttattttagtgctgaatttactcctgtgccataagtttttgtttcttcagtttc

SEQ ID NO: 130604 - DNA, 1030 bp, Homo sapiens
gaaatttttcttaccttaaatcaggcaaaggtgaaggattaataaaaagatttttaaatctgtaatttgtaaatctggagaaatcacttgttcctatttctttgtgaggtgtttcaatgataatgcaaggactgatccccccagataatacaggtggccaacaattctgtcataaaaaaaaagaaaaatatcaatttgtgcaaggaaaaccttagtttttgtaatggatctttcataaatgaaagctaatatgtctaaagaatcataattttagctaacatagatggcaatatagctaatttgacattcacattttataaacaagccatatagctcatattgatttttataaagagtaataggatgttttagacaacaaaatgcaattctggtaatagaagacaccaggtgtcgaagaaggacagtaataacaaaatgcatctgcagtctaaaatactaatcactttcaagatcacagaatcgttctctgtatctagcaatagtagcagggacctttttttttttttttcaaataagctctttttaaaaaaagtgtgctctgatacttttgaatatttgaaagcaaaaccttaaaaatggaatcgattacttaaacgattcttttcccaataatgctggtttcaaacgcaatcactatctccaaagtgctgctttctgtaaaacacataggaagaagaggtaccaaagggctgcgtgccaggctgtcagtgatctcacatcctatttatgcccaagaagcagctattaggaccgtctactagagtctgcgagggaacaaagagcagtatattggacagattaggcgggccctggtgcaccaggcagttccaagagggagggatttacaaaaaggaaccagctgcttgaaggcacttattctgcagctgtagtaggattcgggcacatagaaaccacccaaagataggcgccttcctgctgacctctaggggcattaaaagtaaaagtgtcagaggaatctatcgcaaagcaataaacacataattctatt

SEQ ID NO: 130605 - DNA, 1039 bp, Homo sapiens
ggcgcgcccctggacggtcacttcccagccaccctatggtcgcccgagtcgtgtccccctgttatgcgcccgggctgagccgcaggctgacacccccgaaatccaggagttgcagtgggaggaagcaaaagcaaactggcgggagatgcgcgagccaggcggcggggagaacagccgcggagaaggagcccctgagagtttccctaccgccgccggccgcgccgtggagcgcggtggacgcgggcagaaggcccggtagagtggaccccacggccgctccgggtggcgggcgcgcactgagagcagggcgcggcgcgcgggcacgcgggcggacgggcgggagaggggagcgcgctgtccggaggtgtcagtctgaggcgcatgcgtgcggggcgggaccggcccggcctatatattgggttggcgccggcgccagctgagccgagcggtagctggtctggcggtgaggagttgctgcgcgtaggggggatgtgggaggaaagaaagcccagttgggccgatcacttaccacaggcgggagcctcagggaggaaaatcgggagggctgagaactagacgactgggggtcatgggttcccgcgttccgtccctgtcaggaaccttggcaggggaccgggaagcggctgggcatggagagccgcccctcattctaggggcttctctatcccaccctcatttggggagctatcccgtgggagagaggatgggaggccgggtcccctccatggggagaaaagttcccagccagcccagtctcccctttctttagctccttttcctgccctcccccacgccctccgcttcccatctggagttggggtcccggcgcccctccgagcggcggtagggcggcagggccgggaaggagggaaaggagactggaggccgtgacaccagtcttggttcctccgccccctgcttccccgccaccgccgctctccaaattggcgcggaaccggcttctccacagcatttcgcctccacaaccccctctccccgctggtccaggagggaggcg

SEQ ID NO: 130606 - DNA, 1024 bp, Homo sapiens
cttcccggccctgccgccctaccgccgctcggaggggcgccgggaccccaactccagatgggaagcggagggcgtgggggagggcaggaaaaggagctaaagaaaggggagactgggctggctgggaacttttctccccatggaggggacccggcctcccatcctctctcccacgggatagctccccaaatgagggtgggatagagaagcccctagaatgaggggcggctctccatgcccagccgcttcccggtcccctgccaaggttcctgacagggacggaacgcgggaacccatgacccccagtcgtctagttctcagccctcccgattttcctccctgaggctcccgcctgtggtaagtgatcggcccaactgggctttctttcctcccacatcccccctacgcgcagcaactcctcaccgccagaccagctaccgctcggctcagctggcgccggcgccaacccaatatataggccgggccggtcccgccccgcacgcatgcgcctcagactgacacctccggacagcgcgctcccctctcccgcccgtccgcccgcgtgcccgcgcgccgcgccctgctctcagtgcgcgcccgccacccggagcggccgtggggtccactctaccgggccttctgcccgcgtccaccgcgctccacggcgcggccggcggcggtagggaaactctcaggggctccttctccgcggctgttctccccgccgcctggctcgcgcatctcccgccagtttgcttttgcttcctcccactgcaactcctggatttcgggggtgtcagcctgcggctcagcccgggcgcataacagggggacacgactcgggcgaccatagggtggctgggaagtgaccgtccaggggcgcgccctagctgtcccgccaaggcctcagggaacccaggtctttcctgagcgacgcggggacccgagggcccgcccctcggggaggagcaaagcgttggctgaagagctggccaatgggaggcacgggcggcagcacaacgtg

SEQ ID NO: 130607 - DNA, 1579 bp, Homo sapiens
cgcgccggggagacggagcctcgcgggcgggagcccttcccgagatgcaccgggaggcggcgcccggcgacccccgctcccgcccggccttttgtgctgcgccgctcgagcgcgcttgaggcccgggaaatagccgccgccggatgggcgctttggggcgggcgaagtcctttttcacactttttcgattcttcgtctcgtgacgccggcaaaataattctctccctaatttacctgtaggagctttgcccaaggtgacagcatcaggagaagcccatgccttgtcagtcccaagaaactttctgccatttctaacgcttaggatggctctcggcggggcagaagttgcctcccttttgcagtcactcaaaacgcagttagcggtatagctagcttaaaggtctaacagcatgatgtcaagaaaaggggtcaggggtctcccaacaagggtcacctgatcgtaagcagaactggtggccctcgtggttgaatttgataaaatatactgaaaaccagtatgtcgagtaacgtttgtgggaatcatctttgaatgatgaatgtatgctcagtactgagttaactagtaaattgattttaaaagacactgctcttataaatgttctttccatacccttgactattatgtgaacagaatgcaatcatagtaaaggagaaattagaaaattccaagacgtctttgtgtggaaaggaatagagtgaattctcccatattacagatacctggtcaatagacaagtgggtctgttaaaaaaagagaaaataaagggtagggggcgggtatgtttgtttttagcttgctcttttcctacttatccgttttaaaattcacctaaagtatatttcccctattgtacatgtaaagttaaaacaccatggtaaataaactgttggcctctaccatgcttctctggggtaactattttgattgctccgacattcattttcaggaggaaaaaaccccagaagatgcttggaggcacaggcttaaaaaaaaaaattcaggcttagcccacccatttctttattctgtgccttttttttttttttttgtatatctcctctgtcgaagcttcacagatccttttccctgtgctacagttatgctcatcttacaggacaaaaattacttatttaaatgtcttttatttccaactcgacctcggaaattgttttgttcatctttttatagccagtattcagcagttcaaaggcatatatagtaggacttgggtaaatgctgatttgaattgtatgtaggatatcccattatagaattttaggtctctaggttaccatgatggatgatagacggatggtggaattattcccaataaataccaggcttttaaaaacattaatagactttattttttagaacagttttaaagaaaaattgagcaggtggaacaggacttccatatactcactcccctctcccacccaccacacatgcacagtttcccctgttattgacatcttatagtatggcatatttattaccctatgatgtgtttgctatttaatgaatcaatgtcgatgtgttattattaactaaagt

SEQ ID NO: 130608 - DNA, 6439 bp, Homo sapiens
cacagagtaagtatattcactttgagactgtgtgatatatgtatgcatagggaggcaaaggacccaaatgctgaccttttaaaaatgactttctttctttttttgagatggagtctcactctgtcactcaggctggagtgcaatggtgtgatattggctcacagcagcctccaccccccagattcaagtgattctcttgtttcagcctcccaagtagctgggattacaggcttgcatcaccacacctggctaatttttgtatttttagtagagatggggtttcaccatgttggccaggctggtcttgaactctattaaggtgatccacctgcctcagcctcccaaagtgttgggattacaagagcgagccacagcgcctggcctaaaaataattttctttatattaacttttttctattagtttcttattgtggcctcttaaaattctactttaaaaaaattttatgtgtgtgtgtgtgtgtgtgtgtaataaatatgtgtgtttcctcaagtgattttaggcagaatgtgtcactgcccttcctgtgtaaaataactcttaaaaatcatacagctcttcatgttacgtgttgacatagtttacagcaatcctacttgattagcttttttatatggaaaacataatcatactgtgtgtagccaattttaagattgtgttattcaagagtcttatattgccatgtaaataccatctcaaaatgtgccctgttgtgagataaagaaaaacttaagagatttattctattaagctatagctttttatctagaaaaatggcaaatgagtagaatttccatatgcaaatttctattaaataaagatttaaagcatgtttcctggaacattttacttatagacaggaaatgtcttgtgaaggtattgtgagcacactgctttctgatcagtaaaatttgggaattaaaatattttccttttaagattatggtgagaattaaaatatatatttgcaaaagaattggcaaatgcagatattcaataaatgttagctcccctcccagacaagcttatataaatgtgtgtgctccgtaaatgaaattcaaagtttaaagtgtatttttagaaaacagtctacttagtgagccatctggggcttatatggcatctttctagtaacagttggctctcctttccaccactatcagtcagtggggtcacagaataataaacttgtctgtcagccatgaaacacaagctctcattcagccataaacaaattagcgtggcaaattgaattgctaagtaacttttccagttttgttaataacatactctgttatttaatacatccccacttttttctgtttcagagtggaagctcaaaatgaaatggggcagcatattcattgttatgttgcagctcttgctgctcatacaacttttctggaacaacccaagagctttcgcccttcccagtggataaaagaacacagtgaaagacagcctcttaacagaaatagccttcgtcgccaaaatcttaccagggattgccaccctcggcaagtcaagcacaatggctgggttgttcatcagccctgcccgcgtcagtacaattactaatagtttcaagttttgttggttggtttctcttggtttgtgcttacatgtatggatgtgtgtatatgtacagtgaaaatgttgtctctttacaaccaattgataaccaatcacatagttttatcagtgtatttagacactatcttgaaaatcagatttatatgctgtgtatcacataatgccttgcctttaacatttactttttttgtacactttttcagattatttctggaaacatatcaatataattacagtgtttgggggtgtctttaaatatattaggttatacattagtcagcattttaaagacatttcttcccaagtacgagaataggcatctttcattttcattttattttgtattacttaatcttttaagcaagcaaaaatttattctcagggtcagctgtacactttattgaccagtacttgataatctctctgtatatgatgaatacatttttacacactaacattagcattaacaggtgatagttgccatggatataatggaattatggctggactttcttttgaaagaaaacttgatgtattctgtgtgtatggtttttccccagattagtcatacagttcatttggaattcaggtacattaagctttagtgaagagtgcatgcagtaattccaatgtgactgcatgacgtggtacagacattacaggtgttgtagacagaggcacttgtctcgtgcagagggattaaattagacctgtgagattatatttggaaaaattcatgtctgtaactaacccattagtgcagtatttaatttgttactattccttcccgccaattctgtccactcctcacctcgcatcagctataaatttggaagtacttgtccaggcactcaagtgacttcatatttctctctgcccatgggaaaagagataggctttatatttccacagagtgaaaaatcctctgtcatggagcctgtcctgccaagtggcaagagtgtggggactgtctggtgatgatgtctttcatggcatctgagtgaagagtgacaggttggctcaacttttttctttttttttttttaattgccttgtattgtaagtattcttccctgcagtccaagtgacttttcattttttgttttaacttcaggcaaaatctttaaccactctggcctctgtttcccccaccaacggggagcagtgacatttacctccctcacagagtcactgtgaggattctatactgatttgaagtggagctgttcagaactgaaccttgtaggaaattccaagggcctttctactgaatctggtgatggggtggggccgtggcactttctctgccacagctgttcttcacagtgttggtgctaatgaggccagggtgcagggttcgattcacacgtaggccagttaacttagagaaaatctatttccttacctctagccagtcacttcctttttccgcagttgtgatgggttttgctgagccatccactctgactgatttcctctgaagtaaacatatttacaatccaaagcaattctactgacagaagtgttgccttcataatcaaacagcttgtttttccatctcctctgcaaccctaattaaatgagtacaggtctacaaaatgttttcaaggagaaaagcagcatatccttaagtgaagtattatatttttcaataaccctgtagtggcttgatgcagggaaccctgggggactttcagcgaagagctgtgctcttttctgactagattagagcgtttggagtggaagacgtcaaatgtgtagtgagatggaggttttacattgttcttctactggctgtgatgaagtgccagaatgtctctttagaacaagagttagattccccctttctccttattgccccttccgttttgacttcccctttatttatttgttgtctaattaggggccaagtctgtaaagttttgtcaaagtgagttagaagttgttttctcttactatttgtgtttaccagagttgggagataagatagtttccatgaaggtgtgtatgttttatacgatgtttgttatagggccatgcattggtaacttgaaaatagaccagcttaatgtcttcaggatgtaaaactctgaatacacggcgtctctttttcatacattgcatgtaagttgttagtacctcacaagctacagaagttcagccatgagattttgtttggcaacatgaacagatttgtgtataactgcaatggcctttttttccagatttccttattgactttttgtttgccttacctggggctagttttttatgctttgtacctagaaaacaaaaaattacattcgttgggctttttttcaaggttgggattaccacaccacctggaatatcatactgtggtttctgcctaaaattggcacatgtaagtattgaagaaaatggttatataattcagttgaaactcttggttattagatgttaggcatctcctgtatgtaagacacaaggccaaccacaacacagaacgatgttgacctgttaagtattctctgaaacatggccaaaatgcattttatgagcttttttttttgctattgtaaatattagtggtttacaatgcgctttagacatatttctttaaaatgcaagcagtgagaaataagacctctctgaattagtagctctaaactgttaacatagaatgttacttggaaaaagtctggaatatgtggtgtacacaagcagtgcttcgtgaatgagtttcttagcttttatagtgcgccatgtttctcaaagtttgtttttgttgacaaaacattttataatatatatcttatgtttattttttttctcaactaattgtgtactgcactgtaaggtgaaaattagccatccattatttatcttctgtggcaatgcatttatatggttgattgggtggggaattttttgcagaaagatgcaaagtgattgggttttcgacttcctatcgcagggagcttttaagaaatattaatttcctatacatttttccaatccccatgcaaactgttcctgtttacataccttctctgttgtatcagtactttgagtgagaagacagtttatttaaaacttgagcaggctgttcagcattgtttctgcttctgaaatctgtatagtacactggtttgtaatcattatgtcttcattgaaatccttgctacttctcttcctcctcaatgaaatacattatatattatctttatgtactcttaagaaaaacgagcaaggaagagtatcttcattattctcattttctctgagttggaaacaaaaacatgaaggactccaactagaagacagatatttacatttaaatagattagtgggaaaactttaagagtttccacatattagttttcattttttgagtcaagagactgctccttgtactgggagacactagtagtatatgtttgtaatgttactttaaaattatctttttattttataaggcccataaatactggttaaactctgttaaaagtgggccttctatcttggatggtttcactgccatcagccatgctgatatattagaaatggcatccctatctacttactttaatgcttaaaattatacataaaatgctttatttagaaaacctacatgatacagtggtgtcagccttgccatgtatcagtttcacttgaaatttgagaccaattaaatttcaactgtttagggtggagaaagaggtactggaaaacatgcagatgaggatatcttttatgtgcaacagtatcctttgcatgggaggagagttactcttgaaaggcaggcagcttaagtggacaatgttttgtatatagttgagaattttacgacacttttaaaaattgtgtaattgttaaatgtccagttttgctctgttttgcctgaagttttagtatttgttttctaggtggacctctgaaaaccaaaccagtacctggggaggttagatgtgtgtttcaggcttggagtgtatgagtggttttgcttgtattttcctccagagattttgaactttaataattgcgtgtgttttttttttttttaagtggctttgtttttttttctcaagtaaaattgtgaacatatttcctttataggggcagggcatgagttagggagactgaagagtattgtagactgtacatgtgccttcttaatgtgtttctcgacacattttttttcagtaacttgaaaattcaaaagggacatttggttaggttactgtacatcaatctatgcataaatggcagcttgttttcttgagccacggtctaaattttgtttttatagaaattttttatactgattggttcatagatggtcagttttgtacacagactgaacaatacagcactttgccaaaaatgagtgtagcattgtttaaacattgtgtgttaacacctgttctttgtaattgggttgtggtgcattttgcactacctggagttacagttttcaatctgtcagtaaataaagtgtcctttaacttcacacttgtcagattcttttatctttatactcattaatattaaaaggaggtacaacttactgtttagtttttttgtccaaaagatgtatttaatacacattttatatatgtttttaaaagcttgtatatattaaggctgggcgcagtggctcatgcctgtaatcccagcaatttggaaggccaaggcaggcacatcgcttgaggccagaagttcgagatcagcctggccaacatggcaaaaccctgtctctactaaaaatatgaaaataagctgagcgtggtggtgtgcacttgtagtttcagctacttgggaggctgaggcaggagaatcccttga

SEQ ID NO: 130609 - DNA, 1140 bp, Homo sapiens
ttttggcaaagtgctgtattgttcagtctgtgtacaaaactgaccatctatgaaccaatcagtataaaaaatttctataaaaacaaaatttagaccgtggctcaagaaaacaagctgccatttatgcatagattgatgtacagtaacctaaccaaatgtcccttttgaattttcaagttactgaaaaaaaatgtgtcgagaaacacattaagaaggcacatgtacagtctacaatactcttcagtctccctaactcatgccctgcccctataaaggaaatatgttcacaattttacttgagaaaaaaaaacaaagccacttaaaaaaaaaaaaaacacacgcaattattaaagttcaaaatctctggaggaaaatacaagcaaaaccactcatacactccaagcctgaaacacacatctaacctccccaggtactggtttggttttcagaggtccacctagaaaacaaatactaaaacttcaggcaaaacagagcaaaactggacatttaacaattacacaatttttaaaagtgtcgtaaaattctcaactatatacaaaacattgtccacttaagctgcctgcctttcaagagtaactctcctcccatgcaaaggatactgttgcacataaaagatatcctcatctgcatgttttccagtacctctttctccaccctaaacagttgaaatttaattggtctcaaatttcaagtgaaactgatacatggcaaggctgacaccactgtatcatgtaggttttctaaataaagcattttatgtataattttaagcattaaagtaagtagatagggatgccatttctaatatatcagcatggctgatggcagtgaaaccatccaagatagaaggcccacttttaacagagtttaaccagtatttatgggccttataaaataaaaagataattttaaagtaacattacaaacatatactactagtgtctcccagtacaaggagcagtctcttgactcaaaaaatgaaaactaatatgtggaaactcttaaagttttcccactaatctatttaaatgtaaatatctgtcttctagttggagtccttcatgtttttgtttccaactcagagaaaatgagaataatgaagatactcttccttgctcg

SEQ ID NO: 130610 - DNA, 1026 bp, Homo sapiens
tgtcagtcattatcttgattaatcaatctgtctattgccccaagcaattgttggtcacttttcttgtaatctctgccttctggctttttaagtttccccgaatttacagacatcatatgacctttgtccagagaatatagctaggaaatatctgagattgctcccacccactaaagtaaaccccattacccagttaattagctgaaagtcacactgttctatcgtgtaccttagtggaatgtttcctgttaaagtattttgggaatgttggcattccctctcttaggttgagggtccaggtggatttggatccttggagcagttcagaatatccctattgttagtgttgtcatgtccaggctctgactctaagaaaagtattgtattatatctatctatctatctatctatctatctatctatctatctatctatatctatctacctatgtacctacctacctacctacctaccgtttcctgttttccagatataaacaaaccctaggcagcacattaatttattaactttaccagagtttgccatactctcaagtctcaatattgtagatgattttttatgaggctaaacatatttcattttgcttgtaccaaaatgaaaacaactttcttatgttacatgatgccaggctatatcctaggtaaggtcatgggtggggaatgttactttaactggcactttattcagtgctacaagtttattaagaggtgtttcaggcattccaacaaaaatttaaaatataactttgtggagttgctattgatttaattgctttagagttgcttcagattcatttcttgaaaattcttcccttctgattatgattttacctctgaggaatgccactcaagaatttataattaggccaggtgcagtggcttacacctgtaatccaagcactttgggaggctggggtgggtggatcacgaggtcaggagttcaagaccagcctggacaacatggcaaaaccccatcttaaaaatacaaaaattagccaggcttgct

SEQ ID NO: 130611 - DNA, 3948 bp, Homo sapiens
acctggctaattttttaaaatttttttgtagaaacaggttattttgttgcctaggctggtctccaactcctaggctcaagcattcctgtggcctcagcctcccaaaatgctaggattgcagacatgagcctccacacctagcctcatccattcctatgctttttatcactgtctttgtgtcatcagctcccaaatctatgcccctagctgagaccacactcctgagctccaaagctctatatcctgctgcctgctggacatctccaactgcattattttgcatatccccccaatttaccatattcgaaatgcctaacctgtactttctgcaggattcattcctgtttccctaaatggttccaccatcctctcagttggccaagccagaaacctgggtctttgacttttcccttccccttttccaggcttacaaggccctgcaggacctggttcctgctcagctcccctagcctgctattgtgaccctccctctggaccttgagcggtactgaaggtgccacattctcactcatccacaggcttccatagtgttcctttgcccccttcctccattactgacctcagccactcaagagtaaagtcattgcaggagtccacccaggtagcctggagaacaccaaatacttcttccatggcattcatcacactggattgttaaacttgtgggagggccctgttcacagccatctcccctgtgcccagcactgcacctgatgcataacaggtgctcagtaaatacatgtagaataatagttgacctggactgaggactttattcgaagtattttgctaagtccattgcctttaacaagagtaggatcagggagactgtctagtagacagttttggcaaagtctcagagacaacagtttggcttaaactaggatgagagtggtggatggaagcaggcagattcgagctgcctgtgctcctggggttgacgggacttggtggttgggatgaggggtgagtaggagggagcaaaaggcatgcgggtgcggcagctcacgcctgtaatcctagcactttgggaggctgaggtgggcggatcatgaggtcaggagatcgagaccatcctggctaacatggtgaaaccctgtctccactaaataaaaaaaaaagaaattagccggatgtggtggtgggcgcctgtagtcccagctacttgggaggctgaggcaggagaatggcgtgaacccgggaggcagagcttggaatgagccaagatcgcctcactgcatgcactccagcctgggcaacagacaaagactccgtctcaaaaaaaaaaaagcgtgaagggtgactgctagggtgttggcctgaataactgccagctgctgctgcttcctgagaaagggatgaagggcagtgtatatgaataagtttgtgggggaaaaaaacctatctttggtatgtgtttggtttgatacgcccatcaggtagccaggtagaaatggataaatattccaagatcaagcaagcctggagttcttcatttagaactcaccagaactccctaaggtaggagctgttgccagctgaagtcacataacttcctaactcacacagcaagtgagcagctagccagggtttgaatgcaggtggctgacccagcacccacctgctgagctgctacacaggaagggtgtttccagttctaggtttggccaagctcagtttcctacagtgtaaatttcttcatgccagctgtaggaattgtttagaaggtcaaagtatgcttgctgggcttacagattttaagtgtaatcaggtgtgcttacagttatagacaagaagtacagagtagaagagaaaatgagccagaggaggatgagggcctggcataatggtggtcaccaggcactgttgctgggacttctgagcagttgaataacatatagcaagactgttactatctagaatttgctcatctgcttgcagaaaagtttgaaggatattattcaaattcaccttattataaaagcataaatatgaaaaagaaccaactctttcccttttatttcacattttaagatatttataggttgaatttgagtaagagtatttacaaaacattatgttgcatttcttgtgtttgactcctgcagaaagggaatagctgtagaatgtaggccaaggcatatgctttcttctaagggtatgtgtgtatgtgtatgtacttatgtatatatgtgcatgctgatttgaaataacttcctttttctgttttattttaggtacaatgactcttcttgcttttcacctaagttgaataagcaccctgtgcactttaatctcctgtcggtaccattgggccaactaaagacaaggttttgaaatctcagctataaaagacatccagccaaactctcagtcttgccttaacaatgttccagaggctgaataaaatgtttgtgggtgaagtcagttcttcctccaaccaagaaccagaattcaatgagaaagaagatgatgaatggattcttgttgacttcataggtaaggtacacttggttacttggtggttcatcttcacagtaaaaatggaaacttgcatctcagtttttgcataaggaaaccaataactgaggggttttcagccttaaaagtaagcaggagtttgtctttaaaaaattgcaggaaaccatctgtgctagataatgtcagtgaaattgactgacatcagactttttagttttgcaactctcacagattgattagatcaagggcacttcattagaagccccttttattagacaagtagtaaccaatatgtctcattacatagttatccagcagaatagaaacagtcttaaaatcactcctgcaaagccaacataaatctatcccatatagtgacacacacacacacacacacacacagaatttctgtgctcagaaataaatttatagtcatatagatgaatataaatggttttctgaactaaataaaagaagatacgtgagcatcagctaatagtatcatctcttctttttctgtgctgtgaatttgatgggtgactttataatgactgcccaatgtgataatcatcctcctgtgggactcttcaacaacacatgtggactgcaatgtggactacgatctagatacttgcactggtttctcagcagaagaagaagaagaagaggaggacatcagtgaagagtcacctactgagcacccttcagtcttttcctgtttaccggcatctcttgagtgcttggctgatacaagtgattcctgctttctccagtttgagtcatgtccaatggaggagagctggtttatcaccccacccccatgttttactgcaggtggattaaccactatcaaggtggaaacaagtcctatggaaaaccttctcattgaacatcccagcatgtctgtctatgctgtgcataactcctgccctggtctcagtgaggccacccgtgggactgatgaattacatagcccaagtagtcccaggtacgttacaagtatttaactctctgtaggcagtccactgagcatgcattttgtctctactgtaattcaaagctaagttattagaagatgcaaaactaattttgttagagatttatgaaagcatgtgcatagtacacaagatggtccgtaagataacttgttgaccagtcacagtgtctcacacctgtaatcccagcactttgggaggccaaggcaggcagatcacttaagctcaggagttcaagaccaccctgggcaacatggtgaaaccccgtctgtacaaaaaataacaaaaaattagccaggtgtggtggtgcacacctgtagtcccagctactcaggaggctgaggtgggaggatggcttgaaccaggaggcagaggttgcattgagtcaagattgtgccactgcacatcagcctgggtgacagagcaagactctgtctcaaaaacaaaaact

SEQ ID NO: 130612 - DNA, 1035 bp, Homo sapiens
gcacatatatacataagtacatacacatacacacatacccttagaagaaagcatatgccttggcctacattctacagctattccctttctgcaggagtcaaacacaagaaatgcaacataatgttttgtaaatactcttactcaaattcaacctataaatatcttaaaatgtgaaataaaagggaaagagttggttctttttcatatttatgcttttataataaggtgaatttgaataatatccttcaaacttttctgcaagcagatgagcaaattctagatagtaacagtcttgctatatgttattcaactgctcagaagtcccagcaacagtgcctggtgaccaccattatgccaggccctcatcctcctctggctcattttctcttctactctgtacttcttgtctataactgtaagcacacctgattacacttaaaatctgtaagcccagcaagcatactttgaccttctaaacaattcctacagctggcatgaagaaatttacactgtaggaaactgagcttggccaaacctagaactggaaacacccttcctgtgtagcagctcagcaggtgggtgctgggtcagccacctgcattcaaaccctggctagctgctcacttgctgtgtgagttaggaagttatgtgacttcagctggcaacagctcctaccttagggagttctggtgagttctaaatgaagaactccaggcttgcttgatcttggaatatttatccatttctacctggctacctgatgggcgtatcaaaccaaacacataccaaagataggtttttttcccccacaaacttattcatatacactgcccttcatccctttctcaggaagcagcagcagctggcagttattcaggccaacaccctagcagtcacccttcacgcttttttttttttgagacggagtctttgtctgttgcccaggctggagtgcatgcagtgaggcgatcttggctcattccaagctctgcctcccgggttcacgccattctcctgcctcagcctcccaagtag

SEQ ID NO: 130613 - DNA, 1047 bp, Homo sapiens
cgaggtgattcagcgcagtctccccattttcccaacagtgagactgaagctcagaagggccaatttagctccagccacctgtagtagagccacagccagaactgctgctgtggatggccaggcccctttaaccctccccaggaactccattctgtgttcttcccacgggtgtcagcagatgtgccatgtaaacaccagcagtggcttgagtgagatgaaggatgagctcctccctcacttggctgggcttctgagcactctgtcgcccaaggttggttgtccttgcagagatatgggacatctggaggcagcctctgactttgggaaaccaaaagagcactgacttgtactgctccctagaaagctcctccagagaagcctttcctgtatcttacttgctacttgcatatattccaggcagaagctgccttcctgggtttggacctgtggccagagggggcaatttgcatgtgggaacccagcagctgtcacaactgcagtggccccagcaatgttttttggccttacagctgccagttatctgacctgggccccagtgccttactctcatgcagcatcacaggttggggacaaggcattcgttcaggacaagcaaaggttcccctgtgtggttctcccctcccagtggctttagctgattcagggctagagtccagcaccatgctctgcagaattgggcttattctctcaactggttcagcagacacagaattgtacgtggggccaatatctgcctccacaatttaaaataaatggaggaaggattttgaaaatatgtttttccctctaagcatgtatcctcaaaaatctttatttacatcagaccttatgataacttattttggaatataactatcacaccacagcaggtcaaacaaactacacttttcttctgattgttcttacatagagcataaagctgactttgaattctgctacagctccagccttcatgatttggccgtgctgctttccagaaggtttcaggaagactggttatgcaagtgacacttcctgtttacctat

SEQ ID NO: 130614 - DNA, 1028 bp, Homo sapiens
tagactttttataatgtggttttgttcagtttataattgaaaagacataatttattttttaaagggagggatggaggtcttttgagccaagcagaacaaggacaaagctgccttcttgaaatgctagggcccagacactttgtttcttttctgtattgaggggttcttttctcttgtcggggaaactgctggactgacgctggttaaagctgttcaaagaacaacagcgctacttcacctaaccttctttgcttcacctctttgctgaattccagaactgtatttgtaagtttgtcctcttaggacacatgctttctctggaatttttattttcgttctatgattgccctagcattgtgaatattagtggtgatctggggaggagaggagtctaaagctctacttttccatttacctccatgtagaaccagcccagttgagagcctccatccctgggcaggagccaaggtcaacagtagcagtgactgggcagggacagtctctgggtcatcagtaggagggtaggcctttaagactttttctagaacagtcctgttcaacagaaatagataatgtgagccacatgtatgtttgaattttctagtagccatatttaaaaaggaaaaagaaactggtgaagttaattttattaatgtatttaatatactaaaattattttttcaacatgtaatcaatataaaaactgttttgcattttggggggtactaagtctttgaaatacactctagtgtgtactttacatatacagcacatctcaattcagatacaaagttttcatttgaagtacttgatctatatttagacttcgtaaaatttataggtgaaaaagtagattcataccctaactgttccaaacatacttgaaagttttcaaaaaactaaattatcagcttttaagtttaactggattaaacttagtaaatggattaaatagtaaaatgaaaaatgcagtttctcgatgatactagtcacatttcaagtgttcatgtgcacagtgtgcctggtgg

SEQ ID NO: 130615 - DNA, 1140 bp, Homo sapiens
cgccgccgccgggcccggccgcccacccagtgggtcggtcctcggcggcccccggggcccagggcgcggacagaggctgacagaggcggcggcggcgcggacaagggcccggcctggccccggcgctgggcggcggttgggagtttggtctctgcctcctcccccgagcgtggcttgttttcttggccgcggcgggacctcctcctctcacccctcctcactcccctccactcctcctcctccgcctgctctcggccgttggatggggccgccccttcgggactcggcgtcggggctcccgcggccacccccgggacgcatctccgaagacagcggcgcttgggcttgtggcccggcgctctgtccccgccctgcgatcccgtcccctgcgcctgccctccgagttccggaggccctgcggctatggggaacctgctccgtgacccggccaccggcccccgcctgtccgcggcctgtcccttgcttgacctggcttgaactcagtcttcgctacctgactttgcacctgtggaaagagcgctctccttggcccttaacatttagatcctttggatcgctcacgcttactgagcgctgagtatgtgccatatactatgctgggggctttgctttatcgccccagttgattctcataataaccttatatgaaataggcccggctatcttacacataggaaacccgaggcacagagagattaagttgctcaaggccacacagccaattaataaaaggaaatggtgtttgtatttcaaagtggcagctgaattttacctggagagtctgttttgcttgtattttctgattatatctgctcagtaggttaattccaatacagagtggattaaggaagagcctctttacaactgtgactcccaaggacttgggcatctattgctaaaaaagccttttctcaatgcacaatagttttgggaaaagggggaacaatgtgacccttggggtcactgaacagaagtcataatgagttcccccacgatactgaaatcaccagcctggtaattgaaatacattttcatttgcagatgtgaaaagcactgggaagcttttaagtcgcaatcagtgtaattctgaactggcagcataattttaaaaggcccctg

SEQ ID NO: 130616 - DNA, 1080 bp, Homo sapiens
ctcctgagtagctgggattacaggcacccaccaccacacccggctaattttttgtatttttagtagagacggggtttcatcatgttagccaggctggtcttgaactcctgacctcaggtgatccaccctccttggcctcccaaagtttaaggtttacagatgtgagtcaccgtgcctgaccagaaggccattcttagtagtgagtgagggagacaatctaataatcttctttttaaaaattacttaaagaatgaatgaatgaatttatttaaaagtacatgcagtaaaattctctctttgttgtgttctataggttccaaaaaatgtagtcatgtatttatcaccatagtcataatacagaacagttacattaactcaaaaaattccctcaaagatactgattttttagacagtagacaatgcatttgctaaagtttttaaaccctgtttataggttaaagactcagtctctgagaaaacaattggactgatgcgaatgcagttttggaaaaaaactgtggaagatatatactgtgacaatccaccacatcagcctgtggccattgaactatggaaggtaaaaaaaaaaaaataccacttttaatttgtatgaatattattcgagtctactttttgatggatataatttgggtactggtgattatagtggaatctattctgaaaatattcttaggcttatgtattcagagctgttatagttttggcacagaaatttaaaatcacccactgataatttacacacatcttttgtatatttgtttattaaaggaaaaaggaagaattagtctctacataataacttgtattttccacatttccatatttgcctgcagaatttaaatcctacacattttgatataatagcaagtaaaatgttctgttctctctgcctagcagcagctccttataccagtgttttaatccaggttttgggcataccagtgttttaatccaggttctgggctgtagaacatgtattaatcttttgtgatgggagacttgctctcagtgttgtccagatacaaatctaaaactgccttgtctagtttgatagaatta

SEQ ID NO: 130617 - DNA, 1032 bp, Homo sapiens
caagtgtctgggcactaggtgagctctttcctactggagtgtctttacttgctaaggtaacaatttaccatgtggattatttttgttggagttttagttactctatttttcgaggagtggttatttttgctaaatagaatctttatcctgtggaaaacaatttgcgtataatgagtaagtatagaagtcagggtggctaggcacagtggctcatgcctataataccagcactttgggaggttgaggcaggaagataatttgaacacagaagttcaagaccagcaacatagggagaccctgtctctacaatttaaaaaaataaaaaagtcagggtatatcacttaatagagaagctcagtacttaatgcttaattctggttttgttttgtttgaaagtggaattgttaaattattagcagtataggaaaaaaagacaagttagtagaaaagtattagaagtatagtcttataaatgttttgaaatattttctagggacattttctttttccctgatacttctttaacatagctgtctatatggtgatgttattacaaatgttcccttacttagttttgtatttggtttgttcattttattcagatctacagaagtcatttctagtactttctaaaaacttataatgctctttgttttttaggctgttaaaagacataatctgactaaaagatggcttatgaaaatcgtcgatgaaagagtgagtcaaaattgttcaagtcttaagttttttcttcctgtttaattcttaagctaattcttcaagaaggacattttttgactgtatattaatattttggaggaaggaaacttttagagaattatgccattttattcatactttacccttgcatgctaccccccataccctcacattgagacagacaagcaccaaggcagaggcatgtgtatgcacaaccacactccactattttggttttttcaaaaggaaattttcatacttacataaaagtagagagactactctacatgtgtagagtatctggtgacatgt

SEQ ID NO: 130618 - DNA, 1339 bp, Homo sapiens
taaaaggagaaagggccatttattaggaggaaagagaaggaaagaatgttcagaggaatagaactgagagccagtgtcttgaaaatcaagggaggagaagatttaagaaagaggagtatcagagttttacatgctacagagagattgaagagaaaagatagatgtggtgattagtaaatcatggatgatcatagagtaatttcagtagatggttgggggtcaaactggagtataatgggttaagaagtaagtcaggaagtagagggcttttcctggtgttagggacaatataaatgaagacatggagacaggagtgggcttggcgaacacaggatgatgggcatcagcctgagtgaccaggtgttcgtagctcagagtggtagggagttaggttggatggacgaggttagagtcaagatgtggaggcctttgaattccaggatgaattgttgaaacttgacctatcagggaattaaagaaggtaaaaatgaaatgatgatgtgaggacattaatttgtccggctgcgtggaacgaattaaaggtcagggaacacaggcaagatcacctaggagggtcttactcatttaaacaggagagaaagtcagtctaagctaggggtgcacaggacttggtaatgcaagtatttcttcattttccccttaccacagagctggggagtcaaaattattatgagatattgtaaggtcgctggaaaatgctaaagccaatctgtaagaaaggatggaatttttactacagtagttactttttcctgagtcctttaggcctaggaaactaatcttaatctgcaggagatgagctgttttcttgcatttgagagaggccctatcagtattgttaaactgctggtgttgctttcagagggagagtgtttatttgcttaattttgaacgagcttcctctcctcttcctttttaggctaggtcctttcacaaaactgttcctgtgaaagcatttcctgcttttcttcagacggtaagtagattaacagagaaggctgtataattagtgaagcagatgtgtatgatctgtttttatattttataaagttcccaatgaacttctttagttcggagcctttgtttttgtttccctccctcatggcggctttcattagttactgatgcttttgctgagggccatttctgtatttctcagaggcaggtgagctgagtttttagcacggactttgcagccagattgcattggcttgaatctgttttgccccttactagcaatgggaccttaaattccttaagaaccacattcctcagtttactcttaggtgaaatgggaataataggagaaactactttg

SEQ ID NO: 130619 - DNA, 1050 bp, Homo sapiens
gaattctttttattgtttaagtcagcgtaagttgggttttctgttgatttcaaccaaggcttctaactaatagtgtcaacacaataatccagtcacacagagtcactttcagttctcttaaatacatgtactttttacttcaaaatatggttaaactcagccttcaatgtggttaggctgggcacagtggctcacacctgtaattccagcactttggaaggccgaggcaggaggatcacttgagtgcagaaattcaagactagcctgagcaacacagcaagaccccgtctctaaaaaaaagaaaaattagctggttgtgttggcattcacctgtagtcccagctacttggggggctgaggtgggaggatcgcttgagcccagggggttgaggctgcagtgagccatgatcgcaccactgcactccagcctggatgacagagcaagatcctatctcaaacaaaacaaaacaaaaaagtagcgagtacagtcacttgtaaaaagcatgatccaggccccagtgatcatggctgaagaacaaatcaccatctgcggcatctagaaaaaaaaaaaaaaactttaaaaactgagaatattccagctgttgagcattccttaagtgttggcttgtagacatctgtcacttttgtttgttcgtttttttggttttgttttgttttgttttgttttgagatggagtttcgctctttcgcccaggctggagtgcagtggcgcgatcttggctcactgcaacctccgcctccccggttcaagcgattcttccgcctcagcctcccgaatagctgggattacagacacgtgccaccacccccggctaatttgtgtgtttttggtagagacgggttttcaccatgttggtcaggctgttctctaactgctgacctcaggggatccacccgcctcagccttccaaagtgctgagattacaggcgtgagccaccgcgcccggcggacatgtgtcattttagggcacctgcctgaacaagtgagcagctctcacactctgaggtcacaccttctctcaaaactat

SEQ ID NO: 130620 - DNA, 3105 bp, Homo sapiens
atggtttatttatttggagccttttcaagttttatgatcctttgacgaatttatttttctttttaaaaatgtgattgaaggccgagagcgcgctgccggtgttgcttgaatagccttgtgtgctctccgtacattccagcaataacttgagtgtgcggtggaagtgggtatgaaggttacagacacctaagccctcctcggtaattcatagactcacaaaacgcgttgttgataaatgccttctttgtcgtgttgtgtagtacgttgctgaagagactcattaaagaaagatttagacagaaactttgagagtcttaaaggcatgtgttctcttaagaataagaagtgatcttgacagtttgaagtttttttcccctccctttagtttcttaagggtgaatgcctaccgcgttttgagcatttactttttttaaatactctggcagctcgtggggtcttcacgttaattcagtattaacgaaggcttcattataatctctttgggtcccgaccacacggggaatgaatggtattaagctatttatttggaaagcacacgtaatcggcctctaaataaaactagtatagtgactaagcttcagaagaaaatattcagcctcagtaaatgaatctaaatgatttttaaataaagacatcttgctttaaaattctgttaaatgaactgaaaaggctcttaaacacaaatacagtaagccctaaaaccccaaattcttggagaattttactttttagatctaaaaatacagcttctgctcatatttgattgtcaatttctttttccttttttctctttttccttccttccttttccttttcctagacagggtctctgtctgtcgcccaggctggagtgcagtggtgtcatctccgctcactgcagcctcaaactcccggggcccaggtgatccacctcggcctcctgagtagttaggactacaggagcgcatcaccacacctggctaatttttgtttgaattttgtggagagaaggttttgccatgttgctcaggctgtattgccaatttctgttgttcttaaaaattcttttagttttgcttcattgtcaagtaaatggcattataacattttttatttagaaatgaaattaactaatttcacaaatgtagcagccaaactggtatttaactgagatcttatgactctgaagccttttcatttttcctgtagcataactttgtaggatacataactcagtcttctggagcaatctgtccatctcgtttgctcttatcactgctctgacttgaatttagttcttcagtataaatacttatttcccagcgagctgatttacaggtgatccttgtgatgaaattttttccttaaaaatacttaagcctatactctttgaagccttttctgctctgttctctcattccactcccttgccctctccagaaatcaattaatttctcccatggtattactgtaaatatcgcatagattctgtcatgacatctccttgacagcaggcaacacatcgggtctgatttgcctcttcattccctgcatgccaagaacatagcagatgctcaggaaaggtttgaatggatgagtacacgtatgtttgttccttgtaaatatgcttcatgaatttcttttgaaattgtaaattccatgagcatcatagttaaatcttctttgtagtctttttcccaatacatgccatcaactccattaaatccacagattggtttttattatatatacacacacacacacacacacacacacacacacacacacacatgttttgttgttgttttgttgagaatttaacttagtacctgagtgaattttcgcctgggggtacagaacttgaatatttatgaaatttctaagtagataatggattaaagtataattactgatgtatgagagagaagccatggatcatcaaaaggattataatcataattttaagtgtgattgaatgtatttgaacttgatggaaatattgttaatgcttgaaaaatttaaaggtcatatttatacatttaagctcttggaacaaatctcattatagctctatcaattattgttttgccggaattgtcttagaatttttagaatgccctgcttaatagaaagtatatgaaaaatttttttgttgttgtttatctttgatgaaccagctttgtacatgagctgcctgcttaatatttaaaagcaatgtatgtgttgacttaactgaataaaaaatacttcatggatacactttcacagtgctgttttaagttggaaaacctctctaggttaaggtgttttgtaattctataatgcctatagaattcggggtttatttcctgcccccacccaagataactttctcccctgtcaaactgtaaaccacaaactaatgtgctcaatttagggaggtcctgagaagagaataaaaggcattcaaatagttgctgtgaatgcactggaaagaaagcaagttgcatgtaggatggactggaacaaataaaccttgtcctgactcagctccttgctggcttgtgactcttgaacaagccgcttcacttctgtaagcttcactggactcatttgtgaaatgggcacagaaatatttgcctcagtgttagcgtgagggtcacccaagattcgatgtttgtggaagggcctggaatacgatagtagctattattttaacaaatgaacagagtggcagtgaattatatagaatcatagaatttaaaaatttttaaagggaagcagcctgtaggaatacctagttcagttttcagccttggctgcacattaaaatctcctgaagagctacttaaaaagaatattgcctggatcccaccccaggacaaataaatcagaattactgggtttggggacagaacaaaggtaattttgcctctttgttaaaacatccccgattttagtgttcagtcaggtggagaacctttgatttaactcaatttcccatctcctttcttatgcttttcattttgtagttgagtaaaatgcagaggggttagctgccagccagattcctatcagtcaggctagaaaggatgtattaaatatttgcagctgaggaaagtgaag

SEQ ID NO: 130621 - DNA, 3976 bp, Homo sapiens
cttttttcccttaaattttcctcctgctttctaaactaggggttccccaaagtttagtcctctgctctcgtttttcttccagcatcagccagcatctctaggtgggtgactaccaaatctctctgtcctggagctccctgcccatcctggcatctctgtcccgcagatgtgtttgtcttgtggatgccctggaggacttcaagataaacatgtcccaaactgatttcttctctctcctaaaacaaagctagcatctgcccagtggcttacccttaagcctttgaagtcatcttacagtcctttttcatccatgtgttcagttatttcctaaatcctatctgctatgcctcagttatctgccaattattgtggttcaggcttttcttacctttcatttagagattgttgtaatcctcatatgactggtttctttgtcttcagtcttgcttcttcatattctcttcagtccatcccgtgtactgcttctgtgtctgattaatattttcctatttaaaaacctttgtcttcccatggcctgtgtaataaagtgtaaactcttctatctgatggttgctttcttttgcagtttgtctcatccctatcttaccagacttcttatcactatgccttctcctgaccttgcctcctctggcctaggctccattatttcctctctgggggaatagtcttgtgtaccatcatccatccccaaaccccagatagtttgagctactacttttgctttaaggcccagcttgaatttctggtccttacaagacctgttcctagatgttctacctggtcaaaattacatcccacctcaactccttggccctgggacctttaccactgttttttttgttttgttttggtttgttttaagttaaaaagtttttggcttgtttttcctctgctgttttagactttgcacagatttaagttaattgtatacctcagtttatagcacattatagggataccaaaccccttccttgttttgtttttttccttctttgtcagttactcccatgataatctttcctatagaaacacaactgaattatatatacttgtctatataaatatgagaatatagctgtctttctcttcctcagaggttttcagttttgagtatcttctgtcctttaatactgctttgcacagagcaagtgataataaatgtttgactacttgaaattcattaaaaattaatggttttatttgcttttgaattaatcacttagactaaaaccctggagattaattttagctttactcttctatatccagtctgcaattctgaatctgacctatcctttattttcctattgtaagcttcagactcttcatcaactttcccctctatttttgcagttacttttcaactggatcctgttttcagtctcttccttctcaatttatctttcgttgtttctatagttatctaagaaaaatccagatcagatcaggccactccttccaaaagtttcagaaggaagtcttagatattaacaagattttgtgttatttttccccccttttcccactaaataactcccctacagcctctgctgcagctgtacagtgtaacttttttttttcttttgagagggagtcttgctctgtggttcaggctggagtgcagtggcacgatcttggctcactgcaacctctgccttctggtttcaagcaactctcttgcctcagcctcccaagtagctgggactacaggtgcatgccaccacacttgactaatttttgtgttttgttttttttttttttttggtagagacggggtttcactgttggccaggctggtatcgaactcctgacctcaagtgatctggttgcctcggccttctaaaatgttggggttacaggcttgagccactgcaccttgcccagtgtgactttttatgtgcgtttttacttgcaaagctttgtgcctttatttagccatttttttgccttcttaaattccgctcattcttcacaacctgttttcagtgttcaaatgctgtattctctgtgccatgccctcactctttgctttttttgcttccttactactttgctaatgtttttagtatagtacttatctccttgtgttttgtattaaccttgtggcgtatatcttatttcctagtgtctgctttgttctttttttccaccaaacataaaccttgaatgtagtgagcaggttgtaactgttttgaatgatactaaagaaaattggtcagggatgtcacaggataactaattcctcagtagtgttttagttgagctttaccaggtttatttttcagatattatttaattaattaatttttttcttgagacaggttctggctctgtggtccaggctgcagtgcagtggtgcagtcatgattcactgcagcgttggccccccaggctcaagctgtcctcccgcctcagcctcccgagtagctgggaccacaagtgcacaccgccacacctggctaatttatgtaattttggtagaaatggggtttcaccatgttgtccaggctggtcttgaactcctggtctcaagggatctgcctgccacggcctcccaaagtgctggattacaggcttgtgccattatgcccaagctattttttagatattatccaatgctttctttacagctgtcagcactgtacagctgcccctgtacaaatacttttagaaatgatgtgagtttttgaatctgagttttgtgatgatgaaaatatgcacgtaatcatcattttttatttactaactaaacagctgtgctttttggagaaagaaatcatttatatatattaccatgagattgaaattttttaaaaaacaggatctgccttgctcaatacttagaatttttaattacatactgtacttaaatgggccacaacatttgcttgtaaatttaaaatctgtgggtccagtgaagcagttgatgggtagggtgtggttcctgttttctgtgaaaattaatatagatgttaaaaatgaagtctttgattttcatcaaactcaagattgggagctgctgccacttctaactgctgattgtattcagttcagtgcacattggcacattgatgccatttatgcaagcatttttttttaggtgctgttgcaaatacaaagttggaggaaataatctttttttttttttttcttttttttgagatggagtctcgctctgtcgcccaggctggagtgcagtggcactatctcggctcactgcaagctccgcctcctgggttcgcgccattctcctgcctcagcctcccaagtagctgggactccaggcgcccgctaccgtgcccggctaattttttgtattttcagtagagacaggctttcaccatgttagccaggatggtttcgatctcctgaccttgtgatccgcccgcctcggcctcccaaagtgctgggattacaggcgtgggacaccgcgcccggcctggaaataatctttttttaaggaacctccacatctgttgggaatgagcaagtacacacatttttatgaaacaaatagactataagtgctataaagtggtgcaaataaaatggtgtgaggattcacctggccacaggatatacccagccacaatatttggctgtgaggctatcgaactgagtgtgtcttgaagaattggtgagatttcagtaaatagagaagaacaaaggagggaggacatgccgagcttagaggtagggaaagaagcccagagcatattctggtaatagctagtagtctggtttgactataacagagaatgtagagaaagaggtaaaactggaaagatagattgcagcaggttaggacttgactgtgaagggctttgaataccaagttaaggattttagatttgattctgttggccaaggaatctggtttctgagtagacttacctgattatagctatagttaaagaatattaatcttgccttgtgtaggatgatttgaatcaaa

SEQ ID NO: 130622 - DNA, 1532 bp, Homo sapiens
tttttaaagaaaaataccatatgtaggacaagatgaaatggatactgtcattgtgctgcttggtaaattggtgttacttccagaatggaaattttgtaaaaggtagcaagattctttattcatgccttttgagccagtaattttatttacttcttgaaatttgttctatgaagccatttctgcaaggggacgggaaagctttctcttagttcttcctatatacactggtattctttcccaagaaaagtagacattaatcaaattgggccatgtttatagctctcttctgcttcctcccctcaatgagtaggatatgggaaggactcagtccttggctaggccctgtaatcttgtgttctaaccctctcacaaaagtgtagcattcttactgcttggggcacctcagtgtgctggaggtaaatttagatttgggcttaaggggaagggagaggccttgcttaggccctgaaccaaatggtagtgccctaatccagtttaccaaagaacattatttggggtatctagctgtaacccagataaaagtggtactttgatttcccttttgataacctctctccactcctttctttccttgctgcctcctgtttccctaccaccattctctctttctctctcttatatgtgtttgtgtgtgtgtgcagggcagcatttatgtattcctgggttttttagttcattgcttaccatcttttttatgtctgacacatacagaaaatattcaggaccaaaaaggataatggaagaggctgcttaaggccaaaggccttaggttttgtgcatgcccatagtttttcagatatatgtcacaacccaccaatcaatcaagtgggctgccagaatcattaaaataaatgaagataaaagaatgcatcattcattgttgaaataattatacgagtgtttgtaaccttgcaatataaaatgtgtttatgttggtcattgtcaaactttgaaagctatttgctttgctgcagccaaatactaattaataatgccccaaaccttgcttaagttgcatcattattaaacagggagaaagatttatgaacaaagatttagacttaatatattgaaacatttggacaatgaaagattatcaagacaccagctgggtaaatcatgacatatccatcctttcaggtgatttgttcaaggtagtattcccttatcttcagtatttttagggtttgcaatgaaggtccagaggttagttaatagcttccttagagttcttgtagattcagtggagttcttaggaacaattagtgtaccataacatactgtaacatcacagagaaatcagatttgaggcttgttctgctgtgacagccttgggcaagttatttaacccctctttggctgtttactcatccataaaatggagctaatagtgcatgtatcataaggttgctgtgaggaggaaatacagtaataagtgcaaagtgctcagcacattggttggactccctatgagtagagttcattccaggttaagttttgcttttacatta

SEQ ID NO: 130623 - DNA, 3985 bp, Homo sapiens
ctacatcctacttttgtggaggacaagagggctttataaggacccaagatttgcagggagacagaattcagaaataaccagaattctagtgtcctttataatgaaggccaagaagggctatagtgtcagtttttgagctgaatactggaacttacatactatgctgttagtctttaaactttaaatggtcttcttctcaaggcttgttgttctttaatatgacttggttatagtatagtagtattagtttagtaggtttgaaataggatacaactctgggacttgagtgaagtcaatattggacttagagattaaatgtttagattaatagggtgttttgcacattgttaaaatgttattaacattttttagtaccttttctgtgtcaaaccgtatcagtttcaaacaaaactatcagatgatctctgctttttaggttctgcatggtctctggaggaacagatttcagtcctttggtaaaagtgaagctagaatatacatggaatatggatagctcacaggaagggttttagtctagcatgggagtttaaaggaggcttcctggaggagacacgattacctaaactaagtctcgaaggatgaatatgagttagctgcagtagtaagtagtaaaaggaacaacagtgaaatggactacaagtagtagagtgttcttagaatatgacatttgaggtgaagactgacttatggtgaggttggagtgacaagaaccaagtaatgaaaggccgtgaacaccctgtatttaataggttaagggatcattttgagcaatgatggggtcaaattagggttttagagatcactgcccaaagattgatttgggggcaagattgaaggccaggacacatgttgggaaacagttctagtaatccaggtgagagaattaaggctgtagctcagtggtaatagcttacttggaaaattgtagtcatttttcttagtttatgtaacattttgttccctattgttcagaatcccattgagattacatttcattgaatggggtttattattttgcagagataagttatgttaattatccaatcgtctttcattcaattatgtctgtaggaagtttatacttttacaaatacctgcttaactagtatggtgctacgtggagatgataaataagtgtttttcatcattttaaaaattgagaaatgttagcccttttgatgtgcttagtgattatcttagagggaaagaattttagaacattttgcctttgtgtaaaagcaatgatttgttagcttaatttatatataattaacttataggaatttataatttatatgtgctaatttctttttcttttttttaaaaggctattagtgaaagatggtggatcgcttggcaaacagtgaagcaaatactagacgtataagtatagtggaaaactgttttggagcagctggtcaacctttaactatacctggacgagttcttattggagaaggagtattgactaagttgtgcaggaaaaagcccaaagcaaggcagtttttcttgtttaatgatattcttgtatatggcaatattgtcatccagaagaaaaaatataacaaacaacatattattcccctggaaaatgtcactattgattccatcaaagatgagggagacttaaggaatggatggctaatcaagacaccaactaaatcttttgcagtttatgctgccactgctacggagaaatcagaatggatgaatcatataaataaatgtgttactgatttactctccaaaagtgggaagacacccagtaatgaacatgctgctgtctgggttcctgactctgaggcaactgtatgtatgcgttgtcagaaagcaaaattcacacctgttaatcgtcgccaccattgccgcaaatgtggttttgttgtctgtgggccctgctctgaaaagagatttcttcttcccagccagtcctctaagcctgtgcggatttgtgacttctgctatgacctgctttctgctggggacatggccacatgccagcctgctagatcagactcttacagccagtcattgaagtctcctttaaatgatatgtctgatgatgatgacgatgatgatagcagtgactaaggacacatttgggagtatttaatcaggtgtggctatctgagaaatcaactttgggggaaatgtaagattctgagctctctctctgttttgttctagccatgaatttgcctgagaaacttgtaacctatgtgcctcaatatattccatagaaagtaggtccccctgccttctcccactcctcacactcttctacagggataggcttttgcaaatatatcagataaattttttgtttcttgtttatttttaggttattttcttggaaggttgggaaaagatgtttgttttaacaggtcatgtactacgttgttgttttcatttctgttataagtaaaactaaaagcacagaatggtgggaaaggggctataatgtggttcattaataatgttagcagcttttttctaaccatcctgtctaatggttaagacaccagtaacaaaaacacatgatttggaaatactttggctttttcatatacctagtggtgccttatcataatagcactgttacatgaaataagcccctaccttcttactttctggtttgttgaaaaaatacactggtgctctttgaagtgataaaatgagtgtttatgaatgggtgtaattaggaaatacttctcatctgacagctacaaataactaagtttggaggtattttcactctatatgaataaatatttttccataaaatagttgtgattatatttttgttttatataggtcccaaattataattgtcaaatatatattttaaattaataaaagttgtcattcttaggaatttggtttgaaatttatcagttatacagaattgtcatactgcattagcttctacctttagtaagacatattttttaggtataaattcttatgctttaacattatttctggattgaaaatcttataaaacccttgaaaataaacagtctcttttttacaaagcctgtgttagagcacagatttacctaggcttgaagatttggaagaaataatatgtaagaatggcctcaaggcagaccactttaagtttggctagacttcatatcgtggaagtattgtctatttcagtgtgaaactatcttgaatttgcaaatatagtgttatattttataaagttttgtaaaatcccaaacaatatttctatttttgtaaaacaattgtatgtataatctgtatttgaaatcattttgcaatctatggaaatagagtagcaattgctatttctaaattgtgaactttaagtcaatctagatttattttgagaagtaattgttcactctttacttttgaggcagccattaggttgaaagtatatatttatcatataaaacttgatgcgttttgcactactctttccatttatatgctgcaaacaactacagtctttgaaatatggaaaatcagcagtctaaagtttgttttaaattctaaatttaaaaaatcttcaaatctgaatataccgcaaatgtcatgagaagtttgattcagtaacttgtgatggaggattctttggtatcttactgtttggttaaggcactaattttacttacctattagattttgaaagtatctgagatatacaaatctccctgtaggaaatgtgaaagaaaagcacaacaaaactagggttttttgttcatttgcttgcttttatgattttttttggtttgttttaatatcaggtggatttttgtttctaagcaatatatacataaaatcaaccaacatatctgaaaaggatcatgaaacctgagaaatgctaatggagatttgctggtacataggaatctagcaaattcaggaaccaaggggaaatgttgtgagataacatttacattgtcaacctttattgactttgtttttacaataa

SEQ ID NO: 130624 - DNA, 1049 bp, Homo sapiens
accacaaacacatgagtaagcattgtgctatataggacagctatgatgtaactaggaataggaattatttagctccgttataattctataggaccactgttgtatatgtggtccgtcattgaccaaaacatcactggggcaaattaattatattgaataatagaagtgggagttaaaaaaaacattgttggagggttgtggtggtgccagcctacatcgaaggacaatgcccagaaggtagggctataggacaaaagtgaaattaggagtctggagaagccttatatgggaacaccaggcagccaacaggctaatataaatccactggaatgttacctactgttagagctataaagaagaattaatagtaattgaatcaccatgtgttgaggactctctgtacaaaaaaattagagatacaaactgcctgtagaggtagtgttgttgctgtcagtcctaaattgcctgtctcaactcagttgggacttgtctccgtcattttcagagccatgcctcctctattccaggcatctctcaagtcacccatgagccacagcagcagtttcccagttatcatccacttacatcttttctaatatcacccacatatagcattcaagataatatccctaaaatactattctgagtgcctctcctctattcagaagggaagtgagagttgccatttgtctcacattaactctaaactcactatttgctttaccaaattgttatccttgttgttcctcttctctctttagttccttcagctccaattaaagcctgggtcagatattccactgccactgggatgcttgtcattctgtactttccacttatgtttttctgtgtctgagtatatttacatttattccctatctggaacaacactcccttctaatgcatgtctcctgctgccttatctgtttaattcacacactgcagattgatttttctatttaaattttttcgattttttaaatccattgaatgcccatgtcctaaaccctgtgctagcttatcaataaaaggcaaaacactggccagta

SEQ ID NO: 130625 - DNA, 2196 bp, Homo sapiens
cttttctttcatgacttgccaccattttcctgcaaccacttttgctcataaataaaataagcactttttatcaacattttatagagtataaacttttttcttttaaatctaattcttttgattaaattcttgctgtatatactatatacttttaaaaggaaatttatttctatgtttgcattcatcagcaagataactgagtactggttgcttgcctatcaatgtgttcatatagtataattaaattgtagcaattaacagtgtgacaattatcagtttcagcatcaggcaagtggctggatggtattcgaaaatggtattacaatgctgcaggattcaataaactgggtaagcagctgtgctgtttaatgttttttgttgttgttgttgtttctttgtttttttttttgtttttctgagagtattgcttttgcaagtgttactgtggttccaaaaaccatttcagttcttgtatacatcagaagattttaaaattaaatcacattatgttaaatccagttcctttttaaagtttttttgagagaagagggatgaaagcctctaaaatgttcgacttggtaatgatttaagtagtaagacattttccttctacaccccctttcccaactcttccacttaaaattttatttatttatttatttatttatttgagacagagtcttgctctgtcaccaggctggagtgcagtggcgcaatcacggttcactgcaacctccgcctcccgagttcaagtgattctcctgcctcagcctcctgagtagctgggattacaggcgtgtgccaccacgcctggctaattttttttgtatgtagtagagacggggtttcaccatattaggctggtcgcaaactcctgacctcaggtgatccacctgcctcggcctcccaaagtgctgggattataggtgtgcactactgcgcccggccttccacttaaaattttaatttaaattatataaacattgaaagtagagagtttttgaatattaaaattttatcacgtccatgcaatcatatgattcctaagcttttttagaactttgtaatttaccatgaacttcatcttttactattgaagcttgaagaaagtgtaagcaaaagtcactgttccttagtatactatcattttaagattctttaataccttgatctcagatttaaactatgagaaaaaagagatgtggtttattaatgtgtgtttaaaaacaaagtaaacatttaaaatattttgtaaatggtttagataaaatatgaattttgtggcattggattttaagaggctcatatattgtttccatagtctagttcaagaagtaacccattatatcaagtaataactcattacttttaatggcaaaactgcaattacttttgcaccaacctataatgtatgaaatgcattgaatttccattgaacctagtgatttgaattcgatagttcaccaaaagttgtaagttataagtcataaaggtattttactaatttaaaaaaaccgcgatttttgagatgcatgtgcaatctaactttgtcatctatcatagggttaatgcgagatgatacaatatacgaggatgaagatgtaaaagaagccataagaagacttcctgagaacctttataatgacaggatgtttcgcattaagagggcactggacctgaacttgaagcatcagatcttgcctaaagagcagtggaccaaatatgaagaggtagcacagctttatctacctgacagtgttgctcattaaggatggagttttagaaacaagagaaacatgttcatttgcatagtgttagagttctctgagtcatgtcaaataaatatgtgaggttaataaagcaaatgttatttccgttttagaagaaaaccacattgagtcttacgtgtgaaatgattcttctgaaattactaagcaagtctctaatatagagagccaggactaaaatccaggtctgttgcctcccaggtctttgctgttccagctctgcactctgcttcctacttagatgaaaagatcagcccattgagtgtccctccagatcccaagaagagcttctgtgaagcaaactctcaccccttgaactgcattgaaactaggcaaaggcctgtggacattcatttctttttcttcccgaaaagacttccccctcataacctatcaaagcaacttatca

SEQ ID NO: 130626 - DNA, 1066 bp, Homo sapiens
caaccaagttggagtagcttaaaaaatgttgatccttttctccccgcccccagcaattgtgaagctgttaggaaacatcaggttgccagaaacatccgttaacctaattgacattgagctttttgggggtgggggagactttttaaataattattttattaatttggcagatattgaaggagtcttactaaattcaagacactgcttctgtgcgtgtttgggaactacatagaccagatctcaactcccattagctaactctgaccttgggtgggatcacttctgtaagccagcttccccttctgtagtaacagacatgtaaataaatcagctaatgttggtaaagcaaataggaaagtgtttggtgcacaataagtgcttagtgaatattattatagtcactgataggtggttgaatataatctgtcttccacaagtatgtttgtagattgttgactgatacttgtttttctagcagcagttttatacatgactcttaatttccaaggagatttgctaaagccacgtaatctgtagtgcactgagtttgcaagcaaggagagttgagtgaaaggagagtttgctttccttccttggtaagggctaaccctagacaaaattttaaaagagaatacaaacctgttctacctctccttttgtaaaatgtctctcctaaaatgtcagatacggtcctgctgtacttggaccctgctgggttacttcatcaggctcagccctgttccccaaacagttttaaaattacctatttctcatcctttttcaatatccattcccttggggggaacttagttgcttaggaggaggtaaatggacttcttttacgaatccatattaatgtttaaatgactaatggtatcaaaatcctccccaaaatacatacatttttaaagaatgtggccaaatgaaataactgtaatatcgagtaaaaattttagaggatgagggtcatttagacctgccagtctatgctgaaatctcactgtcttttccctacaactccagctctcttgaaatgaaaagtttacaattatttcctgtgatctat

SEQ ID NO: 130627 - DNA, 1040 bp, Homo sapiens
ttttctgttcttatcaaaaaaaaaaaaatcttaagcagaagctatttcattctttcttaccaagtaataaaccagattaattgaaaagagaatctaaaggttggtgcaaaagtaatcatgtttttgctattgaaagtaatggcaaaaaccgcaactaatacctattagtggatttcagaattattttctgtttttaagtataagtggaaaccatctagagttgggtgaatgcttgttttgttttaaacgtgtttttgccattgttacagaatgcttttatttagttagtaatttagggtgtgggagcctttttaaaaacagctgttactttgggaagtagcatgagactccatctcaaaaaaaaagaatgtaagtgtttatcacatgcgtatgtatttatgtttctctagggtggcttatctgcattcaaaaaatttcagtaaagcagatgttgcacagatggtcagaaaagcaccatttttgctgaacttttcagtggaaagactggataacagattgggattttttcagaaagaacttgaacttagtgtgaagaaggtaaagaaaaggagagaatttgtttatttccatgtcaggtacattttaatagctgatagatctcatgttcccagcagatgcctggcccatgtgaatcatataaattcctggtattttttgtacaaaaatgaattatcctgctagtttaaacatagagctccatcattttataatacttaatcaaactggttccttcagtttttgttttctttttttccaaacagtattaatcttatctattcctggggttcctatcatttttctgattgggtcatattttaagttttaactttgtatcttaataatgccttaattttccaaactagttaaagatgcacgtatagtaatactagattgttttgtttgcaaccacagactagagatctggtagttcgtctcccaaggctgctaactggaagtctggaacccgtgaaagaaaatatgaaggtaggacaactttaggctttttgagaaatcagttt

SEQ ID NO: 130628 - DNA, 1066 bp, Homo sapiens
tttatagctacacatataaaacatttgctttttaaatattttattgtttagattcttaaaacaaaattcttctagtggtaattagttttattagggtataattatatcaagtaaaattcatcttgtgggatatatagttctatgaattttgacatatgcatttagtgtgtaagaactactgcaatcaacaaataaaacaattatattaactccacagagttccctcatggtcgctttttagtcaatcctctccttcctatgggtcctattctaggaatatttcgctggtaatgaaatgatataaggttaagtagaatatgaaggaaagagagctggggagagggcagggaggagatgctggctataaatgatgagaaaggatagttaatgatgagaagcacaaaacagaacaaaagatcacagacctgattccttagcttaaggtaatgtgtagttctaagtgtcttccatgctgcgtttgattttaaaaaaacaaaaacaacttcagaatcagggctgtactagagagtcacatctcctgtagagaggactgcaggttgtagaaacaatcatagaagcccttttaaagatgtatttgagggtaacttggaagggagggcattgggtcaaaacaaagactttcgggatatgattactttaatccatgcaattcagactgttggcatatgtgtacttttagccaagttaacaggctatggtaaactcaatctctgtttcaaaattcacttgaaagttaggtgatttttagcattctcacctactgattaagtgaaggaaaggcattgtgtgctttgaaatttaccaacaaatttctaatctcagaggaacagtagttagtctgtctaaatagttgtaaccttacctcttaaaaggtgaaaaattagggacttggatgtttaattctaaaatgatcccaagatttaaccactgaaagaagcaaacaagggaagagctggtctttgcagaaatagttttaagtgtgcatattagagcactaatttgtttctctctttcaaagaactggatgaattgcctccattgtctc

SEQ ID NO: 130629 - DNA, 1048 bp, Homo sapiens
ggctaaatataaaatcccttcatattcctggagtttaacatagcactagcctttcctgataaaaatatttttgaaaactactttttcagtcaaaatatacaggtattaattgctggttgcttatttatttctgtcacttggttttgttactagttttgaccttttctttttgaaggcttttttctcctttcctacagtgaaacaaaacttgacaaaactggttttgttcaattccctttggaagaacagctttatctgtgaagtaatcaacagtgttcagccctgagaatgaagcaagaaactgctttcactgttctgtatatcaatgataatattttgatgatttgtttaggacacagtagatttctgttttttcattttgggacaaatttatatacataaaatgcatttgaataattcagtgttactttgatcagcaatgtgctgcggaaacacccttcacaccaaatttcaagaacacttatttgcatcagcttattctctttaaatgattaaattaacagattagtgaggtctgctgtcacttgaacatttgcagatttttgttttaagcatttttcttacaccagtgtcattgcattttgtttttaaattgtaaagtatatctttatttttccactcagaagttcctgtctgttggtttgtaactgagattgccttgttgttggcttttcctgtacataagaaacatctcactattttagactaaatatatatttaaacacctttcaattagaaaaaaataatttccagtttatctttttgttgtttgaataccgttttaaacatttaagtaaattaaatttctcttcttttgacggttatatctttcctttgtagactaagaaaaatggctttgtcagcccaacagatacccagatggtttaactcagttaagttgaggagcctcattaatgctgcacaactcacaaaacgttttactagaccagcaagaacactgttacatggcttttctgctcagcctcagatatcctctgacaattgctttctccagtggggatttaag

SEQ ID NO: 130630 - DNA, 1096 bp, Homo sapiens
ggtcccggccttctcgggctggggccgccgccaccgcggcaggacggggaggcgggccatggcgtcctgcgtggggagccggaccctaagcaaggatgatgtgaactacaaaatgcatttccggatgatcaacgagcagcaagtggaggacatcaccattgacttcttctaccggccgcataccatcaccctgctcagcttcaccatcgtcagcctcatgtacttcgcctttaccaggtggggcggcccagccgagcggggggcgcgtccaagggctagggaagaggcgggagggagggtggcggggaggggggcccggcatggctctgggtgaggaagtgggctggctgctccacgcacacgcactggcagcccgccgcccacgcggcccctccgcccgcccggtgtctcacagtacgctagcctgctcccctacccctcagtgccccttctccatacagcgcctccggttacacggggaacgcacgcgagtcacctagcacgatcgccccctcacccaccgcactcagcatcgctccacacaacatcacgacgcgggcccctcctctgcactgctccagccttcgtccctacccagcacaccgcatgaatcatgtcgtatgcaccactttcagcacacaccgctacacatacaaagcaccccaatccacagcgcctgcaggcaccatacacaggcccaggacacaacctagatcccttcctgtggaactccggtattcggcactatccgtaacgcacaaaaaatgcacatgtgtgctgcatacacggtctttcctgtgcagcacttcccgtatgcattgcacacaagtcatccagcataacacttcccccagcctcaaacactaccatctgtaccacggcacaaactgccactctaaacacacacctcacagcggacctttcctttccagcacagcccaatacccatcatctgtgtacatggctgcacagacaccagcccgccacacatcacgcggtgcataccctgctcactcattacctaacatacgtgctgaaatgtgatcttgtccagcaattttaatggtgcctggggtatagtaactgctgtgtgtta

SEQ ID NO: 130631 - DNA, 1012 bp, Homo sapiens
gatgtcaattatgtgatgtcagtctgaatgaggacattgtgtgccctcagtgtgcagccattcttaagtaaaaactggtgttcctggaaattggatgttgagcctccctacctaagccagaaggcatcacaggtaccctagtaaagatcaggctggcattttgagggccacatttataacctctgggcagatattcagttgttaggtgtctattaaaagtgcacttcactggaaggtaaagtgtgtctgattatatagtctggttttataatcaggtctgtgaaattaacagtcagcattagtttgttagtgccgtttggacacataatgatctaagaattattgtatgatctgtataaatctcttatttcagaacctatgttcaatcctgtcatacatctggcagtcccccagtttttagaacatggaaatcttccttcctctaggttttctatttggatctgaaagtaaatgctcaatgttgtttttctattttcagggatgactctgttccagaagacaacatctggagaggcatcctctctgttattttcttctttcttatcatcagtgtgttagctttccccaatggtaagtaatgtcatgcattaccacatttctcctatattgtgcctttctggtttttttgagatgtgagtcatctagaagatgaagtaaagaaataatctgagttttgtgtagtggttaggggcacaggctctggaggcagactgcccattctgccacttcctagccccagagaagcctcctaagagtgctgagaatacttcagtttccttctataaaatggagagagcagacaggtacggttgtgagggttaactaaatgggtgcacgttaaacactatgaacatgactgacaaattataagctctcaataaatgtggttgtttttgttgctgtttttgttattatcagttgagtcataaaatactccattactgctgagttcttcctttttgctaaggacagggtcaatgctgtaatgagt

SEQ ID NO: 130632 - DNA, 1032 bp, Homo sapiens
ttggcagactggcttattcagcggctcagtgacctgtgaagacccagcttctttacccctttctgttctgccgtcttctaggctgcagtctgccctgctggccttgagacagctcctgcagtgccagccatgtagtggcaggcaatggccagcagatgaagagatcatctcttctcttgtgtctttacttgagtagagaccccttttctagcaatcctccagcacacttacatgtctttgactaggattgggccacatgtctcttctcaaccagttccaaggacagaaatttatagtgtttagaggagtaggtgttcaacagatatttgttggctagaagaatgacaggggactaggattacctctgctggtttagaatccacccctgagctatatggcagaggagtggacactcaaacaaaattttgtgtgacaatcaacagggtgagtggtaggattaggtcccagagttctttcattcagtcccataagcagatgtggagggagagggctggcagtgagagcaggggaaggagagggtctgatgtctgcatttacacttctctcctgccctcttcgcctcttcagttctcctcttcattctcttttggcttccttacaaaaatgttttaatggctaccttcatcccattatagcaactgacactcaagtgtatgtgtaattttaactataccaccctatcactggagtgaaatttagaaacctatttgagtctccagttggctggagatttctttcaacggtcgaccttctggtgtacatttcctgcttctgagaactccctttaactgttgttcatcccctttccaccttaccacgcccccaaaaccagcccagccttatctgtacttcaagtgcctggcccattattaacttctcatgaatatatgctgaattaaataataaatccacctggaaaaaagttcacagaacaagacctcttttttcccttttgttgtctgcaagagaaacaccattcagcccccctttttttttttttttttttgagac

SEQ ID NO: 130633 - DNA, 1050 bp, Homo sapiens
cagggcttcacagacctcgaagcccaaccaagaactccagattgagaatccctgcaccacagattctttctgtcctaatgtaattattcaagaggatcataattattaaaaagtgtagtggggggcgtttgtggtgaaaattggtaaaaaatgggtggtgcataagtgcaaactgaaggcaattctcatatcaacttgcctaaaaaatgtgcattccctgggccctaggatgcacaattatgggctggccacataccacccgggcctcccttgaactccctgaggccaggagaggggtgcctgttagaaggtctggcactatagcgcttgcagtggatttcattccagccacggacgtgctctcctctggagtggctcactggagattagtgctgagccaagtttggatggatgctgtgatccaaggtcatttgtatcacggtctctaaatgtcccgcataaacattctaattccaatgagttcaagggaaagagaaaccacaaaacccctcgtgatcgtttctgaaatctctctaaaacgtattggacagggttttgccttctaaaagtgcattgttaacatttctttttaaaatgacacatagtgattattaggatagcaattatgagatgatagaacaataaaataatgcctacacggggtaatgtggagtgtaagtctcaaaaaagtggccctgggccacctcttgaaccttacactggtagtactgtccacacccagccttgccctcctccagtccacttagttggctttttaaaatgttacctagatcatcttatttccccacttaacttacaatcatatctgaaatgttggccgtggcctttaagccctgatggtcacttcagggccgccttgctccattcccctctctgccagtgctctagccacatacggggtcctagatatttctcttttcggaaaccgacctgcatgctgttctctacctgaatgttgcgtgcaatcctcacacccaccccgcacaccctttgcctcatgatccttcaagtctcagtctaagttagcat

SEQ ID NO: 130634 - DNA, 1046 bp, Homo sapiens
tgggtcacggtggctgcccctgcacctgtcaatgtcactctcagcacctgcactctctggccttgatgccttgatcctgctccactgcttgccacagagaggccagtagtcatgaattagtttatttcatttgttactattatttttatcgaaccatacaaaaaaattttattcttggctaaaacgactctattttggcttttactgaagagactaattatgtgggaaaaaccaactatttttctcttcactgacggtgaacacttctgtgaccagatgtgtaggtttttcccacaccagccaattctctaactttcctgacacctggagttagcgtcagatcccactagttaagggcccagttccataagactgcccacatttcagatgccactcgcaagtccaggctgtcacctgtgcttctgaccaatcagctacaaatcaggggttcccacaatatcctccttgtgcacaatcatttgctatgatggctcacagaactcagggaaatatttaagtttgccggcttattgtaaaggacatgataaaggatacaggtgaatggccagatggagaggtacctagggtgaggtccagcagagtcctcagggcagaagcttctgtctctgtggtgttggggtacaccaccctcccagcatgtggatgtgttcactaacctggaaactctgaaccccagagttcagagatttttatggagactatcgcataggcatgatctttttttttgagacagagtctcactctgttgcctaggctggagtgcagtggcacaatctcggctcactgcagcctctgtctcccaggttcaagcgattatcctgcttcagcctcccgaatagctaggattacaggcgcctgccactacacccggctaacttttgtatttttagtagagacggtggtctcaccacgttggccaggctggtcgcaaactcctgatctcaaatgatctgcctgcttcggcctcctagagtgctgggattacaggcatgagccaccacgcttggcctttttttttttttttt

SEQ ID NO: 130635 - DNA, 1086 bp, Homo sapiens
acaatatcacactattttatactataatgtgttcttttccaatgttttttaatcccaacatttggtacaggttaatttttttctgaaaaggagaacgggaatttgggccatagatgggtttgctttgacaaacaagaagtaacacaaagggacttcataaaaggtccaagaaataatcattcccccatggtgacattggtcaaatccttcttagagtggtatttaaagattgttatctataaattttttaagggatatgcttaaagcaaaaataagaatgccagaaattatttatcagtcttgggggagaaagtctgttttggaatttttttactctaagggagagaatgacggaggttgacttcttagcctatgatgatgatgataatgcagatgacggttatgagaataagggcagttatttattatgaattgtctatgtcagacactgtgcagggctctttatattctacataagcctcgtgcatgcatgctagatgttcatatcaccattttacaggggaggagatggaagcttaaaatgcagtatctcactgaaaacacaagccgatggatctctctggcgtcaaaacctgtgcttttcatttggagtgtgctttcagtatatagttataaaaataagtgctttgatgctcacaggagccttaggaaatagaaattgggagaaagataccccaagtgtaatattttcccaaacatctttcttgcatttttgaacaaaagtggtcacattgcaaagtaaactgacttgcaggtggatgtgcttgtgtgcctctgctgatccagttctcacagccagtaggaggagattgaatcgaatgataatgctcttgacacctggctttcttaagaatttgacatcacagggacatccagatgtcaaagttacagccccaagtagctgaacctggcttttaaactctagttttcaagtattggctaaatctttcttgccaaagtaaagcacgaggctgtgttcagcctgtagagttctaactggtgctaaaacagcctcatcttctccatctctaatcccatccctttatacttctttaaattgtcttt

SEQ ID NO: 130636 - DNA, 1032 bp, Homo sapiens
attttgagaattatgacaatgctttgttgtcagggttggaaacttttctccttttcccctcccagatccttgtcatgttgtcattagccaaggtaattaattggtagtatttttcaagagagaccattctttctttaaaagccctgtgtcaaaaagagaagagctgtttggatatgtgctgtttgtttgcaaaccatctgcaatataaaaaacaagaaacagattgcagaacctgttactgttggttattttctgtacattaggaaaaaatgaaatgtcaacaacttcttctaaaataatgtattgttaaaaaggaaatctatctatctgcatggtaccccagttttgtttatttttccaaccatgggctcttgtgtttctcagctcttcttcatgcatctcctccccaattttgccgagtgctggtgggatcaagtcattctggacatcctgttgtgcaatggcggtggcatttggctgggcatggtcgtttgccggtttttagagatgaggacttaccactgggcaagcttcaagtgagttgccttctttttggatattagtcacagtttttcatgatatatatttaattgttttggtaggaatccattttagtatgatctttgatgataaggaataaattccatgttaataactgaaactcataaatgattataaacctgatttcaagcatttgtccagaaaatgctcaatcatttatgattttctctctctcaccctatgtattcagggggtcctaacaccatcctcctaattcaaaagatttctgaaatccacccccactcttttttatcccgactgcctcagccttcattcagactcccatccctggatcaattcatctctgtttccaggttaagtcctccagtccttcccacaccattgcttgagtgatctttttaagaacatcagattcatcatgtcattgccctgtgatggcttctcatggtctttggtcatggtcaatacatccattaccccagtagggagatcctttctctacaccctccc

SEQ ID NO: 130637 - DNA, 1045 bp, Homo sapiens
gcagttttacgtgggagacaagcagtgggagaacagtctccttgctgccctgtgcctgtcatcaatgagattcctcattgagtgtgcttctgtcacctgctttacctgtatagagagacctttgagacacaattcaaataaaaagcagtctctttgtcctgagcatttattataaaaatcatcagtgcacaggatttttttcttgtgctttgttttccccctgccttatctctggattttcactggagccattctcttcttacagggacattcataccaccaccgggaagatcaagagagctgttctgcagttcactcctgctagctggacctatgttcgatggtttgaccccaaatcttcttttcagagagtagctggagtgtaccttttcatgatcatctggcaggtattttttcagatgcccagaagttgggaggaaaacaaaaactaaaataaaaactttttaggaatttagagttaacattagtttacattgcttttcagctccatactttacaagatataatattctgcagctggcatgtagaataattaagcaaagtgatgttgttatgcctaaggtcttgcctcattttgaagacagttttaaaatatggatctttgaattacaaattagaaacagattagattccgtgaaataatttgtgtctagcatccatcatccaatgagttaggcattggattgctttttagaatgatcattttcaagaccaaaggaacaaatgagaaggcttttcttacattcctaattcagtgtttattggttaaaattgttcctcagctgttaccactttggttaatctgtagggtgctaaatgagtgctggggaattggagccttttgctgagtcctccagagtgttgtcctccgtggagagaagctgtatttccaagtggcccacttcacgacggaagtgattctgacagcccagggtcttggcaaaagattatcaagcatctgtgtttctgagagacagcaattttttctgatgctcctggccccaggttgtttcacaacttttgg

SEQ ID NO: 130638 - DNA, 1876 bp, Homo sapiens
tttagtggttttttttttttttttttttttttttttttaggctagtcaagtgaagcagtgggagtggaaaaggaacaaagaaatctgtaaatggttgcgatcagttagttgtaaacaccccggcactcagaccagacaagaatctggctctttaaatgatgctcccctgcctccagcctaacccaaacgctgaatctcttacaggaatgttttaacaggcactggctttctcttctcttgaacagaactagaccaggcagcctgacatgggacaaggagggacgttttttactttgtcaaagtgatttaattatgtgctgacttgctggtcttccagcagctctcaatgaattccaactttgttctttcagacagtactacgcttacctcaccgacacacagtgcaagcgcgtaggaacacaatgctgggtgtttgggtgagtaatctgttattgtggagatttaaaaaccacttaagccctaattttatttgggtatttcttgaccctgtgttaagagcctttcagtataatttttctatgaagacaggtggactagattttatatatctatatctatatctatatatacatagatatatcttttcatctttaatattcccttttctgatttaagttaagaatagttacttggcaaattataaaacaagagtatagaaatggctctcttattttggccgggtgcagtggctcatgcctgtaatcctatcactttgggagcccgaggtgggcggatcacttgagcccaggaattcgagactaacctggtcaacatggcgaaaccctgtctctactaaaagtacaaaaattagctggttgaggctgaggcaggagaatcgcttgaacccgggaggctgaggtttcagtgagccaaagtcacgccactgcactgcactccagcctgggcgatagagtgagactccatgttaaaaaacaaacagacaaaaagaaatggatctctctctttttttttttttttgagatggagtctcactctgtcccaggctggagggcagtggcatgatctcggctcactgcaacctctgccttctgggctcaagtgattctcctgcctcagcctcccaagtagctgggattacaggtgcgcaccaccacaccctactaagttttgtattttcagtagagacggggtttcaccgtgttggtcaggctggtttctaactctgacctcatgatctgacccccttggcctcccaaagtgctgggattacaggcatgagccaccgcacccggccttggctctctttttttttttttaaataaattaggaaatcagatggtatttcccacaaacaactctgagactttgttttatgaaatacattagagagaaaatggattggttgcattccttctggatgtatcttgagtttggaatgccatcctgtcatgggctgacccacaccccatattattgtcacatcaaaagggccccttggaacagctgcttgctatatactgaagtataattttattgttccaaagagtactaacatacagcagcatggtcacaatggtcttgttatggattcaaatgttatatctttttttttttctttttgagacggagtgttctgtcgccaggctggagtacagtggcgtgatctcggctcactgcaacctccgcctcccaggttcaagcgattctcctgcctcagtcccccaagtagctgggactacaggcgcgtgccaccacacccagctaatttttgtatttttagtagagatggggtttcaccatgttggccaggatggtctcgatttcttgaacctcgtgatccacccaccttctgcctcccaaagtgctgggattacaggcttgagccactgcgccc

SEQ ID NO: 130639 - DNA, 1319 bp, Homo sapiens
ttgaagttattattttgaagaaaagttcttattttatatttaagcttaagatttttcacttagtctagaaaatgtattgggctttttaaataatcatagaaaatttcagacatgtgcaaatagagaggatagatggcccctcatgaacccatcatcggttatcaactcagggccaattgtgtttcctcttatgttgtactcactgccccaaccctaacttattttgaaacagatccacctttaatatttcaggatggatcactaaaagaagctcaggatactttttcggtttaatgcaaccaccctaccattatcatatctaaaaaagaattaacagtaattccttaatatcatcaaatacctaatcagtgttcaaattactaaccttttcttaaaggttgtatttgtttaacaatatatttgaatccacattcacccatcgtgattggttggcatgccttttaagtctctgaatccataggttttcctctatcgctaaccctctttccctcgtaatttatcggttgaagaaagcagcccttttgtcctatagattttcccacagtctggattttactgattttatcgtatcttgtaatttaacatatttctttgtcctctgtattttctgtaagtcggtaattggatctagaggcttaatcacatttgggtctagtttttttcttttcttttctcttttttggcaagactaacctttgtatttttaacgtgtcttttatcgcctttaacgggatctatttttagggttacttgttagaaatcctaactgtaccaaggcacagtgagcctgttctgtcctgtttcatcttgaacaataaaagggaataatgatctcctttgtatttaaactacagaattaatgcccaagtatattttttcatgtcagtgagaccagatgtaaggaatcggttagggaaatgtgtcagacatgcccagagattttcactatgctcttctcagatatgtctctggcctgtgcacctcaagtctgaattgtaataggacctgactgcagggggcagaggtgggtgccctcttcaccgggtaccagagaaccacccgcccacagggagggtgagacaggcaggactcccaggacaagacagacagccctcctcaccacagcaaatcacaggcctcccagctgcctccccaccactgccccctgggcagcagtgaccagaaaggtcttctcaggccacctacccaggcagccctctctggtccctgtcttagtccattttctgttgctataacagaataccatgggcttggtaatttacagagaaattaaatca

SEQ ID NO: 130640 - DNA, 1024 bp, Homo sapiens
gcatgcaggcaacaacgaaagccattcttccaggagaaggaatcggcattccaagtcaaaagtcaccaatggcgttggaaagaaatgaaaaaccctggttaatcaaagatgttccagagtgcctagaactgagagggaaatggaactcatttggaactccccgtgaggaggtcgaggcgcacagggcaagcaggaagaggcgagggcacttgggggtcattatttgagatcgtaagtcttgtttcccacagacctggccgcgtcaggcagatcatcgcctggggggcctttgccaacgtggggtctcttctaacttcagcacttgacatgcggtcaccggtggcagcgcggtgtgttgaagggaaacggtagctattcattcacagttgccaagagcagctccgcgcctgctggatcgtggatgcagcgtaaacatcttccttcagacgaggcattaaccccatggttaatggactggtcaccagtttttattttatttttatgaatctacctttccattgattgatttaagttcaggccacttttctgtcttttatttggttactgttgttatttgtttttaagttaggatgctttttaacagcctttagaagccgctgctgaaattgatactgggggaagggttccccttccttctagagcagaaaagggagagaggtgttgtattcctgtttggtaacctcagtctcctgtaagacctcctaccacatggcgagtatacaccaatcaggagagggtagctgcctgcataggagcctcgcttccgattattcccttcccaatattattcatccagacttagccacagtgcacaaaagcaaacctgctagagaggcagtgaacaccacagcttctccccagctaggtgccttttacatcgggtttgttctccttccatggtgtgttgctgacattgtcactgagtcccatgtgaggtgctggtgagtattacctttcatctgtgccatgctctagaaccttgaccttgatagttcaccacctc

SEQ ID NO: 130641 - DNA, 1061 bp, Homo sapiens
aagaacggtttatgtatttttctccttaagtagcattgcattgagtgttaggttcttttccctttttttcattcttggtcttcccaaagcttcttcccacatttcgtttgtgtctgtttccaccattcatagaaaccttggaaccactctcacagcaatgctaggatgtttcatggacctgttaagcattttgatgatacaagacatcctatcaatgccagtcttattttcgctaggactctgcttccacagtaagctcctaaggtgctcacccaacccaggagaaaacaaaattcattaccaaatacaacaggttcagccttcttggtcttccctcagaagccaccgtgtagcaccctggaatgatgcctctttatgccaaggcccaccctttggaattgggagggttttgggtagaatcctgcacttacagaggcccttggggtcattgagaagtggaggaggttggacacagaaggggaggctaaacacaaggtggggaagaaaaaatgtaaccattggcagccagactgaagctagccctttaaaatacggggttggggggttaacatccgctctttggaatgtgctcagtgactgctgcagagttcctgggccaccctaatgtttaccaggtgggcgttgtttatatggttcttattgttatgacaactagaaatcccacagtagactagacagtgctccctaccatttcccatttataggattgaaatcaagatgtaaggagagctggccgggcgcagggctcacgcctgtaatcccagcactttgggaggctgaggtgggtggatcgcctgaggtcaggagtttgagaccagcctgaccaatatggtgaaaccctgtctctgctgaaaatacttaaattagccgggcatggtggcaggcacctgtagtcccagctactcgggagacagagacagaagaaatgcttgaacccaggaggtggaggttccagtgagccgagatcacgccaccgcactctctaacctgggcgacagagcgagactatctcaaaaaaaaaaaaaaaaaaaaaaaaaaac

SEQ ID NO: 130642 - DNA, 1090 bp, Homo sapiens
gtaggctataccacccaagtttgtatacattcactctatgatgtttcgcacaatggcaaaatcgcctaaagacacatttctcagaacatatcccatcattcagcagctcatgactgtgcagggctaggtcaatacaggatagctcttgctgatcctagcctgagtttgtccactaggctatgctgcctctcactcagatgaaagggaagagctcttggtggagacttctggaggactgtaaaggaacattgggcctgactgcaaagaactgaatgctgacctcatgcttcccagttttcatgggctgtgatgaacaggatggagtggcggtggcagactagagtgaggaagagcaatgaggggccactgagaaacctgcagatccaagggagaggcagggaagctggaagcaggggaaatgggaggccatgagcaaagagagaagaggctttggtgattctgccttatgtaagggtcggggtggggttggagaaaacactggtgacagtgaaactaagatgtcaaggaaaggcatgggtttacagggaaaagggctgagtctgttgtatttgaagttctggagaaacttcagcatctagccttctggtctgtgctggagagtggttactgctggaccagaggactcccctcacgttgagttactgaaagccatggtgggaaccgcggatggatgagaccaccgggcagaaaagccgagcagctcctgaacagtgaacctttgggatcaccacactgtgtttctcacaattcagtatcgctgcttctcagtggaggctctgctgcctccatgggagagcactggaaaatagaggggatgcttttgattgtcccagtggttgaaggatggtataggccttcgatagatatacagtgacacagggaaacaagatgttctgcaatgcacagggcagctctgcaaagtgaaaaatttctctggggtcctcttgatttgtaaatatctcattgggctttcatttaggtgaaaaatctattttgaagtctcttagcccagaacctaattacagtttccatatatacctatatattttacttcatttaaatttacatg

SEQ ID NO: 130643 - DNA, 1070 bp, Homo sapiens
taaaacacaagcagatagcttaatctacagtcttcacagagtgaaaaaaaatcggaccacatcattttctaattttgttattagaactctctcctccttacacaaagctgaaaaattccttaggatgatcatgtaaagtttccttgaaggatttcatattgtgcttctaaaacctatcttgtgcttattggaacaaaccagtaagctattccttcgcttgtttctctcttttaaaaggtctttttcatagagcaaattatgtctagatgctagaataggctctaattacttgtttgcttttcatctaagactcacaggctcctggtgggtggaatgagtcacactggaccaagtgtatgacccctatccttgctgactatgaggctaaggaagagacagcagaagggaggaaagacgacaacagcatctcaaaaacaaaagagcaagagatgatggtgacaacagggattaggaagttacatgtcaaaatgcacagcaaacagaaataaacagggcagtgaaaaacacacctgggccaggctttgagcaccagaggctcatgtctaccacagatggcccacctgaggggaacatcaatggaataaaggctggacaaaggtgagatggcgccgagctaggctagatttgaaagcagagtcaggaaaataatagatactggaaatcaagaaatcagggcattgaatgatgacaggagagcatgacttcctggagctggagacatttctaagcagttggcctcctatagatttcctatgaggtgtatcctggatcttctagaagatatctgataattagataccagggtaaaatggaactagtgaacatattaatgtcctttttttttaatgtatttttctggtcgtaaaagtagaacatactgatgcaaagtgtaaaggcaaaaataatcaaatcctatcaccaagggaacttattaagagtctttttggggattccctgttcaataaatgatgctgggatagctggctagccatatgcagaagtatgaaactctggaccacaacttttcaccatatacaaaaattaactca

SEQ ID NO: 130644 - DNA, 1033 bp, Homo sapiens
tgtattatgaaaggcaggctctggaaagtttgcattagaagggtaactaaaatcgaaatcatgtaactttgcagttctttagaaaatatagtttggctgttttatgagtgaaacaaattgcttttgctagggaattttataaaaacaagggctctttctctcttagttgggtattagcagaaggaggatgtcatttaagaaggaaagatcttgaaagatcaggcttgcagaaaatggatgtctgagaagcaatttgagcatgcccttcagcttctgcttttaggacctgatatgtctagttttgatggtaaccacccttcgaggggtagcctaccctgtgtaatatgatcacttaaatggcgccttggataatcattagtttggaaaggatttcaaaaggtgaactggtttgttccctgggtggaactagttttcaagtctccaaaagcccccagagacctgactggccagctagaggtggcttggagtctccttaggttggcaaggcccctgaagctgacccagtcacacagagccccaccagccctgtcattaaggtttatagcaagtccagtcaagccactgtgctgttggcatacctgctggtggggatccagttgtcctgtgaggaatgccatctgggtttagattctcactagattgtccttcttccattgccaaaaatcaaactaaaagattttgcccatccttttcttcttcccaaggcagaagggtgcattgcagaatctccaaaccactgaattcttttcgtggactagaggccaaaataaagtcttagagaaaagccagaagtaatgaagaagaatctttgctaaaaccaatctactcttatttaacttttttagtcaactgtgacagtactatcattttcattctaatcatttggatttaaatcttgaagaagccctggactcattcatctttgttggtttccacgtccagtctgcctctaagtccagctgtgcattcattctgcagatatttatttcatacctactaggtgcttgaggta

SEQ ID NO: 130645 - DNA, 1205 bp, Homo sapiens
cctaagaatgcctttataacatgactgttgtgaagatgaaatgaagggagcatatgaatggtgcttgaggcacggaagataggacatttttttttcttcctttcctctcttggcctttttttttttggcaatgaaatgaatgaaatgagggagccatgtcagatgttcttacctctctgacattctaaataggtgaattttctctcccatcaaggttagtgctataggaagaaaccatgtttccaaatctcctactcctgtgcagtgctgagctgggtaaacatctgttgacactgcatgctgaagtgcagatacccgtgggcctggacattttggggttggttggcactcctgaagaagtttcacgctggccactgaaggcattatggttcagggtcaactgaatacaccagcccccagtggacctgggctagttgtccagttttgatgcctctgcactcagtgtcatcagcattgcagggttggtgtcaagaataaagaagacattgatgtaacgtcttgacacatcagctgtgcacagtcacacctcctcctcttccctgaggctgtgctgagattccagcacatgggaaggagagagttagaatttagtctgtatcatgcgttggtatgccgttggtcatttagaatgaggtggcaggggtagtgagtatattttggggatctgggggcagaaaagggattatttttattttttaagtgtggaaatgtggcctggcgcgatatctcatgcctgtaatcccagcactttgggaggccgaggtgggccaatcacctgaggtcaggaattcgagaccagcctggccaacatggtgaaaccccgtctctactaaaaatataaaaattagccgggcgtggtgatgggcacctataatcccagctacttgggaggctgaggcaggagaattgcttgaacacaggagacggaggttgcaatgagccgagatcatgccatggcactgcagcctgggcgacagagtgagactccatctcaaaaaaaaaaaaaaaaaaaagagtggaaatgcattaaatttcttcttttagccattgggctttaggtcttactattaaaaatctcaactgcattttgataagtctgtttctaggcagcattagctttagcaacaaggatggaggggtgaatgcctctgaatgggagaggacactgttgaaatagaattgtg

SEQ ID NO: 130646 - DNA, 1048 bp, Homo sapiens
tgagaaagatgtaacgtcatgacttgcacctgaccctttgtcttcttggatcttacatacttttggacaaccaagagtgaaaagggtggaaacttccgatctcgactgagtaaaaggaaagcctttctaagaggcagtcaaagatggaacaggctacttaagcaggaggcaggacccatacctggagctaagctggtgtttgtttggatggctgtttactgaggatctttagaggagattcaagccatcaactggctggggagagtcgctgacctttatagcttccttctaaccttagaagattctgtacgacattttaaaggtgagtgctgagcaacttaaactatattttatttcctttcctgataacttggtctgactgagactagacatcttttgttgcctatagttgaaggagtctggcattctaggaccaacttgctgttaaactgatggcaagatctctatttgccaaagttaggggactgtgtatgtaaccattgaaatctaacattacctcaaacttcaagggactctgacaggtactttaaccagttagaatggcacacttgactatctggtttgagtcagagcagtgagtgcctgggagaaaacagcaaactcaagacaccatgagtggactttagggagagggaagagagacagagggcccacaggccagcacgaagaatgtaaagggaaagtagccactgtcccaacctgccaggggtttgggaggcactgttaatttcccaagcattcacttatccgcactttgaccaggcaacccttcttcggctggacagggacactcatgctggaccttgatcacccatgacccatgtgtcatagtgcagagctttccttctgaggcttaagtgaccagtgtgacaagaaccctgaaacacctaatgtacagaaggactctaggtccatggtccccaacctttctggcaccagggactggtttcatgggagacagtttttccacaggtgttaggggggatggttttgggatgaaactgttccatcttggatcatcaggcat

SEQ ID NO: 130647 - DNA, 1069 bp, Homo sapiens
atgttggtcaggctggtcttgaactcctgaccttgtgatccaccctccttagcctcccaaagttctgggattacagacgtgagccactgcgcccagccaaagcttgtgttatatattgggcttccattcctgaaagctggttttatactatacaaataacaaagtcaatatgaaaatgtgtcaaaaatatgaatgtacctcttaaatacacatattaactatttcaaacaaaagtactaaagataaaaaaaagttatactgtaaatgttactttcagggaatttttttctgctgaggttgagttgactgaagcttttaaagtccaatgttaagtctttctaaagcatatagaggtatttttttttccagtgtttcaaggtcttttaaattgtgttaaaaaacagagttatctgcttccaattctattgcatatgaaaagtgtagaaatgctgggaagtttgttaattgctaaaagttgaaggagggacagtttccatggcaacttcttcagtaacccatgctctgatatttcagaaggatattctttgctgagctgtgaatgcagtattaagaattcaatcaaatcttcagaatgtgaagagcaattgctaaagaaaatcattagccctgtgcacagttagaccaaacagctggctgggtctgggctgtcccgtattgagtcagccttacctgtccactaatcaaggcgttgccttctggacgtagtccttggtgagtctgctagccgtctggttttggtcatccctatgaaagtcttaggaaaggcagtaacaggttgagctgtctttgattgagttagattcatgactgaatatcattagggtgtattcctttaatctgtatgtgttgggaaatgatttgtgtgtctgaagaaagtaagcaacatataaattttgtctaaaaggccgcatttatgctgtaataattttctcgtttttcttttaaataaggggacaaaccagggcctgacattatcttgtaataacgagtactgagcatagaattttatgtgtccatgtctgtgccttcatgaattgtcagattctac

SEQ ID NO: 130648 - DNA, 1666 bp, Homo sapiens
gtataattatcacctggtttgtgcataattaaaaatgtaattgtatatttttatgcaataggttatcatgtactgttttaagtgtgtacagttttttatgggcctaccatttagttaaattgcatagatgctttttagaatgctactgtgaagaagtgcagagttgaggtcgtttttagaagctcagtgagttggccccttttgctctctgtattatccttttaggctaagctgcagcacagctgtcccacctgactagctttcctcctgtggctcttattgtcattgcattagctgagagaacaggttttaagatttttaactcttctctgcctagcctaggtttcagaaatattttagagggtttttagaaagtcgaaattcagtggataagacttttgatagttttcaggttctctttgttttatgtaaccttcggtttttaaaaatgtttacatttcactccattttcttctaatcctgtagatatgggactggcctaggatctggcgttttaaataatcttttcacttccccttcccccaacaaggtaattctgatgtcagggagacagggaaaaattcacctcgagaaacaccatgacaggtcagtattggggaatgaggacttgagatttgcctttcaaaatgagtaaggtttaagtggatggagaggagatgatttccttgtggaggtaagaaatggagcaaagtctaaggtgagaatgagcacgtaatattaggagagaaggagggcaaggaggatgctaaccagctttcagtggaagattattttagagcaatgttctcaaactgtgggtacattagaagtgtaccatgggcttgttaaatagccacattcctgccttccaccccgaccctgaaattgcttgtttgggcattctgtgggcttagggtggtggcctgggcgtcggcatttctaacagacatccagctgaacttggtgtgatggaatccctgctttatggaataaaagagggtctgctgacaaggcagcagggactgcattttggcagtccttactgtgttagatgaggtttcggagttaagatggggacactagaactctagctgggaaatcaggtgcagggatgctgcataatcccctgaggtgatgcgtgcagcgaggcaacagcagtcaggctctacagggtagaatttattctcagaagaaggtatagaccgctgacaaaggagttcactcctctgtaaactgttaaggaattgcaaagaaattttccatttgtaatctgctgacatattttagaaaggtagcctccttaatccacccctctaaagacctgatggtggtccctcacaggtatccaaagtagccttaaatcagagactggtctagttggaggatgtgacttggaatctatgaaccctggatgtacttgagggcaactcacttgaaactttggaatttcatgtggatgcatgttttctggagagaggtcctagagtcttgaccatattctcagacatgcccttacttggatttaggataagatgatttagtacttggctcattgggtggctggctttctctctcctctcttttttaaaaacccagaacaaattcctattagtgaaaaagaaacaatagcttgaagaacaaagaaggccccagaccataagataga

SEQ ID NO: 130649 - DNA, 1124 bp, Homo sapiens
cattttcatctgcatacatgacattagattctccaaatgtccaattaaacacttgtcaatggaagaaatgtttgtttcctcagctgacctgttgtcagccttggccttcctgatggggaagcagtttcagctgatactgttgtatgctcttcctttctgggcctgatcttgtccctgttgagaactgtggagactgtgccaagctgtggaccatgggattaggttaggtaactaaagaaaatatccaggctgtgagcacttttcaaacctaagaaaatctttagtttcttttgcacagttgtaaaccgtttgtgcttaaaaaattataaaagtgattgcagttgagatagagaaaagagcagtgctgatatgtgtttatatacttctaagggctgacttcatttttttcaacatcttaaacttctattgaacaaatattgtgtgtgtaggtgtgtgtttgtgtgtgtgtgtgtcatcatctctgttgacagaaatgctcaatgataagtctctgtgactggaagagcagtgaaggacttggacacatgctgtagaaacataaaggaagtgaggaaggcaatattggagaagaatcaaaggagtttaaattattctttggaaaagttggagtttataaattaaaaaaaaactgtatgaccttgagcaaatttctatttttactagtgtcagtttcctaatccataaaatagggaatataatgtcaagaacatcgaaggttattattaaaattaaataaaatgatctatgtaaaatgcagcaacacttgccacattgtaaattctcaagaaatgctagctaatattgaaatatgaaataatacttctttggtccaaagatgtttaagcattcctatttggtaaagagaaggagcaaaagaacaagagaaaaattagataattggtacagtatgaacagagtatttggctttggaaaggagggtgggcagttctttcactgggacaggagctcagaatgactctataggtaaagggatagaagaactttaaggtgaggatgaagaaagacaaagcatgtcatggtcattctattgtctcttcagttacgtagaagaggagagctttttctgagcatgagggggaata

SEQ ID NO: 130650 - DNA, 1079 bp, Homo sapiens
gacaactcctcaacattgacccatcccctcagtccagttccatatgttccattgggaattaatttcctgcaggcatagaggagtcgtaagagttgcctctgccagagaagccccatctttccttgagccaggagtcagtagaagatagtaggctacaaaccatttgactatacctctatgatctcttgccactgaatatagaaaaggagtataaagaagcagtataaaatatgaaattgaattgtcagtggctagatagttagacatatagtctgggtattcaaagggagtgccttttaaaaatgtgctcaacccccattagcccatgaaatgcctcctttccgttcctacactggcatatctttcaccagaagcatttaaccagattctagaacctgtccattgggaataatttagtcaccttcttcaacttatttttctctttttcccctctcaaatgtcattttttttcacatggctccagtctcaattctcctcttattttatccattgtccccagtaacacactcttctttgtccatctagtcatacatcaatccacctatctattcatccaatcaactattattgagccccaattacatgcatgtgaagcatattctcaaagcaccatttccctggccaagctaggatgataatgagagataagatgctctgtttcagtttggttattcaaagcagaccctataataaggaattgggagcaagtagtttatttgttaggtaattccaggaagcaacagtgaggtaaagaaggagaggaaagggggaaaaaaaacaacaaaataataaaggtgcattaagatgtgagaaactgcttataggcaactgggtttagtcctgctgggaattttttgagaaactttgtagaacgtgcctcagaattgtgcccctgaaggatgagaaagctgagatgtttatccatttacttcagtcctcactggctaagagttatcttgggggcattaaatccctggcattttcaggatgccctcccagtaggctttgcaagccttagtactggagagagccttcaggcagaaaagcagaagacaagg

SEQ ID NO: 130651 - DNA, 1059 bp, Homo sapiens
cattgttaaaccctgtctctactgaaaatacaaaaattagccaggcgtggtggcatgctcttgtaatcccagctactcgggaggctgaagcaggagaatcgcttgaatccaggaggaggaggttgtagtgagctgagattgtgccgctgcactccagcctgggtgacagagcaagactctgtcagaagaagaagaagaaggagaagaagaagaaggagaaggagaaggagaagaagtagaaaaaaaccattattctgaaaacacattttaaagcataaaaagataaataaagggctgggggtgatggctcacacctgtaatcctagcactttgaaggctgaggtgggaagatcacttgagcccaggagtttgagaacacctgggcaacattgtgaaaccccatctctacaaaaaacaagaataaagtttaaaaaataacaacaaaaacatcctgggagtgtcgtgagtgcttttggatgagatgaacatttgaattggtaggctgagtaaagccgattgccttccccaatgtaggtgggcatcatccaatctgtcataggtccgaatagaacaaaaaggcttcatgaggaagaatttgctctttctgtctttcagccaggacattggtcttctgccttcagactctggcgggagcttacctcagctctcctggttctcgggcctttggacttggactggaactacaccatctgctctcttgggcacttctcagcctctgtaatcatgtgagctgacagcttatggtaaatctgtttctagctatctatctatctgtatatcatattggttctgtttttctggagaacccagactaatacatgtacatacatcttgttcatttagtcctattattttctgtagtttatctctaaaagtctggtttcttggttaaaggcttttgtggttcttttgggtaacattttgagatcactttgataaagattctcaatgaacattccgtcaggctgggctctgaaagtttgcaagctaaccttgaagttggactctcatggcagagactctctagtgccacctagt

SEQ ID NO: 130652 - DNA, 1001 bp, Homo sapiens
atttatattttttgagacaggatctcactttgtcaccaaggctcactgaagcctcaaactcctgggctcaaatgatcctcctgccttaggctccccagtggctgggaccacaggtgtacaccaccacgccaggctaatttttagaagttttagtaaagacgaggtctcgctatattgcccaggcttgtctcgaactcctgggctcaagtgatccttttgccttggcctatcgaagtgctgggattataggtatgagccacaccagggctaaaaattactcttgaaccaatctaaatgtctaaggctgatgggagtaaaatcagaagttactttcatttactgtattttatccttacaaaattataccattatcctacctgcaatatacatttacattaattaaatgtagtagctacttcttgcttcaattaaaaaataagataaaattgtagtagcagttgcttctaattgcattaatcgctaaatgcaaaaaattgtgttatgccagagtcagttatctgcgaattccagtgtcagcagagctccagcccttttaaatcggcagaaggggtcaacttcagttttgatttctttctactactgagaattaattcgctggcttctacttccaaagtttcaaaagcagaggctaatatttgaaggccattgattgggtgaaatagttaattgagaaaactcaataaccagcatcaagtttgtgttagcaattgagcggggtgcagttaaagcagacatgaattgcagtgacagaagcagtttaattagctgtcaattttctaaacaaaacgttctggtgtaggtcaggattttgaaactttcatcttggtttctgcaggaactggcaaggttgaaaagggaagcggctggagggtgtttcatcgctgggacgttgtacacaaagcaaccagacaatgaaaaaggaaggaggttggacagggtgggtggggtgcgcggaataggagaggagctcttctttattt

SEQ ID NO: 130653 - DNA, 1048 bp, Homo sapiens
gccaatttaagaaaaggatggaggcagcagtgtctggctttgctaggagacagattactgtcattataatgcacgagaaacattccatttgttaagccagagaaaaagatatttcacacaaaaaataagaggaatgtatctattggtcaattatttcatcttactccaagaattactgaatttcagataaatgattcttcatcatagaagatattagttgccaaagagtcctctaaagacaaggccgggcaggcccttcaatgtgtgaaatacaaatgtataaaatgaagttaacaggcaagtgcactcccacctaaagacattcagattttaagatatttgaaaacattgatctggtcatacaaaaccaaaacacagctgtatgcaaatctggcacacagatgctggctctcctctctggctctcaggttaagcaaagagattattaaaataatcaaagatccggaaatgtttttatttttttcttaactacatggtttaattttagacagcatgggttgactccctgctatgaaagatgaagtgattacactcttaacaatttctcctacctacattttcctccatttctcttctcattaattataatatattttactttgccaggttataagccatcacatcatgttctgtaattatgatacccctagttacttagtttttgttctatttttaaaagcgtctaatgctcatttccagttcttttaccactcctacattcttgattttgattcatttctttggctggatttcaatgtccaatggttttgttcatgaaaggcttacttctatatcttttacacactagattctaagtactactttccctctgtcttttcatatttgagaaagcttgcttgttgactttataactgaacagttttgttggactacactttttttaaacaggcttaattcgctttattttacttgtataaaaaccttatgttgtagccacagctggagcctgggtcctctgcacgtagactctggcgtgggtcttgacaaggtggtcagtgaattcctg

SEQ ID NO: 130654 - DNA, 2865 bp, Homo sapiens
cgccaccagccaccccgcgaaggcgtccaccaattaacccctcccagcttctggtctacagtaacgggtccccaacgccgcgtcttaaccaggcccgaaccgaccaccgccaaccttccctgacacgcctttgccccacccgaccccgcccgcccccacgtgacgcccacgccccgcccactggcgcccacgtgacccacggtcgtccccgcgcgcggcgtggatcgcggcccaagccgccattgttccgccgagggaggacagcggggcctggcgctggcgccgagacgccgcttagcggccgccactggagacactccctcccgcctcccgggtctcctggcggcggcggagtgaggctgacagcggggaacctgggagacccctccgccctccccgcggtggcagcggccgatccccggctccggcgcgagggacggccgcgatgcgctcggcctgaggttacccggcccggcccttcctcgcttccctcgactattccactgcgtctccgcgccccggcgtcatcctgcgagtccctctgacgggagggaagatggctgcacggagctggcaggacgagctggcccagcaggccgaggagggctcggcccggctgcgggaaatgctctcggtcggcctaggctttctgcgcaccgagctgggcctcgacctggggctggagccgaaacggtaccccggctgggtgatcctggtgggcactggcgcgctcgggctgctgctgctgtttctgctgggctacggctgggccgcggcttgcgccggcgcccgcaaaaagcggaggagcccgccccgcaagcgggaggaggcggcggccgtgccggccgcggcccccgacgacctggccttgctgaagaatctccggagcgaggaacagaagaagaagaaccggaagaaactgtccgagaagcccaaagtgagtatgggatgagcggcagtagagaacgggcgaagggcgggcgtggagaccctcgagcttgggggaggccgcgccccagccgggaaggaaaagagtgcttagtcgaaagccgagaggcagcactcccaagtggaggaggaggtgataggtggtcatgttatttggggaatggggggaactcaggaagtataggacgagtggggaagcccagtttcgaggaaggaagttaggaggtctgggggtccgttcagataggcgcccagaggtcaagccatctttgggaaccgtcaccgctagaataagcacagcatccttccttgaggcctgcagagtaggctgcatgtggagcgtaatgggaccttaaggtggtgttaggaagttgtataaagactgcgctcggaagacagatgtctatctcaagtcacattgagacagtaggcagtggaagaagtgcggtgacctagaaattctggggcttacacaggattaaaggtgtccaggtctagacgcgcttccattttagttgggactgttaaagggaaatggttgcccattcttgttctggcaaatgtggccaacagaggccggaacgggagcaaggcaagagggggtcggttacctaatacgctttgaggtgtatggtcctgtgagaaagagctaaggcgagttcaacgaacgagtctgttgcacactctgtggcgtggtagatttgtgaaatagagtaaagggagatgacagggcagaatggtgaaagccgagagaggaattcaggcaccgatttactgggccacgtgtggaagttgcagagggcatcacgtctgtcttaggccttcatgttttacgtttacattctttattgccattcccatggttctcccattatatctttcatagttttatgtatttttaaaaatattttacatttgagcaaattgagactatggagggtatgcagagttagaaacagcacctaacctatttttatatccagcgaattaagatcttcaccttttcagtacaattcagtaagccagtacgaaggccctaccatgtgaaatttgcactctggtgtttggagggcagtgcaaggtatacacgtagagtcagtgttggagagtagtggagacagattcataaataattagaattttgcatagactgataggtgttaaagaggttttaactgagtgttaatgaggtttggagggtaggagacatttcactggagggctttaggaaagttgttggaggaaatggggtttgagttccaactaacaagagttttgttggtaacaaactctaatctctagattagagatgtgacaggtcacagttagtgcattatgaggcctggataggccttcacgttttgcctgctgattaagagatgcaagatacatatgaaacctggaaaaggcacaactttgtcaatgtgaatactaccataagttaggagaggagaaaatagaactgatttggaacataaataatttaaaaatttgtggagactatcaagaattaccaattatcaaagtaatgttatggtgaaaatagagaaccttgctccaaggtaaggaaagaaggtgatcttgaaagaaacacattcagcacaaacccatgtggatgaagcacattgtgaaaatttcaaagccctatttgggacatctagaaatttcagataaacttgagttgagagagacaggttctccaagaacccatccgacatgcgttataacactcaaatgactcatctgaaagaatacagattccggcgaatgcttatacattactgtgaaaaatgctcagtagacttaaaagacttaccccctcattttcattcgagttaaggaagtggggagtaaataagtaaacctagcgttagctttgaggagtggagaatgggaagactgtatggctgaatgtta

SEQ ID NO: 130655 - DNA, 1057 bp, Homo sapiens
gatacaaaggttaaagctcagtttctccccagggagctttttgtttcagtcgtggaaaaagatatacttaagaaattaatgatacaactggatgtggacccaggtgggcgtgaaaggccttgtcacagaagctgactttgaaagtgggtaggagtcccccaggaattcaagaacgacctgggcaatatagtgagacctcatctctacaaaaaatttaaaaaattagcccagtgtggtggtgtgcacctgtagtcccagctattctggaggctgaggttggaggattgcttgagccaggaggtggaggctgcagtgagccaattcgaggccctgtctaaaaaaaggggggaagggagggcagtaagagcaagataatgtgagaggcctgagaaacaacaaaggcccaggattgaaagaagacaactctgtcagcctggcaggaatgggaaactctaaacttgagtaaggcatttcaccttgctctgttcagtgtatcttgtttacaaattggaaatcttagttgagttaaaacactgcagtattcttcaaagtgttatccctggctacttgcaatgagtcactttgaatgcttgtggaaatgcttgggccaggcacagtggcttatgcctgtaatcccagcactttgggaggcactgttgggaggatcacttgagcctaggagtttgacgctgtgatgagctatgatcaggtgactgcactccagcctgggcaacacagcaagactctgtctcctaaaagaaaaaaaaaaaaaaagcttgtagattcctgatctctgatcttttcgttccattatttttagctttctcttaaatcactccaaattttgcgactcctgttttcaaatttttcatttgtagagtaaatagtggcgaaatctgtatttacctcaacctgtttataagcaatttctgaaattattttatcaatttgttttttatcccctaataaaaccatgccatagatcttttagggtatgaattacagtttgttccctaattaaaagtgaggggggccactttttactgggctcagttct

SEQ ID NO: 130656 - DNA, 2440 bp, Homo sapiens
taaaatctaaatctctttccatggcccgtatggcccagcacctgcttttcattctaagctgaatttgtgtgagtttcctgtcatttgctgttcagttcttgaaactctttcacaacccagcgcctttacatgagctattattaacacttttggaacaatctttcccccactattctcctcagcctttagttttcaccttaaaagtcaccttccccgaaaatcctttcctgatcaccctatgtgaaatagacatccctttctattttctgtctcaaccccttagatgtttccttcatagtggttattacagtttgtacattatttgtttacttacccatttacttttttgggttctctccctccccagattgtaaaccggtggcaaactgcctggcgtataagtgcctttggtaattatttgttgaactaaaagctgaacaaagtgactaaaataacatctcacagttaattggataatctgttattgagttaaataaatttatctcttaatatattcccagtagaattgtgtttttttattcttaggtaatagttttgctggtaatattaaaaaagttatatcacttgccacctatagagttttctttttacctttaagtcactctttgtcagttttaattcttaagagaataatcagccaggtgcggtggttcacacctgtaatcccagtacttcgggcggaccaccaggtcaggagattgagaccatcctggccaacatggtgaaaccccatctctactaaaactacaaaaatcagccaggcatggtggcgtgcacctatagtcccagctactcaggaggctgagacaggggaatcgcttgaacccgggaggcggaggttgcagtgagccgagatcgcaccactgtactctagcctggcgacagagcgagactctgtctcaaaaaaagaaaaaaaaaaaaagaataatcatttgctcaaaaaaatccaaattataagtaaaacaaatattcatgattttacagaagagaaatcttgagattcagaaaaattaactgacttattcaaggtcataggacaaaggagtttaaaaggcaaaacaatatcctaatttctagtctaagaactttgttatttccactctacctctctggtttcgatggcatgttccaggatattaaattgcattcagagaacaaatagagttttcccagtgagttatggctttattgcttttaaaatttcgagtcagaagtttctgctgaaaattataatgaccttacaaaagctccagaattttggctccatttgtttggttatgtgacaggattttttcatcttttcttttcattctgccagaggcctaacgtaaaagacctttaacagttctgacagaaaagacctttagtagttgtgcccatcttagataccaagaacaacaataaaccctatgaacattcatttttgttgtgctttggcattactggttagtgtactatttctcaaggctgtaaaagccttgagagtatttttaaattattattcaagcaaaattcagagatataagtgaggaattggtgttatttgatcagttttaaaatgcacttgtttttctctccagctatgctagtagttttcaaactgctccatggaatgccaggcttcccagaaggcatccgtcagaatgtcttagacatttttcttctaagaaagaattatacagatgtgtatttgctgtatcatttgtagtccttatcatacccatcagatgtaaaatattgaaaaccaatgcttgtatttagtttttcagaaatcatctttggcatatcttggccatgtgacagttattaccatctccccatctcataaaggtaaccctgagcatccctgctgtagtcaacaaggagacagtttggaatcctgagttgaatttttggctgtttagaaagcacagggatctttaccactaaaggaaatatctcagtatatagtgagattttgcaaatttgaaccataggttatatttgtaagattgttctctcagttattaagagtttgaaattggggttgaactgtgtctaaagctatggtttatgtgtatgtttagtttatgtagttgctgtgtgcataacatttggcaggggaaaatgtttttactttcaaacaaactgacaagaaattgttccatcttgaatttgtgtaagaacgtttcagaactaaaacaaacttaccaaaactaggtcttgtccattaaatgagataatgcgtgtaatgtgtctagcaagtacttggaaattattattgttaagactgtcttatagtctaacttatcaactacaatgatgcctcttctgaatttcctaatttcttgcctttatctttttttttttttaattatactttaagttctgggatacatgtgcggaatgtgcaggtttgttacataggtatacatgtgcc

SEQ ID NO: 130657 - DNA, 1514 bp, Homo sapiens
tcgagccgagatcacacaccactgcactccagcctgggcaacagagccagaccctgtctcaaaagaaaaaaataaaaatgaaattccagtgtttgtccagggtgaaacacatttgggatctcaatcctggtctcccagcctgctttcaaaacctgtactcttgagagtgtgagggagagtataccttttgttttgtactttactatatgttattgtatacctgtcttcctttactaggttctaagcttcttgagtgcaggcattgagccttatctttgtttcaaggtgttaagagttctgcatagcactctactgagtgaatattatgtaattttcttggaaaacagcagttttttaaaaagaaagataacattacaatgctgcctctagagcaagcctggactattttaagcctctgagaggatatatttgcttattatttttaatccattaacttcccaaaagaatttgcatctggagcattggacctgatggatgcctgtccaggcccttttgaccaccaggacttaacattcatctgagcttgttaatataaaaaaatggcccaaatgcttgaacgtgggaataaagggcataggccatcatagctttggagagaaaagggtagacgggccaggtgcagtggcttatacctgtaatcctagcactttgggaggccaaagagggaggatcacttgagcccaggagttcaagaccagcctgggcaacatagcaagacctcatctctaccaaaaatttaagaaaaattttaaaaagaagggaaaaactgtttctggagcaggtatgctttcacatgctctgtcacttggtgtaattcaaatgtaaatgtgtaagacaaagtatatatttttctcatatttacaaatgatgaaatcaagggttaagtcaaggaaaatggttaaaatcacagtgattaaatatggaagttaagccttaatcccaggtttgtcaaactccaaagcccatagtcttctcatattccattttttgggggaagttggtagactgcccttctagtttctaaacctaagaagtttctaggtcatttgaatcatgatctttacatgttgtggctagaaatacagtttacgtaactaagtgaaagtagggttctatgtgatttcattttagaagtcagtgttaaaccttatatatgcttacctcagatacaggttcttttgcaagttggaatcagttttaacaagttaagagtgctcaaatgacatctgttattaagcatacttttttttttttttttttttttgagacagagactcgctctgtccccaggctggagtgcagtggcgcgatctcagctcactgcaacctccgcatcccaggttcaagtgcttctcctgcctcagcctcccgagtctgggactacaggtgcttgccagcacacccagctaatttttgtatttttagtagagacggggtttcaccatgttggccaggatggtctcgatctcttgacctcatgatctgcctgcctc

SEQ ID NO: 130658 - DNA, 1931 bp, Homo sapiens
aaataaagccattgaaactagtatattgacttactaacatgttgaatttgaggggaatgcataagtgaaaagatgttgtaggatccagaaagacggttagagtacagatacctaggccccattctccaaacttctcagtctggtgatggggctcagaaattattatttaaaaagtaaaaaagaggctgggcacggtggctcacgcctgtaatcccagcactttgggaggccaagatgggtggatcacctgaggtcaggagttcaagaccagccagaccaacatggtgaaaccctgtctctactaaaaatacaaaaattagccgggcgtggtggcatgcacctgtaatctcagctactcaggaggctgaggcaggagaatcacttgaacctgggaggcagaggttgcagtgagccgagatcacaccttggcagtccagcctgggcaacaagagcgaaactccgtctcaaaaaaaaggtaaaaaaagaatgattctggttaaaagccagatttgggaatcacacacttgagtctactcatgagcatctctaagtgctatccatcattttattttaggaatgttaggaaagcttttgtagccttttgtaggctgtggcaatgggtcggaaagcttcttactcccagaacagtagagccatgaaattacagaattagaggttccattagagattgcctaacattcatttgtttatgtatcatctatggctgcttttatgctacaatggaggaattatgtagttgcaacaaagacatatgggccaaaaaataaaaataaagaacaaagatatatggcccataaaacctaaaatagtttctgttttgttttgtttttgctgaggactgttgatggcaatcaataaaatatttttttctgaattttattttgccatacaccctgaatatgtttataaataaaatattttctatctggctgtttacagaaaaagtttgctgacttttgagtagatcatacctgtcactttatagatgtagaaataaggctcggagacaatgagtgaaatattctgagattacacagttaattggtggtcaaattgcaaacacagttttgttctccttttaactgcttccattccattatttttgttagagggactgataccttggtgagataagaaaatctgtggtacagaattttgcttatgaattttatatatatatatatataaacactagggataatctatcaactcttagataacattggtgtacaaaaactttttaaatttaggtacagaggtaggatttgattgtagtatatatggtttcctgcgtataaatctttgcactgatctgctaagcagtttgataatatgatactttttgttgcctgtgcagccaaatgggcggactgttgaagtggctgagggtgaagctgttcgaacacctcaaagtgtaacagcaaagcagccaccagagattgacaagaaaaatgaaaaggtaagtttgggagcatatgaaattgtatgcaagactcttaatagaatgacatataaggataatgcttttctgtttcataagattgtatgtatacctctcatttaaacaaaactcagaaaatctgaattaaccatagtggatgggtggtaaaagtttaactgagttgtttttgtttttttaaaggaaagttgcatcaccaaatattttaaacattgctgtggcaatactaaatattcattataccaaaaacaattcattcacaacttgaacatcttgtgtaagttttcagatatataacatatataccttttattcaaaaacagaactgtggaattgtgttacctttgttagtaagacacatctagcatgaaaaccttagcaaaatcgttcagtgatgtttagtgttgaaatagatttctgttgtgttggaaacataattgtctatttacta

SEQ ID NO: 130659 - DNA, 2261 bp, Homo sapiens
cagcatgggcgacagagcgagactccgtctcaaaaaaaaaaaaaaaaaaagatctgaattaatgtagaaatgtaaagattgctagtgagagaaacaacggaaacaaaatgtgtaaacttttgtcaccaccaagttgttaggatgaagtcagcgatatccactaaaccctgatatcatttattacaagtattaataaggtcttaaatttttatgatgctacacaatatacaaaatatttgtacaaaacattttcatatctcttaatcctgatgaacaactctgaggacattatcatttcttttacatagctcaataaagagttttgtgaattgtccaggaacacatagctgataaggaatgctccttcagtttctctaaggcagcagtttttgaagcatggtcagtgaacccctaggaagggaccctagtgaccctttcattaggtccctgaaggcaaaactattttcataataattaagacattattttcctttttaactatgttgatgcttgcactgatggtgcaaaagcgataataggtaaaactgctggctccttatcatgaaccaaggcagtggaaccaaacttccactcattatattcttgttttgttttgtttttgagacagtctcactctgtcgcccagggtggagtgcagtggcacgatctcactcactgcagcctccacctcccaggttcaagcaattctcatgcctcagtctcctgagtagctggaattacaggtacctgccactacccccggctgatttttgtatttttagtagagacggggtttcactgtgttggccaggctggtcttgaacccctgacctcaggtgatccacctgcctccgcctcccaaagtgctgggattataggtgagatccaccgtaccctgccattttgttttgtttgaagagactctcactctgttacccagcctggagcgcagtggcacagtcatgctcactgcagcctcgacctcccaggctcaagcaatccttctacctcagcctcccaagtagctgggactgcagatgcacactaccatgtgcccagctaattttttgtagagacgctgtcttaccatgttgcccaggctgttcttgaactcctcagctcaaagcagtccacctgccttggcctcccagagtgctgggatcacaggcatctcattgtattttttactgccatctactcacagttaaaaaaaaaatgctagtttcacttgagtgtccttaatgaagcagcaaaaattattattagctttattaaatctttattaaatctcagttcttaaacacatgctttttaatctgtgtgatgaaatggaatatatgcataaagtttgctgcaaaatgaagactgatgattgtcttgaggaaaaacacttatgcaatggcttgtgtgccaaattagccacttattcatattactctttttttgcttgaaagaatgactgatagacaagccgtgattattcagatttgcatatttgcagaccttttctcaaaaatgaacaaggctatcttgtcgcttaaaggaagctggtagtatttgttgcaaatgataacatgacttgttggcaagtgaaaattagaaatttggaaaatttgctggtgcagtagctcacacctgtaatcccatcactttgggaggccaaggcaggaggattgcttgagcccatgagttcaagactagcctgggcaacatagcgagaccctgtctctatattaaaaaaaaaaaaaaaaaaaggaagaaatttggaaaatttgtgtctgctaccatgagcttgacaacttaccagtacataaggaatttctaatgacgttagttggtatattaacaaatgtaattttaaaaaatatatgttgtttaatggaatgttttaacattttggaagatctaccgccaggcgcggtggctcacgcctgtaatcccagcactttgggaggccgagatcagtggatcacaaggtcaggagatcaagaccatcctggctaacacggtgaaaccccgtctctactgaaaatacaaaaaactagccgagcgaggtggcaggcgtctgtaatcccagctactcgggaggctgaggcaggagaatggcatgaacccgggaggcggagcttgcagtgagcccaaatcgcatcactatactccagcctgggcgacaaagctagactgcatctcaaaaaaaaagaaaaaaatttttggaagatctttataactcagtgaacaaataattttccagtggaccagtg

SEQ ID NO: 130660 - DNA, 2048 bp, Homo sapiens
tttctgaagggaactgccctgaaatttaaagtcaagctcagtattttgagcaattaaaaagtcattcatcttgtctttgtctcctggaattatggtttgtttgtttttcccccgtggttcttaaatataccatttattatcaccacctaataaacccatttattagtgattatatataatactcctgtcacttctacctagcaagataaaaaaagatagacaagatgacttatatatatcactttttctaaaccatagatgacagatttgataaaaattaccagaataaataataacagttgcctaaaacaacataatgaaattagaaaacattcttaggatgagttaatataatcaacactcttggttttagcttaacatctaaatttatcatgatattttatgtgctccaccccatattctcccccaaaactataacttttttgtcttccccttactgaataacattttttttctggggctatgtcaggagcctgggaaactaaaattagtcacagagagaaacgacagcagcgtaaacgtgataaggtgctgactgattctggttcattggattcaactatccctgggatagaaaataccatcacagttaccaccgagcaacttacaaccgcatcatttcctgttggttccaagaagaataaaggtatattagtggaacataagacagtggtacatcaaatcaaactccttttattcggatgtacaaaatatcattatgtcaaaatctgactattttgaatgctaacatcattgtgctgatatacccttcttcatgagagtattgtgaaccatgtatcggtttaccgaataccagcagtgttacttgttacgtattgcctaatgactggcctattaaattaaaatttgcctttctgccttgagtcatatgagaaaatgatgttgccacttttctagtgcgtatcactttgccccaactcccttgcatctctgttccttagagtggataagacatttattaaatgaaatgatttatcaccattttgcatgttgagagctttcattccaagatgaatcatgcatgttctggtgagtgcaggttgtgtctggatttcttatcaccccacctttttgagaatattatagatgtttgatagagctagaccagaacttcaaagattgagctaatgttctttctctcaagtattaatatttcagatgttcatactatccaatactggtggcttcttggtagcccactctttaaattaccgtcatttttaccctggagacaccagtctgcaaagtgatactgttcaatttgctggaaggcattggcgtatcttccttgtctttttgttaatgaccttcccacctccccacacctcagttgtttccaaaccattttcttagccttgttaccttttattttttgcttgataacttggtggaatttattgccatggtacagcaatgacttctacttacccattttcactgttacatattagctatgctttagtatttttgttgattctttttcgctgtcttgtgcatgccatccttgctagcacaatcctatgtcatgctggtttttttaaacattgtgatcattatgctttttagtgtcagagaaatagtatttttgtgttataatgtgtattctcacctcttgccatatttcctaagtcctggtcccaaatactggcaaagttcttcataaggtgatgtgtttgcttccaggattgttgaaaaggcagcgggtgttgttgagaggtggcaaagttgaatccaattacagagcccaatactgcagttcatacttaaaataatcttgataactgttgtagaatagcaaactctgtctgtacataggcagttttccaggttctttttggcattttagttgactaagaatatggtaaccagaaaactcagttccttaccaacaagtgaaatgtgttgtaaaattgacttttttccagtggaagaatttagcacttgaaggagcaatttataatagataataattaaaaattaatttatgtgttactcctaatttaatg

SEQ ID NO: 130661 - DNA, 1256 bp, Homo sapiens
tatttgtgtgtgtgtacatacatacactctacatatataatgatacctgggctccaccacaaagattcagattttaattggtctgggctgaggctccagggtctattgttaataaatttttcagttaattttaatgtgcagccaggttttagaatcattgcttgatacataatgtaatatatataaataaggaaagaacatgtaactaaggaaatgtcttcatattcttagtgggtgagtattcagaatatgtgtcattttcctctttgctctgttgtactttctttgagcaagttattctgctgtgaacaactttgttagtatatatgttatgttcaagcctcctgtttttaaattaaggcaatccttggtgatcaaaggatagtaggggaagtgagtaataaatataagtcaagcaatcatagaaatgtgaaaatatcccagttttaagaagtcatgtacctgttttttaatattcattttcttttctttaagtttcttcaggattgaatgaaaacctcactgtcaatggaggaggctggaatgaaaagtctgtaaaactctcctcacagatcagtgcaggtgaggagaagtggaactccgtttcacctgcttctgcaggaaagaggaaaactgagccatctgcctggagtcaagacactggagatgctaatacaaatggaaaagactggggaaggagttggagtgaccgttcaatattttctggcattggtaagaagtgttagaaaaatttaactttatttaaaattactaatcttgtacatttttaatttttcagaaatagaaaaaaaaactatgaatagaaaaataagtactgctctgcagaaataatagtaataattaactcatctcacatcctttttgtagagcaaggtgggaattaaataagtaaataacatcatttactctttacatagtgctttcacatactttatcacatttgattatcaacatagctaactggtgtaattatatattcttagtgatgtgatacatgtaatgtgtgggtagactttttgattaatttcaacaattctgttgagtctaaataaaaatagtaaatggaagtacagttgataacatccacttatattttacagtctgcatggtgcctatttataattaaattttcctccggattttaatataaagaccagtagttgagaagtttatttctgttgagagctatcaagttaaaagcagcttaatttgtgtgtgtgtgtgtttgtgtgtgt

SEQ ID NO: 130662 - DNA, 4749 bp, Homo sapiens
ttttgatgtaattcaagttgaatatgcatgtttatgtctcccctagtccccacttaacattgtaacataaacattttccttactttttgtaagtatatttaatggccctataatgtttaaggatagcataacttacttaactattcccatattattcaagaagtaattttccttttttttttgagatggagtctcactctgtcgctgtcacgctggagtgcaatggcatgatctcggctcacaacaccctctgcctcctgggttcaagcaattctcttgcctcagcctcccaagtagctgggattacaggcatacgccaccaaactcagctaattatttttttgtatttttagtagagacggggtttcaccatgttggccaggctggtttcaaactcctgacctcaagtgatccacccacctcggccttctaaagtgttaggattacaggccacggcgcccagccaattttcctttttttaaccattgtagataatgtttcacggaatatatttgtttgggatttttttgttgtggtttttaagatggggtctctctctgttacccaggctggagtgcagtggcatgatttcagctctctacaacctctgcctcctgggttcaagcatttctcatgcctcagccacccgagtagttgggattacaggcgcacaccaccacacttggctaatttttgtatttttttagtagaggtggggtttcaccatgttggccacactggtctagaactcttgacctcaagttgtcttcctaccccagcctcccaaagtgctgggattacaggtgtgagccaccacacctggccatgttttgcggttatttcttaaggacagagtcttgtgagtgatattggattaaagggaatatggatgtttgtaatgctctactacatagtgcctaagtattttctaagagagttgttctaatttatactcaaagcatcagtataagtgcccatttatcatatgcttaccaaggttggggattttttttttccgccttttctaattcgataagcaaaaagtacgtaaattattttggttaactttttgaaatcactgatgagattgaaaagttttccacaactttcttggtcatttctttttttgtttgcttgtttgtttgtttgagacggagtctcgctctgtcgcccaggctggagtgcagtgcaatctcagctcactgcaacctccacctctcaggttcaagtgattctcctgcctcagcctcctaagtagctgggattacaggggcctgtcaccacaaccggctaatttttgtacttttagtagagacaggccatgttggccaggctggtctcaaactcctgacctcatgattcacctaccttggcctcccaaagtactgggatgacaggcgtgagccaccatgcccagccgtttcttggtcatttctatttcttttatgaattgtctgttcttgttattttcccatttgtctaatgagctcttcatgtttttttgttttgttttgtttttaattttttgagacagggtcgtactctgttgtccaggctggagtgcagtggtgtgatcattgctcactgcagcctcgacttccagggctcaaaagatcttcctgccttagccttcttagtagctgggaccacaggcatgtgccaccacacctggctaattttggtatttttttgtagagacagtttcgccatgttgccctggctggtctcaaactcttgggctcaagtgatccacctgcctcggcttctcacagtgctgggattacagatgtgggccaccacatctgcctactattttattttttaaatctagttatactttcttgtgcattaaacatacgattttttctcttgtgcttatggcagatatttttatctgctctaatttgagggagcaatagatactagaaactttttagttttagtatgtaagtagaaaaatatttcttcctttgttgttaggctttttctggaacttttttttttttttgagatggagttttgcccttgttgcctaggctggagtgcaatggcacgatctcggctcaccacaaccaccgcctctcgggttcaagcaattctcctgcctcagcctcctgagtagcctggattacaggcgtgcgccaccacgcctggctaattttgtatttttagtagagatggggtttctccatgttggtcaggctggtctcgaactcccagtctcaggtgatccacctgccttagcctcccaaagtactgggattacacgtgtgagccaccaacactggcccctctcttttaaagctaacaccctcaaaaatcaaacaccagatcatttaattatattgtttttaagcttgctctcccttcctccccattatattgaaaaattgtgtagcggtatcaaaacttgtttgaaagagacattcccttgcctgggcatggtggctcatgtctgtaatcctggcactttgcagggctgaggctggcagatcgcctgagcccaggagttccaagaccagcctgggcaacatggtgaaaccttgtctgtactaaaatacaaaaaaatcgctgggcatggtggcacgtgcctgtaatcccagctactcgggaggccgagacgggacaattgcttaaacctgggaagcggagattgcagtgagccaaggtcgagccactgcactccagccttggcaacagagcgagactccctctcaaaaagaaaaaaaaaaagaccttccctaaattcccactctcatttttagcagagaagaaagcattaatttctgtgctataaagcatcctttcatatttggtaaaagaaatggttgaattttatggagtaatgttaggaaccgtgtgaccttttgggatatttacaatttgcaatttgctgctgcctttttttttttttttctttaagatggaggcttgttctgtcacccaggctggactgcagtggcacaatcttggctcactgcaacctcacctcccgggtcccagttcaagcaattctcctgcctcagcctcctgagtagctgggattacaggcacgtgtcaccatgcccagctaatttttgtatttttagtagaaataggctctcaccatgttggccaggctggtcttgaactcctgacctcataatctgcccgcctcggccccccaaaatgctgggtttagaggcatgagccactccgcccagcctacaatttacttgtaaaagttatatagcatttcataattaggacataaattagatggtatttgcttaatgttgttacagataatattaaacagcaaattagagttcctgcctagatagactaggacttttatggaaaatgaaagggaactatattaaattagatttgtaatgggtcactggaaagagacagatgtgactcgtctcatggaggtttacgttctttaaaataagaaatgtcttgaaaatattgagaaagtagcatggtatagaggagtgaacagggactggttcagacagatctattaggtatgaatctctattcttctacatgatagcttttatggacattcaggctagttatttaacctgtatgaacctcatacttatgtaattgtgaggatttgttgtaatgaaagtcaagtaccaagttcagtgctatcccaaagtagttgcttaattatgataaataataatgcagcttggtatagtggaaaagagcataggctttgggaattgacttaagctgcattcgtggctcagctgttttctagctatcagcaagtcacttaattgctccaaaactgcctagcaaagtttctgtaaggattagaagtggttggtgtaaggggcccagctacgtaataaatattcagtaaatagtagctattactatattaagtggttctcatttctaaggttatctttaaatagtctcatagttttaaatctttacatatctttcaagtctgatgcaagttgaaggttccaagtgatgttttttattttaacagctgcttggtctagtgtggataggggaatgaatacctctgaacagaattctgcttcttttgcatctctcacacttaactctgctgtttctggtatgtgaaaaacagtcttttgttcagctaacaaaaacatttgtttaattttagtgcttgttatttgaaaaactaatcaacatcaagtactgctatcaatataaatagcaggtattataaagtggcagaggcctttacaacaggaagagaagacctaaattcttatgtgcaaatggcttaattcccctctctaggggagtaaggattctgtagcttgagatcactgacagtgtattggcacacagacaaatacacatgcaaggccttccattcaggttcatattcttctgttgctaatgtagtcctgccatacttttagttacaatttgacattttacttctgttcaccgttactcatcatgagtttaaaactaaccctttcaggttatggattcccacataataactataagtatctgtagatttataaaatacatgattactaataaactactgttaattctgcattacttaaatggatatatgttttattaatcatatagaaactacatgtatttaacaaatattacataaatatgggaggccaggtgtggtggctcacatctctaatcccagcacgtagcgaggctgaggtgggaagatcacttgagcctaggagttcaagaccagcctgggcaactacatcaccacataaagttaaa

SEQ ID NO: 130663 - DNA, 1104 bp, Homo sapiens
gctggtaagatcatctgtaaccaagaagaaatttataaattagtagtaaggactcacgtgggaggacgtgattgtatgtaacacttttatactaaccaagtatcttttcttcctaaccatttctttatacagtggctctgaatccaaaatacatatcagagtcatctaaggactccagtacacatgtaaattccaattcagaaggggtgtatgtgtgtgtgcgcacgcctgatggaaaaccactgctttacatttgcatcctaaagtgaatttatatctataaagcaaggggtttgacctggcatcagtgaactcatatgcccccaaaactatatgcagaattttgtgttaagctctggatagtagactgccacagctttcatcaggttcctaaaagactatgtgaacccactctcacccgacctactaccctcacctgagaaaaaacaaaaacagacaaaacttatgagataatattttgttttctttaaatgcacttgaacttagtctctagacctcctgcaactcttcttgtctctttggcttctctctgcctcacctctctagataaccacctatttctctaatgtttcttagccaaaagatgctagctaactcagacattttctagttccctctttcaaggttctgaggatacatagccctgaaacatccaggactaaaatgatcaatggcagagatttctattgtgttttattttccattaagaagaaggaaaaaacaactttttttgacttcttgaaatttgtaggcagggcacagtggtttatgcctgtaatcccagcactttgggaggcagaggaggatccctgtagaccaggagttcaggaccagcctgggcaacacagggaagaccctatctctacgaaaaattttttaaaaataagccaggagaccaggcaaggtggcttatgcctgtaatcccagcactttgggaggctgaggcaggaggatcacttaagcctaggagttcaagaccagcctgggcaacatggtgtaaaaccccatctctacaaaaaatacaaaaattagctgggtatggtaatgtgtgcctgtagtcccagctacttgggaggctgaggt

SEQ ID NO: 130664 - DNA, 1054 bp, Homo sapiens
gtgtataatacaaaacacaaaatctaatggattggtgctagggaaaacatagatttctgatcattgaattagatcaagtgattatcatagttaatctaaaattaccctcaattctacttttccttttaacttaattctttttctaatgtctgaatttttccttttaggagaaattttaaaaataaagtctccgtgtcaaagtatagaactattgttatgaaacatcattaggaaattccatttttaattttattgcattcgtttttcatttaagggtctactgctgagccagtttctcagtctaccacttctgattatcagtgggatgttagccgtaatcaaccctatatcgatgatgaatggtctgggttaagtatgtccttttaaaaattatcagttattttttttcagagttttctttctagcaccctgaattcatgctttatgttttaattttaattctaatttctcacctttaaaggtcataagaatataatttaataccaaatgtactacttgaaacctgattattgaatacctgtagaattaaaactgaattttcgtaattgaggcaatatttaaacaaagttttcttctagttgctctgtagtatttctagtttttaaattttttgttttaaatgaatgtctgtttctcctcctaggtagtataatagactgaattaaatatacagaaatggctttgtatttgtgaagtatacacacatttttgtgccggtagaaaactactttcttaacccagttgccagtagaagtttagttaaaggaagacattttagaagggaagaatatggtttgtatgttcggaaagctcatgccgtcttcatttaaaaaaaaaaaattatgagttttttttcctcacaaacctaaatctcaaaatgtactttgtctgaatttttatttcacatccttttttactatttactgttttctactgttagcacttatatgttccctgtggggttttccaccatttttaagcatatgttttccttctccaagtagagttaagaactctctgaaaatggggacta

SEQ ID NO: 130665 - DNA, 4561 bp, Homo sapiens
tggctctttgaaaagacattggcagactaatggaaaactttagcgataagaaattataattgaagcaaactatactgtgaatcatttttaagggaactatgtctaagaagttttttggtacattaggcctatgaatcttaagaattagttacccaggccggtgccatggctcacacttgtaatcccagcactttgggaagccaaggtgcaaggatttcttgagcccacgcgttcaagaccagcctaggcagcatagtgagaccccatctctacaaaaaaaaattagctgggcgtggttcgcatgcctgtagtcccagctactcaggagtctgaagtggaagatcacttgagcctgagaagtctaggctacagtgtgccatgatcttgccactgcactccagcctgggcaatagagcgagaccctgtcataaaaaatacttttactaagcattttactcgatttttatttttcacctccacctcctaccacatgtattaagaaaatgggtgacatgttggtatattgcccactcaattgcctaaactttcttctgcttaatagtttcttttctggcaagaagtcttagagacatggcttatggacggcaattttcaaaatctgggtttcttatctgtgagatttaagcaaagccactgatagcttggtatgtgaacctcctaaagtattattaatgaatggttggtataagatgagtagttggttccagacatctactagactgaattgaagtatatcttacatatgaagtatatcttaatgagaggttcatcagaattgtgagaaataaatttttaactatacatgccttatagattagaaactggttttaatatcatcagtgataataaaaacagtagctaccatttattgagcgcttactgcattgccatgaattgctttacatgtatctcatataatcctctcagcaatcctatgaagttgataatagagcccattaagaaacttgaccaaaatcatcttgttattaagtggtagaacaatattcaaatgtatatttgtttgacatgaagacccatgctcttcgcctctgtgctactatgtaatactgactccagatacttgctcatggtggtgaatttagaaatacaggaaggaacttccttttttataacacatttcacacttgtaatcacctgttccatgtttttcctccactaggctataaattcttatgttgtctctccctgtcctccactagcttagctcttctttgtttccacagcccccatggcagaatctgtcactctgtatttaatagtttgttaagcttacctatcttcacccctgaatagacagactacaagctgcacgtgcagaaggattctattttacttgtttttctatctctagtacctacctagctcaagttctagcacatagtaagtgcttaataaggattggatagatgtaatttcactattaaaatatatttattattccaacctgggcaatatagtgaatccccttctctacaaaaagtttaaaaattagccaggcatggtggcacatggctgtggtcccagctgctcaggaggctgaggcaggaggatcacttgagccccaggaggttaaggctgcagtgaactatgattataccactgcagtccagcctgggtgacagaataagaccctgtctcttaaactaagaaaatatatatatattatatacatataatgttttatttttttctgtctcttcctcataaatttgagatcatactgtgtagacaattttgtctatgattttttttctgtgagcgttttcccagattattatatattcttccaaaacctagattttaaaactttcataagaatgtattatatattcctgttaaacaaaaacaataatagagttcacctggaaaaataagactagcagaaagtaaataggagtactaaataagagtaatgcaaacaaatttgtccttctagatataaaaatgtattgcagagttatgtatagcactgtcccaggaatagatcagtggaatagaatagaaattgcagaaacagactgaagtgcatataaaagaattgagtaaggccgggcacagtggctcacgcctgtaatcccaacactttgggaggctgaggcaggtggatcaagaggtcaggagttcgagaccagcctgaccaacatggtgaaaccctgtttctactaaaaatacaaaaattagccgggtgtggtggtgcacgcctgtaatcccagctacttgggaggctgaggcaggagaatcgcttgaacccgggaggcggaggttgcagtgagccgagatcgtgccactgcactctagcctgggtgacagagtgagactccatctcaaaaaaaaaagagaattgagcattgctgggcgtggtgcctcacgcctataatcccagcactttgggaggctgagtcaggcagatcacgagatcaagagttcgagaccagcctggccaacatggtgaaaccctgtctctactaagaatacaaaaattagccaggtgtggtggcgcatgcctgtaatcccagctactcgggaggctgaggcaggagaatcacttgaacctgggaggcagaggttccagttagctgagatcatgccactgcactccagcttgggcgacagagcaagactccgtcttggggaaaaaaataaagaaagaattgagtgtttgataagagtagcattaggtattagtgggaaatgattggatttttcatttaagcattgttgggacaacttgttaaccatttggaaataaagcctaacctttgtcatcttaaaccattgtaaatgaaacctgactataagtagatttacaggaacatatataggagtatatgatgtgcagggagagaagggaagaattaactttgagagctacttatttaatctggttaaaggcaaagactggtttctccttttagaataagtcattgatagcttcctcaaggagttaaaaattcagtgcatcctatagtgaaataaagggatctggaagtgtagaataaaatttatttttgataataaatgatgattgaagccctgaaagttattcaaatgtttttgaaatgattggataaaaagcacattgaatgatctgaaaaatataagaaagtacaggttaagtatttaaaaagggggagaaaaataagaggttgaatattgtcatgacttggtgaatttgaagaaactaattttgaaaagctcataaggataggagaggtgtagtataaaatgacaggtagggattgtaactttggtactactgttaagaattaattccaaaccctagacaataaatcaattacaaaaatgttataataatcaggggagaaaacaaccaggtcctagaccaagttaaaaatggatagagaaaagaaattcaggagattgataacaaaggaagcacagagagtggaatcaaatggctaataaattttctggaatttcttagaaattccatttaaccatatgatatgcttagcagaaattgaataaagattgttaccttcatgttatttttttttctggctcttaaaatgtgcttgggagacagaacaataacttaaaattacagcttagttgaacataaggaatttttagtttttgccttttaatttatggcaaaaatgatagacgcctaattcacactgttaaattttagatggtctgtcttctgctgatcccaactctgattggaatgcaccagcagaagagtggggcaattgggtagacgaagaaagagcttcacttctaaagtcccaggaaccaattcctgatgatcaaaaggtgagtataagagattcctgggtgtttatttgttaatgaaagagacaggctgggcacagtggctcacgcctatgattccagcactttgggaggtactgtgggaggattgcttgagcccaggagttcaaggccagcctgggcaacatagcgagaccccatctctatttataaaaataaaataaagcaactgaaggagaattctgggtcacagaggctgacaccaattgagagcctcagggagacaataatagcatcagaaacagcaaacccaagttttgataggactggaggagagatagtggataatagcaacacgtggtatcaggaatggttttgctagggttggggtgttgtattttaatgatagggagattttggtatagggtcagcagtctttttttctttttttttttttttcggagacagattcttgttgtgctgcccaggctggagtgcagtggcatgatctcagctcactgcaacctctacctcctgtgttcaagcagttttcctacctcagactcctgagtagctgggattactagcccgacactatgcccggctaatttttgtgtatttagtagagatgggatttcaccatgttggcaaagctggtctccaactccagacctcaggtgatccgctcacctcagccccccaaagtgctgggattacaggcgtaagccaccatgcctggccttttttttttttttttttttttttgagatggtgtcctcaa

SEQ ID NO: 130666 - DNA, 1053 bp, Homo sapiens
tgggactacaggcgcctgccatcacgcccggctaatttttttgtatttttagtagagatggggtttcaccatgttagccaggatggtctcgatctcctgacctcgtgatccgcccgcctcggcctcccaaagtgctgggattacaggcatgaaccaccgtgcccagcctcagtgagtttttaaaacactaaagtttacacagctctctacttaggttgtagtgagtgatggatgacgtagacacactgagagaatgaggttccatgtattttgttattttttaaatatgtagttcttgatccattgtattacttattactagtttttatttagattttgggaaatgaagactgtacctaatgaatgaaattatttcataataattttctaaataatggacacataaccatttggttctctttaatatttttgcttttaacctaaggtctcagatgatgataaagaaaagggagagggagctcttccaactgggaaatccaaaaagaaaaaaaagaaaaagaagaagcaaggtgaagataactctactgcacaggtaaaatgtcagaacaacaagcattcattaagcgcctccggcttaaaatgtgaaaagattatgtacagatgttaaaaatacatagagataaaagacagtatgagacatcatttatttgaaaaatcatagactgttttacatattcaatacattatattgtaataaaaatgttattgctcaaaaaattcgtgttaaaggtgttgctaaactcaaaaataagtaaaattccaaattattcatgcatttttttattatataatggtgaaatgggaaaagagatacagtattttacacatacaaaaattccttttgagtaactggaaggtaacatttagcacacatagaaaaaccatgtgtataacaagtggagtctttcacttgactttgagtttgctggttatttcacttagaagtatcctttcctgcttttttggcatctacccaacagacattttctctttccatcactcatacatttccttttctttctttttctttgc

SEQ ID NO: 130667 - DNA, 1866 bp, Homo sapiens
tttcctctgttgcccaggctggagtgcaatggtgcgatctcggctcactgcaaccttcacctcccaggctcaagcaattctcatacctcctcctgagtagctgggattaaaggcatgcaccaccatgcctggctaatttttgtagttttgtagttttgggttttttttttttctttgagacagaatcacccagcctggagtacagtggtgtgatcacagtctactgcagcctccatctctcaggctcaagtagtcctccctgctcagcctcctgagtaactgggactacatgtatacaccaccacatgtgactaatttttgtatttttgtagagacagggtttcaccatgttgcccaggctggtctcaaattcctgagctcaagcaattcacccacctccgcctcccagagtgctgggattacagccatacaccaccatagattttaattaatgaagaatgaatgctttatataatctaataggttatttttctctataggacacagaagaattagaaaaagagattagagaagaccttccagtgaatacctctaaaacccgtccaaaacaggaaaaagctttttccttgaagaccataagcactagtgatccagccgaagtactcgtcaaaaatagccaggtaatttttaagaataataaagttgccgggcgcagtggcttacgcctgtaatcccagcactttgagaggccaaggtgggcaggtcatgaggtcaggagttcaagagcagcctggccaacatagtgaaaccccgtctctactaaaaatacaaaaattagccgggcacggtgatgggagcctgtaaccccagctacttaggaggctgaggcaggagaatcgcttgaacctgagaggcggagggtgcagtgagccgagatcactccactgcactccggcctaggcaagagagcaagacactgtctcaaaaaaaaaaaaaaaaaaaagaataataaagttttgttgactcaagtattttatcataaataatgttttaagcactgtgctaagcatttaaaatataatgactaatttagtcttcaaaacaatcccgagagaaaggtgagacgcattttataaatgaagctagagaagttgaataacttgcccagagtcatataactatcagtagtgaaatcaagaaccacactgtactgtattttctcctgctaaatatctaggcatacaagggatagacagcttagacatagagaaaatatgagtggtttcattttcccccaatatatgtacataatatgactatggttcagcctcccaaaatggaacatttgtttaaaacttggttataggctcttgaatgatgtgccttctatggaaagtatctgtatggcagaagggaccattttacaaaaggcctaggttggtgacacaaaatctgatttctaattgggtaaattaattacatcatataaattcagggctgggtgtggtggctcacgcctgtaatcccagcactttgggaggccaaggtgggtggatcacaaggtcaggagttcgagaccagcctggccaagatggtgaaaccctgtctctactaaaaatacaaaaattggccaggtgtggtggcaggcacctgtaatcccagctacccaagaggctgaggcaggagaatcacttgaacccaggaggcagaggttgcagtgagccaagatcacgccactgcactccagcctgggcaacaaagtgagactccatctcataaataagcaaccaggtgcagtggctcagacctgtaatcccaacactttgggaggccaaggcaggaggatcacttgagtccaggagtttgagaccagcctgggcaacatggctagactcagtatttaca

SEQ ID NO: 130668 - DNA, 1098 bp, Homo sapiens
cggatcacgaagtcaagagatcgagaccatcctggctaacacagtgaaaccttgtctctactaaaaacacaaaaaaaatagctgggcgtggtggcacacgcctgtagtcccagctactcaggaggctgaggcaggagaatcgtttgaacccgggaggcggaggttgcagtgagccaagattgtgccactgcactccatcctgggcaacagagtgagactccacctcaaaaaaaagttaatgaaaaattattcatttctatttgaaattcagtagacattttataatttcataccttcatttttatctcaacatatattcataaatgttgtaggtgatgattgatttggctgtatcactagagggcaggtatgagttacattgtttatctggaaaccatattagtattgaattgctgctaaaccacctcttggtattactgtgatatttaaactttatttgaaaatttcaccaaaaaacctgagatgattttttcctaaaatagcctatcaagactcttccacctgctacttctaccgagccatctgtaatcttatcaaaaagtgattctgacaagagctcttcccaagtgccgccaatactacaagagacagataaatccaagtcaaataccaagcaaaatagtgtgcctccttcacagagtaagtaatcctcattttttgttcctttgtactgtttacatttttcatgtgttaaggttctgatcttaaaagtctaatggaggccaggcgcagtggctcacgcctgtaatcccagcactttgggaggccgaggcgggcagatcacgaggtcaggacatcaagaccatcctggctaacatggtgaaaccccgtctctactaaaaatacaaaaaattagccaggtgtggcggcgggtgcctgtagtcccagctactcgggaggctgaggcaggagaatggcgtgaacccgggaggcagagcttgcagtgagccaaaatcgtgccactgcactccagcctgggcaacagagcgagactccgtctcaaaaaaaaaaacgtctaatggattaataagagtagccctttcttcctttgaaaatgctaaattctgccgggtgcgg

SEQ ID NO: 130669 - DNA, 4805 bp, Homo sapiens
tacctttagtatccattttacccatttttctcttttattagttaggttgagccatattaaataacagtttttttgggtcaaaactggttgaatatcagcagttccatatagttcaacctaataataccattgaaaggaaaggagggaagaagacatagaataacttaaaatatataacgagggcttgaaaacttaaacataaaatttgagtattttaaaacattgtttcatagttactacttttatattattgagacgtaacagtatttaccatcctcctaatttttttcttcgttttcccccttttcttttttagccaagtctgaaactagctgggaatctcccaaacaaataaaaaagaagaaaaaagccagacgagaaacgtgaaattttttttcctgaattggacatgtgtttgcaaacacttgtcttgaagattatgctgtttatgcaataatttgtgaacatgtacagagttttatataaatttaaaccaatttttaaaacaaaactgcggacaccaccataaaaatggaatcaaaagaaagttaatttatgaaattaagaggtcagcagaatatactcagtgatggaagacacttgggaaagtctttttaatagaacaagaacgatcttaatttaagaatattatcctggtttaacaacagtgccctgtttacaacagattgtgccctatctcatctgcagccgaggaataaaggattctgattagaaagagggttgcctacagattagtaagcaattccttggatcttatgcacagaacttgtaccatttgaatctgttttatgcttaaatcaaagtgctttgatcaaatgcataacctgccatatctttacatatttgttggtagcaatttgtattaaagaaatcacaagtgcaaataaaaagtcatttatcatttgtttaactaaactgtcatggtttagtttacaatttttaaaaagttcttaaaatactgaaaatgcagttgacacttgtgtatggcttatgaagttatttttgatagtcttacattacttgaattgttcaaagtacagtatattttaaattaagaaaagtgaactatatgtatttgttttatacatttaaggcttagactcataaataatgctattgtttatgatttgaaaactttcaggcaaaatccaatttacatttttcccttccctagcaattacttttttccagcttcaactcttcttagttactaatactttgttgactttaaaaatgaaatcattcacaaacttttggtatatgatggagaatgaaaaactagagtcagacagctttaattgacattgtcaacacctccagttatcaggaatacatttttttactgccttaacctgtagtgcgtagaatatgcatcaatttcttgaaggagattcatgtttttataagaattttcatgtaattattgcaattgtggtcaaataaggaacgtttcctgcttgaaattatattgatttaaatgatgtgtgagatgtttcaccattttcaggcactgtgtaattctattgtaataaactggcaggtatctttgtaactataaatagtgcatgctcagccatgtacactgtaaatagcctttaccaaacgtgtttgacaaggaccataattaacatcacttagtgaattgtgataaagaaaaaaaagccatgatttattcgatgtgattggcttgtttttatgtggcgccaagaacgaacctgtttaacagctgtaaccaatggtactgatctatccatccaatgttgtcattatatttgactgtggttcaacagtattgcgttgtcagactaggaaagctaaacgaacaaaatggttttagttttgctgaagactggccttattaatggacagctttcctaacaagagattattaacttttatcaggtgttaacatctgtttcaggaacatggcagtatgtttacatgtcagaagttttgtttaattctatggtatttctaaattgacttgtttaaataaattcagcaaatggatagcattgttttttatttgcttcaatatgggggtagataatagctaaagagccaaggatgaatttcttcaaatgactttattctgttagctttacataggtgttggaggattcctaaggtgtcagcattttgtaaaggtaccacaaaggagaagttgatagggaatctaattttagaatgtgccaaatggtctgtgctcaacaatataattgaactctctcaactctacctcaccatttctttatctcaaaattctgttggctttgtcaaacgttggattttatttctgcagcctagtatctccccattctaccacctatgccagatgttaaagacagcagatgttttgaggagaatggcattgtggagatgcagagatgcgttgctaagttgaggtggatccagtatagagatacctctatttcttctttatggctcaagagctaggacttggattttgttttaagagatggcagctggccgggtgcagtggctcacgtctgtaatcccagcactttgggaggccgaggcaggtggatcacgaggtcaggagttcaagaccagcctggccaagagggtgaaaccccatctttactaaaaatacaaaaaaaaaaattagctgggtgtggtggtgggctcctgtaatcccagctactcaggaggctaaggcagagaatcatttgaacccaggagacggagtttgcaaagccaagatcgtgccactgcactccagcctgggcaacagaaggagactccgtctcaaaaaaaaaaaaaagatggcagctatataaatgataaaattaattacattctctttcacatgcatgaggtgcaaactctgtcacaaagtattttaattaccttttaccttgtttcatagatctttatgtgacataaaaacagtttctggcacggtggctcacgcctgtaatcctagcactttgggaggctgaggcaggtggatcacctgaggtcaggagtttgagaccagcctggccaatatggtgaaaccccatctctacaaaatttgcaaaaagtagatgggtgtggtagtgggcgcctgtaatcccagctactcaggaggttgaggcagagaatcgcttgaacccggggggtggaggttgcagtgagctgagatcgcaccactgcactccagcatgaaagagcgagactcaatctcaaaaaaaaaaaagtttctggcacctgaacaggaactggtttccatcatcaactcagaaagcactaaaatctaggtggtgattcagggaggagcaggggaagacagcctcctatggtggcatgaataagatgcttccagaactagtagggaaataactaacctcttcaggctttatcaggcctggaggggaaccttgctcatgttagcaagaaaggtatcctagagaagccactcaaaaggctccctaatccagcctgtctccacatacatactgaaaattcttccctactctgaggcagggtgtagtggtttaggggtttctccagactggaatcctacctatctgtaccgacaattgagcaaacaacagttgagagagtccaaaaaaaaaagtattaaaatgtgattgatgtaatttaccatgtttactttatgcatgcattttattggggaggggaggtcagaataattcacccaaatctagtggtcttatttcataggctaatctggtttatatttgcattaaagatactggagggcaatatttacagagtttagtttttcttaattaaaaacagtcctctattaatatagtgtgaaatatctttcaaaatttagagtttaggtttaagatgtctactagatatctttaagattttcctgtaaactcactgcacaaactggaattactttccaaaagacttagggaatgcaaatatgttactcataagatgcattgagtattgtaaataaaacaaaccatttttgatttgtttaaattgctcgttacagttctcttgtggggagggactttgtcagtcattttgcatcttaagctagactaaactttttgttgttgttttcctaaaaccataggtgcaagctttgccgctgggaagtcatattgaattaagcacttttgaaaatgtcactgtttgtgacacacaatgttctctacagaaaacttcttctatcttatgtcattttagcagtagatgtagctgcctgccaccaggtgcaatatgtcatttgcatcagccttttcagttaaggaaattaaaacttggcatgcattagttcatatgtatgaggttggctgtgtccccaaacagcaattgcttgtacaagatagaagtttgcttctcagctgggcatggtggctcatgcctgtaatccaagctctttgggaggccaacgcgggaggattgtttgagcccaggagtttgaaaccatcctgagcaatagagagacccccatctcgacaaaaaaaaaaaaaaaaaattagaaacaaaaaaaagattgtttctctttcatattaaagtttgggaaggcaatccagagcccatatgacattatgcagggtcagggatccgggttctttctatattgttcctccccattctcaacctgtagctttttttttttttcttttaatgagatagggtctcactctgttgcccaggctggagtgcagtggcacacttctggctcacttcagcctggaactcccgggctcgagctatattctcccactttagcctcagcctccagagtacctgggactacaggtacacaccaccatgcctggctaaat

SEQ ID NO: 130670 - DNA, 1169 bp, Homo sapiens
gcttgaacccgggaggcggaggttgcagtgagccgagatcgcgccattgcactccagcctgggcgacaagagcgagactctgtctcaaaaaaaaaaaaaaaagaagtagaagggaagaaaatcgcaaggaactagactaaaagaatctcgacccttgaatggagttacacgaacggccagatgaaagaaggaaggcccggacctccactcagggccgactaggggactggcggagggtgcacgctgatggatttactcaccgggtgcttggagctccagcagctggctggagcccgcgatgacgtcacggactcgggtcacatggccaagtccgccccgccccctccccgtccccgccgctgcagcggtcgccttcggagcgaagggtaccgacccggcagaagctcggagctctcggggtatcgaggaggcaggcccgcgggcgcacgggcgagcgggccgggagccggagcggcggaggagccggcagcagcggcgcggcgggctccaggcgaggcggtcgacgctcctgaaaacttgcgcgcgcgctcgcgccactgcgcccggagcgatgaagatggtcgcgccctggacgcggttctactccaacagctgctgcttgtgctgccatgtccgcaccggcaccatcctgctcggcgtctggtatctggtgagcgcggcgcgcccggcccgggaccctgcgttgcttccgcgcccctagctgggcttctggcccggcctcgcggtggggtgaggcgtgcgctcatccgcctaaagttgtattattagaaacttaattctccgggtgccgcgtccgcacttcccccggctgggccagcgccgactgggggaggccaggagtttggggcgatgggggaggccaggggcgcggggcggagggccgcactcgacccttggcgcccaggtggtgtgggtcgccgatctccagcctccgcgcagccccgcggcctcgcgtagggcgcaccggggcagacaaactgagcttatctgccgagcacgtgtttcctttcttcttaaagcccgtgggctttgtgtttcgacggctgcggacggagcggtcgcggaggtgacggcgcatattttgcagctctgtggttagggttgcggatttgtcaatgctcgttctccctggccgcgtctccgctagg

SEQ ID NO: 130671 - DNA, 1016 bp, Homo sapiens
cccaggctggagtgcagtggcacagtcttggctcaccgcaactttcgcctcctgggttcaagcagttctcgtgtctcaacttcccgagtagctgggattacaggtgtgtgccactgagcccgtcctagctttttgtttttttgagacaggggtctcactttatttcccaggttggagtgcagtggtgcaatcacgcctcattgcaacctcggacctttcagctcaagtagttttcccacctcagcctcccgagtagctgggaccacaggcacacaccacacccagctatttttacaaattattgtttgtagaaacagggtcttgcttgtttgcccagtctggtctcgagcttctgggttcaagcgagccacttgccttggcctcccaaagtgctgggattacaggcatgagccaccatgcctggttgatacttttttgtgcacagagtttaggtctccattgtccatcctgaactcggctctgggctgggcctctctcttcatattcaaatatttaaaatgttctttaagacatgaaagggagcacagtcattttctgcctccacaccctgtccctccatgtctcccagtaggtctttgcctcttctgggggccatcctttgccttctgtccattgtctagacatccttcttgttaattacgtgcaccctgtgttctttgagtacgtaatggtgtcttagcctgagaatgaacaccagaaccgactgaagttcactcagagaaattgggattgcttctgctggtgtggcagatcgttttgcacgctagccccttgtcagattgggagtgctgtctggagcactcccttgaaaggaattttgagcttgctgccagggattggtttagcagagttggccagggcctgtgaatggggtgtggtggcttcttgggaggaacctgggttactggtaagagcgtatatggcatttgtaatcaaagcaccaacaattgaatgtcagttgaaaactttatgcacctgtattttatgaacatggt

SEQ ID NO: 130672 - DNA, 1354 bp, Homo sapiens
atagggtaactacctgacgttgccatggcatttgtaaattgtcatggcgctggtgggagtgtcttttagcatgcatgctaatgtattataactagtgcataatgagaaataaggacagccagagctcacttttgtcaccatcttggttttgatgggttttggccggcgtctttaccatcacctgttttatcggcatggtctttgcgacctgtaccttgcaccgacctcctatctcatcctgtgacttagaaggcctaacctcctggaagtgcagcccagtgggtcttagccacattttaccaagcccctgttcataatggagtcgctttggttcagatgcctttgacggagaaggtaacttttcactatatattctttgtacagttcaggtgtttggttaaacacatgcttgtagtatctgtttaaattagttatatgtatatgtatactctgggaagtggctcttctcattattacaatttttttcgaaaagcaatcagcttttatttgacaatttggaaaatacaggaagaaaaaaagttattccggccaggcacggtgcctcacgcctataatcctagcactttgggaggccgaggcgggtggatcacgagatcaggagttcaagaccagcctgaccaagacggtgaaaccccatctctactaaaaatacaaaaattagccgggtgtggtggcaggcacttgtaaccccagctactcgagaggctgaggcaggagaatcgcttgaacctggcaggtggaggttgtagtgagccgagatcgtgccactacactccagcctgggtgacagagtgagactccgtctcaaaaaaaaaagaaaaaaagttacttcgaatcctacaataatcctgaaataaccaattgggattgtcatttaaaaatgaacttttttttttcttcccctgagacagggtctcactctttcacccaggctggagggcagtggcacgatctcagctcactggaacctctgcctccctggttgaagtgattctcctgcctcagcctcctgaatagctgggattacaggcatccaccaccatgcccaactaatttgcattttaagaaatagggtttcaccatgttggccaggctggtctcgaactcctaatctcaagtaatccacccaccttggcttcccaaagtggtgggattacaggtgtgagccaccgtgccgggccaaaaataaactcttgaatggatgttctgtaaaacatttacacttcctttaaacaggtatttccaagtatgtggatttttgtttatttggttttgagggaaggtcttactatgttgctcaggttggagtgcagtggcgcatcagctcactgta

SEQ ID NO: 130673 - DNA, 1149 bp, Homo sapiens
aactgcttcctagatggcttcaaagctctcaaagctccactagtttgaacctgtaaaatgtttgattaactgagacaacttgggttgcttacctttagctctagagtgtagctgactcactggaaagtttttgtgctttttcaaccactggcgccagggctgatgcctgtgtttgtgtgtgttgttcactgctctatggtgcctgggccagggggaatgaggtaaaatcctgctgttgtcttcactccaagccttgtgcacttggctgcaactgaatgggctggcagcatttctgccttgggaatgtttatctgctccctccatgggtggggcttagtgttgagagtcaagccactgaagaagttgcctgtggccagcctgactccatgtggtcagtgtaattttctattataaggattgcatcctggggttacttaaattcttttttttttttttttttcttgttgcagatcatcaatgctgtggtactgttgattttattgagtgccctggctgatccggatcagtataacttttcaagttctgaactgggaggtgactttgagttcatggatgatgccagtaagtagtagatatttgggtattttcaagggcagggaatctgactgccagcacttcctattaaattacaaatatagactcgtgagttcatttgagctgatatataacttgtcattgcaaatcaacgaatatttgtgtgcgtctaacattctgtcttctaggtgcaagagtctaaataagatctattttcatcttatgttaacttacccacttaaaaatgattgcattatcatagactttctaccctgggccttttggccttttttgagaggaaggggtataaatgccaggaaggaaggtgaaaaggcttgtgcttatctccttgtgtcttctattatgtttcagtatttatttttattctaggagtgatccttttccattctagaaatgatgttgcagattatttgggggaatttagggccttttcccagtgaatggaaatatgtacagggatgtggatgtggggtaagcagggaggaagctaggctcccagcttgaagatcactgcagcctcatcattttataatcattatgccgagtccatgccaaaggagaggagtagtgctg

SEQ ID NO: 130674 - DNA, 1835 bp, Homo sapiens
agtagctgggtcagcaggtgcccaccaccacgcccggctaattttttgtatttttagtacacatggggtttcactgtgttaaccaggatggtctcaatctcctgacctcgtgatcgccctcctcggcctcccaaagtgttgggattataggtgtgagccaccgcacctggccggagtttttattttaaataagatcggaagctatgaaggctttcattagagctttgaggcacacatgagtttacaaaatagaagttagacacctatatatctataaagtaatacctaattcattatttatataatccagtggaccagaagaacaaacattaaaaaaatctgtaaaccaatatccctttttctattttgaaataatctcttagtataaagtatttactaactttatgctagtttatttacaaaatgcctttgagaagagactgaaagtattcagtggatccactactgattgtcttttttaaagaaattctttttaatctttcggcagacatgtgcattgccattgcgatttctcttctcatgatcctgatatgtgctatggctacttacggagcgtacaaggtaagccgcttgcagtaagatgctggccttttccttggtctcttacatgtgtaatctgtgctgctgtctatagtgagaagtgactttccagttttctgttaagaatctctgtttaaatctctcgtttgtattatgtggtactaggaaaaccaatattatactggaaatttttttttttttgggaagacggggtctcactctgtcacacaggctggagtagagtggtgtgatcttagctcactgcaatctccgcctcccaagttcaagtgattctcccacctcagcctccagagtagctgggactacaggtgtgtgccaccacaccttgctgatttttgtattttttagtagagacgtgatttcaccatgttgggcaggctagtctcgaactcctgaccttaagtgatccacccacctcagcctcccaaaatgctgggattacaggtgtgagacaccacacacagccagtcctggaaatgttcactgaagcttatttgttgactgcttatatttggcatactggtttccaccatgacctgggttaatgaattccaatttttccatttcctttcagattaataaaatactttgaatttaagaaaaatattgttttataatattgaacacattaactttctattttctgttctgtttagcaacgcgcagcctggatcatcccattcttctgttaccagatctttgactttgccctgaacatgttggttgcaatcactgtgcttatttatccaaactccattcaggaatacatacggcaactggtacgtggacctcttactgctccttttcattaattcttttcattagggaagctggttaagtaagggatgtgtagagatacacagacattaatttcaggatttttagcttgcagctgagttactcataggaaatttcttttttcttttttttgaggtggagtcttgctctcgtcacccaggctggagtgcagtgatgcgatctcggctcactgcaacctctgcctccagggtctcagcctcccagctagctgggattataggcatgtaccaacatacctggctaattttgtatttttagtagagatggggtttcactgtgttggtcaggctggtcttgaactcctgacctcaggtgatccacccatcttggcctcccaaagtgctgggattatgggtgtgagccactgtgcctggcctgataaagttttgagggccggggttatgattggtggcagtgatggtggtggttgatgt

SEQ ID NO: 130675 - DNA, 1187 bp, Homo sapiens
ctgtgagataaatttatatgctatgaaatttttaaaaaaatcgacttgtgtaataaaatcacagataatcatatagaagaaaaatttccaaagaagcagttaaactgtggcaataaatgagttaatacattcgattgttctgtgaattcaggagcgataatgttaattgtgtgcttgttctttccagacacttattcttagaaatttctcattcaactctcatccctcccctctcccaacttcccccagtaccacccccatacccccattggtgtaatagaatacggctccagtagcacattgtgccaagaagttactatacccaacatttgtactttcagggacttttggtttagtagagctgttataatatgtgcatttattgcttatgtcaataaaagttttataatatggctttatctgtgtggtattctaaattacctgcagtttgaaaattaaaaatctgataatcactcctcattttcagggttacttgattagctgtgtttggaactgctaccgatacatcaatggtaggaactcctctgatgtcctggtttatgttaccagcaatgacactacggtaggtatgatgtcacttatggtagagatctcgcccacacctttactgtatgctgatctttaagtgtttctagtgtttgctacatttttattgttactgaaacatactcatgagctgcttagttatcaaaagattcatcttagttatcaaaatactcatttaactatgaagttaaatgtattttgtttttcttacaggatattaaaatgtagatggctcaactctggtttattttaaaatgtattacagatagataatatatgtaccttactgtaattatttatcttaaacctgcattgttaaaccatggtgtataattctagatatcgcttctgcattgtatgacattatattaactcactttatatgtgaagttaaaccaagatgcgatgtttacaggtaggtaaaaaagaactgcaaagttactatgtctttgtaatttatcttatgtatgtattcttagtaaaataatttagatgatctctgttctgctactagttgctcatactttaaaattgcaaacctgtcataaaagatttttgaaaacatgtcttcactggaagagtccatgaaaacatatgcactttatgtaaattatcttgaa

SEQ ID NO: 130676 - DNA, 2235 bp, Homo sapiens
agccgaaatcagccagtgtatagaccgccaactctgaggtatccttatttcatagacatggaaactgatgttaaggaacttacccaaggctacgctgataaaatgtgactgacccaggctttgaatccaggctgataccaaaagcttggcgttttcactgcactttgcagttctcaccatgagtggttactgtagtcaatcaagtgcctgccctatttgtgtgtgcacatggacacactcacctaggggtcttttttcctcttcagagccatcaccatttcttttagagtcaccgacctctggccatccagctacacatggacagggttagaaaaactcaaggcttgagagtcgctctccatttgctcctttaaggattcaaaaagtcttttaatgaagtgtatccacttgctagaaaattgaacttggtacaagttgtggaacatgtttagttgcataaaagttcagtaaaagctaaacctcggggaacgtgtgtgctcttcaaacattaactcttgccgtccctctttcttctcaggtgctgctacccccgtatgatgatgccactgtgaatggtgctgccaaggagccaccgccaccttacgtgtctgcctaagccttcaagtgggcggagctgagggcagcagcttgactttgcagacatctgagcaatagttctgttatttcacttttgccatgagcctctctgagcttgtttgttgctgaaatgctactttttaaaatttagatgttagattgaaaactgtagttttcaacatatgctttgctggaacactgtgatagattaactgtagaattcttcctgtacgattggggatataatgggcttcactaaccttccctaggcattgaaacttcccccaaatctgatggacctagaagtctgcttttgtacctgctgggccccaaagttgggcatttttctctctgttccctctcttttgaaaatgtaaaataaaaccaaaaatagacaactttttcttcagccattccagcatagagaacaaaaccttatggaaacaggaatgtcaattgtgtaatcattgttctaattaggtaaatagaagtccttatgtatgtgttacaagaatttcccccacaacatcctttatgactgaagttcaatgacagtttgtgtttggtggtaaaggattttctccatggcctgaattaagaccattagaaagcaccaggccgtgggagcagtgaccatctgctgactgttcttgtggatcttgtgtccagggacatggggtgacatgcctcgtatgtgttagagggtggaatggatgtgtttggcgctgcatgggatctggtgcccctcttctcctggattcacatccccacccagggcccgcttttactaagtgttctgccctagattggttcaaggaggtcatccaactgactttatcaagtggaattgggatatatttgatatacttctgcctaacaacatggaaaagggttttcttttccctgcaagctacatcctactgctttgaacttccaagtatgtctagtcaccttttaaaatgtaaacattttcagaaaaatgaggattgccttccttgtatgcgctttttaccttgactacctgaattgcaagggatttttatatattcatatgttacaaagtcagcaactctcctgttggttcattattgaatgtgctgtaaattaagttgtttgcaattaaaacaaggtttgcccacatccaagatgaccttgtgattttgtgctgattgtgtctgaggacctttccctccacatatggtctggcagatgcacccagttcagcctaaggagtaggcttttttttgggggggggaggtcgggtgggggggatttttaatcttttaattttcaagatggttaaaatattgaaatgtttaagtggataactatattattcataaaatgactgagtgaaaactaatacactatgagatgaaaagtacttgtcagggattttcaagcttttgctcaagtaattactatgaaataacaatttctagaaatgaagaacaatccgtggagaataaattaccattggtgtgggggaaaaaagccaaacagaagtagaaaaaggtgtagccggcatacaaatgttatctacagtgtatttttagattttttatacttgaccaggtctcttatgtcctttttctggaaaactgtttttaactactaaagtgattataaatgaaaaag

SEQ ID NO: 130677 - DNA, 1108 bp, Homo sapiens
atggcatagggcaagatctataaataagcaaaaggcccagtccctgtcctcaggagctcatggtccaagtcaaaatcacataaaaacatttgagtcccctttgaaatgagtattgttttcttgaacaaattttcaacttgctgtagtttttttcctgatcactttcatcctgtctttccaagatgggatatgtttatttagaaattacttcacctgggacagctgcttctctcttttgctcaggcccgtagcactgcaggatgggcaagtgtcgtggacctcatactgctaggagtctctgtagtcaccaacaagatcagaagtggcatgataaacagtacaagaaagcccatttgggcacagccctgaaggccaacccttttggaggtgcttctcatgcaaaaggaattgtgctgggaaaagtaggagttgaagccaaaaagccaaattctgccattaggaagtgtgtcagggtccagtggatcaaggatggcaagaaaatcacagcctttgtattcagtgatggttgcttgaaccttattgtggaaaaccataaagctctggttgctggatttggtcaaaaaggtcatgctgttggtgatatttctggagttcgctttcaggttgtcaaagtagcctgtgtctttcttttggccctatacaaaggcaagaaggaaagaccaagatcataaattttaatggtgaaaacactgtagtaataaatgttcatatgccaaaaagaaaaaaaagaaattatgtcacctgggacaatggtgccatcagtcagcctgtcctcaaaggaaccctctggacatggacccaactgtccatgtagatggggtatcccaaagggagctctgccctgcctacagggttcccctccctgggctggagtccaagctcatccactaccttggaacattcccttaaccctgcatctccagctccaacaaatgggcagctggccggatatgaagatgtttcctctcctggccttctacttgagggagacagggaggagctctaatagtttacataggactcaaacactgtctgtcacctagggaaacagtgcacgtgagatgacattgcaattttacatgtctcc

SEQ ID NO: 130678 - DNA, 1043 bp, Homo sapiens
ctgagatggcgccactgcactccagcccaggtgacagtgcaagactccacctcagaaaaaaaaaaaaaaaaaaaaaaaaggcaggagtgcttttctaattttcatgaaggctcctgtggtttagcatatagccctgggttggggcagtagatgatggatctgcagatcccaggaaggaggacaagggggagcattcccaagacccaggcaggccctctccaagagccacacctgcccgacccttcatgtctgaacttactgcagggagagtgtgacccaataatctttacctgctgagaagaggggccaggcttagaccctgccatggaggaggatattaattaaggcacctttgaagggagggaaattcacacaagactcgcactctgagaactctcttcctttggagatctttggaagtagcagagcctccttggattgggcctttattatgggtcttagtcatggtgtcaatatctatccaagcatcacaatcaatttaaagggaagcctggaagttccatggagaattgtgtgctaaactggattctctcccttcaaaacaaatgggtagtttccacaacacctgcacatgtacaaaaacgccacaaaggttcaaaatgttgttggaggttccaagaaagctgtaattctgagttgaaaacaccaagtcctggcagcccaagtaactgaattttcttcaaaatgtgtccttgggtcccttgagggctcagaaccacagtctcatagcttgtccctgaaagggctagttcaatggttctcaaactcaagtgtgcatctcaactctctagaggacttgttaaaaactaagaccaggccaaatgcacagtggctcatgcctgtaatcccagcactttgggaggccgaggcaggcagatcacctgaggttgggagttcaagaccagcctgaccaacatggagaaaccccatctctactaaaaaaaaaaaaataataataatacaaaattagctgggtgtggtggtgcatgcccataatctcagctattcaggaggctgaggca

SEQ ID NO: 130679 - DNA, 1227 bp, Homo sapiens
gcggaaaatactacagagtgtgcacactggctatcattgatccaggtatgctttttaaatcataaagtcttttttttttttgcctttctaatgtaatgtctggacaagtatttcttactacgcaaatgtctttggttcctaaattcagatagaatatggatctagcaaggcatatcgtgtagttgtattttgtagagaattggtaatgaatgccaatacattataattggctttattataagttaaaatttttactgtcagataatgaatttcatttgatgaagtacctatgaaataatgacatagatttggtaaaaggtgaaattataaggagagaataatctggcaaaacagaagaaagtaattcttgcttcttgagaacagacatgtaaaattagcttgagaaaaaaaaaagtgccaaaaaatctacatcattctgttttccaattgtgaatctttgattcatagaatactgcgaatattctcgctgttctgattttgtaatagtcaggacaggctaaacattcgctatattaagaccatgcatgtgtccccaaacctagttctttccctaggtctggttttataaatgctggtgataaaccaattttattatatgatcattttatgtgattatataatggctgtgattctaggttatctttggtcaaccttaagaaaaatgacagtacagctaatgtgataacttttgcaaaaagtcagtgctaatttgcagaccattgtctacagaagggataaccaaaggtagagaaattttatggtaccagttgctattaaatgaattgtaaaattactgtttttttatttttattttttaggtgactctgacatcattagaagcatgccagaacagactggtgaaaagtaaaccttttcacctacaaaatttcacctgcaaaccttaaacctgcaaaattttcctttaataaaatttgcttgttttaaaaacattgtatctatttcagtatttttctctatttttgtttcaatacaatttcctgaaggttggattagagaggatgaggcagatgtggtggcaagacttttcagtaaagagttacacatcctgggccgggcgtggtggctcacgcctgtaattccagccctttgggaggccgaggcgggcggatcatgaggtcggaagatcgagaccatcctggctaacgcagtgaaaccccatctctactaaaagtacaaaaaaaatta

SEQ ID NO: 130680 - DNA, 2733 bp, Homo sapiens
gcgatcatggctcactgcagcctcgacctaccgagctcaagcgacctctccgcctcagcctccggcgtagctgggagtagctaggactactggagcgcgccaccacgcccggctaatttcttttttatttcttttttatttttttgtagagacaggggtggtctatgttgtccaggctggccttgagctggacgcaacagatcttcccgcctcaacctccgaaagtgctgggattaaaggtatgagcagccgcgtacggcccccgcagccattctagctagcggtaccaatagcaaccggcagctgccctccgcttttgctccgccccttctgcttgcgatctgtttccgcttccggtcccgcagttccggctctgccgtgaagagctttgcattgtgggaagtctttcctttctcgttccccggccatcttagcggctgctgttggtgagtgggctcctaccgaccgaggtttaggcagcgcggggagctttgcgggttgccatttgtaactccggatcctaaaattcctgtcctgttctctgtctcttctaggttgggggccgtcccgctcctaaggcaggaagatggtggccgcaaagaagacggtgagtgaggcgggccaggcccggaagacgattcacgtggagagatgtcttggccagggcgggcagatgtgagcccacgggggtgacagcatgcctgctggcatttggagggccccagaaggaatcccagtggccctctcaatgacttggggtcctcgacttcggaagtttaaggggctcggcttcaaaaagctgggtccggttttgaggcggttgcaggcgaggcccttaggtccgtatttaatgtttgctttgtagaaaaagtcgctggagtcgatcaactctaggctccaactcgttatgaaaagtgggaagtacgtcctggggtacaagcagactctgaagatgatcagacaaggcaaagcgaaattggtcattctcgctaacaactgcccagctttgaggtaatcgaagagactgaacgggcttcgcctaccgcgaattcatcgtgaacgaatatacaggagtgtaaacttgtaatctgagtaccatgaactcgaacacttgcaggataattacggtagcgattgtggtgtttggcccttcattcccgtctccccgacccacccccaaatcgtgtgctccccttctgtgagcttatttttggaggagaaatgtgtgtgtgtggcaggagtgaaaacagaacatcgaggtttaatggaaacacagacacattactgttttttccatgtattttgtgtcctgcttttttggttcttttagctttgaggtgctttaatgatgcttcattgtgtgaacttgttttagtgtcaaaaaactaggtaagaaaagttgaggctgggctatggagttgcaggctatcatagaatcacctagtttagcccgctaaatcagttctgagtcaagatttatgcttgactcactgttttgaaattgaacttagggggtgttgtaaataagccaaacaaacttggaccttgcagagtataagctatgtgagcaaattttctgtggtgatgcataagctgcttacagcattttatatagggtgtctgtagttaccgtcaaagcctggagggccctttctgtcttgtcccatgggttcggcttttccctaaccattctttgaaactttctttaaagcctgtcttctatagtagtgcttctgaaacatgactgtgcaaaggagtcacatgggtgatgttaaaatgcaagttctgatttcattggatctgggatggggcccgaggtgccatttattattttattttttttaagacagagttttgctcttgtcaccccggctggagtgcaatggcacaatctaagctcactgcaacctctgcctcccaggttcaagcaattctgcctcaccctcccgagtagatgggattacaggcacctgccaccatgcctggctaatttttgtatttttagtagagatggggtttcgccatgctggccaggctggtctcggactcctgaccttaggtgatccacccacctcggcctcccaaactgctgagattacaggtgtgagctaccgtgcccggcttgaggtgtttttttaactaatacattgtagcactattgctggtatgtggattcacataattgagtggcaagatagtataggactcctttccgattcctaaaaccattagtatctactaatttgacgctgaaattttgtatttttagtagagacaaggtttcaccatgttggccaggctggtctgacgctcctgacttcaagtgatccggcctcccaaagtgctgggattacacgcgtgaggccagaaattttaactctaaaacggtatcacttcccatctggaattctgggcactgaggggatggtgatagaaatggcttatcttttaaaggtttagattctggatcctccacttactattctgtggctcagtttcattagattaaaaaaaaaaaaaaagaatagggctgtgtgccgtggctcacacctgtaatcccagcactttgggaggctgaggcgggcggatcccttgaggtcaggagttcgagaccagcctggccaacatggtgaaaccccatctaccaaaaatataaaaaattagctgggtgtggtggtgcacgcctgtaatcccagctacttgagaggctgaggcaggagaatcacttgaact

SEQ ID NO: 130681 - DNA, 1404 bp, Homo sapiens
ttttcactggttctcacatggtggaaggagcgagggtctctgtgagcactcctttataaggatactaatctcattcatgaaggctctaccctcatgacctaatcgcctcctaaaggccccacctcctaataccatcacctcgggggttaggatttcaacactggaattttgggggacataagcattcagaccatagcagggagcttagatttgaaattcatgttgcaccgtttataggagaaaatttcacctgtatctgttatatccaaggtcctttatatgtcatcctgacatgattaccttgtgtgctacctactagctttgtgacctcgagcaagttaattcaccttcctacgtaagattcctctttaaaaataagtagtaatagccaccttacagggtgactataggattaaaaacatggtcaatgttgccacccaacaaatattagttctccactataatgtttatctctgataaaggtgacatgtttctttttgaaaatatactagagcctcatcctggaacttcacgacagcggcaaaccagagtcaacccccattctctgcctgaccctgaagtgaatgagcagtcttcctccaaagggatgtttagaaaaaagggaggatggaaagcaggtcccgagggcacgtctcaggagatccccaagtatataactggtgggtactcataaagaggtgcagtttgcttgtattttgaactctcgtgtctagtgcagcaacaaactgccctccttgtggtcctggctctgcctcccctacctctcctctcctcctcctactttagacccttctcgcctctagcctggactttggccagagcttccttgggcttgatggctctcccttcttcagtttctctccctgtctcttactcttcttcttacaagtctttgtgaactgttcctctttgtcttagcccccgtgcccctcttgttttaaatatgccatccacactcagcacagcattctccaaggatggaaaattgagtacacacaaatggcaaccaaacctttatttaaagggcctgtctccaggccctttccatcctcttctgttcttcaccctatgatccccatccacactaccacaattaaaccctatattccttgtaccttgtacctataccttagatatgctttctggtctctctttacgccttcttggtggaggaattcagttaagtttccccagcagcctgtttattctccagtgttaattcaagattggtgtttaatgactttgtcatctccttcaacagcttctacttttgctcaagcacgagctgctgaaatcagtgctatgttaaaagctgtgacccagaagtcttcgaattcactggtttttcagactctgccacggcacatgcgacgaagagccatg

SEQ ID NO: 130682 - DNA, 1055 bp, Homo sapiens
ctcattcacattgaggaagctgggttctggagagatgaagtgacttgcctgggctcacacagcttgttggtggcctacatagcacttgggtggctgattcccctggcttgtgctttttccactgtcctctgccaatgagttacttttcattttgggcataatttttgctgaagttatcagatattttctctaaaatttgatcagccctaagtaataaaactaatagctaataataacaaatattagtgagtgcttaatatatgccctaccctgttttaaatggtttgcatgtgtttactcatttaatcctcagaatagtacgaagtaaggagttaccattatttccattttacagatggggaaactgaggtacagagaggttaggtagtttacccatgattgtatggccaatgagtgttgaggttcagatttgagcccagttgcctgactccagggttccacactctgaaccattattctctgctgtcacttgtttgggtgaggttcctctggccactgacagctgagagctggtcactggatgggaagatttctttgtgtgagtgatcatattgattgacatgcgttgtcagaatcatagctataatttcccttttagttctagttactgagtgcactgaaattgcttaaagatgctatagcagaagggttggtttggcagatcactgagcctgattagaatgctggcttctccacttaatgactgtgtctttgttcaagtaacaatctctgtgtcacagtgtccttgtctgtcagataagataaccatactaggtacatctggttgtcaggaagactaaatgactgttcatgtaaggagttaactcattgctggcactcagtaacccttcaatgactattaactattataggccaggcatggcagctcatgcttagaatcacagcattttgggaggctgaggcaggaggattgcttgagccctggggttcaagaccagtctgggcaacatagtgagactctgtctctgcaaaaaaaaaaaaaaaaaaaaaaaaatctgggtgtggtggctcgt

SEQ ID NO: 130683 - DNA, 1033 bp, Homo sapiens
tggttcgggttggtttaaaaatatttgttaaggtgacaggaatggacaggtttagatattttttccactaaaccatcgggcaggagaaggtttagattttgacttatgagaacatagctttagcaatttgttttgtgtcttaggcctctaaaggttttgtgatacggcttttggcttcttagcagttttgcctgtgtaaattcctaagtacttaattgtgtctcccgctttgtgcaggatttatcctattactgttgtttggagttgaaaggcaaagaggaagaaatactaaaggcgctttctggaatgtgtaacatagacacaggtaaacttgttttaaagctgagttctattttagtctatgtatatttattcatttcataaagaagtgtctactgtaagcattttggaattcaaacatatagaaaagtgtgtgagacactaatcattcccaatgaaaatgttaacttaaaaacagttgggttggcttttaaataatttctaacattgtcaagtgtaaagtgatagagtcatttttctggtggagtgaacttgacagaaagaaacttgaagctctcattactcatttaacacatatttgttgagaacttattgtgtgccaggctttgatctgagcaatcctcacaaccaaaacttcacctctcatggaggcagacagtaaatgacagtgtggttatcaggaaataggactgcagtctcaacacccggaattatggaattttgcttttgttgatgtcagggctgacgtttgcagcagttcactgcttgtctggaaagcgccaagggagccttgtgctttatcgggtgaataaatatcccagagaaatgcttgggcctgttacgtttatctggaagtcccagaggaccccgggtgacccttctgagagcaggcagctgtggatctggctgcatccaacccttaaacaggtataatccttcaggttatctcccgtcattctgaaactgcatttttaattactgctggaagtcaatactgtagaaatgtaaatag

SEQ ID NO: 130684 - DNA, 1095 bp, Homo sapiens
ctccatcttcactgcttctgctgtactctcaaccagtgttgtctcttgcctgaacaattgggggatcaggaaaggattctagagggaaccttaagtttcctccatccttcctccttttcagcccattctccacacaagaggcagagtgattttttgataatttattccctcttgttgcttcctgatgaaaagtttttgaatagcttctcattgtaattaagataaaatccaaagtgctcaatgtgacccgtgtaatcttgtgccttcttgcctctgaggcctcatttctcctcacccttctacacttcagccaccctgaccttctttcaggttctggaatgtcagttcttgtctcccttagagcctttgcacctgttttttccttccaactactgagcattctgcctccaccactctttactttgctgaaccttcctcattcttcagatttcagtctctagcatttccctctagcatcctttcctgatcccccaagttaaactagatccctcctgttgttttcagagagagcatcttgcaaattccctcaatttatttatatagatttgtgtatttatgtaatgtccatgtctctcatgagactgtgagcttcataagggtgaggatagagttggtcctgtttttcactctctccccagtgcttagcacaatgtctggcacagagagggtgccccgtagtagctaataagttgtggagcaaagatttgaaccaatgaagtttggttccagagcctgtactgtaaaccactaagctgtgctacctgagtttctgtgagtaaatggtacctttgttatgattgctttttttttttttttttttgtttgagacagagcctcactctgtcacccaggctggagtgcagtggcacaatctcagctcactgcaacctccacctctcaggttcaagcaattctcatacctcagcctcccgagtagctggaattacaggtgccagccaacacacccggctaatattttttgtatttttagtagcggtttcactatgttggccaggctggtctcgaactcctggcctcaagtgacccgcctgcctcggcctaccaaaatgctgg

SEQ ID NO: 130685 - DNA, 1015 bp, Homo sapiens
aaacaaatggtatgttcatattctaagtaactggcattctgatagtggagataaatgcatacaccaggtactgacctaaactctatgcttacctgcacacaactgcatttttgctcatagctgctgtagttatcactgatagaagcatatgtgttcatttcataaaagaacctttttttatgttggcctcatgttttttgcaagaaacctcattctttatgaatgttaacttattctctaaaagtatcaatgggaagagagggaatacatgtttttaagtaattagtccaagaaaaacgtttcattaggaaatctgaaagatttaaaaatacaagcaaatacagatgtattatgaatgactttctgtaaacttctttttgttgttgttaaaggaataacatcaccagcagaaattccggcaggtactattctgggactgacagttggggatcctcgaataaatttgccccaaaagaagtccaaagctttgcccaatccagaaaaatgccaaggtaaagttccaaaaacaccccaggttttccttactatttcgagcagtccagtcttattagaagaagagttctttctctgacacctctccagtaacttcatctgtaaaaaattagggcagtctccttacctgcccactttacaagctgattatgatctaaggaaatggtaggtgtggaagtgtcttttagcagtaaaacacgtagcctgatacttatgttcattttattttccgagttctctttttttagtatctagtaaaacctgtctctctgcaaactacgttctctgaaaatgtctggcgtttcagaattttaattgtgaggaagggatctgcacccgaagctggtcttgtgctcagtggaagcctctgtctgaccatacagatgatccaggttcgaatcctggcaaggccatcccaggtgctgaagtataagatgtcttggtttagactaagtagtactagaggcctgagaaagttgtttggctggggtggcacaggagg

SEQ ID NO: 130686 - DNA, 1022 bp, Homo sapiens
agattggcagcaattttgataatgtctcattgtatttactgtcatttaaacatgattaattggaagaataattaaaattaccatgtgagtctttggagataaagtaaaggtttgtgttgtaacgacttcagaatttttttttttttgagatggaatctcgcttttgtcacccaggctggagtgcaatggatggcgtcatcactgcaacctccacctcctgggttcaagtgatttgcctgcctcagcctcctgagtagctgaaattacaggcatccaccacaacgcctggctaatttttttttttttttttttgtatttttggtagagatggggtttcaccatgttggccaggctgatctcaaactcctgacctcaggtgatccacccacttcagcctcccaaagtgctgggattacaggcatgaaccaccacgcctggcccagaattttttttttaatgtagttagatagcttattgatggggcaataaattactctgtcagaacttcacataaaaggtggattggatgagagaggagtttgaagatatataggtaagttagttaattatgaagcctaagactttactcaatgagtcattgcctctttcttttcttttcttttttactacgaatgtggtctggtgcaacgtaaaagttgcagcatttactacaccattaaatgttgactattataattgccttgaagctataaactctacttagtttctcttgctacctcaaatccttttttggaatgaggtgattattaaatcctctctaaggcttttgttttaatatgaatcagctcaaggaaaattaaagtctatcttgaaaaacgtgatttaatttgacgcctgaagtcaagcaatccttctgcctcggcctcccaaagtgctgggattacaggtgtgagccaccattcccagctagagagcttttaaaagggaaggtacatgaagaaaatgaagtgataatgcatattcttagatgctttgaaaaagtttgcttgatagctggttct

SEQ ID NO: 130687 - DNA, 1551 bp, Homo sapiens
gatgagaaaaatgaggccagcctcctgatggaagagcaggcatttgaactgactctcagatgggagccagaagtcaccagacttcttgggggcagggtcaaggtttcagtgaagataagattgcaggaagtaagaaaagcatgtacaggagcccaggcaaaaaccaggaagactctacaagtggatcaggagctaggaatcaggaatggggtgagagaggaagctgaagacacaaatggggctacagcatgaaagaccttgaagccttttcaggatttggactggagatgtgggacacccttgaaagttttaaggttggctgtgacatgatgagatttcactctgacagcagtgtggggttggagatggggggtgaggaagctggagagagactgtgggttggatggccttaaaaagacccttgaaatattctaggtatgacataatgggggcctgaattgtggcagtgtggctagagtggagagggtgatgtttaacgcatattcctggaaggtgaaattgacaaggcttggtggttggttggaagataggaggtaagaaaggaggaggtgtgtcgattaggtcctgatattctagcttggatttaggatttcagctaaaagagagccagaaccatgtcttacttgctcactgatgtatttccaggttctagaaaagtgtgtggcacatagaagtgctcagtaaatatttgaatggctgaatgaatggagtgtgtgaattgtggtgtcattcagctaggtgaggaatataggaagagagcaaatacagtgggaagggtgatgagttcaatcttgagcttgaggggctgtgggacttcccaagagcagaggtccaggagacaggttttgatcccgggaggaaaagtcggggctaaagagatatagtttggaattactaacacatagatggtagtggaaactccgaaagtgaaaaagaagaatcaggattggacctggcttgaagagcgttcatgaggtagcagttagactatggcctggaggcagtctcttgcatagtttttctaaacagtgatagccctcttacctacctgttaatctctttttacagctccaagaaaagtctgaaaggatgttatccaccccctacattccccttaacaataattttaaacatcttctatttaattcttgaagatctgatgagcaattttctcaagaggcagtgcatttctctagttgcccatccttgagaaggtgtcacttaattgtttatatcttttttacttcatgacaccaaatcttaatcaaaatcaatgtaaggacagaatatcaacatacaagattaatcttgatataagagatcagcagaatgaatactgataatgaatgatataagataatttcgaatttctacctaagcacttgtatagaggaaaatatctgtaggaggaataccttatacttaaaatggctcacatttatttatttagaacgtttttctcttgcttttttaaaagagcatttaattttctaaagctgcttatagggagacccaggaggatctcccaga

SEQ ID NO: 130688 - DNA, 2437 bp, Homo sapiens
gtgaagatcgactaggctggggaagtggctgggatgtcctactcccaaagggctggggcatggctttctggattccatttgtaagttactttttgattctaacagttgcaatatttaaaatacattcctaataaatgctaagtactcaaaatgttccagactttatgtacaacttaggaggaattgagtggtgtatttctgcccttagagctatagtcctggatacaagatacttcatacatatagtccctggagccaggttctcattataagacctgtgctgacatatcgtcaattgttgaggtttttaaagtggcctgatattcgaatagtagtggcaacaaaaatgttgaggtatttgatttgaagaaatttgttataagtttaaaagcaaaggacttaacttttacagatggatagaatacttttttttttgtttttgaaatgttaactataaccatatactcctatttatcaactgcagctaaaaattttattagaatcgaatgtgtcttttttttcctggttatttcaaatattactttgaaggctgggtgtggtggctcactcctgtaatcccagcactttgggagaccgaggtgggcagatcacttgaggtcagaagtttgaggccagcctggccaacatggtgaaaccccatctctactaaaaatacaaaaactagctgggtgtggtggtgcatacctgtaatcccaactccttgggaggctgaggcataagaatcccttgaacctgggaggcggagtttcagtgagctgagatcataccactgcactctagcctgggcgacagagcgagactctgtctcaaaataaataaataaataaaataaataagtaaataaataaataaataaatattacttcgattctagagagtgtaaaaggcatgtgagacttttagattcatgccggtaattaatttttagcatgcctagtgcaagggacatccagttaatcattcaggagtaggaatatttaaaaataatcctacttaattttttactatgagatgctttcaagcatacaaaaaagaatagatgctgatatagtgaatgcctgtgtgccatttacccgccatccggcttaagaaatataacattacagatgcattgatgcaccctgtgtacctctctccagtttcatttccctccctccttttaaaataatcactccgctgatttcggtatttgctactaccatgcatatttttatagctttattaaagtatgtttgtatcccacaataaaataactatttagacttgacatgtttttaaagtatataccttactgtatatatgattttgcaacttgctgtattcacttggcattgagattcttttccatattggttaatgaagcatgacgaagctcgattttattcatttttactattgcatggtaatccattgtgtgtatttctatccattctccttttgaggggcgtttaggttgtttccattttcccccatataaacattaagcaattcactttaagttggtagactgacagtatctttttgacatttcttttagatttatcgaggtgtgagagtcggagggttgaaagagtctgcagtgcattctcagtataagaggtcgcctaatgtcccaggcgattttccagactgccctgccgggatgctgtttgcggaagagcaagctaagaatcttcttgaaaagtacaaaaggtaagaaactggcttctctaatttgataatgtattaaggaaaagagaagtgcctgcttatattggtatcccaaacattaggatggctttggtaatttcatagacttttcagtgagttcagcattactgagaaataattaagaagatattacttaagtgaggagattgtcttatatctatttggcttttgtaggcccattttggttataaacccttctgtttgttatttatttctatcaataatgatgtacacttaaacttggacatgagtctcagacacttgttaatagatttctactaccaacccgtgtctccctccaaaatggaaattgtgtttttaaaacttattatagaagtaatatatagttatcaaaatttaattaaactatgaaaatatataaaaagataaattggtatagtcctgccacccagagagataagtactgtttgtttgtttgttttttgagatggtggtcttgctctgttgcccaggctgtagttcagtggcgtgatcttggctcactgaaacctctgcctcctgggctcaagcgattctttcacctcacccgtgtagctgagagtaaaggcatgtgccattgtgcctggctaacttctgtattttctgtagagacggggtttcaccatgttgcccaggctggtctcgataccaattttccatagatccaccggccttggcctcccaaagtgccaggattataggtgtg

SEQ ID NO: 130689 - DNA, 1268 bp, Homo sapiens
tgtgtgtgtgtgttttaaaatagagatgcattataatggttataattattttagttttccaatcctaaattgttcaacattggttctcctgtatgtttttctttagacgccctcctgcaaaacggcccaactacgttaagcttggcactctggcacctttctgctgtccctgggagcagttaactcaagactgggagtcaagagtccaggcttacgaagaaccttctgtagcttcatctccaaatggtaaggagagtgacctaagaagatctgaggtgccttgtgctcccatgcctaaaaaaactcatcagccatctgatgaagtgggcacatccatagagcaccccagggaggcagaggaggtaatggatgcagggtgtcaagaatcggcagggcctgagaggatcacagaccaggaggccagtgaaaaccatgttgctgccacagggagtcacctctgcgttctcaggtaagtgtcggtgacttctgggtacattttggattatttattttaatattgaagaggctacaggatgtaagcgttatcactgtttgtttatgcaaaatccaagtgaatttataggctttctggaagggaaagccagtcttttatatttcatagagggctcagggaaacagcttaataatatttgatgtaaggcatgatgctaattgatgaaatgatttacaatattgtcatcaatagatccaagccaaggcagttttttttctgacatattttatgcagtttgagcaaggattctttgctttaaattaccaaattagatttcttctagttccttttgaattatatggatttgtgttagagcagcaacccattagatgtaatatagtcctagccagagaggctaccggatacactatgttctcctctcagtattggtgtgggccaggttctgctcatcagtgaccctgcattctgtgctttgctctgattttttttttttttttttttgagatggagtcttgctctgtcacccaggcgggagtgcagaggtgtgatcttggctcactgcaacctcggcctcctgggttcaagcgattctcctgcctcagcctcccaagtagctgggactacaggtacatgccaccacgcctggctaattttcaccatgttggccaggctggtctcgaactcctgacctcaggtgacccgcccacctcagcctcccaaagtgctaggattacaggtgtgagccactgcgcccggcctgtgctttgatttttaaaaagtgcttatccctcta

SEQ ID NO: 130690 - DNA, 1116 bp, Homo sapiens
aaagcagtcataatttatggtgtattttaccgaattggtccagcatattggtcctacaaggctcagccaagaaatgtatctggtgccttaaactacagatttctggtgactcttaaaactggtttacaaagattgagaaaacaattagattgaagagttttgcttcaagtagacctgcattcatagctagagtgcatgagattttcagcactgtagaatttcacacaggcacaagcataacaccagtactttagcagccgccaacagttgcatctattaaacgttttgagaaatgacattgacttatgcacatttaagcaatcaacaatgttttagaagtccaggtaacatataaaatatattcagacctagttttactttccatattgttgctccaaagtaaggtaaataggagttttagttgtactggcctgtaagattttttaaattacacagtgcatgacaacaactaaagccaactcagtccttctcttggcattgtgagttgaggacctttagccaactgttagctcatctgactatctgtctagaccaagggtcggcaaagttttcagtaaagacccacagagtacatattttggagtttgtgttgtctgtaccaacagacagacatggtgtctgtcccaactacccaactctgccattgtagcactaaagcagccatagacaagatgtaaacagaagagcatggctgtgttccagtaaaactttatttacaggccaggcatggtggctcatgcctgtaatcccagcactctgggaggctgaggctgacagatcatctgaggttaggagtttgggaccagcctggtcaacatagtgaaaccccatctctactaaaagtacaaaaattagccaggcatgacggtgggtgcctggagtcccagctacctgggaggctgaggcaggagaatcacttgaacccgggaggtggaggttgcagtgagccgagatcatgccattgcactccagcctgggcgacagagtaagactgtctcaaaaacaaacaaacaaacaaacaaacaaaaacaagtggccagtctgtgagctatagttcccaacacctggtctagactcttctgcccttgctctgca

SEQ ID NO: 130691 - DNA, 1227 bp, Homo sapiens
ttcttcacttgataaagctacctaaataaaaattaggattttttaattgcttttctgctcacagaattttgccaagttgagaatgaactctgtctcctggcattcaagacctgcaacaggcctcaagtgacgtttatgaccttatctccattattgttttatttgagccctttccgccaacaaactgaactgcttccaaactctctatatcattattttatttatgggttgtaaagttcctgacggcagagacttggtgtttatccatcttgtttccccacaatgcatgccagtatattagatataatttggtattaaagtttcattgaacgccatgagctcaaacaaaaaaaaattgtcattaatcatacaggctgtctttctccttggcatccacataatcaccataacaacaataataataattttgtgagcatctactaacccatgcatttttgatacaccatctcaaacctccacaagaagatgcatattccctttggtgaaaaagaaagggaggactgaaaagaaagaattagagagattaaatgaggtcacacagctagttaatgccagtagtggccttacactcccatctgtctctaaaatctttgcatttccgctagaccacatagcctaataaacaggaggtctagctttagaatgttagggttgctgagcctgcttgctgatggctcttcagttacaacttaggactgttgttggatgactttacctctttcacatttcagtggaatctatattttctgaaatggcatccttcctacatgtagaaaaaggatgcagggtgcatgcattcaagcttccaagatgagtcgtacaagatttttttcttttattattttaggatatacgtggcgttcttgtgccttgaaatctatgttttgttgtaaatgataatgtattatattctctcttatcagtctttctttgataatgattgctttagagaaacattaatcagcatggcggaaggagcctggcatcagaaattaaatgatctgggttcaaatcccagttgttcttttgcacttttgttgtcttgggcagaaataaccatttaatcattctgtgtttcaatatcttcatctgtaatacagcaattgggaagatcaaatgttctaggacatgtacaatatttagcaaagttcttgacatatgacacgtaaatactaaattaaaaaacaaacttttaactctttttag

SEQ ID NO: 130692 - DNA, 1027 bp, Homo sapiens
ttaattgttgaactatacttcaaagatgatgtaaagaatttgctgaaatatttatgttaaaactcattagacattaaagtctaatttcattgtattgattgtggataatgtggataatttcattgtattggtatctttctttctgtatctagttgaaaaatctaagtttagaagaactacagatgcggttaaaagcactggaccccatgatggaacgggagatagaagaacttcgtcagagatacactgcgaaaagacagcccattctggatgcgatggatgcaaagaaaagaaggcagcaaaacttttgagtctaatttcctctctgtttttaactattctggagaccaagaaaccactaggaattgaaggaatatttggatatttttaatcctaagattttgccctacaattaggcagaggtcaaaaagtgacaatggtacatgcccaggtaaattcccaaaaggcagaattgacagttgtatctgctgtgcattcactctaagatgaggagaacaaaagaagtgtattctcttgttctgtcagctgcataccagtaataaaactgttatgaaatggattttcaaggtctctaaaccttgaaaatccaaagctattgttgcattgtacagcactgaagggctttatgttacaatattctttattcctatctagtatactaggctatttattgtatccccttaggtaaacttatttatttatgctattttgctttgtttcattttttaaggacaagatcaggatagctttggtgaaggtagggtcatattaatatgatgataatgtgcaaccaatttatactttctgcagggagctatggggtacattccttgatttccaggatagtttttcaaataggaaagcaataatggcagtagttctcaaatgggctaggccttttttatattgaagcaataattccatttttaccctttgaaattttgtttttttgatttttgatgtttggtacaaatagaactatatatatttaggtaaaatagatcta

SEQ ID NO: 130693 - DNA, 1030 bp, Homo sapiens
gtctttcttgggaaatgtggttgtgtggtatacattggcctttcaatgtggccattaccgatgtgtacagttcaaagtttggagtttccctgtttgtcttattctgtatctccacagtgatttgaacagcactgagcatgtaacagatgcaagatcactacttggattaaaaatcaatgaagaaagtgtataatactacatatgatatataaatgtatgttttatggcataatattaaaagctaggttctttcatgacatatgactacaaaataacagggctgattattaatatacataccagaacttcttatgcaccgaagtgagtggcattcaccttcaaagtcatcatcatggaagcctgcatactcttctccataacactgtcatttctcaaaatatttttggaactccttttttgaatttccttcagagagtctatgactcattcttttcagtatcctcagagtctttttcagctaagagtgaatttggtttttggaagcagaagtcacgatagggccagggatggcgagtaaaaggatctgctgagaaatgctactttggatgactataagtaatgagtatttttcctagcttgactcataaaataaccaaaggcaattatcttcttaaaacaaaaagtaagttgcaagttttatcattttaaaaccaagcctgagctgggtgcagtggcacatcccagctactgaggaggtcaaggcaggaggatctcttgagcccagaagtttgagaccttgtgtcaaaaaaaataagaagaagaagaagaagaaaagaaaaccaaatctggattactcttacataactgtcctactccagaattgatcatggcttcctgcttttggggccccaccaggcctattcagccttacttcccgccccctaccacagtcatcttctttattaagcatttagtaaaatggaggatagaatggttaatttaacctttattcagtcttgtcacattcttgagtgatctctgcaagtgttcatgattattgtagcactca

SEQ ID NO: 130694 - DNA, 1865 bp, Homo sapiens
tgacatagatagatcaacaggagaaaaacatagaaatttatttcttatgaattttacatggcaaggagcctttgtaaggaaatgaagacccacagatgcagttagaattgaaaacttatatactgaatttactactcttttggcgaaagagtagtaaattgtgaaactgtgacaaggcagaggagcttgggcagagtaggtaattgggcagagaagtaacgaggaagataagggttagcttaacaaggtttgtttgtacagattttcctcggtctcagcttcccgtccttgatgataagaatgatgctttccttctggtagagggaggctgtctttcacacgggaatttcatttcctgcttttatgaagaagaaaggtcagagagttcttgcagttgctgtttttcaagtaccttttactcaaaatagtcagtatgccagagtaatgtattttggggtgacatattctaaattcctttgttgtaaaagtattaagccttgcatggttgtagtggaaatcatcaagagtgatttaatttatagatgttagagaatttggaaacattttgagttgactgtgtaaaaataattttggctatggctgtttttgaaatgaaattaattatgaataattaccatttacccagaatctattattcatatcattaacaaagccacattagttttgtggtaagttttgttttatgcaacactaaaatctgttcatgcatttgcctttttcattttataacatgattgtcaactctgaactgaaaaaagggtggggaagcaacattggttccacctggaatcagtttttttcctttttctgttggaatgaaaatcctgcttttcagggggccgcagagccagaacatttacccatagccgtctaagactgctggtaaatataaagtataactttattacagtgaccccgtgtcagtgtcctttgtaattctaattagtcctgataattaccttggacttttcatcacctaaccagtaaaaacccaagtctgcccaatattagagtttgtggggcaataaaagtctcttcactggactgagttgctcccaagatttcatatctgtaagcaaatcacagcctgattctcaccttccttgcatgcctctgattttgatgaattatctggataaaacagaggatattatatgttgaatacacaggtaacattaaacttttctcccccaatgttttgaatacaaacttccagtctacacttaggtacatgttggagtaaaagtcaaatcttggtgttttctctgcccagtatccctacctttgccttgaagtgtatctaaggcctagatggaatttatagtcctaaatagtttgctttaaagtgaactagaacatcgtgatactctgcttaccgtatttgattatgacaaactgtcaaataacagttcagtcaatgaatggtgctgcttgtgggtgagctgagaaggtcataggcagaaaaagcaagaaattctagaggaggaactagcataatttgtttcgcgtctggcaaaagaatggaaaggttatcattgttaaatccgccatttataattctcaaagttttagctcataggggcatggtgacagtgttttgtttcacttctttaaacttgatgctgacttttatcatagcgtagatatcagatgatgctttaaaaaacctccttaagagagttgtctatttttatttttaaatatttcaaatggatggtgtttcaggtcagacctcatttttgtaatagtacatggagtctgttctttaacaaattgtattcaaccttattgtggattaatattctggtaatatggttttactttctaaaaaactagtcttcaga

SEQ ID NO: 130695 - DNA, 1057 bp, Homo sapiens
taaggtctttttaaaattttttcacatggtccaactgccagacagattgtacatcaatttcctgcagcatttggcaggactatgtatttactgccttaaaaacaatttgaatttattgattttgaaatttgtgattgctttctaaagttttccctcctcacccccatctaaatttactttggggaaaaaggcaaaacagagcacattggcccatttttatgccaagactttcagggaaacattttatatgattaatattgtgtggctaatctggtgtaaaaaatcaattttctccattttaacttatgagagcatgaccatcctgtatgaactatttaaagatcctgtgacatcactaatccaaaattaagtgtttgttactgcctttatttatgtgtgttatattaatcatgtaagttaatattgggccccatttctttataagaattgaattacatttcttcagcagttccatatcttttctatcacggcagcatcctagccttgacttgagcaagctgaaattagtggactctggacttggccccagctcaatgaaatacataggtcatggtacctggtcgccattttaataggtctggattcagttagagagcttctcccttatctgtctattcctttaaacccatttgtcctaaaagattgttctctctcactaataatcagaaaagaaacaacattataaaatccgtatgctttcattccatcaaattcaaactgttttataaaatattagactatttgttactaggtgagtatattattctgaaagatttaatgtcaacactttgaggaatcgagaaatacctatttgtaatgcttgtacaatactctgttatccttagaaatacggcacctcacaaataacataacttctacccagggaataattgactcaccatggaggtctggctccctgcctcattaaatcttctagaattgctgggaggtagctagcaattattcttccctctgtttgacatatgtggagagttaggcaccaagcagtcagaggtcatgcgtagagtctctaagg

SEQ ID NO: 130696 - DNA, 1161 bp, Homo sapiens
ccaccttagcctcccaaagtgctgggattacaggtgtgagccactgtgcccagccaatgtctattttaattccctaatctaagccagttaagaagttaagatgcccatgcaaacaattataatgcaataagatcattgtttaatggaagagtcttcaaaactacagttaggaatatataaggaacaccaaagttcacctgagagaaaagggatgctgttagagaagttagcatttaaacagatacctaagaatgagtaagaatgtaccagatagacaagtggaaaaaatggtgctgcagtatttacagaaggactagccataagaaagcatgttcagtgttgctagagcatgaaattgagttggaaagtggtagaaatgaggctggagagtaggcagcagcgtttataccttacaaggaggttgggagttgggcttatggataactgaaagccattgaaaaattacagcaagctgacctcttgaaacagaattgcaaaaaattgagattggaagtagagaaatcattaaggggattgttgcaatatgacatagtccaaatgagaaatgaacaaaagcaatgaaattgatattaggggacagttttgagagaatctctagtccttagtgattagatctgggaagtaagagaaaaggaagatctcagataagtcccagattacctgaataactaggtgaaggagagaagaggggttggtggatccattcaatttaaggaatagtgactttttaaggtggaatatgatgaattcattttggttatataagtaccatcagacattcagaaagagatgcttcttagacataaccagaattggagttccacagagatctgggctagagatttctggattgtgagtcatcttttaattggtatagttcaagtcatcagtatagagggagaataatattagactgagatgggtccctgtggagcaacaacagagaaaggaatgtgacatcttagatactgagggaggagaacatttcaagaaagaggaaatgaatgtgtaaaaagcttcagcaagatcgaatcataggagagctaaaacccgaagattggataaggtgttaaggagatcaatgttgcttttaagtgaagcagcctccatgagatggtgacgcctaaagccagactgctt

SEQ ID NO: 130697 - DNA, 1074 bp, Homo sapiens
tcatttcaaggccaaaatgactatggatatttaaaaattattgtgtagtatgaacttcagctttaagatttttaagtctatcaaaacttaagcatatttgcattaatagtgagacaaaagtatatacagatgtttgattatgtagtaaatctgttgctataaaagcatatgatcacatttggaaaattgctattgcatgtcttggcagtttgttaagaactaaaaactttaaaaactaactggtgttttgatagattaagttcaaggccaccttttgtttaaatgatgttttgttttatgtaattagaccatgctaggtgaattaagtatgtaattaaaaacagaaggtttggctaattcagagtaaatgagtacaaaatacaaggtcattatccatctctagtgagactccagatgaacagtgcacatggaactatttataaaacatttttcatggtcagagctcctctaggttgctgtccatggcctttgaattaagtattcacagactttcaggaaaaaaaaaagtacctgtaatatagaaatatgatcccacttaaggtgctcatctgagtggaaaaccaaaaaagattagaatctaatcttctatcccagatagaaaaggtaaaatgtattcctcctgtttgaaacgtgaacatttactatgttgcttggcacattgcgttgatggttagaactgtgaaacttttgagagtcctgactctcatttgttttcatttcatgcagcctggagatgtacgggcaaaatatccctaatttaatctgtttcctccgtgcttagtcacagtgggtgacatgggatggattttttcttctggaaagcctggaaagtattttatttgaaatatattttcttttatagtatgagaatgtgcagcttttagaaagctggtgtttaatttagtggttggattcatgaagaaagtttgaatcagtgactggaagcacaaagctgaaccttctcttagcagtcccttcacagttgggctcctggtgtctctccagttttttcctgctgttctctcttccacagtagctgtgcttcagtttgcc

SEQ ID NO: 130698 - DNA, 1083 bp, Homo sapiens
tactttgtactatttaacaatgatactatcactaagcctttagtgaagaggttagcctgagccagaagtaaagccatcagtcaagagaaagaggagatgcataaatcatagcactgaatccaaactctgggtagtagcaaaactgaagcccattcgaataaagtaggaatacagacatggagcaggccgaggtgcggggtgcagactgagttggcttagccagcaacacagaatgcttttttgcacatttcagctgggtcagagaacaggtcctaaaggcaaccatgtctgctgaacagactagtattggatatgatgcagtagtaacctaggtggtaaaggctttaactgccaagctgaggcttctaggtttagccgtaatcctatgagtaatggatagctaataaaaaatttttatgaggggaaaactcttatcaaacttgttttttggtgtcaaagtgaagcatagagaggaactggagaccctggagacctaggataactggattaaagactgttgaaattgttaaaagtggattaaggcaaagatagtggaattagagaagagagtctacattcaagaaatcatctagattagatcatttagaatcatctggatctgatcatcagttttatatagaggattagggtgaagaagaaggtttctgatttagataattagattgatggttttgctattgtttgagataaagaatagaaaaagggaagaacagattttagagactgggtgtgtgtggaggataagctaacaagatatgttatggatgtatagagttttcagtgtctggaggacatataaatctattagatagttgaaagtacagaatggaaccatgaatttgggactatttggcatggaaaaaagtatatgagatcaaccagagagacccttgaagagagatgattaccaaaaatggatttctagggtatcccaaatgtaaggtgagtggggcaggaacagtgagcagaggctggctctatctacccatggatatattgaaccaagcttaaatgtaggccgattacagctgtcacctgagaatttaccatgagtaggatttc

SEQ ID NO: 130699 - DNA, 1027 bp, Homo sapiens
ataataatgttacttttgcatattgttctggaagattttttttcccaaacaaaataactttataatcctttatagttttatttattaataaacgtatggataagtaaatacaattttagataaatataaatatgtacattttttaaatttaagaatttttaagtaataataaaccattttgcttagacaacatgactctaaatgctttgcaattataaatattttaagtacttttttcctcaatattgtgattgagtttttaaataatcagataataaagtttcaaaatctatccccaataaatttagtactaattgctagcaaatattagcagtataattcacaggttagcttgcaaacatcattgcaatgtctacttaatattttttcaatattgtagtaagcagttagaaaaataaaatcaatacatctttagtcctaataagatttcattttaacctatctacttttttaaaattataaattatttagaatgctgacatttaagctttaaattattcatgaatataatgaataatgtagagtatttagcctcaaagagttgtcttgtgtcagttggaataaatcttttttttttttttggcataaatttaagggtacgattgctgttttttaaatttacatggatatattgcatcatggtgaagtctggacttttagtataaccattacccaaataatgtgcattgtaccctttaggtaatttctcatccctgactcccttcttcccctctcacccttccaagtttccatagtctattattccgcactctgtgtccgtgtgtacacattgtttagctcctacttatacgtgagaacatgcagtatttgactttgctgtttctgagttgtttcacttaagataatagctaccagttccatccatgttgcttcaaaagataagattttattcttttttatggctgagtagtatggaatacatcttaatgggctctgagaaacactttgaaatgagctacaaagtaatgaataaattatcatggtt

SEQ ID NO: 130700 - DNA, 1060 bp, Homo sapiens
tgaggttacaggccaccatgcctagccaagtcctcataatttcttacagctgaaaatgtacaataacaatagcaatgcaggcttaaatgcaaagaaaaaaagcccaccaaaaacacctgagtttttaaaatttactttctttgagaaatttgaaataaagctgaaatgatttttaataaaattctgataatgattttactaaacttctgaaatgtttctacaatctaaacattccagacctttgcctaatcatcagcttaatttttatttggtctgggtattttttaattcttattttatttcactttgttctttatgaaattaattatgttggccttgaatctgaccagtgcaaatttattatatggcttcataaaaaaatcatacttcaaagaaaatacttccttaaatgtaagaacttataccttccttatgttctttgtttacctaaggaaatgcaacctcaccacaagtacaaagaccatctttcatggactactttgataagcaagacttcaagaataagagtcacgaaaactgtaatcagaacatgcatgaacccttccctatgtccaaaaacgtttttcctgataactggaaagttcctcaagatggagactttgactttgtaagtacattttaattcttcaatttatgttttctccttctatattttatcatcaaattgagaagcatagttcatatgtatatgaactgtgtgtatgtatatacaattatagaccatatgttaatattcattatacagccatatacatggttagagaaattgtgaaactgtagcttgcttatagaaatgtacttgcagagaaatacttttttatagttaaataaatcatagctcaaatttaaataaatattcaggactccttaaaactaaaatgacaactattttaaaagatgttttcaataatgcaaatatgagatacttctgacattcagtaaactcagttgccaaaattaatgaagcaaaggtatttatgacatagagtttgagaatttgcttcaatttttaaagtatatgagttggtttctatttgag

SEQ ID NO: 130701 - DNA, 1014 bp, Homo sapiens
atagtatttttaataagtattaaaactataatatattcattctcttgttaagaattaagaaatccagctgtcatagaaaagtcttccctcattgcagtattttgcttgcaggatgaagatgagctggattcccacaccatggtgaagactagtgtggagagtgtgggcaccatgcgggccacaagcacgatgagtgaaggggcccagaccatgattgaacataatagcacgatgttggaatccgacttggggaccatggtgataaacagtgaggatgaggaagaagaagatggaactatgaaaagtatgtggcttttttacattaaatattagttttctaattcgaaaggatacttttataggaaccaggctagttctgtgttactttttatagccaactgtggaaaattttgtttcttagatttatgtaacagtaaaaaagagtatggcacaagtcacctttttaaaattgtattttaatatagcagaaaacaacacatcttcaacttagagttatggaacttttttctgttgaaggttgctaacccacggcttaatttgcaaagtattttagagagaaaaagatagtgttcctaacatttactttcccaattaaaaaagtgaacctaaaattatcttccagtaaattcaacagactattattttatgttgtccaaattatcagttaaaccacaaagagcagtgcgagctatgggaagaaataaggtgggaaaataagaagcactagaaagaaggattaagagacagggatgctcatacagaagattcagttgcatgaatatttactgctgcttatcatatgtgaggcacagtgctgggggtgctgcagtggctaaaatgatgatcaaacattctctctgacctctgttgcttacaaagtgatgacaataggaatgctttcacagactagcacttctcttttttaaaaacagttttttaagatactgcagttaacatcgtaggtcattgtgatttcacagttataggcaaaaa

SEQ ID NO: 130702 - DNA, 1033 bp, Homo sapiens
ggcatttatgcatgaggaccatctctttatggctttcccttgctccatttgtcagggttggtttttgtttgtttttttgttgttttaaacagaaatgacttcattttgattctgacaactttcacaaacccttactgtgttttgaatactgaatgaagcactttagtggattcagaggtactctaagacattcttgtccatagggtacttacatttataaaagattttgcaaaacaattgcttgcaatatgagatcataaattgaatacagaagtgtctaatgccggttgtaaattctatggaagtttagaaaagagaataattaacaaagactgaattagccatggaagtagtagatacttgatctgaaactaggtatgatttagttaaatggatagaggggaaggaccttctggatagagaataagacgtacacaaaggaagtctttaatgaacatagcatcatatggagttatggcaaagagattcagttaaagtccagcctgcctgtattggaggttatatgaacaatgggaaaataggattggtccatagaagacattgaaatttaggcagaaatgtttagctttaatgaaggcaggaactgggagccattgtagattcttcattagaatgatagaaatagtattcaagaaaggttagtataatgccgtgtactttgaggaaggtgtgaaactaccttgttccaggtagcatgcaggcattttgcttacctttttatttaatcatcaatctttggagacaaggatcctatgcctcataagtgatttgagccaggatttgaactaatgtctgtctgactctagaaagttagatgggagagtcctcagtcaggaagcattagctgcagtaaaccacctatgatgtagtgaggattatacccagtagcagtgggaatggaaaagaagagatggagctaagagagaattatttaaagaactagttgactgatgcatatatagggaatgaaagagaaaataaatgtaagaagacattgaagttttatgtagca

SEQ ID NO: 130703 - DNA, 1087 bp, Homo sapiens
cctagcactttcagaggccaaggcaggtggatagcttaagctcaggagttcaagaccagcctgagcaacatggcaaaaccccatctctaccaaaaattcaaaaattagccaggcatggtggtgctcacctgtagtcccagctactcaggaggctgaggtggaaggattgcttgagcccaggaggctaaggttgcattgagtcgactttgcgccactgcagagctagaccctgtctcaacaacacaacaaaaagaatagacataaatgatatttttctttttcttaaccactgtgtcttttacaataattttgtctaggttatggaacgaaagtacaagcttggaccccttgttatctaattgatactgtgcttgacttaacatgtgtatctgttaagtcaaggttgttgcattgcaacctcttgtttgtgttcacagcttagcttggttacctttggcccatgaaactttctggttcttttctttttttcttttgctttagtttgagggattcatttggccattacctacttagttttggtactggggaactgactttcttttaggatatggcggaaagttttagatggatattttggtgtcccagttgttttcagtgaaatttttctccattcttttttctcctttttgattatttcatggatgaaaggtcttttcagcatggtgagagatctgtattgccaacttttgcttctgatttattttcagcccagaggacctgtattctctggcagcttttactgtagctgtttccagtccagactctggattggtccttaagcagtggtggagcaaataatgacacagagcaagtttagcattggaccattgaaaaatttcataaaactaactttttagataatgtagatcaaattttttctctgatttcagaatttcagaactgaaattcgctgctacattaagggagagatttatatttcacatcaagtattgatacttgggtctattgtgtgtggatcctgcattcttaacataattttcagaaaatgtatgggttataacaatataaagaaaaatttccaaatttaatttacttctatctagtt

SEQ ID NO: 130704 - DNA, 1125 bp, Homo sapiens
gctcagcaataatgctgatgagaagatagatgccattcagatacctgattctttgaatgtttgaatgtgggagtttttggatctttgcattgtccctgttatttaaaactttcctaataatgtgccttggtatacatcttttccccattcatcgtatggagtgtcttttgactttttaaatctggaaacacccttcagttctatgtgatttcatgtttgctatttcttggtaattttcactgtctctcctctctgtctctggatctccttttatttggttgttgaaccttttaggttagtctttcaattatcttttctgtttccttttccctctttttctctttttattcttctgagattgcctcaagtttatcttccaaacttgctattttttcatatcagatatttaatgtctaagatagctttctcttctacgttattatttcattattattattttgagttatcttttgctccctgccttgtgtctgttcttttgtgtttgttttgatctctgacatttcactttatgggctttcttcaaatgtacggggattatatttgagagaagcactaaaattacctctggcagctctgtgtgtaagagtggaactagttgaccagcaaattttgctgtaaaagatgttagggttcactactctgaattcacatgcttcttgtgacttttctctttgcaagcttaagtcttatttttggtctgctgagttagctgcttacatatttatctgttttctaacttccaaacatttttctagcttccacatttttgacatctcccatatactgttatctattcaattcctgtgctgtttgtcttttggggtttatccttttctgtggctttattgtagttttgagagggttttgagagggataggtgtaaacctgtgtgttctaatctccattttgatgggagctcctgccatttgtaatttcttggactgttctaaaattataatttttattttattttttaaatcagtctatctatctatctatctatctatctatctatctatctatctatctatcatctatctaagacagtctcactctgctgctcaggctggagtgcagtggtgtgatctcagctcactgcaacct

SEQ ID NO: 130705 - DNA, 1070 bp, Homo sapiens
tggcctaccccggtcaccagcaaaggctaaatggagaacctagacttctatccttttgaggctgtccagtccttctcaggcggtgtcagagaaggctgtcatgctaaggcattcatctccacaaggcagtgtagaaagtattccctccctaagtggggagtgccagtgaagaccatgtgggagcctagacttatactcctaccaggcaggaataagaacccaacaacctccctgttggagtggggtcagaggcagtctggtgaagggtcaggactttcatcgccaatcagctaaaatgagactacttcccacagtaccagtacaggactctgggagaacctgacctctcacccttatccattagtaacaaggagccctccatagcccaggccaggaagtggaacacagtatttgctcccgcattcacttagtcgcatataaccacctgaatgggttaagttgagaaacgtaggatccagttgggcaattgtcggtccaaccacaactctatttttggtgtatgaccaggagtctctaccacagatatgttaataggacttaatttgtttggtaagattaatctataactgttctaaaataatttattggttctttacaattgattttagtatttctgtactctgaaaaagttctttcttatagttgtcccaaatgatatgtttgccattttaaaccctctttcaagtatctatttcttcttcagcacaattttttttgtctttaaatatatttttgtgttctcttgaagtttattaaaataactcagggctgggtgcagtggctcatgcctctattcccagcacttaggaaggctgaggtgggaggatcacttgagcccaggaggtcaagactatagtgagccatgattgcaccattgtgctcgcatctgggcaacagagcaagcccctgtctcaaacaaacaaataaacaaataactcactcactcagtcaggtcacttttacctgatgctatctactgacatgtaactatgaaaattactgaaactgattgctgccccaaatttaggttatctatccaaaattataac

SEQ ID NO: 130706 - DNA, 1030 bp, Homo sapiens
tcacatttttatattaacatctaaaaggccttttcctgtccttccctctttttcctcttctccatccctttcctaactagcaatttaatacttgtttagtataattttacccttcaattgctaggcagttagagtgccagggttttttaatacgtggtaaagagtgccagggtctttttatacccagtacgggacctgataaacatccagttcaacctccttacttggaaaaaaaaaacaaaatgatactaaagccacacagtcaggtagtgatttagaactcaagccagtttttctgactcatgtccagtattggcctcatcacattgtactgtttgcttttatttgtactgtcttttataaattagtgtaattactttatttcctttccagaaattattttaaaattttatttagcttgttacctgtgtattatgtttgctatcaggaaacagctatatttgtttacttctttatagttttatagtgttttctcatcctttatctcatttatttgttgtgaagataaccttttgctcatatatctgaggttcttaaataatagcatgaatttctttgttattctggcatgcccatcacttctatacattcacagactcagctgctgtagagtcagacatgtgttgactcattccactgagattataaagttcagtcattgttgattctcattttcagccctttccacatctcctgggtactcttgcagtctaaggcatgacatttcaggcatgaagataattagttgttttgaagcacctagatttcttgcgttattaaactgcttgtgatcagagtagttcttttagaaacataatcagaggtttggtatgtagttaagcaacacattgtgtagaaacaaacacaaggataatcatgtcatttattttactaacattcttcaatcaaaatggtgttagagataagataaattatatggctgtaatgtgtgtccctgtgatttggttggtggcaagggaatgaattgttagtctaaagtgagccactg

SEQ ID NO: 130707 - DNA, 1048 bp, Homo sapiens
aatgtatttggaggtaatgaagttatttaagaatcctcttgaaaccaaactggtggtgagagggaagaaagcagttcaatagggggtgattgaaaggaaaaaagagacctagaagggaagcgtcagcaagaaagagtcaaagagcaaggaaagaaagaaaaatgaggtagttaacaggaggtaaaagtagtagtattgagaagagaagagaatgagggctgaaagggagtaaggttcttaacttcttacatagtttgggttggttgccttttgatctctcagaactaggaacagatatgtttgctttagtttgctgttgttgctgagcaactttgtcactggtgcatccactagggttattgcaagcatgaccctgcaggtactaatctcagcagcactccctcttcagttaactccatagccttctctgcctgacctgaatcaagcatattttgctccaaagctcattttttttctctaccgcacagtccagcttcaatagggaattacttttttggatttaccatatatcctataattttgctgaacttatttaccatagacaattgattttcttggatctaatagtctgtgctcatgccatcatacaaattcatatgttcagcagctttattgagatatactgacatataaagattttatatgtttaaggtatacagtgatgttttacaaatttgtattttatttcttcccacttttcctattatgtgactttagggcaatatactgattctcctaaattttactttctttatatattaaatggacacaatagatttattggaatcacaggcttattgtaaggactaaatgagaaattgtgtgtaaaggatccattacagtattggtacataggggtggtaggtagactgttattctagttttatttccatttttattgagaatgtgtctgtgtttcttcactttatataattctagcatttagttttagaaataaattttaagaaatcacattaagatactcttaatactcttttttttgcttttttgcattttaatcctgagt

SEQ ID NO: 130708 - DNA, 1101 bp, Homo sapiens
aaaaaaatttaccatcttaactgtttttcagtgcacagttcagtagcgttaaatgtattcagattgttgtacagcagatctgcaggattttttcatctagcacaactgcaactcttacccattaagtaaccactccccattgcttcctccctccagcccttggtaactaccattctactttctgtctctatgataatttaactactttagatacttcctgtaagtgtaatcatagagtatttttctttttgcaatgggcttatttcacttagcataatgtccttaagcttcatctgtatttagcatgtgattttcttcctttttaaggctaaataatattcaattatatgtttataccacgttttgtttatccattcatcgtcttcgttcattttttggttttgtttttagtatagattatctttcctttttacccactaaatttctttatctctaggcttcagcttatttagggacataaaccatttgcctggtttgttctttggaagtcattttattttttgtttttgtttttatttttatttgtttttttaagctacttcctaccgaaaggatggaagtcattttaatggttatattttccacctgttttgcagctatattgctaacttatgtattgctatgttaattatacatctagaaaactttgagttattttattagttttcttagatatttaattgattggaagtgtttttaagaaaacttggagtttgctagttaaataattatcaacaatgtagctaataaattcttttctactagcatgcaaactctacactgcatcggttcaaattatagcacctaatgctgcctcaaggcttgtgacattataacttttcaactgagcaatgcttaatttgttatgaaagtaaaaaaaaaaaaagttaagtaattccatcaaaattgtattgctgacatctgtttctgataaaattttagtaatatgataagaattaaaagcattgtgtgatactggtttctgagtctcatgatagtaaactgtagaggacttgtcttttgtgaatcatttgtatatgtaaggtgttattaagtccaaatggaaaagaaatttggtgc

SEQ ID NO: 130709 - DNA, 1010 bp, Homo sapiens
aaaagggtgaaggcagaatgacaagtacccatatttggagatttggtggaaggagataaaagagaccagagagtaagagaagaattaggagagtttcagccaagggagaaaatagttttaaggaggttgtgattgatgaccttttacaaatgtttgtcctcttctctgtctccatctccatctccgtctccttctccttccttcttccttcttccttcctcttcctcctttgtctttcttcttctttcttcttttttgcctttagtttgggtagtatgaataataggttatcagattggaggtcatggttaactttcaggagtgtaattcagtcaagtagcaggctgaagtcaattcctgggggatccagaaatgaagttcggtagccaagaagaggagtaagttgggtggcggtgggggcggggggtgggggtgcggtgagatttgaaggtttgagagtccagggaagattttaatggcatgaggagacttagtctgattttagaatgagatgtaggacccagaggagaggattaaagatgtaaggagtagggccaagggcgacagataatgaaacaaggccccagtcaggtagcagggaatgtgactgaggatttaagtctagtcatcaaccatggggaaagtagatttaagcatactatgtctataacctgctcctgccctggacatcaagtgttacatttgaagagctcactgcttattaatgcagaagcagtatcaagcattttatatggttgccagacttaggcagggccagtgggttgaaaggcagtaatactttgctaggcaataattggtttaggggtgctggttagctgtagtggtggttcagttgcttacaaagtatttagaagcctctgagcaactatattctgatctgccttaaaaataatttagagtgaagctaattactgaaagaccttaaccagcttttaaaaatattgtggaaataagcataaattcaccattttaacatttttaagtgtaca

SEQ ID NO: 130710 - DNA, 1025 bp, Homo sapiens
gctggcaacagaagtatgcttccctactgcacatgtatatatcagtgtccaaggttaagaaaaccacatttgtattttttggcaggtacaatacattttaaatgaaaaaaacatttagaatgttttcttttcaaaatgattgtactgatagaaggaagtatctaacaatctgttcattattaattgcatgttttctgatatggttaattatttaggcttgatgtaatcactcagctggttaagactgcttactgatacaaagttaaagataggatgtacaaatgcaattaaatatcagtttcttaaggttaaaaaaaataataatttcctccaatagagagttcttaacattctatgtggaaataaaatttgtagaaaagaaacagaaaaatgaaatccatagagaattgatatgctacaccttaaattaaaacttatcatcagaatacttaaattcttaaaaagtataatttatgatatttaataaataatttatgagtatgaaaaattaaaaccatggacttttttaaactttaggattaatgactagtaatggcttctttgcataagttgcttcctttcgccttaaacaaagaaaccatacattttaaagttttatcataaaaacagaatgtatatgaaattatttcactttagcaatttttaaagtattttaaggctcaaaaacttaaggatatgggaaagtgatcaagatgtagtgatagaggaaaaaaagaaagttataaaacaatgtaatctcatgattccaattttggttaaaaaccagtatgtactaatgggcacagtagatacacaaagtacacagaagcccatatatcaaaatgttaatggtaaatcttgaggtagtacaagtatttttattttcttccttatactttgttttcttcctttatacctttattcctttctatagcaaacatgcatcacatttacagttgagttttgtggaagaataaactctatatttcattccatttctgccttcctgcttatattttgataga

SEQ ID NO: 130711 - DNA, 1022 bp, Homo sapiens
tatttaattttgttaacttggttttaagtataactttcacatgaatagaaccatctttattacatctgggatcatttaatttgcataattaaatgtagttgtgctatgcaatgcaaggtaagaaataaatgattagcggtgactttgtaagcatttcggtaagtgacttataaactgaaggtcaccattttaattggaatgctcgtgaatctcttacattctgtaatcaaatgaatgatatcaaagaaagaagtaatttaacataacaattgtggcttacactgaaaatatgttcctgttaataagttgcatcatgatctttaaggacttgtatgtagttagtacattttggttcatttgatatccatggtttttcttcatttttattagtgagttgttacagtggttaacaagaaatacacagatttaagctgcaatagttttcccagggttatatgatctaacttcacaagcttcttgaacatatgtagatgcttttctattttgctttacttatgacatacaattgatataggcaagcatgaaagcttgggcagattttcattgctttttctggatcttgctcaggttctgtggtatttatgtaaagcacaattttgttacttgggaatgcatgttgaaattatcatgtgcactattttgctgtaggcccgttggcactgccacaaaggtaatacactgctagtaggccatttccttgtcgactgcatttacaatttaatagaaatattacatgactttttaaacaagtgttttggcagggaggaaatggcagattccatacaaacaagcatagcttcctttcctaaaccacactccagctactcaagaaattgtagttggtttcaagtttgggagtttaggggtagaatgggaagtcaggttgaaacaggaatgacattgatatttactgtaaaatagttatatatttttagctgctgaatttcattactgtatagtttgagtgacactagtatatttctgaataagtgctgagatta

SEQ ID NO: 130712 - DNA, 1030 bp, Homo sapiens
attgacagtttattgctagccaggggagattgctgaaaacttttaagttcttgcttatggctgctgagatgtcttctgcagcctctactggaagcaatatgaaaataatgagcctattaggactgtgatacattttatcttttctaatgatgaaaaacagttattttttacttcttcattttcccctatactgcatactagcccagtaatggaaaccatgattcacaagagggtagaatgagctgtttctggggcagagaattcagtcagcacatcttatgaaattgcacttaaatattgatgtttgtgcagatatgtatttttctggtaagatagttcatagttttccatcaaatgaaaataataactccttgaaacaaggattccttgatcgaaaataactgagaactgtggttcttaatatcagtgaccctcaagagtgtatcttgttacattgtgtatttagggtagtgttttgtttactattttctttatcatagcatattacagttctgcatttcaacctggaaccaaatgtagattatgatgtcttcctcccgtaatctttctacttctggaaagcttagttttagataagtctaattattgttagaagttcctcatcccactgatttaaaaaatcttttctttctttgaattctcatatcaccttatctataattttcttatggcacttttaaacttactgtgtattatcatagttattttgatatagttgtcgtatttccctactaaatctaagttttaaattcaagtatgtttcatctttgtgtgtctaaatgaatctagcagattctaacataagaatatccaataaatatttttgttgaatatgtgcttatttcctttcctatctcaaagatacttctgtggtgttaatactgaaatctggtaagctcagatttttctttcttaaaataataagtgttgtacttacaacttagcataagaatcaatgaaataaattaaaaagtgaaagtaattaaatgctaatcaaatccaacttgaa

SEQ ID NO: 130713 - DNA, 1053 bp, Homo sapiens
tttatttcctatttaaataatatcattatttaacttttcttgtgtttgtgagctgtcttacaaagtagagtattgaactgcaagtattggaagctgttgagatcatgtaacagatagttttatcactggtaacaagtactgccttttgttttccttgaaatgacaggttcacttggttcctttttgagaaaatgtctgtcaaatacccaagtctgtgtaaccttagttttctgttagttattcttcaagtaaaaatgatgttctttgaaaagagccttgtagtttatttagcttgcagctcagtcacacaactgctttttttcagattattgttgttctttgatatgtggggaagtgctttatgcatattttccattttgtcaatgtagaatattaaaaatacatattcaagtgtagaaatttaatagaattaataaactttactgtttcatcaaggtttacagtagttttgtggggggtatagtgagggcaatgaaagaaagagctgtccaagagagaaaaattgttgagggcccagctaaaattggtaattgggaaagtatagtgtaattaatcctggtttgtgggccttcctatggtagtgtgctctgctgtgcagtagaatgcattatggccttgatatggagggtttgggttttaatgaatgagtgtcttagaaggatggggctatagggaatttaaggatgctgctgagagacagttcaaggggttactaacagggcacagtctggaaagaaaagagagagtgtaaggaaatggggtgatcaaagaataggtagtgttctccatgcttgctgcatagccgtcatgtggggagccctaccctaaacagattaaatcagaatctcaggaggttagagaggagataaagtggtagttaagatatgagaaagctggtaggatatgacactatggtaagtgagtgaaatattgaagttttttaccaacatttttttttgtactgtagtaattttgtgaaataaatattttatcctccattgggtggattggatgaaatggataagattatgt

SEQ ID NO: 130714 - DNA, 1100 bp, Homo sapiens
taggctataactgtgtggccgacatctggtcccttggcattacttctatagaaatggctgaaggaaaacctccttatgctgatatacatccaatgagggtaagaaaattatggtttgctgaaaatgttagccttatataagtgttgccgttttgtaatgtcaatgtaagtaaatataaactaaataagttcatttaaatgtattctttttaaaaatggtaaaattacctcttaaagattagtaactgttaacttctcttccttctgcattcttaattgtgagaaaagaactgaaggctttgtatatctctaccatcactgttctcctcccccaaaaatatacttgtaaaatttttgcttgcttttcaatagaagaaagggttggtaaatcctctttgctcttcagtttattgttttcttgattgtggtagtgaaagagttggaagtaatcatttctcacttttttacccactctgtgatttataccttactgtgtgtttttttttttctgccttttctcttctttggtctgaggatggtattaagcaatcctaatttctaatattactatgcacatataaaggaattcggctaattttttttaatgaatgcatgctgagaaaatggaattccttttttgaacatcattatatgcttctgtgaactctgcaggataatttttgagtttgaaatatatattttgcatattcaagtctaattgcctgtgtttcagggtttgtgatgatatactttttaggtttattactatgtgaatcatatagataagttcatcatcataaataggtacactgatctttgtatacttattgccctctagtggctgtagttatctcaataaggatgtaggaatgaggggaggagtgtatgtatgtgtgtatttgtagaaaagagaagataatatcatggtggctggaggaatgtgaagtaaatagatagaaagaggaagaatgcataaaaattcagatattttagaatatctgaagaagaataaattggaattacatctgatattataatgccattgtgggttaaatttcgataatataggtaacagtgtattatacagaaaatatttaaaaa

SEQ ID NO: 130715 - DNA, 1039 bp, Homo sapiens
tattatggcatttaatcctcatgaggattggagaactctatgaggtaagaactattaatgacccattttccagatgagaaatggaaacatatggaggttaagtagtgatatggaaagaaaggattggaattatagctgaagactagaattgagctgagaacatgaaatgtggagccagactgccaggatttgaatcctggctctgctacatactacctctctgaacttgggcaagtttttaaacttctctgtgacttaatttcttcatctgatatatgggacaagatatgagttgttataaagattacatgtatttaaagaataacacctggcacataagtggccctatatatatttgcttttgacattgtcatccttatcctatcatctcacttaggtagataaaagtgtctttgcattttggacatgatcatctaccagatgtatttgggtagaagaatgcagagaactatagaaccaaggatagaatcttagtattcaccattggtactttggtactttgaattattgttgttaatgaagaaagtatacattccataacatagacctcacatttttaggtacagtgttagtttctttaatagaatcaaacggtggtggctgggcgaggtggctcacacctgtaatcccagcactttgggaggctgaggcggggagatcacttgggctcaggagtttgagaccaacctggctgacatagagaaaccccgtctctactaaaaatacaaaaattggcctggtgtgttggcatgcgcctgtaatcctagctgccgggagactgaggcatgagaatcacttgaacccaggaggcagaggttgcagtgagcctagatctcgccactgcactccagcatgggtgacagagtgagactccacctcaataaacatataaatacataaataaccaaataaccaaataaataaaagagtcaagcagtggctattcaaaatatactagcatattttatccaagtgcccttagaatcaataccttgcatgtaatagcctttatggtaaa

SEQ ID NO: 130716 - DNA, 1056 bp, Homo sapiens
agccagaatgaaagaaaatttaaaataactttttggcctcatggaaatatagattattttcgagttgattaatatttgactgaatgcaaaatcctttagaagacatatttaaaatgctttagttaaagggaaaaattttcatttgttcctcatgttaagtagtaagttctttgccaaaatgaagtcttattttcttcagaatcactcaaaacatttgggcctcttctggtttgtaatcctgttaaatttcgtccatgaagtaaagcctaattatgcatagttggtgaactccagatattgagaatttgatgtgcaatagaaatttacttatttaacttattggaacagtatgaaatgttgaaaatactttgtattgggattaagaaaaaaatttctttgggaattaactaaatttaattgtttatgtattttcctttagcccatatgttgtaaagtactatggcagttattttaagaatacagacctctggattgttatggagtactgtggcgctggctctgtctcagacataattagattacgaaacaagacagtaagtattttaaaattgttttgctaatatcatttctaaagattgatattttagaatctgactagttggtattttgttacacagaaaataatagcatgaaaaaagaaaaggttttaagtggtgtaaagatatctagtaggaggtgtgagaaccagccacatatctttctgtaacaaatttaggaattacatgattgtttaatttatttattaggataatttttggtgtgtcacagagaaactaccatggtacttctcttcttcatttggaatcagcgtgtgtgtgtgttgtttaataatgtgagtttcataaattatggctagaattttatttaaagtttataatattcatggtatttacgtatcttaaattttatgtattataatttatggctggaatatttgaagaaattatatacttctgaattaaaaaaaaacatttttgtatttattttcccaaatattgtcaggatgtgtgaaagtgatagaaatatatatatttc

SEQ ID NO: 130717 - DNA, 1062 bp, Homo sapiens
catgagaaacacataactttctaagagtataaaaagacgatgttcacttctagttctagttgaattttttaagaaaaatcaactttattacttcagagctaaacatttgctaaatatttataaaatgttgagcttttaaaaggcaaaagggagcaggattgaaaaaaaaaatggccaggcatggtggctcacccctgtaatcccaccactttggtaggttgaggtggccagatcacttgagatcagaagttcgagaacagcctggccaacatggtgaaaccctgtctctactacaaatacaaaaattagctgggtatggtgtcccatacctataatcccagctacttgggaggctgaggcaggagaattgcttgaacttgggaggcggaggctgcagtgccactgcactccagcctgggtgacagaccaagacttcgtctcaaaaaacaacaacaaaacctttcattttactagtttgaggtaaaaatgtacttcctgtagttgatgtagaaaagatgttttattttgtggattcaagatcagactcctcaatgtataatttagaaaatgcttgttatttaacgctaactttgagactttttgacatcgtttaataatgttacattgaaggactaaaggatgaaaacctttcatgtgttttaaagatgtatttttttttttttttaacagtattcaagatgaaactgctagggtacaagaggttttttttttttttcttttttcttttcttaaatggaacacttaatgaatttgcatatcatccttgtgtaagaaccatgataatcttctcggcatcattagtaggacttaattttaaatgagatttcacatatgagatgaaggatcatgcctagcacatagcagtaacacttatgactcattaagtagctactattagtagtgatacagctaccagcagtgtggtcattaaaacctatgctctagtggatagggaaatctgccagaagagaaaaagagattgacagttacagagctgaaatcaggtagaaggcactttatgaaaaagaaatctctgttctc

SEQ ID NO: 130718 - DNA, 1132 bp, Homo sapiens
gcggctgtggatggttagtgggtgttgcaatataatgaaattctaaatacatcattttgctttcatttattaattggaatgtttttataaaaagtaacttcccctcatcttctgtttagttacccagtggtactgttgataaaggaaagacaggataaatgtttgattctttccttttatttacaagttttcaagataacgaattagttccctgtctttctccaaaggtggccatttttttttcttttaaatgccattatgagaagatggatttaaacatacttgatggatttaatccattggaatcactttcactgaagcgcaaattgtctcacctttggttagtgggagtctcttcaggagataacatgaccctagtggtttttgatagtttccttgttgtctgctgtgatatttggggcccatcttgtatacttcttgtcctagatctggaatcatccatttctccaaaaagccgtggtttctcttagtaagaaatgatatttcaagatcctaacctggagactaatatcctaataactaatatcctgttatttttaatagcattttattcatagataggataactgattttttctttcaaactatggatattctgccaaaagtgatgacactggtggttttgagctcttttctctggatagtctctccactacacatttattttctaagtttgagtcagaaattgggcatatataaattcaaattacgtgatatagactattcagagcagacttttatctttatgttcttcctatttgctctggttgctctttgacccactataatcctaatacccagtcttacttttttctcaccactaaatatttcagatgacctagtgtcattttaaatgaaaaagatagaaaataaaataatccaagacaaataacaccactgttgataagagcagattttaggctgggtgcagtagctcatgcactaatcccagcacctgggaggccgaggcaggcagattgctttagtctaggagttcaagaccagcctgggcaacatggcaaaacctggtttctacaaaaaaatacaaaaattagctgggcatggtggtgcacacctgtggtcacagccaggaggctgaggtgggagcatc

SEQ ID NO: 130719 - DNA, 1013 bp, Homo sapiens
attatatgaggctcaaagacgttaaataacttggtcaagtggagaaagtgccagaattctgcatctgattggctacaaaggctgtgcaccctcttgttgtatacagtgatggctctttttgaaactctctttcttatcattccatgatgtagtggtcctctttttctgtaatctcctggtctctgttgcttattctgctcttaatccttataaaagtgccattttgcttttctgccttgaataacacttccttagtgctgacttttacatggccttatcgatgtcgttgatgttcaagtatgactagaagctgctgctcagttggcattttttattttttcaggtaggtcttactctttcattatcccatctagtttgtcactatagcctatcaaattttctattaaaaagttggtggattaattttttctgttttctttctcaagagtactaccccataaaacccattccatggttttatgaccctcacttttgaattgcagcagtaccttctagctggacgctttagtccagtggttttcaaaactattttgttttgttttgagatggaggggtacaatctcggctcactgcaacctctggcatcctgattcaagcgattctcgtccctcagcctcctgagaggctgggattacaggcgggcgccaccacgcccagctcatttttgtgttttagtagagacaacgtttcgccatgttggccaggctggtctccaactccagacctcagatgatccacctgcctcggccacctaaagtgctgggattacaggcatgaaccaccgtgcctggcccccgttgttctttatttatgttataggctgtgggtactcccagctttacctttattcacatttttcctttagaaaagtttgtgttactttttgcctgaagaataatctatgttttattcttccatcaaagcctacctcatcaagtatgttttctgagtactttctagcctgagatatttcactgaattcctaatgtgat

SEQ ID NO: 130720 - DNA, 1019 bp, Homo sapiens
ggcagatccggctgggttccgggaagcgagggcctcgcggggtggctgggttggtgaagggctactgcggccgaaggggagcccgcctcacttcattcttccactctgagggacccgctctcttctggtcactacgtcttcctccctcacttcgcttggcgaagggtgttgtacttgtgaggaagtcgcagctggagctgggagtccgctggagtttttctctgtttctaagaggaggcgaacggccgctttggtggggacttactgctttcggcctgagataacgaacgctctttccttcactctaccgccgacttctaacgtttctgtctactcctttcagcttccgacttcgactccttaccttaaaagatgctggagtcatatgtaactccaattttaatgagctatgtgaatcgctacatcaagaacttaaagccgtcggatctacagctttcactatggggtggagacgtggtactcagcaagctcgagttaaagttggatgtgctggaacaggtaagctatttagctgtcattaactggaaacagttttcagcttgtttagacggtaatctattgtttcctaagctttgactttatgctgtaaaaacgtaacttttctactgatgtattttgagctaccctgaaacaagggggctttattttacactattttctttttctttctttctttttttttttttttttttttttttgagatggagtctcgctttgtcgcccaagctggagtgcagctgcgtgatctcggctcactgcaacctccgcctccgggactcaggcagttctcctgccgtagcctccctaatagctgggattacaggcgcgcaccaccacgcctggctaatttttgtatttttagtagagacggggtttcaccatgttggccaggctggtctcgaactcctgagcttaggtgatccgcccgcctcagtcttccgaagtgctgggattataggcgtgagccaccgcgcccggcctgcataatttttaaaaat

SEQ ID NO: 130721 - DNA, 1356 bp, Homo sapiens
gggtcgaggaaaaaaagacaaaaaaaaaaaaaaaaaagagcagattcagatcatgaggaaagatgacatttcccacggcatcctcagagtgttgagtagatacattgagaatggcagtaaaattggaaacttctttattaatcgttttagtttcttttaacatgagatttgtctgatgcaaaagaaccgtaacttcaaagatcacatattcattaattcatttattacatttattagtaacatgccaagaaattctgttaggcttgaggatctgtgcaagctcagaagagtcagagaccaactgctttttaggagataagggaagacttaatctgacagtgatggttatttataatttttagttatagtccacagcctcttttattactcttttattaagtcaatctagacttagcactaagaaataatactcctggctgcttctttttcctcttcccaaggttagttgagtggcttaatatttaatattttcattttattttattttttaatgagcacaaatcccaagtgtaacagctcaatttttttttttttttttttgagacggagtcttgctctgttgcccaggctggagtgcagtggcacgatctcggctcactgcaagctccatctcccgggttcatgccattctcctgactcagcctcctgagtagttgggattacaggcgcccgccaccacgcctggctaattttttgtatttttagtagagatggggtttcaccgtgttagccaggatggtctcgatctcctgacctcatgatccgcccgcctcagcctcccaaagtgctgggattacaggcatgagccaccgcgcctggccaacagctcaattttaaaatgttttacacctgtgcaactactgtccaataaaaaaatggaatgtttccagcaccccaaaaggctcacctgtttttgtaagtactccaggccgggcacggtggttcacgcctgtaaccccagcactttgggaggccaaagcaggcagatcatgaggtcaggagttcgagaccagcctagccaacatggtgaaaccctgtctctactaaaaatacaaaaaattagctgggcttggtggcatgtgcctgtaatcccagttatttgggagactgaggcaggagaattgcttgaacccgggaggtggaggttgcagtgagccgagatcatgccactgcactccagcctgggtgacagagtgagactccatctggggcaggggaacgtactccccactcctaaaagaggcgactggtaatctgacttctgtcaacatagataagttttacctggttttgaacctcaaaaaaattggaatcatttatgtttggcttttttct

SEQ ID NO: 130722 - DNA, 1471 bp, Homo sapiens
taactttcacaaatagagttacaataactaaaaatgtgatagaaatacatttttttcttcctcctttgttgatttgtaaacaaattatatctagaagtgagacaaatgagcataaagcaattttggtgacatttttcatgcctaaccttttatctaatgataatgaaaagcagtcagaaaacatttaaaatttatgaccaagtagtatccagttcaattttacattaggtgaagtggaatactttttttttttttttttaagttgatcagttttcattttgtcaggttattttcaaatctccaattgagctcccctttcaacttgacttagaatactgttctattagtttaaaatatattttgaagacatatttttagatggagacttaaaaaattacatcatttcagttatttgaagtactgctgctatatactgttgcactatcatatatcagccttcatcatgtactgagtattatatattatttccattcagcaaagtaggagacaggcctagagtgcttaaggaacttattaaatgtaacttgtaccataaattattgttatttatcattaactatggcctaacaaggtatttgatgctactttttgataaacagtaattctgaaaatatttttgtgttggacattttatttctcttttaagaaaggaatttgtatattagaatgaaaaatattaagcactaaacaataagtctctgaatattcttgtgttggaaattttattttttaaaaaagaaatttgcatattataataaaaaatattaagcacttactaatttttatgtaatgttttgtgttttaaggaactgaaattaccattcacttttttaagtggacatattcatgaattgaggattcatgtaccatggacaaaactgggttcagaaccagtggtaattaccatcaatactatggaatgcattttgaaacttaaggatgggatacaggtaagaaattattgaaccaagttgtttatgttaactaattttagtagtatttgacatttctttaccttttcaaatatgccaactgttacataaacatatcttagcttatatacttttttttttttttttttttttttttgagatagagtcttgctctgttgccaggctggagtgcagtggtgcgatctcggctcactgcaacctcctcctcctgggttcaagtgattttcctgcctcagcctcctgagtagctgggactacaggtgtgcgccaccacgcccagctaatttttatatttttagtagagaaggggtttcactatgttggccaggatggtcttgatctcttgacctcgtgatctgcccaccttggcctcccaaagtactgggattataggcatgagccactgtgcctggcctttaatttgtatatgcctgtttaagtgacatgactatttgcaaagtcatttttaaatttgaataaagtatgtaaaggttgtt

SEQ ID NO: 130723 - DNA, 1052 bp, Homo sapiens
tggttggaatggtaggttcagtgaaggggccttttagagttacaggtactcaaagatatgaatctgttaaaaaaaactattatgcataggaatgtattgaagtatgattaaaaggtaggaatatgaggcttaaatcagataagatcattccaaaaataagattttgttaaatgccttgataagaaggcatgtcttgtttgtgaaggtcaatttaattctaccaacatttgttggttgtctactctgtactgcactgaaaagcattgctaaaatatttatataatctcagcaaaagacacttagaaaaagagattcataatgattgtgattctagtggtcatggttttaatatactgccttaacatatccttacaatcagttttacttatagagatttttaggatgacagggtgaccgaattgttgtgttaggtaaaataaagtccatcttgatgtttactctgaattttaaaaaatatattgaaacttcactcatgaaatagttgttaatgatttcctattcactctgagagatgtatctatgtcagtcattgccctcacttttaaatcttgcagagttactacttgtaaactgtttatcctgtttttgatttcagatacacagtttttgattcatgacacatcatgtccatgctaatctaataaatacttgttaacataactcaagagctaaaacattatcagtaacttccatttaactatgtgctcctctcctttttcatattcttttttgttcagcctctaggggcctcatctgtaaaacaggacaagacttgctatacaatttaaaaaattatatgattgatgtgctttctttgatcattgaattaagtcttggctgggcatggtggctcacgcctgtaatcccagcactttgggaggccgaggcgggtggatcacgaggtcaggagatagagaccaccctggctaacagggtgaaaacccgtccttactaaaaatacaaaaaattagctgggcgtggtggccggcgcctgtagtcccagctactcgggaggctgaggcaggagaatg

SEQ ID NO: 130724 - DNA, 1101 bp, Homo sapiens
cttgaggttaggagttcgagaccagcctggtcaacatggcaaaaccccatctctactaaaaatacaaaaattagccgggtgtggtggcaggcacctgtaatcccagccactcaggaggctgaggtgggggaatcacttgaacctaggaggcggattttgcagtgagccgagatcacactactgcactccagcttgggtgatagagcgcgacttcatctcaaaaacaaaaaaaaaaattgatttaaataatataatcttttattatatgatgtataatcctgaaatttatggcatatgaaaatgaaacttggcataaagtggattttttagttcaataatacttttttttaacttattgaggatgttttagttcttgtttgccataagtgaaactttttggaattctgtatttgtttcacaattgggaagatttttttttctttttgagctgaaaaaggtatattttatttttagtctgtcaactattttaagtaagaagaaaacatttagatcaagacaaggaaggctttagtttcatcagggactttctaagaatgttatgaatgagtgaaaatatggggttgtaacagaagtgcaaatataaccttaattgtagtgttcagtgcttttgacactataatttatgtctaaatgctgcaaactgaaagaaccttagtttgaaactttgaagttgatggtggttgcaggttttctttttcccttcagttttatgccatctcaatgtgttatctggcattaaagacataaggaacacagattgcagcttccatttttttggcatgtttttgatttctatttgattcatatgctctggaggttccttttgaatctataaaatgcaacagttctctgattttgttttgatgattagatgctgctaattttcttttttttttttttttttgaacttgttcattttgccatgactattttttgaaacttgagatgtctggtatttagaaactgtactgagactttagtttttctatctgacctgagttttctatggacagattatagtggggtcttactagtctgacaattcctgactattcattggagtgtttacttttatttagt

SEQ ID NO: 130725 - DNA, 1051 bp, Homo sapiens
tatgtcatgcctttactagaaataccacctatcaaaaattgaatttattaggctgggcgcagtggctcatgtcggtaaacccagcactttgggaggccgaagcaggtagatcagttaaggtcaggagttcgagaccagcctggccaatatggtgaaaccccatctctactgaaaatacaaaaattagctgggcgtggtggcatgcacgtgtaatcccagctactcgggaggttgaggcaggagaattgcttgaacccccgaggcagaggttgcagtgagccgagattgcgccactgtactccagactgagtgacagagtgagaccctgtctcaaaaaaaaaaaaaaaaaaaattgaatttaccatttaaccttaaatatcagatcttaaaaaaaaaatcaattggtaatttcctgggtagtgtagagcttagagattagtgttgtcttatatgactcatggtcaggcatctgtttttctgttctgaaatttgcagatctcattagcatcattttgcaatgttagagcagacataaaagttagattatattcttctttcttaggagactgagaagataatagtgtcattaactgaattagggaataaaggacagaggattttgggggaaacaatgggagaaggggaaaaaggagctgaatcagttgcagagttatgagttttgttttagacgtgttcaatttgaggtgctcacataaaaaaattttttctcagtgctacttccctcattatttaatttctaaacttttataataatctattgctaatgtttctgcttttgctcttggccaaatactcagaagagtcttcttcctaaatgaaatacttcatctttttattctcccattcataagtttaattggcttgtttaatatatagaataaagtttaaatttcttggactaataggccctctgccatttgccctagtttctttttacagcttgatatttcactgctctctatttaacctaaattgggctatccattatcatttcagtaaggcatgttaccttgccttgttcaacttttcc

SEQ ID NO: 130726 - DNA, 1332 bp, Homo sapiens
aaagtattgcttttgtagaattagttatacatgtgttcgatagattctgaagtccctaaggacaggatacaaagataaatatatctaatttatccttgtaaatccagcaatttggcatgtaagagtattatatacatgttgaatcaggacaggaaaaaagtactcatttgcagttataaatacagggataaatttcaaaaatatgtataatttatttgtttctgttactcatattgaaacccagttaaaacttatacctaacatgaatgataatttagtatacattgtttagtatacattgtttaggagaggattataaggattattaagattaatcattaaagatgaccaagatagcttggattgaaaatagtgttttaacatataaacaacaaatggggaaaaattaagaacctttttatttattttgcacttacatagagatggatgttgtttaaaggctttcattaagtcattttttcttttgctagagccataaataagaattctttggagattgtcaagtagtttgttttgatatcagctaaagaaagaagaatttatagttttaaactatgagttattaatattttttaaatgctgtttgagaatgcaaattatgaaaattggttatgtagtttttagagctaaaaaataaaattatgttgatcttatctcctgtagctaccataaactgcatatattaaaaaattttttttcttaattcttgagtatgatcgatggttttctttttctttctttaaaataaaaataggatgaccatgaaagctgtggttctaattctaccaaccgtagtactgctgagagcacaaaatcatcaatcaaaccgcggagaatgcagcaggctgctcctacagatcctgacttaccaccaggtaacttctaatgggatcaataaaaccaaatttcaatttttggccgggcatggtggctcatgcctgtaatcccagtgctttggggggctgaggcgggtggattacttgaggtcaggagtttgagaccagcctggccaacatggtgaagccatgtctctgctaaaaatacaaaaattagccgggtgtggtggtgtgcacctgtaatctcagctactcgggaggctgaggcaggagaatcacttgaacctgggaggtgggggttacagtgagccaagatcatgctactgcattccagcctgggtgacagagtgatactctgtctcaaaaaaaaaaaaaaaaaattgatcattgttttagtactttgtagaatatatatttttagtatcataaaacttttaagctatatgtgcatatgtacttgctacatgacttcaga

SEQ ID NO: 130727 - DNA, 1505 bp, Homo sapiens
tagcatgaaattaaaagaaaaattttggagattctaagcaagccatggagaaatagaatgttcattaattacttttagtgtttggagttaacctgtatttctgtttctttttcctatttccctgtgttcttattctacttttatacattctccttccttccatacttttgttttttcatttttctgtcttcttcatggtagtattttaaaaatatttctttaactcttcctgtctacattttcttcttcattcatattttcccctctactctattttaacattaaatattagtaagtgagtagagttgaatccattatgatggtcatgtttcttctatccgaggcataacttttaaatatttttatggctaaactaggaagagatgaaggtagctggtttaaaaagaggcttaagcttaaagaagaccatcttctaatatactgtataatcagcatatagtaacattgcttcattttggaaaatgtttatataatacaataagcaaaaatcaaacaaagtacttgtagaataggataatcattgtatgggatctaatattatgttatcaaaaatatatatggtctttgtggtttctcttagtatatgaatacttcactatagaacttcttgataatgacgtttgttggggtcgatctgctacttattacctgtgtcactttggcaagccttttaacctatctgaacttcagtttctctttgggaaatatgctaaataataaccacctttctcatacattaagttcaataacactttaagaaataattatttactgagagatttgtggctaattaaattctttttttctattttataggttatgtgcagagtctgattagacgagttgtaaataatgtaaacattgtgataaataatctcatactaaaatatgttgaagatgatatcgtcctttccgtcaatatcacttctgcagaatgttatacagtaggtgaattatgggatcgtgcattcatggatatttctggtgagtaaatatggagaataccgtatatttttccataattgaaacaattaccttaactcttaacccttctttgggccaactgagttgctggtaaatgttatcaaatcttcatgcctccagtgtgggaaaaaaatgcacatatacaaaatgttgcatataattacaggaggttagtagacactccaaattcagaaatctatacttgtggtttttgtttgtttgtttttgagacagggtctggctctgttgcccaggctggagtgcagtggtgtgatctcagctcactgcaacctctgcctcccgggctcaaacaatcctctcacctcagactcttgagtagctgagactacaggcacatgctgctatgcccggctttttttttttttttttttttttgagatggagtcttgctctgtcgcccaggctggagtgcagtggctcaatctcggctcactgcaagttccacctccccgggttcacaccattcttctgcctcagcc

SEQ ID NO: 130728 - DNA, 1056 bp, Homo sapiens
ttttatataattttaattaatttaaatagccacatatggctggtggctaccatattggatagtgcaagtttagagtagcagtgagttttttttaatataaaatgaatgttaaatgaatgacttcttcaaaaaattatctttaatgtggattcttaagaattttattgttatctcattgtgtaagagaactgtagtgaaatttttcataattaaaaaaaatttgtagttaatgtgccatgcagattggggcaaactaattaggtctctgattcttcatatataaaatggggagaattgtgcctatttcataaagttgttggaagatttaaattgtataataaaatgaaaagttcattgcatatggtctggcattatgtattaaatgctccatgaatcttattttctgttattattaattttattactatttatactaataaataatagttgcctttcccctgctaattttcctttttacttaaaatgtttttttttctttttagcaactgatttggtgctgagaaaggttatcaatttttctgactgtacagtttgtcttgataaacggaatgccagtggtaaaatagaattttaccaggatcctttattatacaaatgttccttcagaactcgtcttcattttacatatgaaaacctaaattccaagatgccatctgttattaaagtaggtatctcttttttttgcagttaagttgcatgtctttattttgtttattgactcttgtggatgctaatcattattaacaaatgaagaaattaaccttgtaaatatgtatgccatttgtttttataaaaattttatttatgtttatgatttttatgttgtatttatacatttctgtataacgtattctactagagtttagagacaacttttttctgtaattgtttttttttagtttttccagctgtttattagtgtttctctcttcaagtagatagaggaaataatattaaaaggtatatttatacccacagtggactgcatatcagtattctgtatttcagttcttataatctgttcagcatgatctg

SEQ ID NO: 130729 - DNA, 1064 bp, Homo sapiens
ggatatgggaggaaaaattttaaaggatgtctatttctattctcttagttaaatccttttgacttatttaaaatgacttaattttaattgataggttctgaagatgaaacaagaatagatatgcaatatcctgctcagcataaaggtcaagagttatattcacagcaagatgaggagcagccacagggatgggtgtcatgggcctggtcctttgtgcctgcaattgtgagttatgacgatggcgaggaagactttgttgggaacgatcctgcatcaaccatgcatcaacaaaaagcacagactttgaaggatcctattgtttctataggattttattgcacaaaggcaacggtgactttcaaagtaggtcttttctcttgctgtttatatctctatcaactttaatgcttaaatttggattgttagtacaattctagctttattcaagtttgctttgcattcagtagatgtgagatagagtctaacagttcttacttcataaaattacatggctcctccacttgaaatctttgaattctgatcccttcctgtcttcttagggcattctccacatttcttttttattagcttcatggatagttttttgccctattgaatcattcagttggtgtacaaacatgccttaatattgtcattaaaaaagaaaggaacagcaaaaattttcccgtgaattcttttacctgtcaggtacggtttcctttctgtgctctccttcgtaacaatcataacaatctctctctctctttttttttttttttttttttttgagacagggtctgactctgttgcctaggctggagtgcagtggtgcaatcacagctcagtgcaacctctgcctcccgggctcaagacatcctctcacttcagcctcccgagcagctgggactacaggcacgtgccactgtgcccagctaatttttttttttttttaatattttgtagagttggggttttgccatgttgcccaggctggtctcgctcctaggctcaagcgtttttccccctttggcctcccaatgtgctaggattacaggtgttagcta

SEQ ID NO: 130730 - DNA, 1040 bp, Homo sapiens
cataattctaaagatgtttaactaatttagagattctacaaggaaagcctctaacatttttattaaattcaattcttagttctaatgtttcctttcgtcttataggcccttatgatgggagaacctttctttgattgccagattgggtttgttggttgcagagccatgtgccttaaaggaattatgggtgttaaagattttgaagagaatatgaatagaagtgaaactgtaagtccgtttcctccatccttttttggataggatataggaataattaagtgcttactgaagtgtttaaccatataatatctgttagactatatatatctcaggcttgagagaggagctttactatttctccctgtgtttcacctgccagaaattatagatctcagggaagtttagaaagttggtagcgcctaacacctggacagtagttccaactactttcttattcatgaatctttcttcttttttgttcatggcagttatttggagtttccttttggtttgtaaaaatgatctttggcaaaatagtcaatgaaggtggagcagcagcattccttatctttctgttttagtgatttcttttgactagtaaatgggcatcataaaatcaaggttttattttgtttaacaggctaatggtttttcttcccatttataaattttgcatttgttttcaggaagcctgtttcttcatttgtggtgacaatttgagtacgaaaggtttcacataccttacaaattcattgtttgattaccgaagcccagaaaataatggtactcgcgcagaatttatcttggattcaactcatcataaggttagagaatatatatttgaaccaaattctaggctgtgtttgggtggacacattgtatgaatacttgtgatttctagctttcttttcaaataatgccttctgaatgctaattgtttattaaaacatttagaatgcatttatacagtatacatgtagaaatgtttgaggagtgcacagagatcttttattgaatatgtaaacatattttgcttattt

SEQ ID NO: 130731 - DNA, 1049 bp, Homo sapiens
gaaggtgatactaatttttaattaaaaagaatgtgttgtatcaatcagaaaaatagaaaatcttccagagactttagatgtatatattgtattattttattatgtaccttattattgtattattttctattttttggaaataaatgacgtttaaaacatttcaacacttttttttttacttctatatcaatatatgatgtacttactatttcagtcttttttatgttgaaaagttagcgaaaataggttcacagttttttttggtgaatttttcatgttttataaaaatgatttcagtgtattaggtgatatgttaggtacagatgaatgcaatgaaaaccaaagcatttcccaaagagccaataggtggtgttgaactaggcatttaagtaaatgattataacgtagcatgttaagaagagtagtatagagaactagaagtgtgggtaaaaaaaaaaaaaaatgacaacttttgcttgtgagattgaaacttcgcagagttgatcttgaagtaaatttgtttttgatgaagaaagaaggaaagagcagtaaatttctggcttctgcttttggaatggtttctaaatgttgatgttttcattggtcaatccttaatttctttccctaaactttctcccaagttaatttcattcttttccatggatttaagtactttccatatgttgttgatactcaaatttgcattttatagtccaaagttctctaagattcagaattaaatatccaatgcatacttgacgtttttgcctctgtgtctttcagatatctcaaaactgattttgtccaaaattgagttattaataaatattcctatgaccacttactacctctgcttctttatttttaggcttctcttctttgaaaatcgtactatcctcttcttgttgctcaagccagaagcctgggagtcatcatgacacaccttttccctcgctcctagccatctggtccacagatgataacagtggtatcactgttaccatatggactagcatttagttcatatgtaccatcatctctagattcta

SEQ ID NO: 130732 - DNA, 1576 bp, Homo sapiens
attacaggtgtgagactatttcttaacaatttttaggagtttttaaaatttttgtttttaatatgctgtggatacaagtccctcatggagctggatcttccccctccccatctatctgtagcaaatattttctgtcagtctgtgtcttgcctttacattatctcaatggtattttactgaccaaaagctgttactcttttaaagaaagaaattggggatttcttaaagatatattaaaatgaaaaactggtaaatttttatataacaaagatacatttacattcgagaatagtgcaacttatatttgttaaaggtaacttattattttatacctgcttcattgttgaaaagaaaaacaggatttgaccttatagtttggagaactaattcatttttcagttgtttaagaatattatttaaaaatattctttattaattttttatcattttaattttagatattaaggatgaaaatgaaacaatactgaatcctgaagaggtggctcttctggaggaatatattcctactcgacatacaagtgttactctcctcaaatgtacctgcacaatttccatggctgaattcaacttgctggaccatttactacctgtcattatgggagaaaaggtatattttgtgatttgctatattttttttccctcatatatggatttttttttttttttttgtcatttactgaaagaatatctgcagccgggcacagtggcttgagtgtgtaatcctggcaattcaggaggctggggcaggatgcacacttgaggccaagagtttgagaccagcctaggcaacagcaataccttgtctctaaaaaaaatttggcacggtggcacatgcctgtattcccagctcttcaggaggctgaggtgggaggattgcttgagcccagaagtttgaggctgcagtgaactatgatcacgccactacacttcagcctgggtgtcacagtgtgaccctgtctcaaaaaaaaaaaaaagaaaaagataaaagtatctgcttatatagttatccatgatgaagtaaaagcaatgtaactatgaactaaaaattaactgttaatttttaaaatgtaattttaaatttatatttttaataaaataaacttaatcttgagagtgtataaagaaatgttgaagaatatgggcctagaagtcagaccatatgccagctataatgccatagacaattactttatatctctaagccctgattttctcttctcaaaaagaaaacaattgtattttttcaagcagcctgactattttagttttagccagtaaaactgtcagcctgcctagattcagacagtttattacttacatagacagcagaagcaaagtcagtaatggtgccagctcccctgtcccttgttctataggacaacctgtaaacaaagggccaaatgacttctattggtacatggtggggcaccctgttggcaacaattcagtttcacactgcagctaagcagtggtgtagcttagcgcatatgtggaaagcccataactcagctgaatgaggaatgctgatgagaaaatgtttcatggccgcctctct

SEQ ID NO: 130733 - DNA, 1029 bp, Homo sapiens
aatttttcctctttttagtagtatgacatttcataccttaatatatcggtgtgtgtcttggttttcccatttgaaaaactagtataatgatagtacctccctcatagagttattatggaaggattcaacgtgttaacagataaaagaaatctagaacaatgcaggtttgctagtaaatcctttctaagtgttaagaagcactatttttatttttactcaggatgattgccttgattatgtagtaattgcttgagcagtatatgtgtaggtgaatatgtgtgtatggacatcattctagtttgtatttttatattattcagagtttctgaaatagtggaacttaaagttagcagaattgcatatctattttgtttaagtagtatgtttgcatacatactttggatgtataccctttcttcccttgcaacctaagtcatttagtattttgttgtctgtaaatgctatttactgtattgcgattctttctgttttcttgtgcaggaccaaaagatctcagattgctataactgaaggtatatttgaacttccaaatctcacaattcaagctacaagagcacagacacttctcttgcaagcaatatatcaaagttggtctcatcttggaaatgtcagctcttccgcagtgattgaagctttgataaatgaaatcttcctaagtataggtaagagcacagtctttttgataactatatggaaaatttgtgttagaggcaactaatattttattatgaaaatccatatgtctagcatggtcaacttaaattgtaatatgtttctttgaatgtagatatttatagcttatgtttaaaatccagattatgagttaagccatccagttttatttcctcgtacctatttctgcatatgtttcataattgcaaaagattatttttcaccagcttcttgtataatttaccctttggataacttttgagggtatcaatgtatgtgtttgaaatgataaccaaattaagtataagtacagtatgtttgattatactggtaaaa

SEQ ID NO: 130734 - DNA, 1052 bp, Homo sapiens
tagcctgaacatttgtgttagtaagctcatgaaattattatttgcttttataatttttctttttcctagccaaacctattccatttttacttttctgaatttataaaatggactgtgctatgaaaaagcattttatttgaaatttcctattctaaaaatattctgtgtttaaaagaatggtggcatatgtattgaaaaattgattaggtaagtgacaacagattgttatttgtaacctcaagttctgtcatttagaaacctaaaattagtggaactaatttttgcatattgaggagttgaagaaattagaatgatgttaagacatttctttgccaaataattttatttttatcaaatggaatgcctataaaatttataacagattaaagagaaaccatcagctaagacagttttaaaaagccagatttccaggtggtcagttttcttgtcttttttccccccgagaacaaaacctcattctgtgctttgtattcttatggagtgcttaaaggattgtgccttcaaatagttctatctaaagatccacgaaatgtgtatgtatttagggtgtaaagttttagcattttattattttgcgtctgaggactctcattacatagtactcagcactgttaagctttgtttaatatgttttgtgtaagtatgtgatcctttgctttacaactagttttcatttcccacattaataaagagattatacaagctgtgtacatttttggatctctcagacttaggttctgataatgtgtgaaagaagaaccattattattatcattatatatatttttttgagatggagtctcgctctgtcacccaggctagagtgcagtggcatgatctcggctcactgcaagctccgcctcctgggttcatgccattttcctcccgagtagctgggactacaggtgcctgccaccacacccggctaagattttgtatttttagtggagatggggtttcaccgtgttagccaggatggtctcgatctcctgacctcgtgatccgtctgcctcggcctcccaaagtgctgg

SEQ ID NO: 130735 - DNA, 1005 bp, Homo sapiens
tcattcctgtttgcaaataagaaatgtgtatatgtttcacttttactaccaccaaaataactgtatctgacctgaattaaactgttactgatttctgatattcttataaaatgcatgtatataattgagttccagttttaccatttctttcattataaattgtgatttattagcgagttttgaaatcaacttcattgattactactaagaatttgaaaagactagaatagaaactttgtgcctcagtcttctcattctaaatgttggactaatgtgccaccaaaagcaataacaaatttaacttcaagcatcaaaactgcaaagtgcttttagtaagaaaagtttttctttgataaatgctatatccaaaagtaagagataaattttgagtgttgaatcagtcactaatttctattttgtgaatgagtttaagaggctttaagagaatatctgtggatgttgaattatgttttatgatgctacaataatgaatccttcctcagctcttgcaaaaatcaaattaaaagtatattaaaataaaaaagaaaatgttatatgctagtgcttgctagggatttgattttgtgcattgaattatagtaatctttatgttacatataaatactggtttagtgaatgtcttactatttctgttgcgcattattttcacttttcaactattgacacttaggaaagatcactgaattggagtgtgaagattttctcaataactatatatgactaaataaaggtcagtttgtttcattaagttttagttaattttctcatctataaaataatgaaaatatgtttatagctgctcatagagttcttgcaaatgccaaatatattattgtttgtgggcttaatctgttgttcttgtcctagacatagaccttgctggaatcatccatctaaagatattacctatggaagttgttctaggatataaagttcttggagactgagataacaacagtcagaattgtagtctaggtgatccgt

SEQ ID NO: 130736 - DNA, 1042 bp, Homo sapiens
tctcctgcctcagcctcctgagtagctgggattacaggcgtctgccaccacgcccggctaatttttgtatttttagtagagacggggtttcaccatgttggccaggctgctcttgaactcctgacctcaattgatccgcccgccttggcgtcccacagttctgaggttacaggcatgagccaccgcacctggcccagtcgtgcaattttgatggaagtgactgactaaatttcaggcacgggctgtgactggctttagccaatcgaaacattcccttcacctctctccttctatactgattggttgagaaacctaattgaggccaatggggttgaaaaacctaattgaaaccaatgagatgtcacagggtgttgctgggcaaattagaaatcatcttccttctgaaaccatcagacaaataggctcttttccttggaaagtgtgctgtgagcctatgagatctgcaactgttgcaatcattgtgttatcattacattacattatagccacaaagaagggaagtctgaggaagacaggtggaggaaggcagagctgagaaatctcagagaaatagagtcagagaactgataacattgtgaatctcagatctatctctgaactctgcattaccatatgatttaagctgatctaaggtggtctttttctcttcttcttccttagtgctgctcctacttttatttccatcatgaagaatcttaagtgatatagtttgtcaggataaaacccaaacttctgagcatgaaatcaaaaggtccttatgatatgattcttttctaccaatgtatgtagctccattttcagaactactactctcccctttgccttcacatctcttatatttttgatgttcttaaccatatcaaccccataaagtttctaggctaagtcacgctttcatatgcctgttttcatatacccccaaaatcttattctttctttaggattagtcttagtaagtatcctctgcaaatacttctctccctcatttaagcagatttgattattttctcctttgtgaaat

SEQ ID NO: 130737 - DNA, 1306 bp, Homo sapiens
ggcttgaatgtgatttttatttgatatatgagctgtgacataactgttgcatgactgagatgtgcttgtaagtgctgtactatgcagatgggttttttttctgaaacaaagccaaaaataaaatcttgaatgtgttcatgtagtgggaaaagaatacttcatagaaacatatggaaacatttctaagtttttttcattatatgaaccttttactttctaagcatttttatgattgttcaagttaacatgtcatttacctcatattttccaagtttagtgagacatgggaaatcttatagtactctgatgtttggaaacaaccagataatttttaggaatgcacattttaggattaggtgaaatgattattagaaaattaggattgaataatgggtttatttttcattacattattaatcataagactatagctaattaattatattaatctgatgggatttgatgaggagatgtattgagtggtttctttttactcacttttaaattaaagcataggacaacattaaaggaaatcataaaagtaaaaagatacaagtatagcatgactgtttttaattctccacattcccttccaactcatgtcttcgtatatacatttttacatgttttttatttattatatgtttaccattttatgttatgctcttcttttcataacattatgttttaaaatttctctttggtggtcacgtaccactctgattgtctctctcattgtgggaagcatacaaatagaaaattttcttagattcaaagttcctcccaaggtctcattttatcttcctcttttctgtcacagagaaatgacttagaattatgtacatgttgcctctccagttagctttgatgctgagtccggtgtatattttgtagttctaacttcctgactctgtatttgacatacgtagaactctcttctgatttgtgggctcttctcctttgtctttttatcgttgatcttaagagaatacactgagtaatctctttctcctgtgttgcttcagctacaacccatacactgacaactgcttcatttaatgctgtagcccagaacatcttcctgaaactgtgacatttatttgaatatgccaaggtatctaaaactcactatattcagaaggaaatttaactcttcttttcttttcttttttttttgttttttgagatggagtttccctctgtcgcccaggctggagtgcagtggcgcgatctcagctcactgcaaggttcgcctcccgggttcacgccattctgcctcagcctcccgagtagctgggactagagg

SEQ ID NO: 130738 - DNA, 1024 bp, Homo sapiens
ttaaagaatactcatcctcagcatttaacttttttctagatgacagtattttgggcctagggatactgatgtaaataattgacacagaattgcagataaagagaggttctgaggttaagaatcagttcagccagagtcaatctaaagcatctaaggctactaggaagctttaaggagccatgaatcatacttcagggacccaacagtaatgaaggtgtccaggttgaatccaagcattttctgtttatagttaaacagaacaataagatatgcaataatttaaagacattaaataattataaaggtttcactctttcctcctcatttactttatttcctactttagatggtattttggtggctcagttaaaataatacttaataaagttaggcttcatgtagaggggtaggatttgtatcagattaatgtaacttctaagtccctttatgcattccagataagaggaagtgtgaaccccctgatgccagagactgctgtttcttgattactaactctttgacctcaaaattcaatgaagtttagtatattaggcatagtgcattcaagctcattttctaagttatctttcatgttttgtcaactgccaggtggactctgggcattttttggggaaatgtggttaaagcagccataattatcaactgcttgaaatacttacccggtattttaaagaatattaataaggcctcatttaatttggttcgcagcttttagatgattgtacagtgatcatgatcatgtcttacatttttatatattccctagccatttaataatgtacttgagaactaaatattttaatagtatttccttacagtctgatacagcagcaatgttaggtagttaaatgttgtctactacataatattgagctcaattagcttgaaatggcaagttcatctaaagtacatatgaataaaagggattataagtatagtgaagtgttacatagaactggtaaatattttaagtatatgtactcattatgatttctaaatatta

SEQ ID NO: 130739 - DNA, 1583 bp, Homo sapiens
gatgcggtggctcacgcctgtaatcccagcactttgggaggccgaggtgggtggattatgaggtcaggagttcgagaccaccttggctaacatagtgaaactccatctctacaaaaaatacaaaaattagctgggcctggtagcatgtgcctgtaatcctagctactcaggaagctgaggcaggagaatcactcgaacctaggaggtggagatctcaccactgcactccagcctgggcgacagagcaagactctgtctcaaaaaaaaaaaaacaaaaaaagattatgagctctgattatcatcagttttgcacatatttcgtgtttgttggtactttaggcaatctattggtgaattagctagatatttttgattacctttctatttcttgcctaatagatagtgaactgtttgagggcaggcactatattttatagctctttaaaatcctcaacccctaatatagttaattttgcatagttgggtgtaagtaaatgttcgttaattgactctagttattggcctttggttattgcatgaaggtaccagtaagggacagtgtggagcttttgctttgtgcatgttcaattttttttttaactccttctattaaaatagacattattgtattttagaatattaccaagtcatcattttataattatagaaaatcccttaattttttccacttctggaattactgtcaaccttcattactcattgtttgtacttaatgtttagatctaagctacaaaacagcataccatattttcatcatcattactcttttaaaaatttgccttcattccagtttcagggagtttgggcaatgcctgtgatatttgtgtcttgaaaatatctcagtggtctgtcagatatgaggttgatccaattttaataatagttttttctacttcctgatctttaatgggttgaaattatcttggcttttactggtagtgtagtcataataattttttaattgtaggtgctcaagagagaaaacagacacaaagtgttctgtattggttctatattattcccctggaatgatgtgtttaactagttttcttttaaactatcaactacataaattttgttcaaggctggtgtcttagcatttgcgttacaactataagtagtacacatacatgtcttctatattcatttagaaagatcactatcttaaatttttttttcatttcacttgttaaatatagtgaatatgttatttggggcagggaaaaaaataaggcaatcaggcaggttgctgacggcagtccaaatggctgatcagagagtctttatatgcattggtaatgtgttgtgcaatataagctgaaatatattccacaagggaggaaaacggaataggttacatacactgttcctaagtgcaatgaatataaaactccattactcactttaggcaggtgctttttatatgaggctttaaagtaatataaaactgctggtgaaatgattggtttatacagacaccacttagcttccagtgctctaaccagataaagagactaaaactattaagatatttctttaatgattcagggattgatgtttaa

SEQ ID NO: 130740 - DNA, 1037 bp, Homo sapiens
agataacttatgataagagtcttatatataacatgtatgagatattaagaaatacttattatttatgattcaaggtagagtattaagttttggaaactgtaaaagaagccgtgttataaaataattctaaagaaactcatttggtctatccatattcttttgctcttgtatataccggaaactaattcagatttttggttctgaacaccatcaacgactctttagagaatcttttagtagctcttgtttgctgactactatataggtttcctgtatttcttttgaaaaaattggtattgaatgagagtttgacccttaaggcttgagagccaggggagggaaggctattattaagttctgtttctctctcatcatctaacatagtgattggaacagggtaagttatctattgattatagctccctgcaaccacagtagatgttaaatagagtagctcagcatcctttgttataaagaaaaatgagatccaggctttgccactttctgacttgggcctttgcaaaatccttatttctccaatccttttttaaatatatatatagaatgaaaatagtaatagctcctaaggattattttgtgtttgccgaataaatgaaataaactaggcatcatgcatggcactcagtaagtgctcagtgcatgttaagtgctatgattactattattgatactactgctgctgcttttattgctgctgctgctgctaccactaactactactactactactactactactactactactactactactactactacgatgatgattgtattagcatttttggcatcatttaattttctgagatattaaaatttcctgagacatgaattttgagaatctgttaaaaatgctttaaaatgcataaatatacagcattttagataccatttcataggtgtaatgaactctttaaagtgtgctctagaccataggtttagaactccttctcagaggataatggataccacttcaaatggacacaattcaggtggcaaatattggaaaatag

SEQ ID NO: 130741 - DNA, 1023 bp, Homo sapiens
aaattcaatcggctagtacatttgcagttttcttttattaggtgtgaaatctaagaatcccctgccaactcttgagggctcaatccagaatgttgaattgaagtactgcagcacatcattggtcaaatgtgcctctgggaccatgggatcaataaaaatttgtgccaaagccccaggtatgtgcagctggaccgtgtaaaactttattgcctgtataggagaattggccttgcgttttacaaggagcgttactgaaacaagaatttactcactgttgctatgaatcagacgttttaaatttttacttagaaatttttctaattgtgccaggatggtacttcttgactttaacaaatttttatttagggaaaaatacttagttttatgaatggttatgagggagaaaaattaaaggaatgtttattatactttttgggggaataggaggtgtatatatatgtatataatatgacacttaaaattaaattaaaaagttgttattgtaatataattaaataggagacccagttgtttttaaattttggttgtaaatgactttaccttcctaccaatattttatttcataatatattttaaaaaccatttgtgatttttttcagtgcaaactaaatttaaggtaagtttataaaagtccagatttcatttaatttttagaagacagtgtgtttagttgtttccttttataagcttttctggacatgttctgcattcattagcaaatatgaaaacttaagagttaaaaatgctttacattttatgagactcagtataattaaatgtatagctaatattatcaaataaagttgaaatgttatattatggtgttagtatattttaaaatcaaacattctcaagtgactcatgttttatttttattattgttttataaatatttcttttcagttgatagtggaaaagagaagttgattcccttgcttcagggtccttctgacactaaagaccttcatagcaccaagtggctcaatgagagtagaaagccag

SEQ ID NO: 130742 - DNA, 1060 bp, Homo sapiens
cgaaaggtgtggtaaactatttgccatatgcattttaatttttttccccaaaaagtttaataaatatcttattgtaaaaacaatattttcaagtactagaaatgtcaagttctagctaggatactaactaagggaatttatagatatttaaatacaggtgtatatttaaatgtttacacaaaacaaagcatatgtatatgtttaaaatattttttcttttttcagatcatgaaattactttgtgttagttgattttcaaatttatctttattaaagcaccaccttgcagtatttctttgccattctcctatttttattgctctacttttttagcataatcattcatttattcatctaacaagtatttattgcctattttttgtgcgtagaactataacgatgcatcaaagtctctacagtgaatcaacttctaatgaggagtaagcatataaacaactacagctgaataaatgaatgatataaaggcttattttttgggttcagcttcatccattataaattatgttactttgagcaagtaaacctttctgagtattggtttctttttttctttacttttttttttgagatagaatctcactctgtcatccaggaaggagtgcagtggtgcttgcatcctctacctcctgggcccaagagatcctcctccctcagtctcctgaatagctatgactacaggcatgagctgccacacctggctaaatttgtgtgtgtgtgtgtgtttttgtagagacagagtcccactatgttgcccaggttggtcttgaactcctacgttcaagcgatctttccaccttggcctcccaaagtgctgggcttataggcgtgagccacagcacctggcctagtgttggtttgtcacctataaaatggagatactcttatctgcttactaagattgttgtgaagattaaatactgtatcctcaagtacattgtaaactttaaaacataatgtggattttaagtattaattattcttttcacaatagtaccctatattaaccagtgattgaaaatgtaaggtttttctgagtcat

SEQ ID NO: 130743 - DNA, 1043 bp, Homo sapiens
tagttaaaaggctttttttatatttatgctttagaaactagcataggcagtagtgtggatgaggataaatgacaggaggccatgagaaaagttaggaatatgttgcagtgaaaaaatgctaatgtcaatggagagaattacacagatttgtggaatattaatgggttggaattacaggaggtgattaattgaatatgttggccaaaagaaagagcacagtaggcaagcacccaggatgtggatttgaagagctgggtggacaataaaatgccttttactgaaatgaggaacaaagaaacaagaaccaagttttctttagggtaatagaagcaatagatgtaataatactaatagttctttctacgtgccaggaattattctaagcattttacagagaacataggcagtttgaataaagaactcatattcttcaccattacgtgaaacagcacaggctatggagatttcagactctagataatttatgattcaattcattgaattctatttactttaatttattggctgctagctgcattctagaggctggtatagaaagttactcagtacagggccctggtcaagtagtctatatacacatacaactaattctaatttgactttcacaaatgatataattgattgggagagaagttctgctatccaaaaatagaggaaaaagagattaatttgaattgaagaagggaggactgaatgatattagaaagatctctcaaggaaggattgatatttaagccttgagtgataaaggattgcacatgagtggaaaattcttattttagcattgcaaatattttcaattagcttacattgttttcttttaaatggtaattattattggatgaagacaatattcccataaaagtaaaaaatatataattgttgttaaaaagtgtttagtacatatttgtggtaaggtaatttttcctctacagtatttcagaatattcagataagtataattaggaatcatatttaaaaattttaaaagattgtagaatataagattggattgttattgc

SEQ ID NO: 130744 - DNA, 1571 bp, Homo sapiens
gtactaatcaactctgtcaaaaattgcctgtttctcacttaacctagttatatcaccactgtatttttaatactttttgttaatgctgtttatttttatcagatgactattaagacaaaagttttcgcttatgtttggcgcattggttgtaataaatgtgaagtggattctttaagtcaatttaagggcatctggcaactaggaagactaatccttggagtgaattaagggcatgaagacaaggacctgtcatttataggataagaggtcagtgaactatgtgggcaggataaatatatcaattagggagtttccctgagagtgggcaagaggctaagaatctgagtcaataggtcaggaatatgtagacagtaggtaaaagacatatctagagtgccagatggactagtgaggtagaggttatatgttttcattatattttaggggtatttgactattaagtgagaaaataatgctgtttgggggaagctggccttggaaaatagtgcattcccattagaagttgatagaatatatacgtagtggaacatcttggtcctggtagtgggatactaattatgtttattgtattaaccctatttgattcaggattgtttttgcctacaaataacttagttcaaactaggtcttaacaaaatgcaagagactaatgttcatatttatttagtgaataaattggagtagttttctgtgctattggtggaacaaattaaactttcactggttgagggcttacacctacacagtatagtgtgggaggatcatcagccagtttgtcttattgttttattggcagcagaaaactcttaaactgtgttttcccatggaagaggcatctcacttgaaatctcagaacttatactaaaaaatttatgaagtgggatgatagtgaattacagaagagtcatcaaagaaagtatgtgattaactgacagtttattgacttcatcctcagggccaatttaaagaaaagtgaggcagagttagatttcaagctatgctttgaatgctgtgtgaggtctttttgagctttttggttaagctgtaattaattaactcgattaaacaagtattactacatgaataaaagtacacacacggatttttcaaagaggtaataatgggttcactgctgataaaactgtggatctgagtttggttaacattaaagagcactccaaaattcacctgttgttttaatctcttgatagagaatggtaataattagggttctatatatgtattctatatcttttaatatatgtctatctctgtatgtttgtatatatttatttgacttcagagaaaatagcattaaggtttccttttccttttcaattatattttaaaatgttaacttttaagttagcttgaccctttgaaaaattgttaaaaattactgtcctcaggctttacaacttgtacagttatataatttcactcacagatatgaaagcaaagaaatattttaaagtcttctattttcaaatgcttcctaagaaagatgcttccagtttatgaacaataaaatgaaacttcataggtagaac

SEQ ID NO: 130745 - DNA, 1064 bp, Homo sapiens
aagaaaagaataaacaaatttaaattatggagtaaggaacttcaatataagaaaatatcctgtcattgagagtaacttacatggaattattattttttttatttttgggatggagtctcgctctgttacccaggctagagtgcagtggcatgatctcagttcactgcaacctccacctcctgggttcaagcgattctcctgcctcagcctcctgaatagctgggactacaggcacgcaccaccaagcctagcagctaatttttgtatttttattagagacggggtttcaccatgatggccaggctggtcttaaacttctgacctcgtgatccacctgcctcagcctcccaaagtgctgggattacaggtgtgagccaccacacccgccctacatgaatttctttatgagagaagggtcttattactgagattgttcaggtgtgttattttaaggccaaagaaagtctagttattgttaaaattaggggcataatgatgtaatgtagtagctctcaaccctatcaaatctaatgcccctttttgtaacatgtattttcttatgtccctttactatcttgaaataaaattcataattgtactttcctaagcttatgatttatgaataaatctatataatataatcttattaagggagaaataaaaggaaagtaatttataatagaagcacacatttttatatttagagcataactagatttgaagacatgatgaggtgttcaggtaagatactcagcctgccacatgtattgtaccgggacagttacaagtcttgcctgtgtatatgtgttgcatattggcaatgaatatcctcaaatgaaatagccgtgagtgatgtgattttctaaaatggtaaacatgtctttgtcaaatgcgaaatgatataaaattttctcctatattgctgagagatagatttctggagctttctgggtctattaaaagtgggtgaaaactgctttgtatttagatgtaaaattgagttagagtctaaattcaagtaattatctacaggtttttaacttacatggaaatctgcgagaata

SEQ ID NO: 130746 - DNA, 1082 bp, Homo sapiens
tcaggcttatttcacttaatataatgttttcgagattcatcagtgctgtagcatgtatcagtacttcatttctttttatggataaatacttttccattgtttggaaataccacattttgtttattcatcaactcatggaaatttatattgatttcactttttggctgttacgaattatgctgatatgagcatttgaatacaagtttttgtgtgggcataagttttcggtgcccacatttcctcaaaaagacatatagttgcagtatgacccagttatgccatagtattttccaaagtgggtgtaccagtttacattcctaccagcaatgtatcagggtttgcattcctccacatcctttccaacgcttgttactgtttgtctgttatgtcatagctatcctacatggtgtaaagtgacaaatagcttattgttttttatgaggacttatgtaacagtttaaaaatcttgtcttttaggtgctgtacttctttgcagtatacaaggactagcagttaatattgacccaatcttatatacgtggctcatctatcagcctcagaaacgaacaagtagacatatgcaacaggtaagagatttttaaataattttttctgttaacaaatatttttcttattcatttagtagaattatatatgtcttttgatggattcttttttaacaaatgtactagatttcctttgtctccccaccttacccctttcaaacaattccgttcccttatttttgtatgagaaattgcatgtcagtataaagtttctttgattattaaaggggctttctgtacaatggcttacaaaacagaaactagtttaggagtcctatttcaccagtcttcattctttcatagtgtctacatgtccattctcatggtgtgcaatacataagaattgctcagtaaatgaatgttggcttgtttgttttgttttgagacacagtttcactctgcctcccaggctgaagtgcagtggcgtgatctcggcccactccctggttcaagtgattctctcgggactacctcccgagttcaagtgattcttgtgcctcatcctcccaagtagct

SEQ ID NO: 130747 - DNA, 1023 bp, Homo sapiens
aaaattatgttagtgatcagaaatggaggaggagaaaccagagagttcatgaaagcaaaaaatgcttagaattttgaggagctactggtcagcaatgtcaaattctagatgttaactatgtgctttacttgcttatttgtagtataaaatggatacattaaataatatttaaggttacttccaactctaacattattgtatgattcttttgcttattttataatgttgcagtaccttttagcttcatcactaacaaacttaatcttatatatcactttgaattaattgtaagttatgatagtgattttcctcatttttccttttttaatctctaattatggtaaaatacatataacataaaatttaccttccttactatttggaataaactatatggtttattttgtggttcctcaatttgagtaagcttattgagtatcagttaacataatcattgcagtaccaaataatacatctttatataggttatcttatatatgacctaggtacttggcttgcctcaccctagtcctggccctgtgttaaacatactatatatttaaacatttccagatgttaatgtatcatcaacactttaaaagataaaattagattctcattaaatgattacaatttagactgtgaaaatctgagttttatttattttatcttattttatttttttgagacagagtcttagttgtcgcccaggctggagtgcagtggtgtgatctcggctcactgcaagctccgcctcccaggtttatgccattctcctgcctcagcctcccgagtagctgggactacaggtgcccgccaccatgcccagctaatttttttgtatttttagtagagacggagtttcaccgtgttagccagggtggtctccatctcctgacctcgtgatccacccgcctcggcctcctaaagtgctgggattacaggcgtgagcttttatttttaaaaacgttgtccattttttaagatgttttatgagccaaaatataaaacagaaaaccctgc

SEQ ID NO: 130748 - DNA, 1032 bp, Homo sapiens
ttttttagggctggcactatgtcttttgtctctgtattcctgacttccaggtcagttcatgatagatattagagagtacatgaataaaggagagaaaaagtaatgaaatgcaacatacaatgttcctttatttttgttttttatttgaaactctttcctgaagagtaacatacacttatatagagaacatttggtactgtagaaattatgcaaaatataattatcactacattttcaagttgtaaataaaaataaatatattatttgggaataggaaatagttatgttattgaaaagggaagaaaatgtggcacaacatttcaaagcttttatctataaagtgctttatatgatgggcagtggctaattaagattttcagattaatgggtaaataaaacctatcttagtctcttctttttagctgaattgggatcacaattatagagcactaaaagagaaaaatctaagtttctcaaacctcacatatagggccaaggacttacagaggcatatatctttcaaatagcacataaactagaaacttcagggaaaaatgcattgcagtcatttcatttattaaaataagaataacaaataatttttactttattggtttatcttcagtatatgatacttagatatgtagcccttgacctagtaggaatcaaaatagaggtggttccacttcaagaatttgtaataatcccttcactttaacacatgaatgtgttcagtattggcaaaagaacacgttgctaccaaaactgaaacaagatccttgaaacagaaaggatgttgccatggaaaaatgaagtaacactcagtgcagctgtgatgcattcatgaataggatatttttttaaaagatcatttgtgtttggtgtggctcagagggtcccaaccagatggtttccatgaacatgatctgacccccagcttgaggacttcttactggcagattacttcattttctttcccttggattgtcagatccttacattaattcagaatttactgctgcagatttatat

SEQ ID NO: 130749 - DNA, 1166 bp, Homo sapiens
gatttttaaaagctcagatagttttatcatgtaaatataagctaataatctgaggttagcttacatttcttgtgttacttgtattaattatgtatctggggaacactttgaaattgcaggtttgatttttttaaattacaatttgcattcaaaaacaatcattaaaatttttaaacattttactattaaaacattgtttttcttgcttagttgggtcaaaactattgaatatagagaacttactgtaaatgaatctagtttaagaaaacacattctagggaaagcattaggagatatacctaatgtaaatgatgagttaatgagttaatgggtgcagcacaccaacatggcacatgtatacatatgtaacaaacctgcatgttgtgcacaagtaccctagaacttaaagtataataataaaaaaaacaataaaaaagaaaataagctcatgaaaataaaaaaaagaaaacacattctaacaattgtttgtattaaatggaaatatttgtttatatgatccttagatgatttatactttaaactatgagtaattcttttcatgctgacatgttgatggggagcactgtacttttgtgcacatatagctgcagcttcctgtgtttcagtctgagtcatggtaaagtgggaaatatgagtttgaagcttaagtactgagcttaaaacacttaatcattttttcccactcttgcattgaaatagtgggagcaaaggtagttgagaccacagcaggccacttgttactgttgacttaagtacaaacagtggtcgaagtgtttagccctttgggaagttttgtaattgaacaagaatgcaggagttattttgataagatagagtagcaatggggccaaaactatgatcatccttaagctctgaagcaggccaaggatgaagggatataaagtgtttgctcttccaaataaacaaagataaattcacctaggaaaataaacttagcatttggtcaatttgcaacaaaatggtaaaagaattgaactgtttattttagaacttggcctaaggatgtatgggaaaatagttcagcatctccatttccggcctgattttcacaacagatttggaaacagagcagaaaattaatgcacaaacatgtttaacaataccaaacaaaatgctgtaaatcc

SEQ ID NO: 130750 - DNA, 1050 bp, Homo sapiens
actctatagaaggggtagacaaatatttttctgtaaagggctggttagtaaatacctttggactttgtggattgtagcttctctgtagcaactactcaactctgctgaaaagaagtcatatgcagtcagtacatgaacggatttggctgtgatctagtaaaaatttattccccaatacagacagattagccccttcactgtagcttgcagactctactctataggaacatactcattggtttaatcttaaccttttctagatcttaactacttttagaggaagctggaaacatgcatgtgctttctaacaataaaaatcatttgagaagtgtatgtttatacattagcattatgtattggtattaacatttatatgattatcatttgcatgtaagatgtgaaaaagttacaaataataatttctgattttaatttataatttgtattttctgttatttttgtttatgttacaaagtaagatttttttttctcctcatcccagggagattctatacaagcaggtgaggaatcaccattctcagattctgtgaccttggaacaaactacaagtaatattggaggaaccagtggacgtgttagtttatggatgcagtgggtgcttcccaaaattactataaagctctttgctccagatcctgaaaataaaggcacaggtacaggattccttttctttcttccctccctccctctgtccctccctccctccctccctccctccctcccttccttccttcctttcttttctgtctgtctgtctgtctgtctgtctttccgtctgtctgtctgtctttcctttctgacagagttttgctcttgttgcccaggctgaagtgcactggcgtgaccttgcctcactgcaacctcttccttctgggttcaagtgattctcctgcctcagcctcccgaatagctgagattacaggcgtgcaccacgacacccagctaattttgtatttttagtagagacagggtttctccatgttggtgaggctggtcttgaactcctgacctcaggtggtccgcccacgt

SEQ ID NO: 130751 - DNA, 1031 bp, Homo sapiens
aattcaagtaatttctagttgcagtgctaaaatgttgaatcttattaacattaaaggtttacgtgtacatattttccttgactttgtaatacataaattttgtcctgtttgtattaaaattcatctaaaagaccatgaggaattttcctcaatggtcatattgatacattatagtattgtcactaaaagtattgggaaaatccttgactgatatcaaatataacactccagacattaactgggctttcccctttcttgaaataaatgtcttatcttaataaacaggcctatgctgatttgcttattattctagaagcttttgtgatctcagcgcctctgtacatatccagcatgcatttgtcaatgtgaaatgtaaaatagaaagttttaatattaattgtgaagactgtgttgatattactgcttgtttcttattgcagaggtttgtatggtcagtgaactagaagatctcagtgcttccatagatgtccaggatgtatataccaaagtgaaatgtaaaatagagagtttcaatattgatcactatagaagcaggtaaataatgaataatgaatataagaaaatctgtatttttctttgaacaaagttaccataagactttttctattttaatttggctggttattaaaataaatactatacaggcatacctcggacatattgagagtttggctccagactattccaataaagtgaatatttcaataaaggaagtgacagaaattgtttggtttctcagtgtatataaagttgtgtttacactatactgcagtctgtgaagtgtacaatagcattatgtattttaaaatgtacataccttaatttaaaaatactttattgctaaaatgtgctaatgatcatctgagcattcaatgagtcataatcttgttgctgatggaaggtcttgtcttgatgttgatggctgctgactgatcggggtggtggttgctgaaggttagggtagctgtggcaatttttaaaaataagtcaatgatgtcatttgccacatg

SEQ ID NO: 130752 - DNA, 1031 bp, Homo sapiens
agtgagctatgattgtgccattgcactccagcctgggcgacagagcaaggctctatctttaaaaaagaaaaatagacatagatgttactcttatcgaggagatggaagtaaataatcagccaaataaatacataatttaccatgaagacaaatgttcttatgcagaactgtcagagtgcggtgctaatgtaaattgttctattgattgcattgtcagatttatgttttagttcagtgcagtgttgtgaactttagacttatttgaaatagttatgtatgttcaatttcttaactcagaaaaattgaagagaacagataaggtgaacttatgttttccaggccaggggaaggttggcagtcaggacattttgaaggagtatttctacaatgcaaagaaaaatctgtggtgagacccatttagttactatgatttttgaaaatgtactttaaactgtttatcttgttatttcataaaataggactaatggttacaagaatttgagttcagaataaattcttattagcctgtttcttcaaaattacatataaatttaaagctatttattctttgaaactgctcctgttttgtaaccatcttcctgttataacaattaagtaaatttatcaaagaggcaaaggtaggcttgcttttgttaatatactttatctttaatgtactattgtgttgactttttggaattgtttcccaattcttatgtgagtttatgctggattgttctttaccataaactggaagtagtaattttatactaaaagcaattattttttgtttactttcattaacattgcttttgcagaagatggtccaggcagaggccatacctagcggttgctcaaacctaaatttatacaaacttgaggagaatttaaaactatccagatatttttttgcttatggcttttattgctttttgtcttttcaccttctttgctcctgtccatcacttcaagccttggggaagagtgttggtctttggggcaatgtggaggtgtcttcctttcctgtactg

SEQ ID NO: 130753 - DNA, 1050 bp, Homo sapiens
gtcacttgcatgagtacagactaattttacctcaatataaggaaatcaaagtaggacattcattatatttttttaaattgtgcatgtattgaatgatcaagagttgaccaatactgcttttgtcattcctcttacgattcttaataagattgcctttaaaaattttttttctattattatgccattgttttcttacaactaattcaaagtaacttgtgtggtaccttcttgaatctgaacaagtttgcatttctgtcattgattaggtagatgaacacaaggctgtatcagtgacttttagacgtttagaaccttgacttttttaatggtacaacatctggatatgttcttaagctaattcttttaactgatattcttaaagttaactttgttcttaaatttaatttttaatagtgtatttgcatagcaagtgttatgttctgattttattttgagcttttactagcaatagtctttaatctttagtgcaggaaaaaaatgtgacttttgtgttggaggaagtgtttagatttattttcctctctttgaatgttcattagtgtctgtgaaaaacattcttaataattttaacaaatattcataaagaaaccgtaaatttatcgttaatgttcttcagaaattttttctaaatttataaattaaatgccatttaaaaagtttctttacttagtgttttttaacattttattttaaatagtataaagtattattactgtatgaaaaaatgatatttatattacctcaactagtattcactttttgccttatgttaagggagttaaggatgcagcaattaaaaaaaaaacaccctttcttcatgtggcttacctttcaagtatgcttacattccacgtttaaaatatttttccaaattaaaacatttatacattgaaataccttttatactctttacaggattcaaatgttgctattaataaagatttattatgagttagatttttttagattagtggtcagtagtaaccctctccccagtttagacacttagaacagacaacatcactgtga

SEQ ID NO: 130754 - DNA, 1016 bp, Homo sapiens
ctttgacttccagcttaatctttttatttcacaatagatgacttttaaaaatctagcatgtctagaatgagtagttcctcatgaggctcaattttaaaaaatagagttaaagcaaggaaggaaggcattcattttcatgttgaaaatatttctagaaggaacatttcctcatatggtccaactattaaatacaggtgaaataacccaaaaaagagaagctgatttttttttgcggtgataaagtaactgaagaaatgactcaaggcactttcatgtataaatacatatttttattatttttttttacatctcggtgatatattttgataagttgaatactttctataataaaattaattattttaatctagtttatgaatgatctgcattaagtgctcttttttttaattataacttcatagtcagtataatctactgagaacacttttggccctaacagaaacagaattctgttcttggatctggctttgtatgtaacaccaagtacgtcatttctcctccatatttacctcatttactgcaatgtttctattacatttcagactttcatatggtgagtagtatctgtagcctggaagaacagttagcaaatatactaattgcacctttgtggtacggtttattctccaggcttactacgtaattgaggactgctgcttaatcagaggttttacccacatggaactatttgataaggttggcataaaatgcaagacctgtaaaatgtaaacaatgttcatattataaggacccataatcaaaccaaacctctaagtcatttgaaaatagtgcagctgcatgagaagtagttttctatttgatcttttgctatggatgtaaaaatactgtctttactgtgacatccgtatgctaatatttgttatgatagttcatctctttttttctccttttgctgtcccttctcccaccttcctactattttgcctttccctcctcccttcatggttatcttattctggttccttatttctctc

SEQ ID NO: 130755 - DNA, 1046 bp, Homo sapiens
agacaagattaacattcttttattgatgagcttaacatcattaacaattatgtttgtatgcttcaacacattgtgtttattttaaaataggaaaaccattcttttttatggacatgtttataatagcctttctttattcctgatgaatgtaactcaaggtatggcatctctcctttatgtatctttatggtttctcctaaaacctagcttatcatctttaacactgagctgtattttctagatgcagtgttaagattaaattctacaaatccccacaaaactgtttcctccttcctcctcccaacttttaatttcttcctaattatataaaggcattctcaaaataacctttgttttggtttttggcaaaggtatgtttcgtatctggtgacattatgaccctaatcctataatggttagtgttggtttcaaataattcccttttagtaagtcagagagagagagagattgggatagtaggtatttagattaacttccctaaaagctttgtttgaaaatattatcggcagagttttagtgcgtcatggtattctgctgatttagttgaaggctttgcatttacatttggccctcaccaaagtaactgcatcttttgtggcttcctgtagcaggatataggtttccatgaatatggtttctatttactgccaaaagctacctcaacaacagtgttgaaaatgacgataagttctaccatcataaatttttgaaatgttttttaaatgtatttacttttatattgccacttttatactttcttctagaaattcatgttagaagctacagaataatagaatgtttgggttcccatcataacagttttgtgttacgaatttggaaaatctattttatacttctttctaatatattttggttatattaagtacactggatatataatatcttactataaccattcctgctggtgtactttcattgaggcactaacattatcatgtgaaattattatctaaacatctctgagtttaaagacaagtgagagaaagcatagggtacctttaaaa

SEQ ID NO: 130756 - DNA, 1093 bp, Homo sapiens
caacgtgaggagactctgtctctagaaaaaataaaaataaattagccaggcatggtggtacattcctgtggtcccagctactcaggaggccaaggtgggaggatcacttgcgcccaggagattgaggctacagtgagccatgattgcaccactgcactccagcctaggtgacagagcaagaccttgtcttaaaaaaaaatgaattaacattgttcttagaccttaaaaagaaaagaattcaaagactaaaaggatatgcttatgaccctaatgaggtcagcaagacagcagttatcaaatagaaggtcagatattaaaaataggaaatgaaaaattattccaaaaaatagtaagattattggtggtaacaaaagtgatatgaaactatttgcaagaacaaaaaggagtaaaaatttaaaaattaatttgttaaaaagtcctgggatgatactaatatgaaattgcttaattacaccttaatttctcaagatgttttcatcttttgtaaatcttatggaattgaagttaagaaacgatgactgtaaaatatgcaaataggcactctcaaaataataatgtaattttgccatacatgtttgtagtacaaagacttgtacaaatttaatgaaaattgtctttgaaaataatgaaatggctaataatcttttactctatcttttagcatacggcggcatcaagaaaggagagcaattttgacccccgttttgacagatttttctgtccgaataactggagcacctgctgtcattttcaccaaagtagtttctccagaaaatttgcatactgaggttagaacataattttgattttattttagtctaaataatggaattgctcctctttgtatgttagggattgccacagtttcagcccataggacttcaaattagctcattaataataatggctactatcatagctaacatttatggagcactttgtagtactcttcagttattgctttccttgtaataactcatttagtcctcataataatcttatttgctactcctcatatccgtattttgtagatgacaaaactgaggcatagaggagctaaccaagctaccca

SEQ ID NO: 130757 - DNA, 1052 bp, Homo sapiens
agtgaaattaattagtctagctgtctttagcttcaacactccgttttcttataaatcatttagagtatatcctttggagaatattcatactgtggctcttagcaattaattgcctgcctaaaattgtctgtttacatctgtctgcccaactagattataacctcctcaagagcaggttgcccttcaaggccgacattattctttgtgatattcataggactctactatcgtacctagtacttaggaaatgctcagtaaatattagttggtttgaattcatgaacaagattatgctacacaattatattgttgctacatattgaaaacaataataatagttggagttatggaaaagtcaaataggtatgaaaaggtgaagacttcttattgttagttgtgtatatctagcacaaggcccaacacacagcaggccctcataaatatgaaattcatctgttaaattgtgtcaagtggctgtgctcaccatttttgctcttctccttaatgtatgaacttgagtcctaggaaatgtcaccaaagtagtgaaggtcaaataagtaagaatgataaattatcatctgaaagctatcatgtttctttatctgtattctaccgtttttgcttcaggagattttagtgtgtggccattccttagaagtgaatataaccacaaacctggacttcttcctaagtgtggctcaagttcaactcttacatcagttaatagtagcaaatatgactggactggaaccatcaaacaaggctgcagaggtaactgttacctgattttgatcaggcttactgcatttgttccaactttacattcacagtaggaaaactataattaagctgactgctttctgcttaattattctgtgtttaactttattcaaaatatagtcataagtcattttggattgatattctttattttagaaatttgtttggtctctattcctcttatttatcatgtacctttgcaaaattgctgtggactgacctcagaggaacctctgttatatacataactttattagcctgctgaagttcta

SEQ ID NO: 130758 - DNA, 1154 bp, Homo sapiens
agtgttctacagatttctgggaaagtctttactttctttctcctcctcctccttggaataacagtgatggaagtgaccagccacttgtgaccatgtgatgacaaacaagaggagaaaacacagtaaggataacaaagtggacagagaaaatggtcctaagatatcagtgacatcatgcagctactgcaccagccctaactttaggttatgtgagcaaaataaacctaaacagttaagtcgttggtatttggctcactattacataaagccaagcacaatccttactgatcagatgttcttacagtattctaagtctgagatgataaaacccagggaaaatactgagcacacaatggacttcaatgctgaataaatacttgctgagtgaattaataaatggattcctgaattcatagtaattctcatttctgttcctagaagtagaaaaaataagatgtatacaacatatacttcaaaagaattggaagaaattgttggctaactccatgtttgagggagacagataggttaagtacataccatggagtgctttgaatatcagattgaaatgttttgcttaagtcagtgagcaatagagagaagttggtgtttgtgcagctagacaatgacttaaacaggtgtgcctgaaagttcagatccgttttagtctgaagctctcagttgtgctcccacatcgataatagtcatctgtaattatgtgatcttcaaacataaatattatagttacattttacctgttgtattataatgaggacctattatctcattatttagtaaggaaatatctgtactatgtagtatcacccattgttttcagaagctacaattgttattgattatatagaagggcgagagtgctgagattgccctgggttacgttcatttggctgcagtaattattcatttattcctgaatagcaagtaatcatcttattaagtctacttacagaggtagtgtatgtaaagactaacacatgctcattttcaaatcagtgattcagaataaataaaacttttgtaggaaaatataaaccatgtttttaggggcaaagaatagaaccacatcattggagatctgatgtgggagttctttgatctctgcactacatatcctggagaagaaaataaagaca

SEQ ID NO: 130759 - DNA, 1052 bp, Homo sapiens
tagctgtatgattttgagcaagttgcttaacttctctgggcctcaatctttttgccttaaaatggggataataatagaaacttctttagtagagttgttctgaggattaaatgagttgatgtacatggtgcacatagaaaagttcctggagcatactgtgcatccagtaagtgttacctatatgttggcattgttgctttaaagaatatcagggaatcaactaattaggttagcattgttatcatcttaatcaccatcatcattgccatctacagatacttatcttgccacatttatgtgcattgtgcccaagatttacagaagtggatataacatgctcttggactcaagaagcttacaatatagagtgtaaggattaaaagaaaattgcagtatatatactaagtgctagataagtgatagagacagcttgttctacagcattgtagggaagagagcagttattgtgggctcataaagagaaggcctctcggaggaaaatggactcttatgagggagagcattctaggctgaaagaacagcacaagtgaggatttggacataggaaggtgaatgtgaagttccagaatggagactttgaatagaggagcagtgaggtgtgggttaaagaggaggccccagcattctggttaaaattatttagtaaacagtaatctgccatgtccagattctgaggtggagtaatcaaataagatttctctaattcacctgaggcctactagtttacatattgccttatttcaggttcccataattgtcatctagttgattgctttccaactggtgttgctacctgcagtctctagtcacctactcccctctgcacatttttatcgcattaatttttctcaaacatccttttgtcactgacttgcttgaaaagttcttagagttctccattgtgcatagcggtgtttctgaaacattaacgtgcataagaattactgggagttcattgtaggtgcagatcactaagtcccaccttcaggtcacatgcttatgacatggtgcctgagaatctctatttaaac

SEQ ID NO: 130760 - DNA, 1844 bp, Homo sapiens
taagaaagaggaactgatgttcttggagccaaatgattataactcttgctgccaccaagttgctctttgttctatacatggggagtcattggtggaaaattttgagaactagtagcctttattgcacaaaggaataatctaccctcaagggtttaaattacttaataactgacttgattttactttatcacttatatttgtccttgttttaagtcctattgtagtaggagaaaataaacatcttttgaaatggcatgcatttattttagtgtacttttctttgtccttcataatttaggactactgatttttccctttcttactgtccaaaaacctataaatcagttttataagaaaggtaaggagtatagcataaactacttctacgtaaaatgtaatttcaaccaccagtaatcatgattttgcagacagtttattatattgcttgagaaatcactataaaagtatgtattaaaataattctttaaagagacattttaaaagatatatgctattctgtattaatgcaaagaaagaagatctgacattcaaaaatatattttaatgatggaaatgaacattagatgctttttctcaagtatttccttggcatttttaggtgattttaggggtctggtgtagaaaatgggcacctattctatttttctgattactgttttaagttatactagactcatttttaaaattttctctttgacaacatgtttatataacattgtttatatgacacttggcatgtaactagtttgaaatattttattacttttttcttacagatctctaaacaagaacagaaaaaagtggatatatttgatggaggcatggctgaaacctcatctcgctacagtggtgctcaggatagtggaattggcagtgacagtgttaaaatcagaatagtgcaaatagagcagcacagtggtgccagtcagcatcgcattgcccgtccctcacgccagtcatcaattgtaaaaaatctaaattttattccctttgacatatttattactgcaagtagaatctcactaatgacctattcctgtatggccttatccaaatcgaaatcacaagaacagaagaataatgaaaaaacagacaagagttcattaaatctcccagaagttgattcagatgttgctaagcccaaccaggcatgtatttccacggtgacagcagaagatctcttaaggagcagcatttcttttccttcagggaaaaaaataggggtcctctctcttgaaagtcttcatgcatccacaaggtcatctgctagacaagcacttggtataactattgttcggcagcctggtcgaagaggaactggtgacttacagctagagccttttctgtactttattgtgtcccagccttccttgcttctgagttgtcaccacagaaagcagcgagtggaagtatccatttttgatgctgtgcttaaaggggtggcctctgattacaaatgtataggtaagaaccttcaaacttactggagtgctaataattactatctaataagttgtattcccatagtttccagattgattaaacagaaacagctggcagacaaaagtcttttctctacagaatatggaaagttcatgttccacagctgaatcctgtttaagtaaatgtttgaaatgtattgaggtttagcttagtattcttactatgcctctgaatattcattctttttccaggaactgaatgaatcaggaactctttcttgactatagagatgcttaacagtttccagtgtttggaaagcatagctcgttttcatattaatggcccataggtatgctttccatgttaatgcttctattcag

SEQ ID NO: 130761 - DNA, 1951 bp, Homo sapiens
cccttcattaagttcactcagctacagtcgctctataggtgggtggcccgtactaaaaatcatcaggagaggcagaggaaagtaggagggggaaaggggccgagaggaacagctatgacctcttcctaaatttgtagatatgcagagatcacagaagcctcattttgcttacttcaagcccaacctaaggatactctgtatataacctcaacctttgaaattgttaaactgaggcaagccagggaccacagtaatagaaaagaactgccaatgatggacttgtttccactttctgaaattgtaagagaagattggcttcagtctgttttattgatatactcccaaatcatgtgtttatacattttcatctaagtctgtattcagcaaagttataagagctcataccaaagataggcatttgaattataatcaattcctaggttaaaataatagaacacttgtttaaagcggggaaaaaaccttgtatgtaaactgacgtggaacccaattttggtacatgaagctagagtggtggtcatgggctagatttaatataggggtggggggtaaatgtaggaggaaaaaggctcacatactttctaaggagcattttctgcataatattctcatggatgcctttccctacacagaatgcatctacttgaacatttatattatctcagtagtatgactcctggttagtaataagcaaaagttatcaatatgcatgataatatttcttaaaaatgaacttagtgatctagggaaatttttttcagaagacccaaaaggaggcaagtaattaaaatacaatggctaaaaataaaattcaactagcatttattgagtgatcaccctgtgccaggcattgtcctaactgctttaacgcattatctcatttcatgctaatgacaactctatgggaaatgttctatcttagagattaggaaactaaggtttagagaagttaagtaacttccccaaggtcacagacctagcaataaacagagctacaattcaaagctaagaagtgttggactcctgagtctagactctcaacctctatgggtcccctgaaaagaaggatctgaattggaggttctctcagtcagcctctattgtcccacttcagaccatgcaaaagattcctgtctaagttttaactgatgaatttttatgttaactgtgtctgtgatgtgattacacagtactcaggtatggaaaacctgggttcaaattctgtcacttatatgtatacctatatcattatgcacttatggaaatgaaaagagataattcatgaataattctaaagtacttagcattgagccagcaggcctaggccctcaaaaatgtgtgctggtactattttagctgtcaatatcatatagtgaaaagaatacttaactaggaggcagaaaacctgggatttttattcatggccctgccatcaattagtaaagtgatcttaggcagtttactctttgactttctgttttcttatctgtaaaatgtgatgattataatagatatcaacaaagtccattccagttctgaagtttcatcattctgtaatttggaattctgtaatttggctttggcttcatggagttgacatctgtaaggctctgcagtatcaggtagaaatttattttgatttgttttgaagatgcagatttcctttgatattctagtggagctctaattagtttattcagagttttaaatatataagttttattaaatgttaatgaaattatttttcaaaaactgatctggaaatgtgttttatatttgtccacttgaatgaattgtctaagtcccattaccaatttggctatccagaaacactttatgtagtactttctttcctgaaaaaagcactgttccataactggtgttttctggaagccccaagatagtaaccttaaggataagaaaaaagagaaaa

SEQ ID NO: 130762 - DNA, 1049 bp, Homo sapiens
tgtttctttaattattaagatttagtatattttaatgtttgtatttttaaaatgtttatatgccatttgcttttattgttttgtttagtaattttcatttattgcttattctatcctccactggtttttctgttggtacctatattgaatatgtgaactctttatatattaatggtatcccttttcttttactgtcacatatgttacaatttcatcttttctgtcatttgactttttattctgttcatggtgttctttcacaaaagttttgtgtggtcatatatgtcagcccttatgttttttagttttggtgtcttattgttattattgttgatatacaataggatagttaatgcacgttacctcagtatacattattttgctacttggaatctatttctagaaaaatgtagaaagttgattaaatatgccacaaggataaccattctcagcgccatgtaagtttgaatatgcagttactctaacttgttttacttatcctaagtcttacttgtcagttttttatacatcatattaacatttctacatcaatttaatcatctctgttcattattttgttatttatatcacttaagatctgtgttttctctattagatcactgttttatctccacattgtattctcttcaaaatgaagagttatgtctccttgtttagatctatcacggtaccacttacctgataataaccacttttgatgatagctgtggtggtgggacccaaaatagatgcccaggtcctagcaggttacatagttcctacaaactggttgtagatcctaccagcaacagactttttaatcatcctttcaccagacttgaccattatatttaaaagagagaatagtacagtgttactatgaaatggatctactatgcatattctcactgctttaaaaatcactgatgatataaaaagagaagactgcactagcttagtgtttgatcttgaccatatagatctaacgtcatgatcaattgctttcagcattttctttgaaatcacataaggttcatatgtgccaaatt

SEQ ID NO: 130763 - DNA, 1067 bp, Homo sapiens
tcagatttgaacatttttttcctctttgttctggaaaacatggttttgtcatcccacattgtacagtgatagtttatctttttcagcgcgagtgcttgtttactgtatgtgcacaaacaaatgaaacaatgaagcttgcaaacagttatttaaccagtttttctctcatttattaactcaaactcatatatcaaaatgagatatttgtgatgtaactgatgtttttaatttcaattttgtcactttagatcctgggaagactctgcctgaagcccttgattattgcactgtttggctacagacagtgcctggagaaatagacagcaaaagtggtattccaccttcctttataacactacagattaaagactttctgaatggaccaggtaagaaagtcataaaatttacatgtgtgtacattttttatgtgaatatattagcatgtatataggatctgttagtaatcttgacattccgtgcaaaaaatgaatagttcattttttcccagaggtgtatgcttttcaggctgcccattttagagatcaaaaggcaaatataaatatgcattaagaattaccttcagtctgacaaaaaggtagttatcaattaaagaatagttgactggaagccaaagccccaatattttatttctacctttcctattaattaactgtatgatcttaggtgattgatctaatcttctatacttcagttttcttacctgtatatgaagaggatagactagatggatgaatggataggaaacatgatatatatatacataagatagtatacatagatagattagatttgatagttaaatgtacctgtttcacatgcttagcaaagtgcttgaaacatagtaattactcagttttagatagatacagatatcaaaaatttttgagagctaattatgtcccaggcactatgcattttaggagtatgtactatagttattcttattttatgaataaggaagctaagacttagaaaagtgaagtaaattgcctaaggtcatagtgacagaggagccattcaaacctaagtctttatgactccaaaga

SEQ ID NO: 130764 - DNA, 1354 bp, Homo sapiens
cccaactagttttttttatttttagtagagatgaggtctcgctatgttgcccaggctggtcctgaactcctaaactcaagcaatccgcctgcctcagcttcctaacgtgctgggattacaggtgtgaaccactgctcctggccattaagaatttaaaataggctgggcatggtggctcacacctgtaatcccagcattttgggaggctaagataggcagatcacttgagaccaagaattccacaccagcctagccaacatggtgaaaccctgtctctactaaaaataacaataaaaataaaaaattagctggccatggtggcacgtacctgtagttccagctactctggaggctgaggcacaagaattgcttgaactgggaggcaaaggttgcagtgagatgagatcacgccactgcgctccagcttgggcaacagagcaagactctgtctcaaaaaaaaagaaaagaatttaaagcaatgattttacaactgtcttaagatctctagcaataccccgcaaggcatgaattttaaggaaggaaaaatatttatatatagactttgttgagtacatgtgttgtggcgtgctagtgtacttatgatccatactacagatggagaaagccagtcatggattaaacagagactgaaaccatctccactgactttgtcactggggacgaattcttcttcagcatgtttttctagtgctgggattgtaaaggtgtagaagtatgaagaactatttctaatcttgataaactctagatatggttttaaatatatgaaggaaagcaagaaactgaaggataagcaagtcattaaagtgtaggaagaagcctttggagtgaggtaatagactgaagaaggtgagtgctagtatttggttagtaagcatgaagtaccatatttcattccatctaagccactagcaattgtaaaaaaacattctatatgccactaaaaatgaaaaaaacatatgctctttacactgtgatacagggcctttttattacatcagtttgaagacacttcctgatttcagagttgttcacacatgaaagactgaacacaatagaatagatgcaatagggtaagaacacgtaattagttcatggaagagtgacaggggaaacttggatttacttatttctcagttttagtttcacattcgttttgtttttaggcacactttgctcattttggctagaaaattatcttgtagtttacatttgattgatttgtttgtaaaacaatggaatttgaaagttgatggtaaattagatacaatattttcaaggcaaccaaatcaattgaattttaagagaaatgccaatgaataaatgaaaaatt

SEQ ID NO: 130765 - DNA, 1040 bp, Homo sapiens
agatacgtcttatattgaaaaatcaatcatacttcttgcaaattcaaattcatctgtgaagtgtttggtatgacatcatacagaaatgtaggaatgtgcccacttgatcccattttaaaagtttttttaaccataggattccttaactttgaaatgcaatttttttttaatttaatgagagctgacacatgagaagaagaactggaaatggtgcagatttttctaattaactcagggttatttgcaaaaacatttgagctctctggtatttttttcattgttctttcacgaatttttgagccactgtcattgtagccatgaaatgacatttaaatgacaacaaagaacaaaaatgccacattgggaaaacattcccaagtcatttatgttttattataaattaatgcttagcatgtcacattcatcatataatttaaataacatggttatatcaaacacaagacaatgaatgcaatttcacatttcttttagtgtagtatatatggtgtctatatttgaaatgcatggccactggtctttttctcctaatagaatcacttctttagtctcaccctgtttaactcattcattaatttacctgtctagttgtcagtgtttctgatttcattctggcttctgattggtttcatctctggttttatttgattttgattttaagaatctgttgacttgaactggttataatcctgttttgaatacagttttctccttatattgtatggattaatgtaactattttataggttacaatgattttcatttctactttaaaataattcctaaacatccttaaatgattgcatttccacaaacctttctgatttgaatgaatatttgtacttaaatgctataaaatagtaaaagagttcttaggtacagtaacacagcattcaaataggtttgtttatatgaatataaagtagaaattttaagttgtttacccccaaatagatgtattttttgagtgcttttgcctttcttggttaaccctgcttttatgttattactgaatttattac

SEQ ID NO: 130766 - DNA, 1053 bp, Homo sapiens
agggtttacacctctgaactacttggctaagtaatagacctcaaagagtcatagaggctggttgtgcagttggcagggaggtagggggccagtactaggtctcatgcagagaagtcagtagagtcgcagtcatttagatttttttttatttcttcatctagcctaattctgttagaattatttcttctacagaaaagagtgagagtaattgggaaatgtcttcctaggaacatggagtaagccaagttagaagagataaagaacattttctggcttatcctaactctaactttccaactttctgcctgcagtttttttccttactctccagccccatgcctttccattgacacagtcttgagccttcctttcttatccctgtacaatagtctcttttatgccaacaactcccaaatgcagctcttttgacttaatatctaactctaagactatttctacatataggtattaggtatactttgttatttaaacatgttcacagtaaattaagccattttctctcttctctctccttgctcacttcttcctttatcatagtcttcaaacttttttttacaactgctgatgataggaaaaattttctggtcatgtcctctcacaatttactaccatcttcaggccattcttatttttatttcaagtccttctacttttttctttgaaatagtcctcaattatgcctgctacttctctggtgtaggcttaatccttgattacttcctcattctgtttactggtagcactaacttcagattctcttatttactcaataatgctgtcttctatgcccttactagatttgcctcccctgccaaatttatttgaatcttaactacccccttcctcagttgatccagtcaaaactctcctcagcccccaaccctttgtgcacctgttcactgtatttcttacatataaattgcttatttggcttaatctgattctgttttttttttttaagaaaaactgttttgcaagaggttttgtattgctctatcaggaggcatataatgtccaaaggtctctcttttt

SEQ ID NO: 130767 - DNA, 1047 bp, Homo sapiens
cgtgcctcctgtcttttggtggacctggtacttttgaaaggaatacctggtattacaatatagcctaatttcaactgcttttttggttcttggcctatcatcttttccaacttgcccaactgggactgccctagccactctgttcacacattgcacagaatatgttttgcaagaaatgtggctcagcactgtctctatgtggtccagtccctccagggtgagggactttgtggcctactaacgtacgtcttgtacagaggttgcactgtatgccctgtatggaaacaaatatacaaaaaacatttgaaaagtgaattacttaaatgtcttaaatagcaatttgtttcttattaaaccttaacagaatcatgtgagtctaggagtttgagtctgcagtgagctaggatagtgccaccacactccagcctaggcaacagaccaagaccctgtcttgaaaaataaataaataagttaacatagcaactgtttgggaatacatatagctctgctagattttcaaacgttctaaaaactttcatcaactgctgctcagtgactgagaggttgcatttgtaatccttaattactaaatttaaggtaatcaaaagaattaaattttgatacataaataacacttttgacataaccttataggaaagatagatcaagtgaccaagtgtccaaataagtaactcccttaccaatccactggtctgagaaagggtcgtccagaaaccagcaccacaaaaagttaacattaaaaattcactgttcaaattcacaaaacaaaataaatctataaaagatttaaataattaaacttttcaaatgatgttttttaaatcagcctgcagcatttttatgctgctgaagttattaaagtttaaaatcacactgagacttttgggacaaactatgagagacagagatccaagattgcttcagatttttcctaaaatatttagtgctgtccaagcatggtggctcacactttaatcccagcaatttgggaggccaagacgggtggattgcttgagaccaggagtt

SEQ ID NO: 130768 - DNA, 1214 bp, Homo sapiens
tcactatcttgaaaaagggactgttcaggtgtggttacatttttggtcttctttccggtaaagaataatgagataataaagaggggaacaagaacaattgttctccttggtggggcggtttcatctttatatagatagcagaaatgtctcttctagtacttgttaatctctaagagtttttaatttaaaatactcatcacaactgggaaccatattttgaaatgaaatatttttacctccttcagcattcagttagtacttcctgtagatcaaacagtagtttaggtatttagaatattaaaatataggacagtccaggagctcacagctcactgaactatgacagatacctaagtaggtaactacaaaaataatatcagtaggtgcctggtaatggcaaaatgcacaggatattccaaaagtaatgatgagaggcacctcactcatcaacaagggtcaagaagggtgtgctggccaaagtgatccaaagtctgagtctcaaaaaaaaagttagcgcttggcacagtggtgcacacctgtagtcccagctacttaggaggctgaggcgggaggatcacttgagcctgggagtttgaggccaacctgggcaacataatgggatccaatctattgaaaaaagagaaagacaagttaagcaagcagccagagttataaatagtttttttctgtgtccctgggaccacaatggtgcctgagatatgagggtagcaatcagcagctttagtatttacctctctatggatgctttgccagtctgcagtcagggaaaatggatcccttaggttcagcagttggtttatgtggatatttgggcaacctcctgggtaggttactaaattgtttctacagaatgagtacttctgacccttctttagttttcattttatacacccaagaaaaagacagtttcaggatcgaacatctgagtcttctttctactttagctttgttttgtttttgttctaatgatcatctgttaaaattgcaccttttttttattgttgttaaaggtattattttctgtgaggtcatagaatttggaagcccacatacagggatgcagaggcaaatgtgtgagtcattttagccatccaatttatctaaaatatttttcccaccagcctcttccagtaccccaaattctacaagtcaaaaataaaaataatgcctttcaacaaatgttgctgacataa

SEQ ID NO: 130769 - DNA, 1046 bp, Homo sapiens
tcatggtgatggagtgcaaaagatttcagctcaagaaaacatgtggagagctgtttcctgctttcaaaaaatttctgttcaaactactcagattgtgatctccatggaaactgtaccccataccagcaaaccatgcctgttagcatctctctcaaacctcaatggaagccttagtgtcaaggcaacacaaaaagtacctggtaagtcacagaaaaggggaggggggagacagaacaagtaagatgatttgttaacatctgaaaatgcatcattttgaagatttatattatgtagaagttaaaagttgtaaaggccattagagatgaggacatttctggtttgtgaccttatttttagagataattttagaacaaatcctttaagtaatgtctaaacagaaatgttcctgtcctcttgaggcatgttcttccaggtatctaaaactgttaattcctaaattcctttttacctaaaacagctatagtggaacaacagtatatcaagttttatgaaccataagaagagtgtttctcaaagtgtgatctctggactagcagcatcagcatcacctgggaaattgttacaaatgcaaattctcagaccccacccatgacctactaaatgcaaaactctgggcatggagcccagcaatctgtgcttcaacaagccctataggtgattctgatgcacagcattaagtcactggtaaccatttacttaaaaaagaaaagttggtgttgtggcagatatgctacacaaagtgtaacagaagccaaggttcaactttgcaagaatgctgttgaggcattttatcaggcagcaacacctggcaacgaaaagctgtgcttctgtgcctagcctagcaaagtggggtacagactctgcaaagtgactgccattgatgggaggatatgtgagaaatcaactggcagtgacatctacattttccacttctgttaccatgactaaattgttatatactttttcaaaaagcatgggaagtgtgggcagaaggattgtgaggaggggaagaggaaaggcaagac

SEQ ID NO: 130770 - DNA, 1030 bp, Homo sapiens
cttaatagtaacaattttgttatgagactataatgaacaccaaaatctatttttagtacagttttttctttatgcatactcaaacagtttaggatgataacaaggttagcaaaataataaactgtaattacatgaaataagatttattaacttctagttataaggactgatttcttggaaaattgtgattaagagattgccacatatttttttcaaaaaaattgattttaactgtatttttaaaataaaacataacttaagttttgaatgttaatttcattgtgtagttgaatgtcttaaaaattcatgctttgcaatttggataaaatacatgcaaacatatattcaaagtataattttgataagtggtaaaaactatccaccaccaccaaaaagcaaatatactcacataaaagcctcctaccagtagtcatatttctttttgtagttttcaagtaacattgttctacattcaactgaaattttttatactttagtatatctttgagctcaatggagttgatgtcagatttttatagtttgaatctaatacagaaatacttaactgtgtctttgattttacagtttatataactgttgtgaccatctgcagcagctgcacttttcagaattatttgctgaaccaaattgagcacagtgacaaaagtagtcatctcagatgtactattaaacgaaagaaaaaggagcattgccttggtacagtacagccatctgctgtacagatgttattgtatagaatgacttcagataaaataattgtagaaaattttcattaaaacctcaacaatttgcacttgtttatgtgaatctgcataactccccaatgagagaacacacttggggtttcttcggttctcactcactttctctttgatcctttttgatgtgctgattttaataaacacagtcaaaaacactgtgcaaaaacatcatggaaaaaactacaaaggaacaattatagcagcagaaactactctaatccctaacttatgcaagctatttttagtga

SEQ ID NO: 130771 - DNA, 2629 bp, Homo sapiens
attgagaatgtgttttagatatgtttctttgtcaaaggtacaaaaatatttgatttcacctaatgattatatgtttttatcatctaaactgtcataagcttacaggaagtgtatgtggaaaggaaataatatgatcaaaagtggtaagttaattttctcccccgggcattccgaatacatttaaatctgtgctttcagatttatttactgatttataaaactaaatatttataaattattgactgaagcagttaaaggaattcctcttattatcatttggaatgaaacgaaatggttaaatattttctactttaccaaaaatatctaccagttcttcttagcctcctatgttattctttaaccctaaactatgggagtttcataggatttgatttttttttaattccactctgcagatactggtatagcagtgacttagaataaactaactcccatttctgttagaatacttatgttctctcatgaatctttggtaaaatgacccaaaacttctgatttcagtagaggtaatgcttgtatttttaaggttggtgtataatattgctgaaaatcctatgattatattaaaagtacatctcctttagaaattatatcatatattttaaaatattttaaggcagataatatttattttgctattcattgaacccatcccattctatagtattttctgaaaacaaaacaacagaaaaaaagcctttcccttacgtgtatatacaacgcaatcatttttgccatttgaaatatgtagctttggagaaaccaaaagtatatagctataaattgcgaacttgcagtgtagcactttccagaggcagggtggagagtgagctacagactttagctccccttgtctgagtaaattatggctctgtttgggcggcactccttagatttcgacaaacgagcacacagttgagagctgtgaaatagctgaactttaggctgccttgctctttctcggggcacttagattggcagcctccatatatgtagataaggaaaaggaaaatagaatatgagcaagttaggtgccacaaaagattgggggaagaaccttaatgaggtcatcttggttggcattttagtcagaatagggaagaagttagaaggatcccctgtccataaggacttgggtgactttttacccaagccaaaaccagtgagttgaactccttctagtcaaaggactatggtttatgtaactttcactaccccaggctctgtcatccagatgtacttatctttttgaataaacaaaagtagagagagaaagcataaccacattatttttcacatatacaaaatgccttttctcatgttcactgaattcaggaccaataaaatgtaaagaacctaaagttccttttcatgtattgaaaagtgaaaccaggtcattaattgataaaaagtggagctccaacttttcattctatagttaactgggtctcccagggaaaatcttataaggcattgtcataagctttggatgctgcagagatgcgagttagcctaaggggaaataaaatagtaaattagatatgactacctaaaataatatgttgcaataaccagccaattacagcaccccaaagacttttgttacttttagcaagaaatagcatctctgtctaatgcctgaacaataggaaatgagttctttgacagttaaagccagaggacaaacttaacttttaagcagccactgaggattgaagtggaagtacagcttgtagacagctatacaaatcactaacaaaccttaatgaatattgggtgtgggcatcagggtcctgtcatttttgacactatgtcccaagtagcttaaacccaacacttaaggaaaggtggagacctcattgggtctgtaacatctgggtttttatttgtcattttggcataccccacaagcgcaaaagaaagagtaaaaggggattatcttgacaatgaaatgagttactgaatcttgtgataatgaaaagcagaagaattctaatgcctttctatagtccctgaggtagaggtgcgtttatggtttagcagaagtaaaatgtagaggggaagaacagatggcctaccgtccgtgaaacatgacacctcccctcccaggactgagtaccactattaatcctggtcagattccctcctattactttataacaaggttcaaagttgctactgataaactggcatgtacttcttttttcacccttagattacctgtagattactgataatttttgactatgatatatctctgtatatcctggtgaaccttgaggcattcgacaaaaagtagaacaggaatttctaaaaattggctgggaaataagaagaacaagtaaaattatcttaacttttttcaaaaaatgtcccatattatgttttctaatatgacgagaataaaaaccataaatgtatgagatactgtaattctcctgtcctcttagaaattatatgaaatggagaagacatctcaacatacaaattatattctccttgctgtaactgttatatgattagatacactaatcattattaattaccactaccttagaaaagatttttttgacaccctcaagaaaggagattaaaaattatgactgtt

SEQ ID NO: 130772 - DNA, 1064 bp, Homo sapiens
agaagttttagatattttagaaatgtaatgctgttaagtcagaaaattatggcttcagttatggactgaagttaataaagatggttttttatttgggggtattttggggcctgtttctatttcttttattttctggagtgctttttttgcttgtttatttgtttgtttagactaagtggaagctttgaatcaggataattgtaaatgaaatggtagtttcagtttcacaatttgatgaaacattttaagaaattgatttccaccatgattatttttaaaccaaagtcttatctctaacacttttgtgggtgtgatgccttctgtggaggattagaggttgaatatcttatttctgcagtaggaatatacaacatatatgaaattttcaagtctctacagaattgaaaagtcaatgtggttactgtactttaaaacatgtgtatactgtgggcctaaggtgttttttaatctttcatcttttttagggatcaaatatcattagaaaaataagccatgggcattacaaacgtggtctggtgaaattcaatattcactatgacaatttagaatatgagctccttgggaggaaagttaactcaccactcttaactttgcatctaaatatcctaaaatgtgccattggttttatgaaaaggttttgatctacactcctattttaagttcaaaagaaagcctacattttaaagtgtattccttttctgggtatatttactttgaactatagcatatagtttttctcataaatctaacctgccactatctgtttttaagactttgtaaacttcaagtggttatgatgtgtgaagtttggattaaactaaaatttttagaaaacacacgttatatattttgattgttttgaattttaacatgggccagtaaaaaacttgagtgtctagcagagtaacatactgcactctgttactgtaggaaatcacagaaaattaccctttcccatcatgttaacaatagacaaatgaagcagctgttcttattcttaatgtagttgcttgaaaaacttgcacaatttaatgaaaatgtct

SEQ ID NO: 130773 - DNA, 1040 bp, Homo sapiens
gagatataagtcatataccagcaatctacctatttcaagtatacaattcagtggttttttagcatattcagagttgcacaatcattaccacagtcaatttcagaacattttcattaccaccaacaaaaaaacccatatccattagcagccactcacattaccctctaacccccttatcaggcctaggaaaccactaatctactttctgtctccatagatttacctattcttaacatttcgtataaatagaatcatgtaacctgtggtcttctgtgaccgacttctttcactcagcatgttttcaaggttcatccatgtttaccaagtgtcaatattttattcctttttatggccaaatgacattccatcatatggatataccacattttatgtattcattcatcagttgatagacatttgggttctttccacttttggctgctatgaataatgctgccatgaccatttgtgtacgactttttgtgtggatatatgttttgatttctcttagatatataactaggagtggaattgccgggttgaatttttttttttttatgggtagacttttctttttgagacagggtcttcctctgtcacccaggctggagtacaggggtacaataatagctcactgtagcctcagtcgcctgggctcaagtgatcctcttgcatcaacctcctgagtgggtagaactatgtgccaccacacccagctaatgttttttattttttttttcagtagagatgaggtctcactatgttgttgaggctatagatttttttaattattaatacaaagtagtcaacctgttgcaagcacagtgtcactagcaatatataagaacaatttcctaatattaaatattttacatgtgatgatatctgattacaacacttgataaattagtcacactgcaagctcttaatgcatttgtcttaacagccaaatatagaatgtgtgaaggcatccaacttatttcttgattattttgtatttggatagattttaatttaatcttcatgtaacttgatgccac

SEQ ID NO: 130774 - DNA, 1019 bp, Homo sapiens
atataagtatgactattaccactattacagattcagcagtctaatccaaaaatctgaaatctaaaatactccaaaatccaaaactttctgagtgttaacatgatgctcaaaggaaatgcttattggggtatttcagattttgaatttatggattagggatcttcaactagtacgtatttgcaaatattccaaaatctgaaaaatatctgaaatccaacacttctggtccctagcattttggataagggatactcaacagatattatgatgactattgtccaaactcctttcatcaagtagaagcacaggctagaccaaggagatctggagtatgatggatgactctacagaccagctggagtagtccaggagatcagagagtcccagggacccagacagtagccttggcatataagcaaaacacagcctggcagatttcagcaagcaaagagttggtatcaaaaaggtcttgctatgtttcatattttgttggagaaatgaagatcctatatgtgggcaaaattcaaagacagggatgctggcctagggagcaagacagggttgtaactaccagaagttagaaaggagggagagctggatcctagtggtgagaaggagcgcactcagaatctacaacttggatcgaggaacagatcaagactggcaacgaggctgacttgataccaagctgctgagctctcagttcaattctcatactctcccagataggagcagagtttgtcccagagcttggagtgggtctcatctgtggaaacaactctcttgagttgcaatattagaacgatacaaaatattttgtttcattagaacttcagttgaggacagaacatatgtaacatgaatcacaagtttgatttaatacaacagctttctccttgaggatctacagtgccaggccctgggcttgctctgggggatccagagacagataagacacaatcaactcattaaaagctcaatccttcagtctagcagggaaatttctgtggtcgtgtggg

SEQ ID NO: 130775 - DNA, 1079 bp, Homo sapiens
caccataaactagtaaagttgcccctgctctaagttttaactcagaagttctgagtatatttttattctttctctttaaggaaaaatattttcttgaaagatgtcatattacacacctgcatttgcttgaaacctggtagcttgataaatcgataagataactgggtcatatgttaagttttttgaaaaaccaacccaaacatagattctaataaaagaacgttacacatttccttttaaagtctaaaaagtatttctcagggctcttaaattaccatattctgataccaggggaaaataaaatctggacttagagtcttgtttgtacttagagggttttccggacaggaaggcagtcttgatgcaatgcagtaagccacaataccagtggggcattacaggtgaaaaatctgcagctgtaccccttcaccacagtgtattacaactgtatgctggaatatttcctgtacaaaaatagggtttggttaactttgtttcccaagagtagatcacattaaaatgttataaaatcatgatttcctgcatttgaatacttgtggtttctcaactggttccaatagtataagggtttttttttttttttttttggtatgacttctattagttgaagatgtatagaagcttttcttttccttcttcaaaatcaactaaaaagcagatacatataaaaagaaataatattataagctaaaacttttgagattgcaagcacattcatcttttatctcattggtagattttttaaatgatatagaaactcaaaatccaacttccattaccagaatacattttatttttatttagtaactattgaaaagtatctctactcaatttgcatttgttttgagtgatgaatatgtgtctcctactgtaaattataaataactgattgtaagaaatactctttatgtttaaaaggacagttaagccctaacacattcataaagagaaacctcccattattgtacaaagacaaagccggtttcttagcctattaaggttttgatgttcataatgctgtccatttatccctatctctagataaggactgtctcttt

SEQ ID NO: 130776 - DNA, 1017 bp, Homo sapiens
tatgtatttgaataaaatctttaaaatattgtactcagtgttgtttttaggttttatttcgatgtgttaaggacaaatagagttagccttttgtatccatcagttctacctccatggattcagccaaccaccaatcaaaaatattcaagaaaagaaaattgtgcttctactgcacatttacagacttttcttgtcattatttcctaaacaatacagtgtaacaactatttacatagtatttacattgtattaggtatcatgaggaatctggagatgatttaaagtatatgggaggatgtgcataggttatatgcaaatactgcagcattttatatcagggacttgagcatccatagattttggtatctgtaggtagtcccagaaccaacccctcatggatactgaaggatgattatatattcttataatgggaaaaaagaataagtacgtgacttttatacatgtatttaaaggcatacaacttaaatttttaataggggtttcatttggtgtgaatttattaatatgcctttgttaacagagtaaaatagggcacataaaggaaaattctgacgcataactgacatactttggtatgtatctccatagtaatctattgttttctgaattttcagagtagctgagaatattccagctgaagtatgtaactacagagccagcctcacacaagttgtgaactaaataaagtttttctttggcattcttccacatctcttactttaggctcccagaattcctccttccctaaaccccactgttggtgcagtccacattcattgcccctaggctacctaatggcttcccacagcagttcccatcttggactgccttatattatgtacctactccaaccctcgccttgtacttaaaaacttagtggtgctttttccttaaggtcctactctgccttccaatgtgccagctaatttttataagctattatatattaattttaatgcagaatttcaggagatgatgctggaaacaagtattttt

SEQ ID NO: 130777 - DNA, 1381 bp, Homo sapiens
ttgtggcatggcaagcagcatgagcatcatgttttcattggttccccttgttcccaagtcccacaagcgtgatgcagaagtgcccccagggggatgctctgcttgcagtagacatttggcacagttgaggaacttgtaaaatctaccttttctctgtgattatgtatcattttctcattgatttgtaagagctctctcctatcagaatgaatattccttcacctgtcatcaaatgttacctgtcttattccagtttactttttaaaatttgattttatcatgggtttcatgccatacatacaaaagtctaccctattataacattttaaaaatattaacatgtttcttctcttacactttcacttcttagccttcagcagttttatccttttggagtttacttttgtgtaaagaatgatgtagggacccactttggttttaccaagtgactagttagttcttgcagcttcattttccgtctttctcctacttatttggtgtggcaccttcattactttttttttttttttttttttttttttgaggcagattcttgctctgtcgcccaggctggagtgcagtcactggtgtgaccgctgctcactgcaatctctgcctcctgggttcaagtagttcccctgcctcagcctcccgagtagctgggattacaggtgcacgccaccacacctggctaactaatttttgtatttttagtggagatggggtttcaccacgttggccaggctggtctcaaactcctgacctcaggtgatctgcccgcctcggcctcccaaagtgccgggattacaggcacaagccaccatgcctggctggcaccttcattgcatagtaagattttgtctgtacttagccctttctctgctattttattcttttaatctatttgtatgttactacactagccttatcttttacttactatgggtttataatacatttaacaccttgtagaatttgttctccattattacttttaaaattttggctgtttttatatattattcttgaattggtctttaaaaataaacaggatgaatatacaataatatgaaaagaaatcctaaactactgtcttttataaccttattctcctctaaaggtcttaatgttataatttttataaaggtttaatttgaatttcaacaaatataaaagcatagtttctatttgcaacttctaaattttttttattttaacataggttccttgtagcttggaatactgggatgaactccagaaggtttttgttgcatttagagaatttaatctgtctgaaagcaaagtttgtgaactgcagttgccggatatcaatctcgtgaatgaccagaagaaattagtatcttcagatctttggagaatt

SEQ ID NO: 130778 - DNA, 1958 bp, Homo sapiens
gtcactatgcaaagtgtggtgaaacccttcagcatcttcgggcagatggcagtttccagcgatgtagtggaaaagctgcttgactgcaccgtgatagttgattctgtatttgtaaaccttggacagcatgtagtccattcactaaacactgcaatacaagcttggcaacaggtatgcacattccataacagtttacagtttggccacatatgatcttttattaggttctgtatgctatcacttctgataataagttcaacacaaacaaaaatgttagagaatgaagaatttgatgggcaccattatacttgaggccttctctgttttggcaaagtgatgcatgttatttttgaaaaactggagaatataggttctctacacatgcattggagatcatgcccacatttttgtgactaatgcaccacatctgtgtggaaagtaacatattcccagaaattttttccaagtattgtggctttagtttgccaaagcttcaacttagctatgtatcaaattgtctaacggtccattgcagaaataaagaacctgtgtgaccctttctaatgataagcattcgatcttttcaaacaaacaaacaaaaaaagcagcgagatgaaatatgtgagtacaatacagtcttagttttttcctctactctttctgactttttgattcactaaaaagtactagataatggatttttaaatcaattagagagccttgattattttaataattttttaacttttatttcttatcagaaataaaccaaaccaaaaaaagggatgaagcgtaagtctatgataagtggcatatttaaaatgggaaacctgtccatgtctgctagcacaaaagtaacttcacagaatatttggatgataatatgttcaatgatttaagaacaaatcacttctgcttcccttactgattttagtgttatattgtatttccatcaagtttgtgttgctatttaagctgaaacatttccccacattttgtatatattacatttgtgtgaggctggctacccgagagaaacggtgcttcatcccccactgacctccttttgggatggagcagttaaggggaagaggagcttttgttctctaacttaagaatttgtatgagaataaatatttttctttatatgcatgaagacctatacaagaccaaggaattaattacctaacatggcactataatagcaaagggaaagaagataacacatctgttttatgttttaaaaatattttttaagggcattccatggttttcttgttgcaaaggacatgcgtaaaataagagctagtgtgatctaaatctttgcagctggttcaaatagccatgtgaaaaaaaagacctctatggctccaatttctgttttttggttgtattttgaacaatacatttaataaaaaacaaacctagaaaatataaaagaatcattgatagaacatttaaacccaggatatttttgtcttggtatcagaaccattataaggggactcatgtgtagcaactactgcaaaatggccttcagaaataccagtttcctcccagggtaaaaatactctcttagacacagctatacatataaataaaatatggtgcataaatatttaaatgttttaaaccacatcagagtgtgaatgactgactggctaacatagtgccttgaaggaatattctgagtttttttaatggaattgtatatttgattaagtagagccatatgtcacgtagcatattgctgacaggtacattctatgaatagttggttctgatttatacagggatttggcaacgttaacatgagccacaagaggatatacttctgtaattgttgctgtaattttcttgtttcctctcatgtcaagggtacttgccaccaagttttaatgtggtaggcacctaaccctgtgtattctaaagtaaatatgaaagtgcactactttgaa

SEQ ID NO: 130779 - DNA, 1064 bp, Homo sapiens
actgtaaagacgtggttgctgcccttctgcagcatacagtctaattatggagacaatattgaacccataatggtacaaattaacaagtgctctgaaggtgaaatatagaatcttatgtaagcgtaaaataggagaacctaccttgaccttgggaggatctcagaaggctgctcttaaaaccaaccttaaaacaggaatctggaagttgagtagaaacaagttggtcaagcaagaaatggagaaaaagatgtccaagcagagggaaggctctgaggcaggaagtagtttgatgtgttggatgagttggaaggaggtcagcgtagtgctggaggagctggaaaaggctagtggagctggagtgtcctgagcaaatgccctcagcaaatggagagtagctcaagatgcagttggaggcatgggcaggggctgggtaagatgattcatctaaaactcaacagcagtcaagttttgaaatcattgctaccaattaaaatccatagtagagagtattatggtagatgacagatgcttgttgttatgagtactttggtctcacttagccagaaactcttttggcgattagtgtgactatgaagcaaggttcggttcaatgggaatagatggatgatgtgagagggcttagaagtcctcaagggcctctggaagaataaggtatgtcagggccacttcaccacctgcagcatagagcctgcccacctacttcaagggcattctggatgattaggagtagattctgtttcccaagatgagtctgtaccctaatgggtacaagtctggtcatggcccaggctggattccaagtacattcatctgtagtctccttggcttcatgcctcctccgtacttgaatcacaatgcttctgagttgtatctctgtttactcccccacttctcagtaaagtggcaaatgatggagtgtgacattttgacattatttagatccatagccaggaaatagaggccaactggagaagcatcagttacatgttatctcccattatctgcaaattaattagctacttatgatgtttttcttatattct

SEQ ID NO: 130780 - DNA, 1045 bp, Homo sapiens
ccaggccttagccggtagaaagcaaagcagaggaagcttaactctccagtcatttgaagatgcatagcttgcatatccctcagagaccctcaggattctctggacactggagccaggatgggaagggtgatcataagagaacaactggctcaggagtgtggggagcagtagtcttcatgctatagacatacagtttctgggtggagaggaggtcagcaggaaagaatgaatagacaaccactgtcaccagcacacctttcattttcatactcatttgcactatttcaaggcctttttgtatttattacaagttttatattcacagcattcctgtgcagtattatttgttatgcatattttatagataaggagacaaatagaaatgttaagttaggtagtggcagaattaggactgaattccttatcttttaattctcaatacagtgtcacttcaatgttgtctcactcccctaggttttggcagcatgatttgtctgttagaatagccaagctttgaagtttgaaaagaagggctgagaaatcactggaatagtaggccacatctaaggctaaactaataggggattcttagtccaagtatgaacccttgcaaagtcttaactgtgttaccaaaaataataggagcttcttaatcacaaactctaaacataaaacaggtatctaataaactttgttttttcttttaaatttgtaactgcatcttgtggatgcaacttttaaaataagctgcagtcattataatcttcttaagactaaaacctagataacctagataatatttataaaaaacgacgtcttcttactatatttctgtatgctaatgtaagtgggttttaggaccctctgaagccagaagccttaatgggcccagagggtcttcatgggattccttacattcattacattcacagttgaaaattctgctgtgttctaatgagaggctacatgaggatcagaaaaactagccactcagtttcaaactgcacctggagcttgtcatagatgcacaattgagcaaaatatt

SEQ ID NO: 130781 - DNA, 1037 bp, Homo sapiens
acaatatggcacagaaggataacttgactaatttggctacagtgtagagtacatgtgtggagctgcaagagggggaagtaggctaaggccatgagggctcctgtatgctgtgctaagaagttttaataccgtcttgaggccatgatagcacaaaggtgtgataatctacgtacccagagagatcaaagttagctttccacagaagctaagtttgaacagtaagtataggttggcccagcggatgacagtggaggagtacaccaagaagaacaagggaggtatatataaacagcaagttatggtcaagggatttcaggttttgtgcagtgtaactcaatcataaaaattgcagaagagatatgtgctggtccactggctcttagagtggtagtggtggggaacccctgattgtagggatggccaactttcatggtgtaaatactccaaagcttatttcaggctaccaatgggttgaccaccagtttgcaaaatctctaaacacttaattgctggttttcacaaacaagtatgagccagctccagcacaccactgtctggcagagttgtgttctcaagagcctgggaatccatttcaagaagatatacatctatgtgatgggcagctcttggctactgaatgagtttaagtagaggaatgccaggatcacagatgtatttcagaaaagttctactaatgtatttgagaagacggtctagagaagattgagaatacaaacagagactactatggtcactgctgcgtagtgcaggagtgagagagattatagtaactgagctaagacagagtaagggcattaaatgatataaatgcctaagaaactgatatttctgtgaataacagcaacacattctgaacagaacttaaaaaaaaaaaaaaaaaaaaaaactacctgaaggctctggagactaaacaaaggcagattttggaggggagtcaaaattttgagcaagtaatttgcaggatgactttcccatttttttggctttgccttgagggcaactgcagtcacggcagc

SEQ ID NO: 130782 - DNA, 1002 bp, Homo sapiens
agaaatggcaaagataggattgtgatagggtcctttatccagtcccagggctgatttctggagttttctgcaagcctgcatgaaagagaatggggatatttcaagtgcaaagcgcccagaggaatggctgctggtgcggctaatggtctctctcttcctcccctggcaataaatctcagatattgaaatatagctttggagaaaaatatactgaagatttcttaagctttttacaagacactcaaagccttttcacaagccagtgctctgcaaatgtaaattcttgatgtctaaacataaaggtcctttactgagctaattttaaatgtgaattttaatacagagtacttggagaaaggtaatgcagctggcctattaaagcatggtattttgccatttttaagtaatgggaaatactgattaagaatgttataaagatttcagcatacataatgttgttgtctttaatcataacctgttaccatgagtctgtgtaacaaaagcattaactcagagacaatggcatacctattatactgtggcacttattatttccgtgcttttaaattatttccagaatattgaagagcttgttatttaaaggtcagaataatgcccaggacatggccaagcccactgagtgtcagatgcatggaatgttggatgacttcatagttataaaattatttcatttctcatgataattccggacttgccaagttagtgaattttaagaactctgagagcagattttaagataaatgtgaaataatccatacttctggagtcagggacttcccttcaggcattagttcatgtttgacttgcttgacttacacttggggataaaatgagttaggacaaggtcttagataccacattcccttactgggaaagaaaaccaacttgcacaactttggctggctcatatttcttgttatacaggcactaagaagcagcggttgccatgaaatactttatttaacctttacaaaaatgttt

SEQ ID NO: 130783 - DNA, 1018 bp, Homo sapiens
tatgaaagaaagatttaaattgtttgcatatgatataaatatatctttcttaaaatatcagttttcagccaggtgcagtggctcacgcctgtaatcctagcactttgggaggccgaggcaagcgatcttgaggtcaagagatcgagaccagcctggccaacatggtgaaacctcatctctactaaaaatacaaaaattagccagtcgtggtggcacacctgtagtcccagctactcgggaggctgaggcaagagaatcgcttgaacccaggacgtggaggttgcagtgagctgagatcgtgtcactgcactccagcctggcaacagagcgagactcaaaaaaaaaaaaaaaaaaaagtcagttgtctttccttgtacttacaaatcatagaacgttgttttcatttaaacctgtttcctacaaaagtactaattattattattttttggaatactcatatagttaaactgattttcttagctgcagttagtgggtaagagtagaaataggacatatatgaccccaaaacaaatccaaacatgaccagacatggcaatgctacatgaataaatataaatatgtatcaggaggctcagttggtaaatgttacaataagtacataacaaaaaaaaaaaagaacaaatacatcatatcttacatttaaaatgttgagggtatttctaatttgatatatctgtgatctcataaggaaagtatattaaatgaattgcatcttcaaactgctattttgttctttatcaaaagaaaaaaggtatgacaattgatgattaaaaaaaaaacccacaaaccaaatttagctttcattactgtctagccataagaaggaaaaaaccgtcagccaataccaaggttctttgatctcacgcttcaacctttttgtcctccagatgaatgaaatgatcttttctcaaatgttcagcaggccttttaccatttgataggaaaattatttttaagaaggtttaaaatgtgatctgaaaaaccacattgactctat

SEQ ID NO: 130784 - DNA, 1415 bp, Homo sapiens
atgcccagagatcccctgtgggtccccagaccaccctttgaaaaccagtgttctgatactattaactagatgggtatgtttaagcaagaaacatcttctctgagcatcagttccttacataacatgataaggtaatgaaatgatacatgtagtggttaagagcagcaccacagagccagactgcatgggttccaaccccctagttagaccctcttcatctttgtgaccttggggaagttacttctttgtgcctcactttcctcttctgtaaaatggggttaataatagtaactcccccacgtaggtactgtgaggattttgtgagttaatatgtatacagcacttgaaactagtggaacacaatattgcaatatatgaaggtcaatccttattgtcttcattgtcgtcattactgaagttctcagaactctccttggttcatcataggcattagtgaggcagctgctgggagaccatgaggaggaggaggaggaggagtgaggctgggtggaattctgccaagtaagatgagtggcatttatttacatatacatgctttctaaataaacactttgtgaggttactggtaaaataaccagaaaacaagtcttttatctgtcactacagaacagcagcaaaagtaacagggctgctaaagcaccatgttgtaggctaaatactgacaggggccagaacatttctgagaatgaaaggaacgccattaaatattctggggaaaaacaaaggtaaaattggtactgtcctggcagacaattagataaaataaccttttaggaatactcaagagattttgatatgccttacagtattgtcaaaattattttttctcaattatcttgtagttatgtcagttctgcatttcctccatggtacagcaaggtatacaaattattcagattgaagacaagactacaataatcaataatacaccatatcaaatattttataaaccacagctatctgtctgcaatccccattctggaaaggaggtaagcaaatcataacgattcttttgtctaagttttgataaagaaacaataaataggatcaacttctctttaacctatagcaaatgaaaagctaaccctgaatgtaggtaaagagaaattcacttatttttgttgtaattaaaaccatgaatgtcatggtcactgcttccaaggtaattaatgagcagaaatcctaccaagaaggaggccctgacacactgctggattagtcctgcctgtgccccatctgctcagaggctccagcctagtcctctagcatgctcactagactcctacaagcagagacatagtcatgaggactggctcctgggtcacatggaaaagcacatctgtctcacaggctgcagtgcctgggggagccatgcaggcaaaaggctagggcct

SEQ ID NO: 130785 - DNA, 1016 bp, Homo sapiens
gcgtggtgactcacgcctgtaatcccagcactttgggaggccaaggtgggcggatcacttgaggtcaggagtttgagaccagccttggccaacatagcgaaaccccatctctactaaaaatacaaaaattagccgggcgtggtggcatgtgcctgtagtccctgctacttgggagactgaggcatgagaattgcttgaacccaggaggcagaggctgcagtgagccgagatggtgccactgcactcccgcctgcgtgatggagtgagactgtctcaaaaaaaaaaaagaaaagaaaagaagatatgctttaaaaagtttaattctgctgtattactgtagctaatgtgctctctgcatttttttttttttttttttttttttagtattttcgtgttccagacagtgctacttttagcatttgcccaggtggagagcagcctgctatgaaatccagctcccttccttgctgggacttgatgcctgacatcagtcagtcagtactggatgcatccctgcttcagaaacagatcatgctgggcttttctcctgccccaggtgctgacagctcacagtgctggagcctgccagctatagttagaccagagtttcccagacagagtgtggcagtacccctcgggaatttccgggaaaatggattctgtaccaggtattttatgtttatataaatgtctgttcttctttgcttgtcagtctagctgttcatctagatgccaagagagatacaatggtcgcagggctccccatatgtaatattaggctttatttttaattacttctagacattgtatacagtgggtcaagtgttataatcacatatggcttgtcccagcatactacttaagggatttttccccatatggagcttacgctggggggaaatgatggtacttgtaccacagaatgtcattatatgaaaagatcatatgtatcatcatacaaatagcatcgtatgaaaagatcatatcataatgaaaaaattacctgttatgagttc

SEQ ID NO: 130786 - DNA, 1086 bp, Homo sapiens
agtgagctatgatcacatcactacactccagccggggtgacagagcaagaccttgtcccaaaaaataagattgagtggtgggaaccatgtggtctcagggtacgttatggtaatcggcatcacagtgtgtgttcttgagccaggttcactctaaagcagttttaatttgataattgggttcccagaaattcaagcaaagaacagcatccagagttagccttgtcagccctttccaataaagaacatggaaatcttactttctgaaagtaacagaggagagagcctttgttctatcctctttgtaaagttgtactttgtgaatgcgttcccatgtaagattaagattgcagcagtaaacgacctgtgttattgccatattggtcagattacattttctccataatgaaattcatagacttactagggttatctagactcttttataaaagataacaacaagatcagggagagggtcctgccagacctgttgtcttgatagcttgcacaacaatgaagaaaacatttccctattgctaaaaactcatttaaaaataagcagtccacatttcaagtttaatagatgggtgtatttataaacagttccagaaactttcccttcaggcagcctttgctttttcacataagaagcaggcacgtaggttactgagctccaatctgaggcctggcaaggacgaaggctcccattcagtctctgcacgacgcagcagtgcagtaagcagcagggaaactctacctgtggcaccaagtaacgggccctgcagcccgtgtgctaaaaacgagctctctttgttttggtttatatttttaatgagctttcacaagaacattctatttgaattttatagaattcacccaaaaatcctctaagctgccgttccaatctcactgtataccaagataagggattctaatatagagggccaagttttcagagcctgttggaaactctgtcactaaaaatctatggacaatctgaagaccatctgaaagaaagcagtgattgaaggagtaggaaatgggaagatgctggaggctccagactcccaggttagcatccttgtcgag

SEQ ID NO: 130787 - DNA, 1274 bp, Homo sapiens
aaagtgcttcccgcaaggacagtgttttagttttatctgtgtgtgtgtgcttgatgttattttggtcaggttggcagagacttgggaactaacaagggccatctgagtccccttttcttctcagcaggaggcaaggaaaacagggcaaagggcttcttcccgtaaaaggcatctgactataggccataggacaggtctgtgaaagtctctggaaggcctcaaaagaagacttgatcttgaaataggagaatccatgatccatagagcgggtgagggactgtgggtgggagggctggcaagagaacagccagagtcataaaaacaaattccacggacaatgaaaaggacactcccccaggcctcaaatcatctgggaggactgggggctgagctgcagaaactcaccccatgagtcactggcagactgctcactcttgacactggaatctctgtggttctgttgtttttatgttaaaataagacaactaacacctgctaaattgaacctcagtggtattttcagcctactgactcactgaatgttttttacacttgttcttttcttctcttagcaaaatctttttggtttgttggcatccctatgtgtgtgcgcacacagatatttttcttttcagattactggtaaagatgcagctgcaaaaacgacattgagcatttcttcctgaaactggacctgcaataacagatgagctagtttgttagtgtccagatctgtccatgaaagtcgctcagtttcgctcactaagatgtgtgcagacctgctagaggaattgtggctattgtgagcaaatgctgaaatagcccttcttaggaaaaccagacagattcacggctctcacatgatttactccctttattcccctcactggtttttcagttaacatcctgaatatcaaaattgcacatattctccatggcacaataattacatcctcagaatggcaaatgataaggtttagtatctccccctttgttatgactgaagttatatggagggaataaaatttattcctaaagctgaagtatttctttataatctttctaaaacttagcaacataactttaccctttaaaatcacagcaggcagattttaaccttcaaaattgggcctcagtgaaggcatcaatactgttttaaccaaaccttgacaaattaaattatagtgaaggatagtttcatatgaaactctaggctgtgttctgcacctgcgattcttaccctttgaagagtgtcatcacccctgtgggcaagt

SEQ ID NO: 130788 - DNA, 1124 bp, Homo sapiens
aaacctcaattccagtgagagagaaaggttttccaagattggcaaagaggaagagcctgttttataaatgggataagcgagtatcttggtggttaagagctatgctgtgactcaaactctctgtacacttaacagctgtgtgaccttgggaaaaaactccttaacctctgtgcctcagtgtccgtatttggataaaaacaatgtatgactcctaggaatatgaggatcaaatgatctcatacaaataaagctcttagcacagtccccagacctagtaagcattcaagatagattacctataatccaaataataattactatatcaataattactcttaagtattaatactactaaattatgactgttatcattattatcaaaagtggagagttagaaaggggctaaccccttccagtttttcatcctcatgaatcagtgcaaatgtattgggctgaacagtctttctctgctcctgaggaactgttagctcctctctctcaactttgttgcctgacttctgaggaaagatgtatggatgacactctgaatagcctgacaggtttgttaaattctgaactaaacttcacagatcctgactgtgtggaccaaactccgtctgaacattgtattttgatgacgataataaatgtctactgcccttggtgtacttagataactggtaaacaaatgggtagtaaagacctttataatgagggtggggactcattttcaatccagataaaactgtgttccagatggagcctttcattttccgaggattttaagcctctgtccttactgagggcttttgttattccaggtgcaattgctggtatagttgatcagccgatgcagaacttccagaaaacatctgaggcacaggcttcagcaggacacaaggccaagggtgtcatctcgggtgtggggaaaggaatcatgggggtgttcacaaagcccatcggaggagctgctgagctggtgtcacagactggctatggtaagtcggtggaaaacccatcaggccaacccagacgttactgatttgcatgcttataccaagggttccctaagatagtgtaacctttcacatggcagacagtggctatctttcttacctctctat

SEQ ID NO: 130789 - DNA, 1110 bp, Homo sapiens
cccaacataatccacagacatgaggaagcctgtctgccgtgaacacttccagtgaagactaaaagtagtattttaagatctataaatgacttttctggtttttagcttttgcctagttcctttgaattttggaaggaattaatttgtagatgacatcatgcagtacatttaaatatggcaggattgagatttattttttaagtcagcatttgcttttcttggttaaatgcaaccagtttaggggtaataactgcttaatatgcctggcacattattgaaatcccttatgagtggctcaaaatgagtcagaaggtcaatttagtccttggctgggttcctttcacaacaggggttttcctgtgctgctgttcaggaggagcaattaaaactttttgtgtattcaaagctttccagctgaattctggccccatcaaatgatatcagagctctggcttttgcctggtggtgcagagctttcgtctgttagtgaatctttggggaccgtttttccccaagcttaaaaacacaagattcaaactctaagggattccttacttattcttctagcaagcctctttactatctctctgccatcgcacggactttctccagcttttaagacactttgatagcattgttactggaccacacgcagaactagaaacaagtctttctttaccacttcttccagagtagtcttgccaatgttcagtaggcaaaaaccacggaaagtttggtggctacctgagattcacaaatcagtggcttacaattgcaaacttcccactccacttgatctacacactagatagctaaaggacttcagggtaggaagaatttatagcttcagctgcctttgatgagcgctttctcagaaaatctcactgaagaacctagtgtatctcagttctatttgtgttccactgaagatgagccagacttttatgaacaataaatgtactttacatcctctttttttccataaaaatttccccttccgctgcccagcttctctattttctctggctttaaatcctaggatttagaaaagcagaaaatgttacagttcaaaaggttttttaatgctccgtccaaagccactggtttgaa

SEQ ID NO: 130790 - DNA, 1082 bp, Homo sapiens
gagcatgcattttataatcagaagatgttaataggctaatttaaatttgttagatttttaccatttttaagattatgtttaaaaacctgtatgagagaacatatttggagacaggaacaaaaatatggcttggaacagaaacagtatgtggctataagggttaatggcaggggggtgggggcggtggtgggcatagaattgagaaggaaaaaagcagaatttgttcaatgcacacaagcaatgagagtaaggtgtggtatgcccaaaatggaaaagaggctattcagagtggtcagggagcttagaggagcgtaaaggagagtgaaacttggagtccaggtagcctgaactgtgctttttctgtggctgagggtgagtgatcaaggtgtgaagtctactagtaggaatagacctcagttgatcctcaaagatggtgagtattgagagagtgtttatctctaacttagcctttgtgtttctcttcacagaatttcttcaggttgaattacctagaagtttgtcactgacttgtgttcctgaactatgacacatgaatatgtgggctaagaaatagttcctcttgataaataaacaattaacaaatactttggacagtaagtctttctcagttcttaatgataatgcagggcacttactagcataagaattggtttgggatttaactgtttatgaagctaacttgatttccgtgttttgttaaaatttcattgttctagcacatctttaactgtgatagtttgtccgtttcattgcagttacttggtcttgggctatggattaaaaagtgttcttcatgagcctgtaagactactgtactgtgggctctaagaagagatagaatcctaataaaatctatccttggccttcattgccactatttggtagctgtgccaccaccacatagttgaaataggtaattcaaatgtagggtttcttactcagtattgctttattaataacaagctaacagtatgtaatagaatttggatatatatctaatccagaaaaggttacttaactagaattgagtaatgtctcctaatgacaagcagagtatggta

SEQ ID NO: 130791 - DNA, 1035 bp, Homo sapiens
gaagcagctggcagcgtcgctcgctgtgtggcagcgttttaaattagagctggaaaactggaggagggtcaccgtacctgccgcaggaggggaaggatgggcttcctgcaacctcccttgccccacggcttcccatcctacccccggccgcgttagctgaaggccagcagggacgcaaaagtttttaggccccttaggtctttaggtgaggctgggcaaaggagcagttagggaatttgggccctcatggtatttgccgcgttcccgtccaggttttaatggtataccgtgtgaccgtggaaaacacctgcctcatgatctgacagggttgtcgcgaaggtttaacgagtggacagaaaatttttagaagagaaagtgttgcataaatgggtttgcaatcgttaattaccaatgcggagctactgcttatttttcttgttgttggaaagatttttgttgcctttgctcgtccattactagtgtgccgcagtttgtcgcgtttatttagggtggtcgctcagtatatggggggcggggggaagatgaaacaggctaagccaagagacagcttaggctttgtgggaggaatccatccactgtcgtgctgtgcctctctaggtagtaaaatgtactatgcatgagaattccttttgatatcttttctgagtttttcttttattattttacccgagaaagggaaaaaaagctcagagtagtgagagctacatgaggtatgcaggacgcagagacctgagtattggacttcagtgccgcccctcacccatgtctcaacccaaatcttattcctgaatttgtgatataaaggacagcgtttagtcagtcaatagcttatgttattttaatgtaaatttttgataaacagtttaggaattgcctctcattttttcttaactcacttgtaggccggaatcccagcactttgggaggacgaggtaggatgatcacttgagggcaggagtttaagaccagcctggggagcatagctagaccctgtttctgccaaaaaagaaaaac

SEQ ID NO: 130792 - DNA, 1049 bp, Homo sapiens
agatgatctgtgaagtgattttggtctctttggggtccagacactgaatcaagatccattagtaccatttctatttctcataatgctttaatgtttcctcttcaaatatgttccttgtactttctcatcaggccaagctaataagattttccccactaaactcttacctcttctgattaatttatcagactgaggataaatgtaatatttgaagcttagttttgaccttttctaaataaggactattcagaatgtaaacaaacaattttaaagaaaagctgttgaccctcctcttctggttcagctttactctaactattaacagggcctttactgtatatttttttaaatggatgtctgttaaacagagtatgtaagtaaactgttataaattggcatattctggtgtgacttggtatatactggtatgtagctttgctgccagtaaatatttgaagtagctggtgtcatttgttttttcctactttatttctctttctttagtgatcatgataggaagagaagtatatttgccttataatcagtgctatgatgagaaatgtttaacaaccagatctctaggggaaaaagcagccctgatttgtagcatttgctgatctctgggtatactctcaccatggatgatttcaagctgccaaagtgacgtcactgaatgcagagttgggaagagatgtgcagtagcaccccatcatataatatttcccccatacagatacacctcaagaccatgggtaatattaatcgcaaaacagtaaaatcaacaagaagtaatgagttttgagtagtcattatttttgtttttaatataacttctttttttcctgaggcctttggacttgaatcataatttctttaattgtaagtttatgtgatttaatttttggtaatgacagagtttaacaactgactcacaaaattcctgaatgtttatgaatcggctcttgtgagctggtacaagctggctccagtaaaccattgcttataagggaggaagagaagtaataacaagaaaagcatcactgtgaatc

SEQ ID NO: 130793 - DNA, 1079 bp, Homo sapiens
tttatttatttatagatcctcttttaatcctcttgtttccagaaaggccaacacctgaacttctctgaaacaccattatctattatacctgacgtttcgttaatgtttctgttaggttctgtggtaataactttatatggataattttatttaattctagacaatcctaagaggtagattggtatccttattttacagatttggaaactgagacttagggaagttgaatgctttcctaacgccatccatttagcaattggtgaacttggaattagtaccaagtattctgactccagaccctatactcttaacttctaagccattgctttcttattattatctctagaaaaaagagtatctgtttatcaccttgtttaatctttcactttaatatcttaaactatctttatgaacattaaatgtcaaacatcacctttaatattttttttctccgtgagactgtaggtccatgaagacagtctgctctgtttaccttgtatgctcaggactgaaggtgccatataaaaggtgctgtgataggtattgaaaaaattcatgaactcattggcatgtttatatttgtagcaacgtattataaacctaatgaaagatagtcattatttggaaatgacagccagctgagtgtttttatttttttaagaaaaattttatgtgaaaacagtttaatgagcccccatataccttcactaagcttcagcaatgatcaacattctgtctttccagtttgctcttggctgggcttggtggctcacacctgtaatcccagcactttggaaggccaaggtgggtggatcacgaggtcaggagttcgagaccagcctggccaacatagtgaaacccatctctactaaaaatacaaaaattagccgggcgtggtggcgctcgcctataatcccagctactcagcgggctgaggcaggagaattgcttgaacccgggtggtggaggttgcagtgagccaagattgcgccactgcactccagcctgggcgacaaagcaagactctttcttggaaaaaaacaaaaaacaacaaaaaaagggagctcttaataaattgt

SEQ ID NO: 130794 - DNA, 1029 bp, Homo sapiens
aagttcttaaggatcctggaagacatcaaaggtaattctatttttttatttttcaatagttttaaaaacaaattatgaatattaatttgggttatttagcacagggagaaagcccaaagtaaattttaaaaaatgtaattttttactcttggaggaatgaatgataataaaacttattataatagtaaatattgatcacactagttttctgatttcatagttttcagatactaatgataacagttatttgggtttgcgtaatgtttctgcccatacattctagaactactttcaaattaattattctattttcatttttataacattaaaatgatgtataatttttatagaataaaataatttatcagttatataaccacactagcataaaatagacacctactctccctagcagcctgcttggttaacaaattccataaccttggttggatgccaggtagctgggtatctggatgagtctctccactagagaacttcttggaggtctgatggggctcaggtctttggtcagctctgtatgttttagattactgtaagttgaagaaccttaagagaaccctgttttaggaaagtctttaacttgtgtttattctcctgaatattcaactacattttggtagttgaatattctaccaatgtgtgtgtgtatatatggaaatgtgttttatttcagacatcttgagaagatgaaaaaatgctatctagtgagcaatggagattactacctttctgcagaaatcttatcaaaatttaaactgttagatggatcacagtggaatgaagagcatttaagaaatattcagtctgaagttttaaaacctttacttctgtattggtaagaaaacatgaatcagttacttactttcactttccttacgccagttatgagttatactttttttgtcttacggatatataacttatggaaacataaaatgacaagactattgtatctttggccttctttaaggtacttgtcctttagataatttggatgtttgggtgact

SEQ ID NO: 130795 - DNA, 1045 bp, Homo sapiens
atacaaaaattagctgggcctggtggcatacccttgtagtctcagctactcgggaggctgaagcaggaaaattgcttgaacctgggaggcagatgttgcagtgagcagagatgccaccactgcagtccagcctgggcaacagacaagagactctgtaaactttactcatatatatatatatatatatatatatatatatatatatatatatatatatatatatatatatgaaactatgtatcattgttaactatagtcatcctacagtgctatagaacactagaacatgtgcctcctatctagctgtaattttatatcctttaacaaatctctgcctgtccccctcttccccctaccctttccatcctctggtgtcctctgaggaaccctgtcttatacagcttcgtacccctcgaagcataatagtcacccgtggtactcaataagttacctgcctggatggtaaatagctacataaataaaacattgttttccaccatgaagtaataagaagccctttggcaagaagctactattagtacatctaaaaaagaagaagtcatgtcctagtttgactaacacagctctggcttactcctgttgtctcatataacactctcagaaactctagtttgaacagtaaattatgtggacactgtttataaggtgagtaatgtattattgttttcattggctgtatcagtttattttgtttttttgttttgttttgtttttgagacagagtctcgctctgttgcccaggcgccatctcggctcactgcaagctccgcctcctgggttcaccccattctcctgcctcagcctggagagtagctgggactgcaggcgcccgccaccatgcccggctaattttttgtatttttagtagagacggggtttcacagtgttagccagaatggccttgatctcctgacctcgtgatccacccgcctcggcctcccaaagtgctgggattacaggcgtgagccaccgcgcccggcccagtttattgatatgggtaaagcttgctagtatctgtgcctaa

SEQ ID NO: 130796 - DNA, 2036 bp, Homo sapiens
ggatcacttgagcctgggagttggaggctgcagtcagccaagatcacaccactgagctccaacctgagtgacagtgagaccctgtctcaaaaaaaaaaagaaaaatttggtggtagatttctaagtctaaggaataacattctgccaattttttcactgtccttgtcacattttatattataaatcgttgctacagctgcttcagtagacattgaagcaaaggcagtacttaagcctagatcttacctctgtgggtaacaacagccagatattaggagatgggactttggctgagtcctgggaaacaggtggagtcaggacatccaggaatgtgtgaactgggaccgggataatcggctagggtccttttatgtattaatgcttgcttactttgttctcaccaagtcttttatcaatagccatatagataagtaggaaaaattatcttcccctgtttctctttaattcactatttttcacttaggcttattagccttgctttttttaagtgtaggggagaatacatgaattaaaagataaattagacatcttatttttaggtagtttgccttttaaatacaaactcttaagttatagtggtatatactacctctttttaaaaaggcaaatgttggttgggctcagtggctcatacctataatcccagcactttgggaggccaggttgggaggatagcttgaggccaggaatttgagaccagcctgggcaacataacgagaccctgtctctaaaaatatatataaataaataaagtattaaaaggcaggtgttatttatagagtcattttttaatatagatgcccaggatttttggattcattggtgtgtcatgtttaatgattaataatgtattctaactttgtgttttgcattgaaacattacaaagtgccatatgctgagtgagaataatggagtacatttaagtgaaaatcctttgtgtcttttttgtgttatttcattaccactttacttggcagacagctgatgttccccattttatttggatggctggtactatgcagtgtgctgcagtagaatttaaattaaataaaaggaaataaaaaataatggttcctaaaatagcttctggttactagggttcttaactgaattatttaaagatacatattacagtagtgctgatattaaatataattttggtgatttcatacccccctttaaggttggaagtacaagcagatgtacagaaagaacggtacagtctaagtggagaatctggcacagtcagcttgggaacagttagtgataatgccagcaccaaagcaatggcaggatccattctgaattcctacatcccattggacaagtaaggaaaaaactgttaaaaaattgaaagtattttttaaattaaaggaataattcctatcattagacaaattaccagtgaaaagtggctaccaactattaagttctctgagaaaaggaaacagtgagctgtccagagtaggcaaatctgtatagatcataaagtggatttgtggttgtcaagggctgggaaagggaagaatggtaactaactgctaatggatgcaagatccctttttgggatcatgaaaatgttctgaagttaggtagtggtgatggttgcacagctctgatcacaactaaaaatcactgaattgtacactttaaacaggggaattgtatctgaataaagctgttctttaaaaaaaggtagcatagtgtctagaacagcataagcaataaatgtgtccaccactattttaaaacattgaagcattataaagagttctgttatatcaagtatgttttttaagtagaacgtgttctgcgttaaggtgttctcatagcttatatatagtctgaattttccacatagaaacccttcccccagtcatctgaacaaaaagaagtcagcaattatgtttgtatttgttactcttatatttcagagaaggcaacagtatggaggtgcaagtagatattgagtcaaagccatccaaattcaggcacaacagtggaagcagtagtg

SEQ ID NO: 130797 - DNA, 1092 bp, Homo sapiens
aaaaaggtttattgacatactcctataggcagtctatgaaggcttttttattcttcttaatctttgctcgttactgttctaattcacatttctttgaataacattgagttgaagatatttttgtattattggtcatccgtatttcttttattaactgtattcctcttcatatcctttacttagttatttataatgtttcaggcaaaatttaagatgaaaagtttatgatttctaagacattatattccaattagaggtcagatacccagaattacccccacctctttcatccatacactcctccttggcagtttattcacttatgtacttctgaatgaatactattaggcctagtaaaaggatggcaatggaaattctgagttgcatgttatctctggcctccccactacttacactgttaataagcacattttcttcctttgcttaaaggacttacctacagctgtgttagttccaccaacatttatatcattttcatcatcaaattcaatcctaactccttttccattgcctgctgagactccacaacctccgcttcgacaaagagaaattggaactacgccatagacataagctaacataataggaacaccgatacctaaagagaaattaaatcagtcattacaaacaacaacaacaaaataactcacagaaacatgagttttagaaagtcttttcaagagagtcatacagagaaaagcgccagggttctgaagagttggctggaacatttgccaaaagtagatttacccagttgttaagcaaattcaaggttcccagcctttcaggtaatgcacataaggggaaaaagagagagatgcaaacttttttcttttgaagtgccaggcctccgaactgtacttggggtggagtggggaggaagggtatcagccactaacaatttaccaactactttaaggctaggctcttgaatctgtaatactttcaaccaagacttactgcaggctcaatttaaattgtcctcaaattaaaaaacaattaaaaaaaatccttccacaaaactttaactccataaaattgtaggtaattagtacttttcagcattttctt

SEQ ID NO: 130798 - DNA, 5115 bp, Homo sapiens
gatataatcagataattgatgcctaaaaatatgcatgttttgcattaatttactattaaactgacttaagggtatgagggtaatggaagactagggataaatttttaacctgaatttcagttatcagtatcttgttaatataatatagattaaataataaaatataatataaaataagatatatcaatatcttgttaatataatttatagtggttcttaccttagtttaatgaactcagaatttaaaggggaaaaaagctcctaactatgagaagtttttaaaaatagtcattgttttaatatagtgcactaatttgttattgtggtgttttgcagcagttatttacattataattttttccgttagtccatcaggatgtactttttgggggaagaaaccctggagccgaaagaagaaaatattgtggcaactgggaacactggttggtgctcctgtcggaatcgctttaatagctggcattgctattcctgcaatgattattggcattcctgtgtatgtgggccgcaaggtaaaatgcatacttcttgttagtccattatcttattctaaatctttaggtgtattcttttagtattgatgatttttgggtttttttttttttttttttttagacaaagggtatctttagtttcttcagtataaaacagttactcttttttcataaatttttagtgtttggcaagcatatataaatacgtataaagcagacttgctttaaaatgttctgaatctgaaaattttagtatgtttgtattataaaactttgagtataaaatattgaaggatacacacctgagatttttctcataggtatatccttgtaaggtcaggtctatgagatctttttaatgaaagttaatagctaaataacacatgccctcaggcaaagaataattagccagttcttgaattatttctgctgtagttcaaagctttttttttggattactgcttttaataaatacactattttgcaaattataacaatcttgtgaaagtccaaacaccagtgactaccactggcctctaattgatgaattatatttcattagctaagcaaatagttcttttgttaagggttaatgggataatttatgaggtcctaagaagtctgttgttgcctaaattaatagaatctctggattgagaagtaactttcagtagaatatagctaaaagaaaaaaaaaagaaattttctttggtatccaagaagatcaaaaaaattaaaactttttttaaaaaataaaaagaaattaatcccaaccttgtacccaagcagaacaaaggatagcaattttcaaaaagggaactaacaggccaggtgcggtgcctcacccctgtaatcttagcactttggaaggctgaggctggtggatcatctgaggtcaggagttcaagaccagcctggccaacatggtgaaaccccatctctactaaaaatacagaaaaaattagccaggcatggtggcaggtgcctgtaatcccagactcgggaggctgaagcaggagaatcacttgaacctgggaggtggaggttgcggtgagctgagattgcaccattgcactccatcctaggcaacaagagcaaaactccatctcaaaaaaaaaaaaaaagaactaacaagctgggcatggtggcttactcctgtcatcgtagcactttgggaggctgaggcagaaggatcacttgaggctgggagttcaagaccagcctggacaacatagtgagaccccatctctcaaaaaaatttaaaaattatctgggtatggtagtatgcacctgtagtcccagctacttgggaggctgaggtgggaggattgcttgagatgggcaagtggaggctgcagtgagctgtgattgtgccacttcactccagcctgggtgatagagcaagatcctatctctaaaataaaaaaaggatctaaaggttgtcatactgtgtcataggtgttgtatgtacttttacttattttaaccctgcagcaacctcgatatttcggtctctgtgtgttaaaatattgagatttaggaaagtttatgtaatatatcttcagttacacacaaagaagcagagctgagatttgaactcagatgcatgaattcttaatataagttccatgattaagtttcagtagctatttgggaactcagtcatggggaaaccaccaactcatgaagcaatccattctgttgtaaaatggctactaattgttacaaaattgttacgtttgagtcagatctgtttccttttgtttcctttatttctgtttctaacttctgggacccgactgggaataaggttgatcttcttctgtaaaacagctgaattttttatattcaacatacattttataatcagaaaaataatatatactatttcttaaaaattagttttggggctgatgacaaacatatttataagtcacatatttatttctgaaggttttaagtgagtaaacctggactttaaaaaatgttgggccatgtgtggtggctcatgcctgtaatcctaacacttggggagggtgaggagggaggattgcattaatccaggagtttgagaccagcctgggcaacacagtgtgacaccttgtctctacaaaaaactaaataatcagctgggagtggtggtgcatgcctgtagcccccgctattaaggaagctgggatgggaggattgattgagcccgtgaggttgaggctacagtgagctgtgatcgtgccactgcactctagtctgagcgacacagagagaccctatttccaaaaaagagagaaaaaataaaaaatttcaaaatatattagctgatcgtaatttttcatgtagttattcaaagcaaggctttgctgaaaacaaaactattcagatacttagaagggaaagagagactgttgtaccacatgtacctataaatcatttatagagaagagattatttacctcattgttcaggtcatagggtacagttacagatctccttttttcaaacatgtacccaaagggttgtaaatgaatgaattagttttccattgaaataatattctgtggtgctttgggatcccaaccagcctaggaaaacctgctaagtcaataaagtacccaaaagctgagccttcacttaacaataaaaagtagagaatgtggcaaaaaatagtaaacagaaaaattaagttgaaccagaaatagtgggataatgtgatcactaatcaaacattggtgcttgaggctgaaaaattttctagaagactcctttctcttggcagcctgcctttgcaagtctgctccatcagttgtgccttttctcttcttcagtgctaagtttcccaggaatgggagtggggaggagcaggaattagctgcagtgctgaaggataatgaaaggtaccttgggaaggtctaccatctctgcctgcatggactgtgtagggaagtgaggaggctcattgacaaggaacctctagtcaatgctgggaaatgggattctgactaggaaatagaaaggtttcttgtcccatacatgcatcacccacctcccaccccaacctttctactgttttccacaacactcatcgtactttacagccttccaaaggccaaaggtgttattataccatgtaataatagattattttataagtcccatctgtagtattgtttataagtcattttattttagagagtccccatacttttgaggctgttttgaatttgttttggaacagagggggaaaatgtgccatattagcccttgcaaaccatgaaaataaagatctcaaagttcatataatttcacaagccagtttttaatcaccgcttctatgatgatatcaaattctacttattaacacctgtcctgtacagagattgctgagtgaattcaatcctgtcttctggtagccattatttatcatcttttttctttctctgccatttactttgagctataaatgagagccctggaatttgagtcatttgtcaatattgtcttcataaaaaggatctgagaaaaaaataatactgtttattcatacttgtttattagaactgctttttaaggtcaatttttaaaaagaaaccttccctagaagccaatttttaccatttagagaatattctttagaaagaaacctttagaatgctggaagtatcctgttggtgaaccatgtaactcataactgtgttgaaaataataatcttaatttcttcctctttgctcgatacataattacactacttttgattaagattataaagatgacttttactcagaacttttaagcacaaagtaaaatccattaaatcactgtcttaagcaaattaataaggagcaaattatttgtgagaatatataatagtttaaggacactagtaggtttaccttgaactaagatactcagctacgaacttctatgaaaaatcactttagcaagtatagatctttttcaactaagttaaattgtaatgtattttctctttaatcccccacccctatttttattaattcaagattcacaatcgctatgaaggcaaggatgtttcaaagcacaaacggaatttggccatagcaggtggtgtaacgttgtctgtaatcgtgtctccagtagtagctgcagtgactgtaggtaagaaaatgctgaaaagtactaattacctacaattttatggagttaaagttttgtggaaggattttttttaattgttttttaatttgaggacaatttaaattgagcctgcagtaagtcttggttgaaagtattacagattcaagagcctagccttaaagtagttggtaaattgttagtggctgatacccttcctccccactccaccccaagtacagttcggaggcctggcacttcaaaagaaaaaagtttgcatctctctctttttccccttatgtgcattacctgaaaggctgggaaccttgaatttgcttaacaactgggtaaatctacttttggcaaatgttccagccaactcttcagaaccctggcgcttttctctgtatgactctcttgaaaagactttctaaaactcatgtttctgtgagttattttgttgttgttgtttgtaatgactgatttaatttctct

SEQ ID NO: 130799 - DNA, 1036 bp, Homo sapiens
gtaaacactgaccctgtctcaattctaacaagcattttagacatgagtttacatcggcaaatgggttcagatcgagatcttcagtcctctgcttcatctgtgagcttgccttcagtcaaaaaggcacccaaaaaaagaagaatttcaataggctccctgtttcggaggaaaaaagataacaaacgtaaatcaagggagctaaatggcggggtggatggaattgcaagtattgaaagtatacattctgaaatgtgtactgataagaactccattttctctacaaatacctcttctgacaatggattaacttccatcagcaaacaaattggagacttcatagagtgccctttgtgccttttgcggcattctaaagacagatttcctgatataatgacttgtcatcacagatcttgtgtggattgcttacgacaatatttaaggatagaaatctctgaaagcagagttaatattagttgcccagaatgtactgaacggtttaatccccatgatattcgcttgatattaagtgatgatgtcttgatggaaaaatacgaagaatttatgcttagacggtggcttgttgcagatcctgattgtaggtggtgtccagctccagactgtgggtaagaagataatgtttgatttttcttgagttaatttttttctctgtggataaaataatttgctattactcaaaagaaaaatttttacatgctggagaattcattcaacagacatgttgagtgcacaccatatgtcaggcactatgctaggtgttaaaggcagtgatcctatcttactcatttctatatcgtctctgcgttacatactcactgagcacttttagaaggaaagggtaaggtggtagagtacaggatctagttgtatacaaaattggttttctcatccatttggagaatttttattttggaataacagatgaaatgatcaggtttgtttatgatgagggggttatttgtggtcataaattcaaatgaccttctttattttttttctctttgttgacatgtttctc

SEQ ID NO: 130800 - DNA, 1028 bp, Homo sapiens
aacagctggctttggaatggagaacactacaattcaaatttgaagtatattcagaagaaaactttggaattagctttacatttgtttgtaaatctaaacaaatatgcaaaattggtcaaaatgtaagtatatagcatttttaaagattaatggttccttttatgtgctgatttctttgtattctgttctctgcattcatcattcaggaataccaccaataaatgtatttatatatcccttaatcacgatttctcttttttttttttttttttagtgtattatagttttaatttggggattttgtaatggattgcaattagctgctttttaaaacacagctttttttcaaacctaatgtattaggtatattgagtttcatatatgtttgccttataaatactgtgaaattaatttgagtgaattgctcgtagatttaagggtgatgatcataactaccacaattaagcccctcccaattatgcaagtttttagcatgcaagttttaccctacgcccccttgagcactacatgaccccagtttataagatgagaaaatggacacagggatggctaagtaacttgtccaaggtcaaacaggtaggacctggtggaagagggattccagattgaggctccagccccaattatgcttgtgctttcctcctgtcccgctgtctttcatgaatctggaaatggaaccatatttatccagaacctcgcctgataccatttcagcaggacattactaaattttccactcgtggtcctatatacttactttttttcctttcttacacatcttcccagtggtagaagctttaatattcaagctccaaccctggcttgtcagaaagtcttccatagttaaccgtacttgactgcctccttcccaacccctcctttccccaccacttaccacactcagttttattacttgtattttgcattccttgatccgtttctctgtaaacatgattttctttctaacttgtttaattgtaagcttcatgagagcagggacttagtct

SEQ ID NO: 130801 - DNA, 1052 bp, Homo sapiens
cttctcaagacccaactatatatatcctgtcctacagttcttaaaagaacccctgtacactaagtacatttcccctttttattcaggatgtctcagccaggcacggtggctcacgcctgtaatcccagcactttgggaggctgaggtgggcagatcgcttgagtccaagagttcgagaccagcctgggcaacatggcaaaaccccatctttacaaaaaaaattaggatatttctaatgagtttctaggactagtgtctaaagagttataagcccacatctcactcctataggtattctaagttttctcctcacatcaaattagatagaattagatcagattacatcataaagccacactgcaaagcaggatcaactcctgcaaaattgccttcaaggggtccggctcagggtggggaggtaatgtgttgcccttgggtttaatcaaatgtcaacacaagaaacaactggagctgtggttcaaattcaggctgggactctcatcagctgtgtttctttaggtaaattacttcagactctcctgatctttaaacttgggacaataataaccatgacagctaactgagatgatcgaagacaaatgtgcttagctcagcacctgggtgtaagtcagggcccaaacattgtttctcctatgacttcccctttcctccttaccacatttcaagaaaaggaaagtgggtggggcgtgtgtggtggctctcgcctgtaatcccagcacttcggtgaggctgaagagggtggatcacttgaggtcaggagttcaagaccagcttggccaacatagtgaaaccccgtctctactaaaaatacaaaaattagctgggcgtcgtggtgcgcatctctaatcccagcaacacaggaggctgaggcaggagaatcacttgaacccgggagtcagaggttgcagtgagccgagatcgtgccactatactccagcctgggtgacaaagtgagactgtgtctcaaaaaaaaaaaaaaaggtggggagaggggaggtaaactccagtattttcagggtgtttagctgtta

SEQ ID NO: 130802 - DNA, 1006 bp, Homo sapiens
tggctgctctctctgcctaatgttctttcccctggtggccacatggctcatccctcactttcttcaggcctctgttaaaatgtcacctcctctgagatgccttttctgaacatcctatgcaaacccctccatgccctcctctcaccccttcaatcctgccccgcttaccctactattcttctatagagcacttattgccatctaacagattatatactgaacatcagaggcatccaaaaaagtcacactgacatgacaatgggaaatcatattacatttagaatgatgtcagcattaattgttttatatatatataaaatatatgtaatatatatatattttaaataggaacaaggtctcactatgttgcccaggctggttttcaaacttctgagcttaagcaatcctcctacctaggcctcccaaagtgctaggattatagacatgtgccaccatgcccagctgttttatactttaacatttattattcatatgttttaaaaaatagagagcagcaccttgtaaataaaaactaacaaagctcttccagttggtaggtatcattctaagtaatttaatcacttaattctcacaagcatgttagttggttattactactagttctatttttcagataaggaagttgaagcacaaaaacaagtgtgttgcccaagttcacacaaccacaggtggcacaacagggatgccaggccaggccatctggctccaaggcccatgttcttaaccactttgctagaatattctattgaaggccccttccctgtgagagatagagaacaagtctaggctagtctctgccaccagtcaacagggtgaccttggacaaactaactgcttaacctccatcttatctgcacaatgactccctttcagctctgagtcttgattaattgacatcaaataacaattatctgagttgctgcagaaaactcaggataagagaaaattgatttagaagacatgaaggatctggctcacatgccca

SEQ ID NO: 130803 - DNA, 1052 bp, Homo sapiens
atcagggtgtggtggtgaatgactggtaatcccagctacttgggaggcttaggcaggagaattgcttgaacccaggaggtggaagttgcagtgagctgagatcatgccactgcactccagcctggggagacaagagcaaaactccaagctccatctcaaaaaaaaaaaaaaaaaaaaaaaaaaaacattaattttatttagctgggcaatgccccccaactaaaacactagatttccctgtctcctttgcacgcaggcatgtgactaagctctaaacaatgagacattagcagaagtgttctgaaagacttcggggattaaagggacctaactcaacaggaggtgaattcttttgctcccctcctccttcccgatggccgaaatgaaacgtgatggctaacatgcaacatgacggctgacactcaaatagctagattggacagtagagtctactctgtaggtgagcagtgcttccaaagctttaaagtgcatgtgaatcccctagggatcttgttaacactgcagactgattcagtaggtgttggatatgtttcctatattccctagttctgttcataaaggcagcctaggttcagtgactgccctaacgtataggagcacacctggcacccagatattggcttctaaatgccacactgcactaaaagaaaccagggcttcttggaaaaatggctaattgcaaagcaggagcagggaagatataagaaaagactggtacatcttgtgccataaagccaggaagtaggccgggcgcagtggctcatgcctgtaatcccaacactttgggaggttgaagtgggcagatcgcaaggtcaggagttcgagaccagcatagccaacaaggtgaaaccccgtctctactaaagctacaaaaattagccgggcgtggtggcaggcacctgtaatcccagctgttcaggaggctgagacaggagaattgcttgaacccgggtggcagaggttgcagtgagctgagattgcgcatcagcctgggcaacagagtgagactgcgtctcaaaaaaaaaaaaaaa

SEQ ID NO: 130804 - DNA, 1017 bp, Homo sapiens
aggtagacattcttcctatgtcctatatttgtagtagctgttttgaatttcatataaataaatgcacacatattgacttgtgcttgtctgcttttgttcaacatcatgtctgagattactccgtattatatgtagcagtagttagctcctatgtggctgcatagtactccatgtatgaatataccacaatttattccttctgttgatggaaacttgggtttttagttgttggctcttagacaaaaagcaagcttgtgactaggtctctgaatcacaataaggcagcaagctggatattatgtgctgcagtgataattgctctgctaaggccaccagcaatctacaacttgatttattgcattgaaacaaggccaaaaactccagagacaatgtaacattgataattgcaggacaatcaatgttttcatattgattcccaaacaaggggaaaatgtcttcaaaagctctgcaaaatcagagcaagtcttaaaatgtgaacaattactgtcctcataaaatgaaatgtcttgaaatggatgctattactactacttcgtgactttaaacaaaggtacatataacttcgtttctcttaattcaccttttctcaagtgttaggaaggggttttgctatttaaagaagaaaaacactacaacgataatgacaactacaatgataaaaacaatgacgatgattcagggatttgcattgatacccacccctgatatttggatcctagatgaggtgactccagcaaaattggaaaaaacacatagagccaggcctatctctgtaagagcacttaagagtaggggcatgactggggtattctgtctcgctttactgcttggcacattcagtaaatacttgttgaatgaattcagtaaatacttgaatgaatggttcaaacatgagataccatttttcttcagggtatgcatttctgaaattagaaactgattactaagacttggcatacttttgttttttacttttcattgaaataattcaaactt

SEQ ID NO: 130805 - DNA, 1374 bp, Homo sapiens
cccaaagtcttgaaattacaggcgtgagccactgcgccctgccagattttgtatagtaatatatatataaaatgacctgtcacaggttggctttcatagttttacctttcctttttgggtggtgcccttgggtctctactactgtctttcatcactcccaagaaattgagtagtgcagccaggatcaggaccagggattggcaaatgttttttgtaaagggccagataggaaatattttgggctttgaggactgtgttatctctgaaatgatcttgttccagtgttaccatgtcaagacaaccatagatagtatgtatacaaatgaacaggtatggctgtgttccagtaaaactatggataaaaacaaccacattgcatttggctaagggctttaatttgctactgacaagtgatagtcctggtcttaatttgtttttttaacatttacagattgatcagggaccatgaaaagaaacttgtgcttcaccgaagaaaaatatctaaacatcgaaaaacttaaatattatggaaaaaaaacattgcaaaatataaaataaataaaaaaaggaaaggaaactttgaaccttatgtaccgagcaaatgccaggtctagcaaacataatgctagtcctagattacttattgatttaaaaacaaaaaaacacaaaaaaatagtaaaatataaaaacaaattaatgttttatagaccctgggaaaaagaattttcagcaaagtacaaaaatttaaagcattcctttctttaattttgtaattctttactgtggaatagctcagaatgtcagttctgttttaagtaacagaattgataactgagcaaggaaacgtaatttggattataaaattcttgctttaataaaaattccttaaacagtgcacggatttgctttttttcaaagtctttataattgccatgcataaataggtaatatcttaatggtgctgagccgacataagaatcttttatgaaaaatgtactgttaagttcagggggtctattggttttatgtaaaaggcacaagacaattcctgtagtgcattttatgagttaaggtttccatacggattattgaaacaatttgttacatgtatttgttacatgatcttaatatttcatgtacaagactgacacccatccacttttgaagataagccagtttatggggtttttttttttgcgggtagaggttgggtctccctattttgtccaggctggtctcgaattcctgggctcaagcataagcataaggcttattcctgcataagccaccatgcctggcctgccagttgatgattatattgaggtttctaggctatgagattattagcttaaacccttacatgatataaaacaa

SEQ ID NO: 130806 - DNA, 2727 bp, Homo sapiens
gtgttttgtttccaataaataacagtgcagccagacattcagggccactactggtctccgcgtcttggtggtagtggtcccccgtgcccagctgtcttttttttttaaatctctgtgtctcgtgtctttatttctgcactctctcgtcgctgcatacagggagaagcccaccgaccctgtggggctggtcgctacatataagtactcgtccttgtatgaattaatgtttttacttattgatgctctgagtctgggaaaatggcaagtgttaagactcagctttaaaaagttttgtcactttttagtcttttatgcaaacctcagatcgaagaagacagcataaacacttttcactcagtaagttttcccagttaatgtatattcacatctttaaaatgcagcattccaaaatatgcccggtgctatccgcccagctgctcctagaccaccatttagtactatgagaccagcttcttcacaggttccacgagtcatgtcaacacagcgtgttggtgagtcttaatccttcctttaaaaattgatcaccaatttgaaagagcaagataaaaatacaaaatgttcttattttttagctaacacatcaacacagacaatgggtccacgtcctgcagctgcagccgctgcagctactcctgctgtccgcaccgttccacagtataaatatgctgcaggagttcgcaatcctcagcaacatcttaatgcacagccacaagttacaatgcaacaggtatggatttaatgatttcttaataaaaatcacatttcttgggtgaaatcaaaggtgtgaagacagctgggcacagtggctcacacctataaccccagcactttgggaggttgaggcaggcagattgcttgagaccaggagtttgggaccagcctgggcaacatacaggaccctgtctccacaaagaaaactagctgggtgtggtggcataagcctgtagtcctagctgctaggaaggctgaggcaggaggattgctcgagcccaggagtttaaggctgcagcaagctgtaatccctgctgggtgacagcaagactctgtctcaaaagaaaaaatgtgaagacagctgcatgatagattcttgagagcttagcctatctggaacattctgctaatatgatagtatgtaaaatgtcttacgcttttggaattggacaagcagcgagaaattcacatcctaaatcaccacgcctggtctgaaacaactattacaagtagctatgggccaggcgtggtggctcacacctctatgtaatcccagcacttcaggaggccaaggcaggtggatcacttgaggtcaggagtttgagaccagcctggtcaacagggtgaaaccccagctctaaaaatataaagattagccaggcttggtggcacatgcctgtaatcccagctactggggaggctgaggcaggaaagttgcttgaatccggaggcggaggttgcagcgagccaagattgtgccgttgcattccagcctgggcgacaaagtgagactccatctcaaaaagaaaaaaaatgtatctgtgatacatagtatataataactactttggcttctttctaattcgctcactcaacttctccacctcatgtttcgatggaagtctaccacttcagcagatgtccattgatgactatttgtatttgccatctttttctgtgctttaaacttaagagttctcattttctgtctagcctgctgttcatgtacaaggtcaggaacctttgactgcttccatgttggcatctgcccctcctcaagagcaaaagcaaatgttgggtgagtacttctgtcccaccttgtcagttcagaaagactagaaaatataggaatcacttaggcactaggtcaatcaattgacagctagggcagtggaattgatctgaattggcatgaatgattatgatagtacagttggtctgcctaattaaaaccactggaaagccaataagaaaatgtattgttagtaataaatagggtagtagggcattactcaccatgggccctcactacatttttgagagaaggaatttgaagcaaatgagaagaaaacttgtgactttgcctgaacaccgatttaacaacctaatggtaacattgcttaattggcaagctgataatatcaagagttaattgccttgtggcagattttattctgtcttcccatgaagacataatgaaattgtggattatgggttattatatacgtgagacagaagtatggttcttaaaccccagtttaatgtggtaattcaatgcagttaaaaacttttttttattgaagggagtttttgaatgtttctgttcctaggtgaacggctgtttcctcttattcaagccatgcaccctactcttgctggtaaaatcactggcatgttgttggagattgataattcagaacttcttcatatgctcgagtctccagagtcactccgttctaaggtgatttaaatttatttaccaagttgcctcttacacagttattacgtggctttttatggggacttaattgtacagaacacttacatcgtgttatatataagccatgtacagttgtaaagtctgcataataacctgtggcgctatttatccccattttatagataggtaaactgaaacaggctgaataatttgccaaatgctcacacagctcttaagtggcagagcctggcttcaaatcccatcagctccaacag

SEQ ID NO: 130807 - DNA, 1377 bp, Homo sapiens
ctgggatgtatttatttagataattaaatttcaatattgaaaatccaatcaaattcagtatctaaaatctttaaaagtttctgtgcagccttcacttctgtcagttctctgacctggctagggtaatgcatatgtgtagtttgcccttaataattgggtattaaggaaaaattgtgaactcaatgggtaaatacaagatgattaagcattaacagggtttagttatttgattcagtgatttataattgtctaaattgtaacgctctttttttgctcctcattctaccattacgttaactttttttttcttttttttaataggttatgatggagggtggtcgcagcaaagggtttggttttgtatgtttctcctccccagaagaagccactaaagcagttacagaaatgaacggtagaattgtggccacaaagccattgtatgtagctttagctcagcgcaaagaagagcgccaggctcacctcactaaccagtatatgcagagaatggcaagtgtacgagctgttcccaaccctgtaatcaacccctaccagccagcacctccttcaggttacttcatggcagctatcccacaggtaggttttagaaggcaaccagaaccatgaaggttttcgtatttggtcatttctagtgttttttgtgcccctcgccccgcaaatgtgaaacattaagaaaggggaattatgattgagtaggaaaaaatgcttgagtgtgaagtcctggtaaatgttttgaaaaagtacatataatttattgcattatttgcttttttcttcaactgataaactcatgtgctttttttccctgcagactcagaaccgtgctgcatactatcctcctagccaaattgctcaactaagaccaagtcctcgctggactgctcagggtgccagacctcatcgtaagtcttttttcttttaattaaggttggggattgagttaaaaataacacattgggtaaatcagctcttctatgtcaatgttaggttaactattgcatttcacataatttgtggttatggatgttcatttttatagcatttaaaagcagtgctaagatagtaatgtctacagtggtttgatttccctttataaaagttttgggaataggtacagctcttcattttttatttatttatttatttatttattttcgagacagagtctcgctctgttgccccaggctcgagtgcagtggctcagtttcggctcactgcaacctccacctcccaggttcaagcgatttctccctgcctcagcctctggagtagctgggattacaggtgcccgccaccacgcccagctaacttacgcattattagtagagatggggtttgaccacgttggccagggttgtc

SEQ ID NO: 130808 - DNA, 2566 bp, Homo sapiens
ttagcacaatagctcatgcctgtaaccctagcgcttggggaggtcaaagagggaagatacttgaagccacaagttttagactagcccgggcaacatagcaagaccctatctctacaaaaaataaattagccaggcatggtggtatgtgggccagtagtcccagatacttggtaagttgaggcaggaggatcacttgagcccaggagttgagttaaagtgagcttattcattgtgctgctacacttcagcctgggcaatggaatgatatactgtctctatagaaaagggaaaaaatcaaattattgggtaaaaaatgcaactcttttgtgctagagctgagaataaaactttttacagccgtttaaagtgtacctccttaaatggaaggaggaatccttcaggggagggaaggtgtttaccttcttaataataaaaggtctttcaatggaaaagtatacctacctggggcatagaaggctgggagggaggagtcaagttacggagctttgaaatttttttcatggctttgtatgttgaaatttgaaatgtataacgtgaatgttgtatggaatatctttgatttatgtaaaaaaattttttagggcctgccttaagtgtgaaagtaatgactgatgaaagtggaaaatccaaaggatttggatttgtaagctttgaaaggcatgaagatgcacagaaagtaagtggtctgtattcagcaggaagaagggggtacaaagttgagttgctcttgtgttgaagtctatgtgcatactaatagctatttgacatgttcttatattttcagttatttgcattttatgcattaggtttgagagtataaattggtaacctatattgtcccaaaaccttgagattttgggatgggtttgtctttagcttttgtgacttaacaaatttgtcttaactgttaaggaaatgaactgtaagttgaaagttttgtgattttttttttttctttttttttggggggaaggctgtggatgagatgaacggaaaggagctcaatggaaaacaaatttatgttggtcgagctcagaaaaaggtggaacggcagacggaacttaagcgcaaatttgaacagatgaaacaagataggatcaccagataccaggttcatttttaattgaacaaccaaaataagacagggatgaggaaacctattttacgttgatttcagttacttccaggtagctggagggtttgagaggggaataggagaagaaatatggggtaaaataatagacccgatgtacttaggtaccaccatggttttctttttctatagttttcttttcttctttttagggtgttaatctttatgtgaaaaatcttgatgatggtattgatgatgaacgtctccggaaagagttttctccatttggtacaatcactagtgcaaaggtaagaaaacatatggttcatttatttgaggtctagtaaaaattcatacatgtagatatatgtatataaattttgtattattatagccactagagaggtgtttgcttcgttacttctaaaacttaaattcacatttgaactggttgtcatagcctaatggttaacttaaaaatggcaagcactgaactctttgctaaggaaggctgatatcctcacatgatatgcactattccaacaactagtcattttgctaaagcaagcaatttattagggacttataattgttactatagttctgatctgtttattcatttctacaattcattctgggtagtcaagccccagttccctcccctgccccctagcagtaagaatagagatcatattttcttttatttgaaatcagagattaagaaacaaagcagtagtattctagtacaaattctgaaatcttgatttaagaagttctcttctagatgtttttgtctagcatccgtgggccaagagtccccctatatgcaaggttttgtgcatacataattttgctggggttggggaagagtgcatagaaaaaaattacaactcaactgaactggaatgacgctgtggctgatctttctagtcagcttttcctggcaagtccgaggaagcttctgtgagagtgaggaaatgttaggggaaaggtggttgaatacaagtaagatggaagtgccatggttgtcttgtgtttcagattatgctttttatgtaagagtattggagtacgatagaatttattcctgaatgtttttgtcttcagtgtgttccctggatattgtttaaattgagtgttgtgcatcagcatattttgaatgtatgaagcatgcatgtttttctgtttcttgagacaggatctcattatgttgcccaggttggagtgcaggggcatgccacaatcacagctcactgcagcctcagcctttcctgggcttaagccaagcttgtccaacccgctgcttgcaggccacatgcggcccaagaatgcttttaatgcagtgcaacacaaattcttaaacttatgaggtgttttttttttgtcttttttaaagacgagtctcactctcgcctgggctggagtgcggtggtgcaatctcagctcactgca

SEQ ID NO: 130809 - DNA, 1520 bp, Homo sapiens
ccttctgctttgctgtgtattataatatgctatgacacatgtgctacctttttttcttcagtgatcgttgttctttttatatttttgagacatggtcttgctctcttgcccaggctggagtgcagtggtgcaatctactcactgccacctctgcctcccgggttctagcaattgtcgtgcttcagcctcccaagtaggtgggattacaggtgtacaccaccacacccaactaatttttgtactttagtagagacagtttcaccatgttggctaggctgaactcgaattcctggcctccagtgatcatcccaccttggccttgcaaagtgctgggattacaggtgtgagccactgcctagcccagtgatccttgttctgaattactactgttatattcagaaaaaattaagttttagtgtcattttgttgaaaatgctgcagttatgtcaggctgttgtgtgttagagtacacgattgggaagtttaaatttttattctaggagatggcaaagaaagcgcaagcgccactttaaaatgacgatgaaagctttttaatttgatagaggtctttttattggcatggtacacatgcacttccactcatttgtattgatgggagtgatccctttaaccctaggttagctagagaagagaagtgtgtattaaaagaagtggttttttttttgtgattgtagttagaggcttattcatatatttcatggtgtcatatcttaaattatggccctatttctattttgtagtgtgctttttattagggattctgaatattctcattaacagtaacaaaaccaaccatcaggcttacttaatctgaactttataaaatagaatctaatgttatagtccttgtatatcttattagatttgttggacgatttaagtctcgtaaagaacgagaagctgaacttggagctagggcaaaagaattcaccaatgtttacatcaagaattttggagaagacatggatgatgagcgccttaaggatctctttggcaagtttggtaatgtgtcttaattaaatttttacacacaaagctctgaattagtgctcagtgttaattttagctattactttatactaaaaaagtcaataaaattagacttacatggtactttaaaatatttgtggttatttgaattaagctgctggccatctattacactacaaagtagtataatgcaaataaatagaattctatccaggttaaaggttaatagcattagattagcacagtaaggtatgactaagtaattagaacagattttaaaatattttactacattaagaggctggagatatatatgtgtgtgtgtgtgtgtgtgtgtgtgtgtgtgtgtgtaattagagatcccatgtcatcagaagcatatatttgacacagccagcctacagtggaatgcagtctcatagaacaataaagctggtcagtctaagtaacatcatgtttgagcagtttaaaacaatgactttcagcgatgaaaccaaaaattcagattt

SEQ ID NO: 130810 - DNA, 2629 bp, Homo sapiens
agataactttggggcaggttatcacaacctaagagttggtggagaaaacatgggaatgaattctagagaccacaaaatgaaaacttgaaagtgttactctttctcagcttaacgtttttaaatccaaaaaacaatttttacatttcttgggattcgaagagttgaacttcaggttgccgtggttacagtgtacagtatatattatcagtctgtaccagtagaccagtaccctaactactgaaaagaatatggcagttttccatttgtctagtttctgtatgtacaatttactatccaattaattacttaagtggatttcttgttcttttttaaaaacttattgctacattgataggcagaatagcttctgaaagtgaccagttttcaatttcataggaagaggtgactcattgaaaaatagctcaagcaaagtcagctaaaaaaaaaaaaaaactagggaagctgagtaggtgtggtcaattgataatgagctaacagctgattatcactatattctagaaactggaactttcatttataaaaaaagaggtggccggaaaattcatcctgtcaataacttttaaatttacattggcatggaatttgtaggaattgtttcagggcttaaaagggaccgttttccctctcttcggggactagtctttttatttaaggatgtgttatttcatttagagcctttaatggtacaggtatacataattcaatcctttatagatcctgaaattaattgtagattttgaaattttctagcagtattcagaaataactaaatcagttgttaagaaaatcagcgatctaaagtgaaattgattgtatgtgtcaagagagcgttaatggtgatttctgaatattgcagacctggtgtttttaaaattctgtgattatgaaaccaaatatgtctaacttcacattagcttttgaaagcatgattcaaatcttggtctagcctttcattttcttaaatggaagttgtgccatgaatcactgaaaccctccctccccccaataattaagaaactttcattttttaggaaatggactagttttcatataatattgttagttattagcaatgaaatgaccaattttagcaagtagttgggaagaagttaaaatatttaaatctataaactacttccagcttgtagataaatctgttgcgtaatgtcttttatactgcttattaaacagattgtatgtgaaggaatttggattttgataactaggaaaaaaagtgctttagatttaatggcaattaaggcgagagattgcgtcaagaatttattaattattagcaatatggaattcttttatatgtgagaaatttcgggggcttctggtatttgtctttgctttatacaacttaggtcccacactagtgtgtgatacttgaaaggtctagccatcttgaagcttaaagaggaagcgttcaactgtgagaccatgtgtcctcccactccagtcaccatagtttatataatcttaagtagccagcaaaaattttgaagtaatattgactctgaaaatgtccttcctgcagcggagcgtgctttggacaccatgaattttgatgttataaagggcaagccagtacgcatcatgtggtctcagcgtgatccatcacttcgcaaaagtggagtaggcaacatattcattaaaaatctggacaaatccattgataataaagcactgtatgatacattttctgcttttggtaacatcctttcatgtaaggtaagccaaaaatgtccgatacacatgtttacattgttgagctacatttagtttagtgcttgaaataggaactgtgcagtaatggatatctttatttcacaaatatccaggttagatggctaacagattgtctctcaacactgaacaaatgttaaatcaatagcaaataaagaaaaatgggtatatgtttttccctaggtggtttgtgatgaaaatggttccaagggctatggatttgtacactttgagacgcaggaagcagctgaaagagctattgaaaaaatgaatggaatgctcctaaatgatcgcaaagtgtaagttataaatatctagctaatcatattttgaatcttatttttaataattccaaatccattcattttaagttaatatttgtcagggagaagttagatgcacataagataaaagaataaaaacattttaaagatgaataacaaaaattcatgtagttgtactggagtgaaaattaataagctaatcttgatttttacaattgaattttctacacagtaagtgtaacatacaaataacaggtttaatataattaacattcatgccaaaaggaaaacagaagataagtaaacagaaaaatgtagctttttcaaaatgagtgcattagtgaaaaatcaggaattcagacaaacctaatattcataattcttgaggtactggttaaattaacccattttataggtgaggaaactcaaagtaatttgcttttatgtactgtaaaatgagagacatacattactcacaagtccgggcgcggtggctcatgcctgtaaatcccagcactttgggaggccgaggtgggcggatcacctgaggttgggagtttgagaccagcctgacc

SEQ ID NO: 130811 - DNA, 2432 bp, Homo sapiens
cgcagcgggaagaggccacaggcggccgcgcacgtggggggtggttagcgcggaggaacccggaagccctttgcaccgcccaccgccgcggtgacgggttaacgctcctcctggtggaggcaggggcgggcggggcggaaggcggggacgcctcagccaacacccccgaggaccgcccgcgagccgtcctccccacccccacggacgcgacgcagcgcgggctccgcttccccggccgcggcgcctgcgcaaaagccccgccccttcgcccgagccccacccccacaccgcagcctccaccgccgccacctctcccttcctctctgctctttcctcctgttttctcttccctcctccccctggcctccgcgtctcctcctactccggcgctgacgctcgcgtaggggccctggcgtcagacgcgcgggggcggggcgagtgcggcgcggggtataagtagagggtgcaggaggcggtgcttccccttctccccggcggttagtgctgagagtgcggagtgtgtgctccgggctcggaacacacatttattattaaaaaatccaaaaaaaatctaaaaaaatcttttaaaaaaccccaaaaaaatttacaaaaaatccgcgtctcccccgccggagacttttattttttttcttcctcttttataaaataacccggtgaagcagccgagaccgacccgcccgcccgcggccccgcagcagctccaagaaggaaccaagagaccgaggccttcccgctgcccggacccgacaccgccaccctcgctccccgccggcagccggcagccagcggcagtggatcgaccccgttctgcggccgttgagtagttttcaattccggttgatttttgtccctctgcgcttgctccccgctcccctccccccggctccggcccccagccccggcactcgctctcctcctctcacggaaaggtcgcggcctgtggccctgcgggcagccgtgccgagatgaaccccagtgcccccagctaccccatggcctcgctctacgtgggggacctccaccccgacgtgaccgaggcgatgctctacgagaagttcagcccggccgggcccatcctctccatccgggtctgcagggacatgatcacccgccgctccttgggctacgcgtatgtgaacttccagcagccggcggacggtgagcgccgggctccgcggtcggccgggcgggcgggcggccatgaggctcgggcggcggcggcgggcggggtaggccggcgggcccggggaggggggcgggagggcatgtcaccccgcgacggccggcgggaaggcgccggggtccctggagccgcgtttcccgagccggcggggacccgcgctgccggcagccacacgcccggctacttcctcctttgcgaccattttctcggcctcagacgctctcaaactttagggtgatgacgcgccgggagggtgggtgagattcggttcctccgcggcgctcccgccagtggccccgggattctggggcgttgaacgctgagctccttccgtgggtaagaggtggaggcgctcccaccacccggagctcctgccggcgccccagcctggggaggaagtgcagttctgtgctcgaaaaataccacgtgttgaaccctgtaacctcgcaggcccgaggcctgcttctgctcctgctcctggcccagtcgcctgggggagccaccaggccttaggataaagttcctgtggcgatgtgtggtgtggtggtggtcctcaggcttgtgagtccacttcccagaactcatcagtgactgatggatctaggaatggaatttaccggagacatgcatttggggtttcccctagatcaagcatttctctaacattaaaagggcagagtgggaggaggggatgtggcagccgaccactttgaaggccagttttctcaggcaacttagaccatttttagtcaaattttatcttagattcacagtactggtggttttcgagtatattatgttaccttctgaaatagttcctgtcgttttgaggggcttttctttataaaatagtcaactttggctataaaatgttactttagtgtaattccaactggaccagtcttatctgtagcatgcaagaagttcaagtttctcttttatttttaaaagtggcccatgatacctgtaaatcttgggaaatgactgagtacaaaataacggagattaaattgagcttgaaatttatgggggaaatgcagctaactttgtgcttttattttgaagctaaacagttaacagaaacacaattttgtaaacagataatatctgtggtctgttgagttgctaggatttgtctttagatcaattggctttgagaagtcagcttaattccattttacggcccaattttgcctttttccccccctacaggctggccacttgaata

SEQ ID NO: 130812 - DNA, 1107 bp, Homo sapiens
cttgtttggttccatttctgctctggttaatgtatttgaagcctctggtttccgttcatccaggtgccaggagccactggtgtccccatcgcctcattttcttcccctaggcagggcttctcctcagcatctcattgaccccattgttcaaagttcttgccaatcctcccatccatggatttcaatatgtaaaccccatcttgacaactacttgctgagtgaatattagagaaataggatcgtttcacataaacatctgctacttcattctagaacttaaaagtttgtgattccagttaaagcagacgagcctgtttttcaggggattgcagaggacagaggtgaggggtgtgtgtgtattcctgctgctttgccaagtctcccacctcctccaagtcactaagaatggggacacctggccagctactcagcaagacatcagattctgggaggcagatgagaaaagcagggagagattggctttttggcacttgcatctctgcagttcagctggtctgggcctgggctaagtgactgttactggctacaggttctggataatgagttcagagactgggatccattgacaggcacttggttgactttgtctctacagtttttcaattaagtagattgttcttctgaaggcaattttgaaacatccaaattttggtgggacagagcaattgccggtattgttaggttatttggtagcatctgaggatggggaaaagaaaaacaatacaaagtggatctgttcccttttaaaattttgtttttccacagtcatctctcttcttacaaaatcctgtctcacccctgatgatcttacgaaaaacactcttttgttcttcaagttataagaaaacaaaccgtggaaagtagctgattttcattaaaaactgatgaatgcttgggtcaaatctcctaattacagagatcaaaggagactaataaattttaactcaaagttctttttttcttcaaaagaatagccttcagtgaaaacaagtacttcctaacccaataaagaaatctgcaacaatccattctcctagctaatttacttaagagttgtgtttgtttaaattacacatgctctggtgt

SEQ ID NO: 130813 - DNA, 1037 bp, Homo sapiens
tttgtcaccctggagtgcaggggtgccattacaactcactgctgccttgacctcctgggttcaagggatcctcctgccacagtgtaccaagtagctgaaactacaggtgcatgccaccacacctggctattaaaaatgttttttttagtagcgacgaggtctcattatgttgtccaggctagtctcaaattcctgtgctcaagggatctgcccacttcagcctcctgaagtgctgagattacaggcatgagccgccgcacctggtcaaaaagtttttaatagagtcattatattctaattttctctcacacatgctatatgtaattgtgtgcatttaaaactttggaggaaaacagttttaaggtaggtttatggttctttttattaaagataatgccgtactcctaaaaatgaaaaacctgtccatttttctttcaaagtaatttacccaaagcctcccaatttgggtaggtacaaaagtttcacaatttagaacttttaaaaagtcgtttatttggcgtggatgggccaggactgcaggtataatttcttgccactagatgtctctgagttttaaagcagcagactcgtgggtttttgtctatttatacatacagatcacctacctccctgttaacagagtttcataatcctcttatgtaacgctgggttgtcagctacagttaatcatcagttgggagatgggcaggcagggaccccaaggacttcatgtcctcgagacagggttggacgtgttgagagaaggttgagaccaggtgtgaccaagcagaaccccgtgactctgaaatgcatccacgcggaggccagggaatgatggaaaacaaagagctcgctgctgcagcacgtgccggctggatgcggagaccacggcatccactccttacagctgggagccagcagaggagctagtgggccgggaaagccgtcagtcctgcgttttgccttggctggctgcgggcgccacttgaaacaagccagtcatgcctctcccaaccctacccccaccccctggaacc

SEQ ID NO: 130814 - DNA, 1076 bp, Homo sapiens
cacctcttcatggtttcagttaccctacttactgggaatatacattgttaatgtgtgtcatagactgagtgtatccccctctaaaacttgtatgttgaagctttaacatccaatatgattgtatttggaggtaggacctttgggaggtgattagggctaggcagagtcataagggtggggcctccatggtgggattagtgtccttatacaaagaggaagagagactagagtttactgtctctctgccatgtgagaacagtgagaagatggacatctgtaagtcaggaagagggccctcaacagcccgtgagtctgccagcaccttgaactttccagcctccagaactgtgagaaataaatgtctgtcgtttaagccacccagtgtacggtttttttgttacagcagcctgagctgtctaatacatgctgtgatgagaataaaatgaaaaaacacacaccacagttctttgcacacagagtctgttgaacagtgagccctcaatgcagtctctctattggtttaatggtccctcccttgatttgctctgatgtaatcctgatttttttccaataactggagcatttcctgagaagtggctggcctccgtagttgcattttgtggaggtatttctttagggaagactgtccttgcaatgcattgcaagacatttagcatccctgacccctcccctttaatgccagtgctgactttcttcttaccccggtcattgtgataaccaaaatgcccgttaacagggacagttccacctctagctgaaagctgtaaagataagaatgtccccttctgctctctccggtccgtgcctccaagatgacaaagaaaagaaggaacaatggtcgtgccaaaaagggccgcggccacgtgcagcctattcgctgcactaactgtgcccgatgcgtgcccaaggacaaggccattaagaaattcgtcattcgaaacatagtggaggccgcagcagtcagggacatttctgaagtgagcgtcttcgatgcctatgtgcttcccaagctgtatgtgaagctacattactgtgtgagttgtgcaattcacagc

SEQ ID NO: 130815 - DNA, 2549 bp, Homo sapiens
gtaaagttacctgctgttagctttcattatttttgctacactcattttatttgtatttaaatgttttaggcaacctaagaacaaatgtaaaagtaaagatgcaggaaaaatgaattgcttggtattcattacttcatgtatatcaagcacagcagtaaaacaaaaacccatgtatttaacttttttttaggatttttgcttttgtgatttttttttttttgatacttgcctaacatgcatgtgctgtaaaaatagttaacagggaaataacttgagatgatggctagctttgtttaatgtcttatgaaattttcatgaacaatccaagcataattgttaagaacacgtgtattaaattcatgtaagtggaataaaagttttatgaatggacttttcaactactttctctacagcttttcatgtaaattagtcttggttctgaaacttctctaaaggaaattgtacattttttgaaatttattccttattccctcttggcagctaatgggctcttaccaagtttaaacacaaaatttatcataacaaaaatactactaatataactactgtttccatgtcccatgatcccctctcttcctccccaccctgaaaaaaatgagttcctattttttctgggagagggggggattgattagaaaaaaatgtagtgtgttccatttaaaattttggcatatggcattttctaacttaggaagccacaatgttcttggcccatcatgacattgggtagcattaactgtaagttttgtgcttccaaatcactttttggtttttaagaatttcttgatactcttatagcctgccttcaattttgatcctttattctttctatttgtcaggtgcacaagattaccttcctgttttagccttctgtcttgtcaccaaccattcttacttggtggccatgtacttggaaaaaggccgcatgatctttctggctccactcagtgtctaaggcaccctgcttcctttgcttgcatcccacagactatttccctcatcctatttactgcagcaaatctctccttagttgatgagactgtgtttatctccctttaaaaccctacctatcctgaatggtctgtcattgtctgcctttaaaatccttcctctttcttcctcctctattctctaaataatgatggggctaagttatacccaaagctcactttacaaaatatttcctcagtactttgcagaaaacaccaaacaaaaatgccattttaaaaaaggtgtattttttcttttagaatgtaagctcctcaagagcagggacaatgttttctgtatgttctattgtgcctagtacactgtaaatgctcaataaatattgatgatgggaggcagtgagtcttgatgataagggtgagaaactgaaatcccaaacactgttttgttgcttgttttattatgacctcagattaaattgggaaatattggcccttttgaataattgtcccaaatattacattcaaataaaagtgcaatggagaccttggggtctttatttccaggagaaaagataccttctgcatctagggcaacaatccttttccctcgcagctctttcttttacctcacttactgatttctcctgacccccaagccaaggaggtaaaataattatatatatatatatatatatatatatatatatataaagtaattatattttatagctagactgaagaggtgggaatttttttgttgttttttttttttttggagacaagagtcttgctctgtcacccaggcttgagtgcagtggtgcgatctcggctgagtgcaacctccgcctgctgggttcaagcgattctcctgcctcagcctcccaagtagctgggattacaggtgcccgccaccacacctggctaatttttgtgtttttagtagagacagggtttcaccatgttgtccaggctggtcttgaattcccgacctcaggcaatccgcccatctcaacctcccaaagtgctgggattacaggcataagccaccgcgcccagtagagatgtgatattattcaagtaaataaaacctgaaacttggcacatttgcctatttaatgtgcatcagtcatctgaactaggttgatcctggaataatgaaaacacttcactagtattaactaatgttttctacatagtagttcccaatagattaaggaaaatttccaacctgagattctttgttttggaatttgaataatgtgtttgtaactattccttgattgtcccaaatccaggctttacgtctgcttttgtcaatgtaacatcctagtgccaggaaattggaaaatccaatgactttttgtgtgtaaagtactggaatttttttgttcgtttgtttttaagacggagtgtcaactctcgcccaggctggggtgcagtggcctgatctcggctcactgcaaccttctcctcccaggctgaagtgattctcctgcctcagcctcgcaagtagctgggactgcaggcatgtgccaccactcctggctaattatttgtatttttagtagagagagggtt

SEQ ID NO: 130816 - DNA, 2632 bp, Homo sapiens
ataacattgtcagggaccaatgttcaattttattgtcctcaaataataaactgaacactaacttcaaacttaaaatattgctgcccaaagcattctgctttaaaccacaaattcatgtgccagctgcattcacaattgtattgacagtgactgggtgtttaagttttataacttaggctatagtttgttctttaagaaatgcaagttctttcagttttgtaaatgttttattctcactatgtctgtttcttttcttcttaagtctcttttggaaaagttcttgatccccaatgcttcacaagcagagagcaaagtcttctatttgaaaatgaaaggagattactaccgttacttggctgaggttgccgctggtgatgacaagaaaggtatgctgtttttaaacctgttggttgaacttgtataagataacatagtgaggaagagtctctgaagcgtacataatgtcttgttttgaattgcttagagtgccgaataaggagtagcagtgctctttgtgttctgagaatacacatctactgcctcatactgctattctaaaataaatgctttctgaaaagccaatattgtgtacagggatgttttttcaagattttaagaaaagtgaccagcctgagcaacatctctctctacaaaaaatattttgaaaattagctgggcatggtggtgcaagcctttggtcccagctaatctggaggctgaggtgggaggattgcttgggtctgggatgtcaaaactcgtcaattttttaaaaacataacaataatgagattataaagttgttttatcttgacattgatcaatggctagtgtgtaccaggagaaagctccctttaaaaaaaaaaaaggaccttgttcaattaacaaatattaagctgttacaggttagtatttcaaaggatatgtgagatattaaaggtttggtttgaggggtgaagatataatgcacactttatctcagtacgttttggtgtgtcttatccagggattgtcgatcagtcacaacaagcataccaagaagcttttgaaatcagcaaaaaggaaatgcaaccaacacatcctatcagactgggtctggcccttaacttctctgtgttctattatgagattctgaactccccagagaaagcctgctctcttgcaaagacagtatgtattttacctgttacgtagaaatttagcagtctttattatttgagcactgaaatgtaatgtactatttttaaatcgtaggcttttgatgaagccattgctgaacttgatacattaagtgaagagtcatacaaagacagcacgctaataatgcaattactgagagacaacttgacagtaagtacataacagcatcattagtgatgaatgtggttgaagaggttatgttttactctagggaatttttttttttattaaatacatcttttaaaattttttctcaacacatttcataggctctcataaatatatctcagctactattaaagtcctatgaaggaaaattacagaaactgaaatattagactgagaactaaaaaatacacacattgatgagttacctgtcttgttaaaatttgttagtatcaaaagtgtgctgagactctacatgttttagttcctttaagaatgattttcttgcccatcaagttgcctccatattggtaaagataatggtagggaattaataacttgagttacaaaatctcaggtatctacagaatccaagtggaagtctattttgcctagcttcttattttaaatgacttaatatgaaaggtcgtgattgtccttgggatactgcagatgtataaaaagaaacagtgtcactatcacaccaggaacatcaacataattccctaataatgtttgaatatctaaataatacttgaattccaattatctctctttttttaagttatttgaattgggattcaaattcagtccacaatgcagttgatttgtatgtctcgtttgtttcttaggtcttctcattcttctccttcagataaatactagatttgaaattttgaggcttaggtgaaaaaattatcaagcatttgctgtgtgtcaggtaaagaggtaggaattgcagatcataatctaggtattactgtttttttgttagacttctagggccatttctcttggggactatgtaatctcattttatacatttctcttccaactttattctagtccactgccattttctataaaccagttctatatgctagtgctgaaaatcttgaagagttttttgaatagtattgtatacttgtttattaaacctaaaattactttattagcacaatttggagctatctataaacttttctgatacttgagtcaagataacaagccacagtaaagaatgaaagaatcttatatatcaaacataagaagcactttgttaactaactttagtattaaggatttttcttttctagtttgaagtgatgacatttttaaagtgatgacctgagacctagatactgtgttttgttcacatcactttttgagaggccctgatctactgtctgcttccaactgaattttgctatcagtatagcatgaagagcgcatattgcaataagaaaaccagggttggccgggcgtggtg

SEQ ID NO: 130817 - DNA, 1065 bp, Homo sapiens
ccttgactaccttctgtgtcctgtttatcttagcttttcagttctatttaaaagtgtgagcctgcctataatagtgcaggggtctcttaacttacagtccatgaatggaatttcgaagattgaagaagcctttaaaattgtgtatttttgtggggcagaaggtccatgccaaccatcaaattttcaaaggtttcattttaaaatttaaaatccactgctgtaggcagagaatgactttatataggaggtctccgagaggaagcagtgtaaaattgtgtgtctaacatttataacagttggcaactgcagttgagtaatcttaatagtgattctgttaatttgactgagttctattttattgctgctctacgtttttatttgctcagggcaattttaagttgtggttatgggtcactgatttttatctccagcccacagaactaccattaaacagaaataagaaagcaagcggctttgggtccgttttagtctgaatatattattacgtgccttgggctttaaaaactgctatgtagagttagcagtttttaagatgaaaatcactagacagctcattggaataagggcttctccaaagaactctgtagggttatatctattgttactatttcattttattaagatatactgtatatttacatgtcttcatggttttggtatgtttcaaagtataaataatcccagttctgtggtctcaggaaggaaaaaattggacagtgtcttttttttctttttttcttttttctttttttttttgagacggagtcttgctctgtcgcctaggctggagtgcaatggaacgatctcggctcactgcaagctctgccttccgggctcacgccattctcctgcctcagcctcccgagtagctgggactacaggtgcccgccaccacacccagctaattgtattgtatttttagtagagatggggtttcaccgtgttagccaagatggtcttggtctcctgacctcgtgatccacctgcctcggcctcccaaagtgctgggattacaggcgtgagccaccgcgcccggcctggaca

SEQ ID NO: 130818 - DNA, 1048 bp, Homo sapiens
cggccaggctggtgaccaggtcacgtctaactcttgacctcaggtgatccactcgccttggcctcccaaagtgctgggattacaggagtgagccaccacgtccagcccaacttgtagcagttttgactatgcttccctttagtttccttatgaagaaactttgtttgcatagaaccagtagatgaggataacaagataatctcttcatataaatagtttcttcttgttatgattattaaggaagttcactctggtccctacccacatcgttaccctccagaatagcactggcttcccaaaaagttttaatggtatttacactttgaaagtttggataaatgagagtttaatttctttactatacaaatggctttgaagagaattctaaacaagcttttgcttccagccttggtcttttcaggagtaagacttagtgatctttgcatactcaacgtgtaatagatgctcaaatatttgttaaacaagcagaaaggcttctttagagaaagagcatagaattaggtcagcagcactgcaaaatttccctagctttttctttttctgcttgggaaaatttgatatttaccgataataggcttctttttcctaccatctttttcaaataggtcacatcgactctggaaacatattgcataaaattccttctgccctttctgtgagatggaagaataaaatgtagcagaactgatatttctactagaaaaagttattgaatcattattaatgattagtaaaaatattttaaattatatttttaagatcttacatgataaaaaatcaattataattttttattactccagccttttctgggctttgatatatatattttttaatttgagaaaaataagcaggtgtccctttgcagaaataatagtattggcttgtggcattagtgataaccagattttttatattgagcacctattttataatagctatgaaaataaactttcttcctacaaaaagcagctaatctccaaagttctgagtttttctgaagagctctttagtaacccattctggt

SEQ ID NO: 130819 - DNA, 3399 bp, Homo sapiens
aaataaccagagagcgtttctgagatcctaagggaaaaatcagtaatttagagacctgacgaaaataatgccgtcataaaggttaaatagtttacgtattgagccagtaccttgcatccaaagtggttaattatttgtttaaaatgtggcgacctgttctctcatttggttaaaaaaatattgtgggatttccctgggaaggtaaaagatgattaatattcgggagccagctgccaaggtggactcttctgttcaccttctaacttaaaagtgcacttcattcagggtgtgtattttcctctgaagtcatttattctgtggtgtcactgtgtggattagtatctttgtgctgttcggcaacttgcaaaagggtatctttccagaaaaatgtagctgaggtaaatcgaaaaggtccaggaaactaaaatgcgagggaaagagaattagatgggtagtcatggtaaaggacagcttgagtggtaacatccaattacattatgatggctagaagcaaaatgcagcacttctgcatttcaactggagcgatgacattggaaacacttataaattaagtacttccaatgtgatatattctagtactcacagtaagagttgaagtgtcatgacttgcggatatttttaaagcatgtggacatataacaagataaagagttgagacattagggtcagatattgatcctttgtggtggatttatactcaaaatatctgaaaacaaacagttggtcattcccccccaaattgttatgctattattggctggcagttgttgcagagatctagtaggtttggggtaggggtaacactaaagctaaaatgtaatcactcttgacaagagtattatgaaagtaaaaagacgtgagttacattaaactgatatgaattatgattctggaaatatgatagaaatccagatgttctctgtaaacaatgcttttactaaaggaagaaaagctgcttaattttggatcacttagtggtattggaaatgagttgagattttgatcaggtaagattaggggtagtttttgaggcagcttttggaagtaattttgacatgtgaaatttgggtcttctgaacaaattttaagttttgctacactgatgtgttaatggctgtaagtttacctctgatgctgagtatgctaaatttttttcccttttttgactatccttttgtgaggctgcattttaattcctcatgtgaacagtctttcacaggcagttaggtttcaggtttaaaaaactcatttaccacaggtataattttgagtctgtttattttgatgggaaaaattttaaatactccttttttcccccctgcagaacatccagtcatggataaaaatgagctggttcagaaggccaaactggccgagcaggctgagcgatatgatgacatggcagcctgcatgaagtctgtaactgagcaaggagctgaattatccaatgaggagaggaatcttctctcagttgcttataaaaatgttgtaggagcccgtaggtcatcttggagggtcgtctcaagtattgaacaaaagacggaaggtgctgagaaaaaacagcagatggctcgagaatacagagagaaaattgagacggagctaagagatatctgcaatgatgtactggtgagaatcaattcagtctggcttcattatactgtagggtccctatgagtatcagttacattactcttaactttttgtttggtttttcttttccttctaaacattgtgtgttccaaatttaaaagtcttcatggtgtcatgactaaaaagatgttaagacaattatagatacgtgtatgtaaaataattgcaacaatgattatgaaacagttcagttttgttaaaaataacagactttagtattgtattttatattaattgaaaatataaactaattgtgttactgttttacttatggttagaatatttgtagtagctctatagctggttatcttaaatgtacatctgtggataaaggaattttacatactttaggtaagagagatgtaataggatactcattgtagaaatagtactcttctcaggattagccgctataatgttaatgtaatgagtcaaccatgcagaaaactctggcgtcacaactatgaaacctcttcctgcattgaattcttgaaggtaaattttgaacactcacaaccatgatgaaaggttatgaacaactcaagcttgattttccagtttgaatcgagtattttaagtattcagtacttactgtgttgaagcactgcgcttaaaagaattaaactacattttggttaattttaatctgtcatataaagtagggctttttgatcaagaatagtttaaatttgaggataaaccagtagagaatccaaccaagctggcagtttttggaataatatttaaagtggttttactaaatggttacacttaaccagtatggaagggctctgatatacaaagaggggcagcatctcgatttttctggacagattactgaatctggaactcagtatggaaatccaggtttgttacttactatatgaaccttgtttatggaagaagtgctataatgagcaataggataatgtctgatgtggttgtgggtttggggtttttgttaaagttgtgatgatactatcatttctttacatttgtatttactaatggaatagcatcagttcctaaactgtaattttctcaaatgatacttacttgacactgtctttttaaagaatagtgattttttaaacatgcttatttgggttcacagccacaaactcaatgaggcatctgtcttggggcatttttttgttctttgcttattgaaacctttagaatgatagctactatttgtatctaagttgaaaaaaggaatatcttgcttttattggggccaagtgacaaatgtctgttttgtgattttgctaaggtaataagaatatttaaattttgttttttgtttttttttttttttgagacggagtcttgctctgttgcccaggctggagtgcagtggcgcgatctcggctcactgcaagctccgcctcccgggttcacgccattctcctgcctcagcctcccgaatagctgagactacaggcgcctgccactgcgcccggctaatttttttgtatttttagtagagacggggtttcaccatgttagccaggatggtctcgatctcctgacctcgtgatccgccctcctcagcctcccaaagtgctgggattacaggcttgagccaccgcgcccggccaaatatttaaattttgaaaatgtgattttttttttctataataaaaaatgtattgggtttttttgttttttttgttttttttttttgctcaccttactaactaatatctgtgtatgtgtaattca

SEQ ID NO: 130820 - DNA, 1029 bp, Homo sapiens
ctaaggtgggggtagggagagaacgccttcccgccggctgagaggaagagtgggccggcagaggctgcaggggagagggagagagagggcgttggggacccaaagggaaggcgaggagtgggggatttgcgttggggaggaaaaggaaaaaagcagcctcctgccctaggtgcactcgggacaagcgtagaggagctggaagccgagcggggtgggaggagtggcggctgcgggcgaggacgcgcgcgcctccgctcgccctccagcgcgggcgggcaggacgagcgccggggagcggcggttacgcggggccccgatcgctgtgggcaccaatcaacggttgccatagcagcgtttgacgtcatcgtgcgtgtggtgcccctgctgccggggctggtgattggaggaaaccccgtgtctgcggagcggctgtagcctgtgagcagcgagatccagggacagagtctcagcctcgccgctgctgccgccgccgccgcccagagactgctgagcccgtccgtccgccgccaccacccactccggacacaggtgaggaacccggccgccgccgcgcctcgcttcctgtcccaggccagccttccgaacgcgtgggagccgtcctcgctccgtcccctcatccccactcgccccgcggtggcggcgccgggctgaggcggagtctcctcagcggacacgggcggcggctcctcttccgctgggctcgggagggcggctagcggccgcctccggctccttgcttccgcatcgacgccccggcgccgatcggtgctcgctcccccgtcctgcccccgggggtgggtagggcgcccacacgcgagatccctggggatctccctgtcgccggctcccgaaggtggacgaggcatggccggggcgccgccggccgcgatccatccccacccttgtctctgcgggcttccaccccctccctcgccgcccttctcgcttccgcccgagataatgactcggcggcggcggcggcgggcatcgcagtggcgcaggtgaggc

SEQ ID NO: 130821 - DNA, 1019 bp, Homo sapiens
ctttagggaaggggggagtcaggccgccctcacccagtgcaggtccgtcacgatggtcacccagagcactcacgcagaaagccagcttgcagccgccagccctgaggatgccgcccccaaagggctcattgctctaatcacccgtccaggggcttgaggcaaagctccaagacagacctgtagcagcatggcccaaaaagttcctctgctgccccagtcccatacctgcctgaggtacgggggttcaggctgagtcggctgacctggagtcatctggaagccttgtcagaaatgcagattctgcagtgctgttcccagaggatgagattcagcagaactgggtaaagccatgaaacctacatttaataagtgcccctggggtttttttcagcaggaggttggtacacttcactttgattttgtagaagatcgcatgaacacagaagtgttaaccacatatgggtaccactgaatgacagtaagttgaggaatttgcccaagaagacacagctagcagttggcaaaggtgggagtcaacccagagtcaccagtcccccaagtctgtgtttctaagcacaggccaaacctctacagcagtcccctaggagcttctaaactcttcctttgtacttttgtgttatccagtaccacccgaaataagcagcatcagctgacactcttctaccttttgattgtatagggatgttgttatggtatgtggatctggatacgttgtaacttaagcctatcagtcactaatagacatgaacacccagaagggtctattacgtctagatggatgccaactcgaatggatttttacataatctctagtttaaaggctgctagtctatcaacagaggatagagaaaaaaatacactgaaaattagatttaagacagatttatccctttgcttggcaaatgtcatcttatcctgttaacagcccacaaggaaaaaagttaacaaaaaataaattacattttcaacaatgcgcttgaagtgcaggcacagatgtc

SEQ ID NO: 130822 - DNA, 1098 bp, Homo sapiens
ggctaggcgggtgtctccttcctcccttgctgctccatgtgcaccctcccgaagccgcacgctcagtggaagaggacgaccatctccgatagaggacgactggtcttcggttaagggtatagactagctgcgctcccctgctagaacctccagacaagctcttgataatatccagtcttaaagaaggatctgttacatgtgcttcagaacaagtggattaagtacaattgaagattccatgtataatttcaatcatcttttagttaaaaaaaaatttaactgaaagcatttccgtaagagctactccaacctggagatcaccaagtaaaacggaggagaagggccaaaagtttgagaaaatggatttcagtttgagctgaaatactaagtaaagtcctacctaaagttgactttatccccaagtgaaatggagagaaatcaagagggtaacatatgagatcagtcaaccgtgggcatgacagggagtcagtgagtaagcagttttagagaatcaacagcctgcaattccatcaagatagttgagagacagacccaggaatcatcctagcaaagcgacagcctccgtcacttgcagtggctaaaagatgtgaagacaagacaccatcaagcccaaatcttattggttacaaaaatggctgaatctaataatgctgacaacacattatatcaaccaaggtgaagtctaagtagttttactttatttagatgatgtatctggatttttcctgttcaattttcttagatctttgaaggaattgccctgtgtccattccaagtatttctggtgagtcatcaagtttcctggctgcaggagtgggttcattcccccatgccccagcaacagtgatcagaataaaaagggtgaatgcaagatctaataggccaaatccatttatatacggatggtgggatgaaaacactttttttttgttgtttgttttttctatcgagatttttataatggaaggatatacatctgaggctgtggtgggaagagctttctgtagcatgaaaggaagaaaagagaagcagagaggagaggcagacagagattcaacagcagtggtttccaacctt

SEQ ID NO: 130823 - DNA, 1001 bp, Homo sapiens
tataattatgcccttcgcttgcaacaaagaatatctgagccacttcctctagctctgcctgagagccgtagagtggcggtgcctgcagttgggtgggcgtgcacccccgctcactgctgttcagtcttcctagcacagaccacttctctgtggcttctcatggcagacagcagtgtgtgaaccccagtggctgtcacgagtgctttctcttgtggtcagagagcagaacttgctaccaggtttaagttactggaggtggaggtttttacaatcaaaaagccagtctttgaaagcacagaaaatgcattagcatcccctcccttggagagagctatttttgtctttcgtcttcacagactgtgctccaaaatagggagacgagtagcaggaggggaacaaaacaatatccacaatgtctccagctcagaaagagcaaatcactgccatttcctcaacaacaacaattgccacagcagtaatggagaacagactgagttggaggcaagctgcccttgggtaaagcacaacacggatctctttctgtgggattgctctccatatacttcatgaaacaaggtttgttgctatggttactagcaaatcacatgatagcctggctacctaaaagtgtgggagaacagcccagatcagaatgtgatgggggtaggggataccttccttcccagctcggctgcatttccctagcagacttggatgacctcagaggtcttcctcatttccaaccagcccacacgtggggttaaaggccagccattctttgggcaccaagagattcctttcataacgagatcatcacaagtttgcctcaagggcctctccctcttgttccaggagcccctctccgcctccccagccccttccttccctggcccctctgccacacacaggtgctgtaattcaatcgctgaattgagtgggagggggtggagtgtgcagcctacaccacttgaataagctcttttctaaaatcgaggatggca

SEQ ID NO: 130824 - DNA, 1108 bp, Homo sapiens
ttattggactcttagtccaacttagttgtttttcagctttaactttggtgactcatttgtgctcagttctgattcagacaatggaaaactattttagcaagagctgaactgatttttattcccctgttgatgtccaaagctcagcccaccgtcatgcactgtgcattcacattctctgtttctgcaagctttgctggccaatttcaccaacgaacgttgaattgaccaaacatgtactaagtgcattctgcagacataacggagactgaattttggagatctttgcttcccaaagaatcccctgaaaaaaaaaattttttttttacttctactaagtagcccagttttccaatcacatgaattttctggaatatttttggagagaagcagatttattgaagagctgttcttttttaccccagatatagacaaagttaaatttattctctgaatataaatcatcagagtaagaaggtaagatttagtcaagaagatacatttgttggactatgggttcatctgtgtgcaacagagacctaaagtttcaatggcttaagcagtattgaggtttatttatcttccatgacagcgtgagagtttgcagccaaagactagtatggcgggtccatggtgtcaaggactgccaggtatctcccatcttattgcttcattatctctaggggatggccctcatctgcatggtccaggcaggaaagaggaggataggaataaccccaccccagaggctgcacccagcacttccccttacatacacacacacacacacacacacacacacacacacattccagctgcaaggaaggctgggaaatgtctttattttgtacaatcagtaaaaactgagattctatcaataaagaaggagggcagacattggagaaaaactagtagactttccaacatattcctgaaaaattttaaatttcagaaggggctataggtgggccaggcaggaaagaatcattatctcacccaaagaatgacatcgggcttcaagtatctaagccaccatcaaaaaggctggtgctcttccaggtttttctttaaagggcatctgtcaggctggggagaacacttctctaggtgg

SEQ ID NO: 130825 - DNA, 1069 bp, Homo sapiens
actacaacagggtgtgaaggctgtcctggcctactcctgctgtcttcccctttatctttcaaaagtgtcccctaatctatcacatttctaatccagttgaggcaacagcttcccaggggtgctttagaaccttgaaatatcaataccataaaacatggtccagaaaaactaacttttatttgatagtatgtataaaaccatctgttcatttcccatacctcttccagacatgaccttcaactggaagggattaaaacaaacaaacaaacaaaaaaaaaaaacacaaaaaacacttgtgccccagagcctttggtttaccacccagggctctgatcactcgagatacattccagaattcatttaacatgtgttcccaccggagtcagcagaatgggtaaccacgggcagacagcacattctggcaattctcaggcccatgctccagaaagacagccttaagttcatactcagggtttataaatagtgagtcatcaaccactaccagttgtcttggtactagtgacataatcttgtaactcctggtgactagagagcttcattaattttgtggagaataaaacctgctctcttcatcagagggagaactgcattctaatttgtaacttgtacgatgtggcacttctcccccttctctgattgaaaatcagtatttattcctgctctgccttactgccatgaataccaaggccattgtctattttgttcaccgttataacccatggaatgcactccataattatttgttgagcaaattatcaaatagatgctttcatattatctcattttagcctcaaacaaccctgggaggtatatgtattatcttcattttactggaactcagaaagatcaagtgacttttccaaggtcacttggtactctccaataattcagacaccaaatattccaggagcatgtctgacagggtcagaaaattcagttgctaactgtttggctaacatttgttgaatactctaagccagtggtccccagtgtttttggcaacagggatgggttttgtggaagacaatttttccatggacagggttgg

SEQ ID NO: 130826 - DNA, 1046 bp, Homo sapiens
ctctcttagcttgtaaatgctctggaacttttcttcatagtatctcattcttgagtagtcatgttgggggtagtttttacttataaaagtaatacatgcctgcactccagcctgggcgacagagcgagactccgtctcaaaaaaaaaaaaaaaaaaaaaagtaatacgtgcttcatggttaacaattcaaactatgcagacaactatcaaataagtaaaagtcccttatgtttccattcataccgtaaacctggttttccgtttgttttgattttgattggtttgttatctggtgggttgattagtttgagttttggttttcaaattcaaactgccttcattttttttttcaatgattgcttgcatcatccaaaaggaaaaattcctatgaccagtgaccatcctactgacagagattgcttcgcaactaaactaagcttctgtgatttgaaacagcttaaaagctctaactagaaagcttaccaactcaatataaaaccaggttttaattgacttgggttatgaaaggctctaataatagagcctgccactttaagaaaatgccatagcccactggcatatgcagaagctccttgtgcaagggaggcgtgcctacagctgatgtcatagcccagccttctaatgccatttgcataaagagtattcgattgcatgattatataaagtgaggtttactggtattttcttgtttagttcttgaaagtctaattataggcctaagggaataaatctaccacttgaagaggattgttgtggctactgtcagattccagggagaagacagattaaaagcaaaaatttgaatttcaaagaaaatactttaatgcaccaacacaatgaagtgaagtttatgtcaaaatatagaggtttgcctttcttgtattctaaactggttcttcattaaaataactttatctaaagaaaaatgaatgccagccacagtggttcatgcctgtaatcccagcactttaggaggccaggcgggtggatcacctgaggtcaggagtttgagatcagcctgatca

SEQ ID NO: 130827 - DNA, 1122 bp, Homo sapiens
tatttattgaaaatcatatatgtgaagttgcattgtgagctgtaaagtattatataaaagcaatgtattatacaaagaaatatagcaaagttccctaatctttggaaattcagatgcattctggagataatacatatatttatttacataattttaggctatatggccaagtgcttggtgtgttttatagacaataacttaatgaggtatatgtacatgtgtgcgtttatgtgtatataggatggctttgggttgaagagggcagtctgtgcctggaagtatggggagtcagctgagggaggagtaggaaggaatagggaaatcaaggtgtgggtggctgattgagcaaaagtacataaagtttctttgagagaaagtgagtaggcaagcccgagcacaaggcttgtgaatgagagcctttgatcccgtggatgagagtggggagaatcgttagaatgggaccagattgtgcaatgcgtgcacactgcagaaaattgttcaaattactcctgacactggggactctttcagggtttgggaacgggagtgacatgatgaaagtatgtcaggaagatttatattaatgaaatactgtgtcgatactggtttgatggagatcttcttacaacctcttgtatgtttctctatttaacagtttactatcataatacaacttttggttattctaggttattatgaatatagattaatgggcaagaattttgctgtgctctaatgcagtgatactactaatgcccaaaaagctgtatttagggatgtttgtccctgcactaaataaccccagactatagtgtggctatacacgacatttcttgtcttctacttcactataaaagtaacacattttgaaatatatctcatatataaaaatgtgaagactgtggtaaggttggattttacaaattgaccagtacaaaacattttgaggaatagtatccatgtctgtctctctctctctctctcattcttaccacatagatttttttaaattaatgcatgtttttgaattttgtagtcacttttttcatattatgtctttgtactctgccatttcatttaacaacataacaggtgggtttttcgtgttataaactgtgctaa

SEQ ID NO: 130828 - DNA, 1815 bp, Homo sapiens
tatggaacaaatgtgaactggtaaaggtcgatcttgatactatattctttgaaaattcttgaagttctttaatttgaaattgaaacattaatttttgaggtttttggaagttactatttggccatttttacaaatggattttgcattaacaggaagattggaatgacttgtggctggattaattcccagaaccctctccctcctttcttttctaagtgagttgttgattttaggagtttgctttgtgctgttacctaaaatcagagactggtgtacagtatgacttccatctgaacttgaaaagtattaaaatgggtcaatattcacattcttttagatctcaggatgggaaaatgggtttgttcagatggatatggtaaatcttacccaattaaggaaggctaattttagagttcttctaatttgcttgtgtcaactcttaacttgtaaaactgctgttaactcggtttaaatttttaaattaatataatagaaagaacactaaaatacttactggtaactgcttagagccatttatctgatcctgtggattacagaatgcattccctcttctgctgtagcttatcattgctttgttttgtagctctgcatattttgcccaccttgtcttccctgtaagtttaagacgtttccaaggaaaagcttcagggctgatagtttcttagcaattcctattcttatgcccttactttaaaatagtccttttattttgtgtattttatttcctaagtttcagatgtaatatctgttgtttcctaacatgtcgattaccagaacgttagaattttacctaatttcttgtggatattgcagaagttctggttaaatcacaacttaaaagtttttaaaagtgctttgagcatatgtatatgtttagtgacaaatcatataaaaccattcacaagttttggttttttttttttcgtttgttttagtgactaattcaggatgaaagtttttttgttcttgtatttaacccttttttataagcagctgaagacaccatatttaacactatatctcagtgatagggaaatagctgcattgatcttacatgagcataatcatccttatacttcatgaggggattattagtacaatccccattttactgtgtttgagttaaaaaccaaacatccctgtaatttaatttgaagattctttaacagattgcagcaaagttcattataaaactgttatggtgtcttcaaagacttgataaaataacactgagagagaattggtccatttgtatgctgtatttctattacttgccaaaaggaatggggttaagattaaacttgtttccattctcttcacatggatattcatccccatgtttaactgacacactgggggctcagttgtgtgctgtaatgtcttattaaagaagatattaaagaaaactaaactagtctaatttcttctacattttaagaggtttttatattcccacttttttttttctcctttctgagcttagaattggctcttaagtataggttggtagatttgagggtagcaagagatttctttcatttctcgttttccctgcagtctttccctttttgaggtctgtagaatacttgggtggaaaaaaacttgtcattttgaaaccttactgtatagaataagtgtgaattgttggaaagggggaagtgattggctattaacataaaaatacaattatgaaaaatacttaggtcagttaattgaattggatgggtaagtccttgatgatattgtaagatttgaagttttagttttatattaaagatactatataggtaatta

SEQ ID NO: 130829 - DNA, 1114 bp, Homo sapiens
cacctctttacaattagtttacttatagtacttagcagaggttcttttttttctcccccaacctatccccttagcaaagcttctgagtattaaaatatagggcaaaatgtagatgtagatatgtgctatataaatttgtttataaatttgttggttgaaagttatcactttacacattacatttggttggattttttccccctaaatagtggagttggtggtgggtgtgttgtgtgtttcagaattctttctttttaaaataaattcttcagagttctgtatataaagtcgagttgacaagtttaccagatattatcttcatagtgtttcttcttagttatttgaaatgcatgtaagttgcatttgtgcaatggtaacattcattgaaaattttgcttatgttttataggtgaattcatgacacctttgactcttctactgtctcagaccttaggtaacatacctgcagctgcttttctaacaaactgttgatcagcaaaaataaaggggctacagaaacactcatttttatgctgttccctcttgggcttcatgcaaagacaattctgtgtaaatgtacagttgactctgatttggaaatatgaaaatcagtccatccttgttataaaaaatttttttacaattgtaattatattgatgttcatattgtgtaaaataactcatttaataaaatagtactttgatttacgacatcacaggataaatggttttagaaattctgttctaactttccacattatttgccttataaaaatctaatgaattcatcagctagaattgcaagtgcaattcttatatccctttctctgctcagtggcaggttcctcagttaaactagagcagactgattcattaaaattgtgcatacgattttatgggcagctgatgatctaggtgaaaaatgacttatctgctgccttagtatattgcggttatgtgtcattgtacccctctgatcatttcctgtgtttgagttggaatatttaaaattgcagtatgacctggctctaactgccagtcaggtgtaccctgtagataactgatagcttcctaaaagcggttggattgtcagtgagcccttgtgaaaggttag

SEQ ID NO: 130830 - DNA, 1076 bp, Homo sapiens
cttgaactcctgacctcatgatccacccgccttggctttccaaagtgctgggattacaggcgtgagccaccgcgcctggccacaattttttaaatgctgggtagtattccgttgtataaatactataaaaatatgtatacaagttgtgcatccgtgttactattgatgggcattcagattttttccagttttggaatgggcactcagaacattttgtacatgtcttggtgtacataacatttgcatttctattgggtatataccaagagtggaattgctggctcatagaataaacagctaccaactagttttccacagggttgtgtcaattgatacttttgtagcatttatatgtgggaattttaatacctataaatttttatttgccagatatttctataaaacttaaggcttcaattctaagaacgttcttatgctttgattactctgtattagagtaaataagccactctaatgcttcaccttctgtttttagatatggctcgtggacagcagaaaattcagtctcagcagaaaaatgccaaaaagcaagctggacaaaagaagaaacaaggacatgaccaaaaggctgctgccaaagctgccttaatatatacctgcactgtctgtagggtaaggggaattgaattgaaagatacagctctcccgtgggcagttttggcttgaatagattaaaattttgaaaccatggcaaaatagatgctttacatgaaatagtaggtttgagagctgattattttaggtatctattttcattcaccctttaaacaaatattttttgaatggctcctgtggccaggcaaaaatctctaggtgctgggaaaacagagtgaacaaaacaaaattgctttcctcatataaaataaagatgtcttcataagggcatataatacacttcactagcacatcatataactctacactcttagagctatataatatgctagtaagtatacctctagttatataattggttttttcttcactaaatttataattaggatgtctgtaaaaccatatagagtataatcacgttgagagcttttcctagaatt

SEQ ID NO: 130831 - DNA, 1041 bp, Homo sapiens
ggggtctccgaggcgggagaggcgggtttgggaaggaaggtgcgccaggctgaagctggggtcggagaagtgttgggtggagacctcactgtgggtgcgttcctcctctcctctccccaaaacgatggtgttaaaagctagggtcaggatgtggagcgctgcctgggcctcttcctttccgatggttatggagaatgagcctacttcctggacccaaaatccttttcttctgttactcatttatgttggttttaaaaggagctttggggcagagcttacttgttgcctcctacgagagcgcctcattttagaactcgtttcttccactacttccctctttgcagccccctcggaaaaccacactgagagttgcattaaaaaccagcatgtaggtatttgtaagtgactttttccctccagtttgtcgcatttaatcaaggagcggttgtagctgcctacgattttgtagaaaattgtgttggcttgagagcaagtcctaagttgagctgtccaaaagcaggtggttggttcgtttgaatttctgctttcagaaaggaaatcgatggggcgtgttgtcagaagttaggggcctacctcatgcatttagcttattttattccatttcctttacctggtgttaagttttctgtcttcagaataagaacaagtgactactgtctttattaagtctcttcggtctttttggttgctgtttggtgacaatggaaaatgggttgaatctattgtgtaatgttatattttagggaaagtcctaagtgcaaaagttaaaaataattttgtgtgtctaatgacattgctttgtacgagtcacaacatggaaatatcaaaatagctagtaacttctagaaagcaaaggaacttctgaaattagtggcttaccatttttgaagattttttttaacataaaacaagatttcccacaaaatcagtgtattaagatacataaaatacattgtgtcgaagagttaagatgtgtgagaagactggctattttgttacaaggtcctgatagtaagacat

SEQ ID NO: 130832 - DNA, 1032 bp, Homo sapiens
agacgggcgcgtcagcctgggaggagcgggaaaagggtcgcagcgcctgaggcccggccgccgcccgagtggatgagcgagcgagcgacttgtgaaacacgccgcggcccggtcaccaaccaggaccgggatcacgtggctcccagggctgggtgaagaagccgcccggaccgagcgcgccggagaggaggggcgcctggggacagaaggcgacgtcccctgaagtttgtgtcagccagggcccgccccctcgcgcttatgtaataggggcgcgctgccattggcccgcgcgaccagccagggcgcaggcgtgcgagcggggtgggggccagaaggaggcagccgcagaaaggcacatgggcggggctgcgaggagcaggcggggcgggggcgccgaggagagcggcgcggcgtgcgcgggcacgaggcgtagtggtctcccctaaggctgaggcggcggcgggcgcgcggcggcggcgggcgtgcgaggctgttgtgctcccggctctcgtgtttcccctcctgagcgggtggaggaggcccaagcggtgctgggcgcgctcccccttcctttccctccggcgtcctctcccggccctctcgcgctgcactgtctctccgacgcaagactgtcccggcccgggtgagcggcagcgggggcggtgctgacgccgcgggacgcccgggaaacggggcgggggccggccagcggggggcggtggggaccgtgggactcgccgcgggtcgcgaggggtcgcggggggcggcagggcccggcccggggcgggccgcgggaaggggatgagttcgggcgcctgccaggccctgcaggtggccgggtcgcaggccagccgcggaagcggagcggtaaccttacccccggcgacagccgccggtcagctgccagagtgtggcgctcccggtggacgcaggggccgggtttcgggcagtctcggcctccaggaggcgcgtcttggtccagggtccgtgaggactggctagatgggggctgcgtggcctttggtggcaggg

SEQ ID NO: 130833 - DNA, 1240 bp, Homo sapiens
tctagtagcctgtgcttgtgttgtaggtgcagtagcttctttttacccccgtctcttttcagattttttttttttttaactaacaagcaaaaaatcaaaaacaaaaacacaacagctttaagttggaacatcaataagtcaaattgctgctggagttcccacatgtagctggggaacatgtgccctcattgcaaggcaggaggtaggtacgtgactgtgcatttaggtatatttgtgaccgagaagaatcacagaaatggaaaccactggagaacagaaagcagcatgaacttttcagcaggcaatcccatagcgcgaggctcttttcctattctttgcctctgtatcctctgtgttccttctggttccagctgaaccagtgataatcccaaatcagtccttcctccttttcagtttctcatcatcttcagactttctggagattgaagagccattcaaaccaaatctttgagctctttcctttagcttatccaggttcatgataggtttgttgttagatgacagaccttttgttgaaactgaagaagtcccaaacctagctgcccgggcagttttcttactttacaagctcacgggtacatggacttgttcagccctcttctgcattctctctccctgtggtatttcagatgtaatttttaccactttcttctctgcttccacgtcaacagttttttcagggagttcttcctctttgacagggatttctatggggctttgtttcttcttcctctgtttcatctcccagtacatcttcatttgcctcttcagcatgccctgaaaaatatgcctggagccagcactttgggaggccaaggtgggcggatcatgaggtcaggagttcgagaccagcctggccaacatagtgaaaccccatctctactaaaaatgcaaaaattagcctggcatggtggcatgtgcttgtagtcccagctactcgggagactgaggcaggataatcgcttgaacccgggaggcggaggttgtggtgagccaagattgaaccactgcactccagcctgggcaacagagtaagactccctctcaaaaaaaaaaaaaaagtgcctggagccttttgatggcatcttgtttcatttccttggtctccaaaccacaaggaagacattcttgctttagttcagcaatcttccacttatggtgcaccaccgtcttggtcgccatcttgttacccctcactccagtaggcccccacccactg

SEQ ID NO: 130834 - DNA, 1058 bp, Homo sapiens
ctcatgcccaataattcactgggcatgaattcattgccaaggttggaaaggctgaaggcacaatgagacaatccagctattacctgcagggctggagaatcaaagggaggaggaggtgggtgttggaggagccacccagcaggagctgggaccacagagagagctgttttccaatgggagatgaaagcacagcagaattgctgccagagacattctcagtgccaagagggaggagaagaactgtcctggcttctctctgcctcgtgatctcctgccagtgcctcccatcggcagaatttaactcggagtcagagggcacattaccgtggaaagtgcagtttgcagaatcaacctctgagatgcagagcaaagtaggggaagtcagggaatagatcttaaagcttccaaaaattacttaaaaacagacagtaatgtatgtgtttccaaataattttaccactgtttccataagaagtaagtcatttctcatttgtagacttcattaccccattttgctgactaagatgcttcagtccaaatgagtgtgggctaagtgaaggttcccatcctgctgggtatgaaaaggtattactgagccttgcaaaggacaattactttgatttcttacacattgcaatgaggacttttcagatcttccatttcaccctggctaggacttcttgaccacactggcagagtttaatgactaggatagggtgagaggctcactgtagaagacaatgaaactagttactggtttttcttgcaaaatagttaagccgctcctcacctccgcatcacacacatacacctattgtattaactagtcaaacatatttatcgaataaacaaggaaactgaggcctaggaagtctcactggcccatatcacatgactccccctcagataattagtgcaagagccgggataagatctgtgttcctgacctgagctgataaactaaaccaagacctggtgactaggacggggattggggatacttgccttaacctgtttagttaaatctgcatagagcagaggaacaattttattttatt

SEQ ID NO: 130835 - DNA, 1030 bp, Homo sapiens
caaaaaggtaggaagggtgctgcaagttgtgcaatagcacattcatagatacagtaatcaagacaaaaaaagtgggactgaagctgggcgcagtggctcacgcctctaatcttagcactttgggaggccgtggcaggcagatcacttgaagcagaaagttccagaccagcctggccaacatggtgaaaccccatctctactaaaaatataaaaattagccggacgtggtggcgggcacctacaattccagctacctgggagactgaggcaggagaatcccttgaacccaggaggtggaggtttcagtgagccaagatcacaccactgcactccaccctgagcaacagagcaagactccgtctcaaaaaaaaaaaaaaatgggactgacaaattatttaataaagtctgataacactattagccaaggtggaaggggtggatactctcatgcacgctagtgagagtgctagttgatttgttgatttgacccatgcagagagtagggttaaggaagggagtcctcagtacatggggctgtggaaaggcttgtattttttaagggcatcttagaatggcagggagatgaagcatagatggaattttctggtctcaaactctaaaagaaaccctgattaagctgtttctatgtgtcacaggctgaagccttgggtccccaatggaggctgactgagcccaggaaggattctaggggtccacagacccagaaggctctgagtgttagaggttcattgattcttgacacctcagtcctggtggcaaacctcagagctgcaggtagaatgttagggaaatgctatttgagttcctctgcgaccacccacctcagcgtctttgcagaggaacgtcactaagccagaagtggagctcagagtttcttgctctttgttgctttaacagtatcttggctccacaaagtcttgttttacagttttattggggagatattcaagtgtgtgtgtgtatgtgtgtgtatttatacttttttatactgaggtttaacatgaatatc

SEQ ID NO: 130836 - DNA, 1036 bp, Homo sapiens
aagagcagagaagaagaacagggaaggaaggaaggggaaggagaacgaagaggacaaggagagggccaccaaagtccaatggtttaggcagtggttgctcaaactgtggtcctcaacaagcagcatcagtgctgacttcgtagattgttagaaacacaaatacttgtctcccaacccaggtccactgaattagaaactctgggggtgaggccctttaacctgtgtttcagccaggcctcctggcgattctgatgcacgctaaattaggaaacgcctgatataaagatgctgctaagaaggctgcccttgatttaaagaaagcaatttcagaagtaaatttatacacgcacatgtgaacaaaagccacgtagaaagacattcattgcagcattatttatgacaggaaaacactggaaacaacctaatgttgaagaaattgtcattccatatttcatacttttttaaagggagagagaaagcgatcttcggactttattgttaagtgaaaaaaagcaagatgcagacctgtgtgcattttatgctaccatttgtgtaaaataggaaatgaggtgtatttgtatttgcataacatgtttctagaaggatactcaagaaattgttggttggctgggaaacaaggaagggaggtcattttcacagtttacccttctgtgccttttggattttgcaccatattcaggtgttaaaaactcaaaacaagttttaagtattaaacatgaacagaaaaagcttcacataacaaatgccgaaaaagtcgagtgaatgaatctttcagtctgtacttaaattcttcttctgcctgggagctcgttatttcaccaagcagcccaatctctcattatgcacatccctcatcctgatgtgctgcttcgcaagatctgctcgagtgacagagcagagcaggagaaactgttgtagtttgaagagcagtgaaggtttctgcctgagagacttccccatgctctccccagcaatacctgggattcaacccctcccaaagtgctgtggggagaga

SEQ ID NO: 130837 - DNA, 1001 bp, Homo sapiens
aaatgctctctgttgagaaaggaactcatagtcttccagggccagcagaattcacaactccaaatgtaaaagtatgccttgtgtgagtcttgcaattgttttggaaatagaaacacctgcttcatatcaatattcacattgttttgctctcatcctggactaattattgaaaggttgattgtgcctcaacttccttatctataaaatgaagtcatcaacagcattaaatgagcttaacacatatagtcagtagatcttagctgagcagatgatggcaatgatgttgatgatgcagctatttccacattagggatatttggattgcttcccattggagaacctgctgttattgcccctactgaacacccaactccctatcctcagccaggtgttatttaggtgtaaaagaaagtctgaactggagaataaggagccaaaaaacgaacaaagagttttctttaaaaaaaataatttttggcaattggtggtgaaatgtggatttgtcatcttgatagaatagtgttgccacccttccttccgagcaacttaggattgagtcagaaggtgtcacatcaggcagatttgttgaacagtttggcaatggtgacagtgttcctacagcctacaagggtttcctggagtctgtaatttaagccacttgataggttggagttctgttgtttaaaaattgggctgttcttatactcagcagacattatattcttccttgagatagtatttttgagtttgtcttcattaaagaagtctccaggccaggggtagtggctcacacctgtaatcccaacactttgggaggttgaggcgggcagatcacctgaggtcgggagttcgagaacagcctggccaatatggagaaaccccgtctctactgaaaatacaaaattagccaggtgtggtggtgcatgcctgtaatgccagctactcgggaggctgaagcaggagaatcccttgaacctgggaggcggaggttgcggtgagcc

SEQ ID NO: 130838 - DNA, 1035 bp, Homo sapiens
taaaaaaattatgaactattcttagagtctatggagggtcttgagtcaatttaccgaatgaatttgtggcctctagaggatatctaaaaatggggacttgagctcctcctatacctcctctgctaagttaagtgatgagccctggatcaccatgatggatttatttgcctccccagtccatgagggccgactgttttgttttatggttttatcagaacccaaagtagtaataatgagttttaagtaagataatatttagtaccctagttaagcggacatttattgcaaaaggaattcctcagaagtttcccagagtaaggttttaacctatggcagccttgaggggctgttgaggccccagagcaccctcctcttccctggatgcagcctgctctggtccagcatctggctcccaaggcagccaaaacaggcagctctgttgcaatggtctgacggccaggtggtctgatggtgaagagacatgtggacttcatctgaagcctttgacttcagacactcccacagtttctttgtttgggacagccttggagtttctgtaggcctggaatgtgaccatttagtaaggcctctgtccactttctcatgggccctttaagcatgcagtgaaagtacccctccaattgctggcaacctgggagggagtggaggcagacttagacattagatggacttggagtagctgggaaaggagatgccatcaggagttgaatttcaagcaatagaagatgtagggtgctgttgaggtaaaatatgtctttaggttgaaacaggagagagcgtatttacatggttacaacagtgcactcttttaagagcagggtgggtgtgccctcctaagctctcgaatagcaaatgccaaactcacatgtctgtcactataactcaggcagaccatggggggcggggagtgaggcgtggaattccaactccatttccaatttaattctcatcttagggggtatgtaagcttgcaagatgtgtagttgggttataacggctttagaggaaactggc

SEQ ID NO: 130839 - DNA, 1013 bp, Homo sapiens
actaatccacgaagctcccaacagaactggcacagatccccttagtagggctgcccaaaagattgaggctgtcagacctggatatctgggcaccctaagttgacaagtctaaagggcagagagcatgctgcctttgtctttgtcttcctagaagacctagtgcagcattcagcttatagtagatagagagagccattgttaaatggttcttatgcaaacaaggctgacctaggtgctgggccatgtgggaatgtggaagcggagagcccagctagtgggactgacatgccttgggtagatcttctcacattcatggcgcctattgcctccgccatgactcactgcccatgcactccatcacttgtgagacaagatgtgacaagcaggcgctgaaagttgtgccttgtaacctaaatatgtctctttcttttgctctttctaccttcatgggagtaaacctctcttctaatcacacatgagttaatgtaaagttttcagaaattaaatcacatttccccaatggttaacttgatcatttcagagttacatcatcattgtgatttttttttctcctcaagggtaataaattaatgaactatgcacaagggaagtttctattttaagaaagctgtgtgaagtggaagaatactttgttcagttatttctttcatagtaggtctccgccttctttaagctgaagcacacctgtttcaaggaaaacagttggccaacaagacagcattggctttgtgggaatgtgccaaagaaatttcaagatattgtattcttttgattcatattcccaagttgctctccagaggaaatatactagcagaaggagagaatagcagccatttacaggtaattagtgagtctatggtgtatgattcattgaattccattctagatccctatttataattattggagatttcttggcaatgcttaagagacaaattaccaaaatccccttacttgtcatagcagcattttaactttgcataagcggtact

SEQ ID NO: 130840 - DNA, 1125 bp, Homo sapiens
ttatttaactggtgcttcatgatggaaatctaactagaaatagcattccaaaatgtagtattttttattgttttcagaagtgataccataaaagttaatgttcactaagattttgatataaaaattatatgataaatattgaaattcactggagccaaactaaaaacagtctgccctttttatctcagtagtgaactttagggggttttttgcatgtattttcataagtgcctttaaataaagacacggcatccctttaaaatttagtttacattaatgtaaaccagaatattctcaggtcacaatgcagttttatatttgatttgtaggaaataaatctctagcctgaaagacattccagctgttgcctgtcttcatgggaggattgttcacattttctgaatctctcccagtgactgcaggaagaccaaaggctgcacattgcttttatgcaaggatgaatttttttaaaagatgattttggattttgtttgctttaatgaatttaagccctatctattagaggtaaatgtcaagaaaactgttgtgttctttggctatctgctctgctgactcccacagactttgatatgattcatataactcaaaccatgatcaggtttgtgacgaccatatttacaatatcgttggagatcaaaaatagcatctcacaaaagtttccccgtcctataccttcccacatcttatcatggatcatgtgcagcacagtcactcaattggcgaacatttattaacggactactgcattcacagtattatagtaggcatgtgaggtcctcccctgatgggatcctcaagtgagatatgctgctggcatagagaacccaagggcctttatggaccctggcttttgtttgcttgagcttttattcaaacattcagtctttcatgcattcagcaaattttgagcacatactacgtgtcaggcattgagccagaccccagggttgctataaggtacaagacagggcaggtcccttccatcatggaatatgcagtctaactatgtagagaacttgcccagagacctatatgtactattaactggggttctctttcccacagccacactggccactgcagtccaaaagagaattctaaaag

SEQ ID NO: 130841 - DNA, 1041 bp, Homo sapiens
ttacagcattgagactatgttgatttcaaggtcatgtttgttgcagcttcaaaagatgctggcaaggaacgaggtactctagaaacctggctgttgcattattaaatattttgtgtatagtttcggacattcttaacccgtttggtgctgtggacctctttggcagcctggtgaagcctatgtacttttctcagaattatgtttttacatgcataaaataaagtatgcaggtttacaaatcaaaccactttcattcattgaaaaacgttaactaaattttacaaaattgtgatacatgctttgttagtaacacattattacataatacaaactaacagcagttataataactaccataactaccataattttgaagtaatggtgagcataaaagatatttcaggatatctacaacaactgtaaaatgaggtgaaaatatctgtgatttctcttggcaacaatatcacaggtgctgtggcttgtggcctacattttaattgaaggaaatactaaatttcagtttgaggttagtgaaactaaagatataatatttttcccaaccaagttccccaggccctcttgaattttatccacccctgagtcaattgatatgtacgttagtgatgccaaaaggtgatagaactgcactggacaaaacccatcaccccatttccacattcggttccaccgcatcggattttattcttcgagtgtgtgaattttgcaatgttctctaaattctgcatgaaaaggaataatatgttcacatagctaccaaattgtaactttcttttattttcctccttgagatccattaacaacagtcttatgtcccctggattgggaaacccttacctggttagacaggggttaagaggaaaactcatagtgttagtacaagttatgcgagttaaaaccatgggccacagaaggtagttcatgtgctcatagcatttgaagcaagcattaaagaatgcatgtggctttccagcttaatgtaaagcacatacacgtgtgaattgatcaattgtcatgttaatt

SEQ ID NO: 130842 - DNA, 1047 bp, Homo sapiens
aagaagcaatttctgattctactaaagaaatttcattcttttacagtgacacaaatgtaatctgcctggctgacttaggttccatttatattttgtagcaccccagagctactcttttttatttatttatttattttaagaaacagaatagaagtcgttataagcctagcatataaaggtccttagggttttgagggcagtctcttctcccctgccttttaactccttgtcctttgtttgggcatacattttctgaatgtctttttcagagtaccttcttgtgagtttcattgattttgtttaatcggcttcccattaattaagaaagagaattaactgggaaataggcacgtgtgcagagttaaaagtaagctagggtcgtcgtaaaggaaataaagctgatgttagaaaacatgtgagataaccctttcattctatggctctgggctttcattacactttgtgtttgtggaacactggccctgtttactcaatgttgagtctcagcaaaggggtgtggatgagaggactcaagaggggagcatttggcacccgtatggccccaaagcacagttttcagcttactcacatggttattttaaagtaacactgttttgaaactccttcggtcctcatttttacctagacattttacagtacaggaatcctgaatttatgttatctgatgtctacatcctacttggtgtcaggatcattagactgtcttacctgtctctgagtcataagccactgtcatgaacccaagccactgttttttatttttctttccatcacaagcatggtctcagtatatccatgtagactctgatatagtttttaaaatacattttcttccaacccctccccctgagcttctgtttttatatatttgcttgcaaataagtttaattggctaagaaaactactccagaatttttcagtttctttccttttgttatagagaaagagagagagagagacatgcttcatgctgatggtagtgaaacaaatgagaacttcagggtggcatatattttcctgcaagta

SEQ ID NO: 130843 - DNA, 1118 bp, Homo sapiens
gatgaagaaaagacaagttggccttctccctttcacaaaaaatttaaaaataaaaacaaccctacagtgtaaaacaaacatgagaaataattcaattttttctaaaagcatatcaaatgtaaattatttccaaaattttacagagctaagcttcctgagtataaatcctggctctgctatgcagtaggtaggcaaattacttcatctctctcttcagtttcttcaattgtgaaatatggaatagtgcctgcctcataggattattatagtaaatgatttaataaatgtatagtacttagaaaaatgttccacatgtagtaagcactcgatgtcagttaatgtaaaaattttccaacatcaacagcaagaaccgttaaatacatccacatataacttacatgtactcataacaaatatttatttatttatgtatgagtagggttaagtttgatttacttggagccatccagttttagaaaagtttatgataactcaacatttttgttctttcttttttcttcttttcctttttttgaggttgggggttggagagaggctctcttccctattagtaggaagaaaaaggaaccatttctttctactcttcaacatttatttcccaatagttgagtcattcaacatggattgaggattcactgtgttctgggttgtgtgctaactgtagtgttgtacagatgaataagatttcatcctttccctgaagatctttgtaggcttatcagagtcagacagataaagaagaaatgacatacacacttgagccatctaccctgtggcaaggtgtcagaattttataatatattaactttattatcctccaaacaaccttaagatgtaggtactgcagctcagaggacttaagtagcttgctcaaggtccagccataaaaagatgaaatttgaacccagtagctctaaacagtaggtccaggcctgcccattaacgttaagacagaggagacagcaacatccctatgtacaaacatcgacaaaagactggttagaattgcatgacccaaaccacctgttagttcaggtgtgtgagcccaggtcagactgcttgtttagtggcatttaccagttatttctggcaaagtg

SEQ ID NO: 130844 - DNA, 1050 bp, Homo sapiens
tccgtctaaaaaaaaaaaaaaaaaaagtattcctctccaaaaatgcaaatgagggtaataacagtggtgcaagcacacagcaaaccccaaaggcagtggagccccacacttctgttattcctatatgctcttcgtcagccataatgtgagattgagaacaatgacaatgtcatctgagctaataagtggccaaaacattttctttcttttttttttttgagacggagtctcgctctgtcacccaggctggagtgcagtggtgcgtgcagcctctgcctcctgggttcaagtgattctcctgcctcagcctcccgagtagctgggatgacaggcatgcaccactacacccagctaacttttgtatttttaatacagacggggtttcactatgttggccaggctggacacgaactcctgacctcaggtgatccgcctgcctcggcctcccaaagtactgggattacaggcatgagccaccatgcctggcccaaaacattttcaagaaggttatttgaaatgtgaattatctttgccatccttgataatgaatgtcacccaagtatcaattgtatcttataagcccaaggatattaacactccattgagatcagcaattcatttaacctcacgacatccaaacggaaagacaaacctctgcagttcccccatcccacccctgtggtgattaaaaacataagattctcaacagtactttaaaattttgcaaaatttattgataaatatttagcagcttcttttgagacttgttagcaaaaaaaaaaaaaaaaaaaacccatgtgactgggtaaatgttcttcctgatgctattaaaaatggtggaaataacacttaaagatagatataataacaaacaaaatgccaaatgcctttattagtcacataatactgttggaatagagagagaaaatattgctgaatgtctgaagaatcaaggatgagaacaaatgatgctgtgtaggatgtttgctgtttagttgtatgaaagcatacttgtcaatgtttcagtttagggtattcgtcaggttcagt

SEQ ID NO: 130845 - DNA, 1020 bp, Homo sapiens
gacatttgggtaatatctggagatgtttttgattgtcacaacctgggggaagaggggagttgctattggcacctaatgggtaggggccagagatgctactaaataagctacgacacacaggaaagtcccctacaacaaagaagtatctggcacaattgtcactcatgcctggattgaggaaccctgtgttagaggaagggaagaaggggtggctattaggaggacagcaaggggtgtttgtcatggatggaaaaacacatgtacgtgatgttctcacagcctccctgtgagtctcactggcttcaggccacagcatccctgagtgacagaagctggtctcattacattggccaaccagccctcagtctacaactgtctgtcagagacccagtgaattagaaagatttgtgcagactaaaattagaaaagagatgaaaagtgattatttggaaataaatttgaatatgcctatttagatcctccaagactgcagtctgacatataaataagactaaaaatatgaaattatggtaccctgtcattctattcactagatttcactagctctgaatctaataaggccttagtcaccgtgttaaattaaagctttttaatatttaaaagatattaataatcttgctttggtaggttggtaaattttaaatttaataatttcaaacagtagctcttcaagtattcgaatcaatgattttttatattcacttatcttgatgttttgccataagtaataaatggtgtaataaaatgtctttgcgcttcaaataatacctcagcactttttaaacttctttgcaaaacttgaatacagtttatgtatgtgagtgataggcacacatatctacaaaggtggctaaattttaaaaaattaatgccatgacctgcaatttcctttgcaaatatgtagcttgtcctgcttgctttatggctgttgtttgcaacatcatattttccccttaaataaaaaatttaaaaatgacatagaagactttggccaaattg

SEQ ID NO: 130846 - DNA, 1051 bp, Homo sapiens
taacattgactcttccccaaatgaaggagggattttctatttgtccctgttagagaaaactagcatgagattaaatgataaatggcagcaataaaagtcagtgagaaatgtacacagctgtacttggatatttgtcatttttgaaaattttagttaaaattgagtgcctcctttattatgctattagatattaatcactagctactatttgcttgtaatttgaagagtttgctattagaaaaaagcatagcaaagtgaagcacatgctaaacattttctaacttttgtccaagactttgaaagattaagactaaggaggcttcatggatcgtaattaaaacaccattcatttggaaccagctcctaaaaaaaatgttgtgcctgtggcctcaaacttggttgagggaaatcctgtaagtcctagaaaatatcacaattgccgtaagtagtttattaattattgtgtagatttactttacataggaactgtgttcctgaaaaattgcaactaaaacaaatttttataattttattcatttctttattaacatattgtaatgtctgtgaaagtcaatcctttgttttggattgattttaagtcacagtaacttctaattctttgtcagacatgacagttcaaaacatgtacatgaatacttggtggtatcatggaatgcaacagtcttgtttactacttaagggcagcctggtgatgaatccttttgcagatttgtggaattattatgattattttaaatgacagttatataattgtaatataaatgattgcaaattccctgagggcaaggaaatgtatcttctatttactgcagcactgtacagtgaaaaaataaacagtacctggacatgaagtcgagacccaggaacacacgcagccttaacagctaacttatgtcaacaaggcacctacttttggtgaacattaattttctcatctgccttcctatcttacaaatgcatagggtctcaaatggaatcatacatatgagaaatgcaataacatgtgagagaacacaatagaaacctaagg

SEQ ID NO: 130847 - DNA, 1035 bp, Homo sapiens
gcagctgttcgactgggggcctttggttgttgggatatagcagaagtgtgggaaatgctgaaagaggccatcacagcccagctggccagataacccatggaaacccttcccagtgtggatcctattatcgtgggccattacttatttgatatttagacataggtgatttgcaatttcagattctagattttctcctccattaaaatgtaaaccttcacaatggaaaagtttgttgtctcttttgtttactgctaattctctagtgtctagatacagctatcagctccacctttgggctgaacctcctgaaagtcctcaaacgggccttcaagttctgacacaatctcccccaccccaagttacctctctgattttatctcctactagtctgtgaaatctagctagatatattcaggagtagataagactgttggggcatatgaaatacatctagcagcaaaatgtagaaagatttagaaggaatcatgtttgaggtctaagttctagttctgctactatttcctggggtgaaactgggccaaatcatgtgacctttgtaggctttagcctccacactgaaagaattttggatcagggtgcttctaattgtaaatttaatggcaatgctatccttggttgtagcataatatgaagttgatttatccattcagaaacatttctgagtatttttggtccctggtgtgaaattgtgaatcttagcctggtgattcataggctaacagctgctttcccaccatctaccccaagctcagggctttgcaatgggggcggcagtatagccagaactgacatcatgtcccattcttcctaggtccaagtcatttccatcaagcagcatttcccaggcttttgtcattcaggtcccatctccatgatttttactatatcacattctatctatattattttttacttaatgtctttctttaaaccactccttctttatattttaccttgcatttgccctaagcagcagttatagctgtgaatagctttgaaattggatatgccagc

SEQ ID NO: 130848 - DNA, 1082 bp, Homo sapiens
ggaaaatgtgtgtttttgcctaaagacagtaaagcttgagtaggatttaacataagaacacttccccttggcatggaggtgtggataatcactatgatgctattggcttctagtcatttctgtccctcctgcagcacctgggtccttctctgtgtttattgtttcaggggcaggtaattccttgctagagtgagctccaaataagctagacttcatctctcattcacatggagcaaagggagactgcgagagttcatgctgcaggtttgcagcatctgccagacccaaacgaggatgatttggatgagaaattgacagaaaagctcttggggcagtgaagaagccactccctgcttgactactagtgggcttgagagagtagtgggcaaggcagggaagaggatggcttcttcaacagaggttaaacttcctaacaggggctttccataagaatggcctgacttagcaaatactgcccaaatttcctgggctgtttgggattttgtccaagaatttcagacaatttagtaaaaattgcctagtggcagaaatccagataaccatagatgggaagaatacatataaagaaattatttgaaagcaaggtatatgaatagactctaggtttataattattactgatttcctgttgtttggatatcgctctttagcctccttaagtcaggatggttttgtctgggtccccaagaaatctgtactcttcccaaggctccctatgtgactagcttcttagttataggatgttacatggaatttcatttttctgcagttttctaagctaaagacttctttgctcctcctcttaaaagaatgaatgcgttttagcccttttagcctgggagcccattattctgtattttcaatgtcccacaaattcccctctgtcaaaaaacattgattttgtcaacagaatacctttcatttaggaataatatggagagagattatctcagaggctgagagcacgagacaccaaatattcagaggataattaaagtgttcttccagatgttttcaaatatagccacagagacaaatactgatcagtcgagtaattgatt

SEQ ID NO: 130849 - DNA, 1049 bp, Homo sapiens
ctattatttgggtcattaattatcagtcctcttcaattagggcacaaacaagattttttttttttttttttttttttttgctaattgatgtggatagtctccactgagggctttgttttcaatgctatttcattccttcttaaaatgtattattcatttgtaaactgctggtttctttgggacattgtccccataaacttttcataaagtgtgaacgatttcatcattcctccacccaagattcatcataaatttgatgtttgttcttgctgcaatattagtagaattcctgttgctctgatagggctcaattgaaaatgatgtcttatcctttttagtgactcaaactagataccgttctgacatgttataaaaagttagtatgagtttattttggtgcaaaaaaattgagctccatttatagtttttaaaataatatgcattttccataaactttttgaagactcagttttacctttatgtgacactggctataatttgttgcaattggtttcttacttgcctgtctctctggctacattgtaaattccttaaaggcatgctccatgtaggtctagctcatcactgtatcccctgagattagcacaatgcctggcacataacaggagttcaataatcatttcttgaatatttaaataatgttatataaaaacatcaaagattgtaaattaccccattctcaaagtaagacccccaaaaattcatgctcttttttttcatagatcactaagtgagaaggcaaactgaagacggagctttgctttattcaagacattgggaaccaaaagaaagtaaaaggcagattttcctccatctctttttcagaaattctgatgccctatttattaactgggatgcttgtactcctagggaagcgataatatggtgaggagacaatcatagatgaggtgggagggcttctggagcccgtttctaaatgctttgtgcctgcagaaaaaggagagcattgagaacttttttctaaatggaacaaagggtgtgactggcacaccatttagcctcgttta

SEQ ID NO: 130850 - DNA, 1001 bp, Homo sapiens
acaaaaagtttccttcaaaccttatttggcatcaaaacttctcccatgtctcaaaccctcaggcctttgcacactctaagaggctttgcctcactattaaatgagtgggctggagacccagaccagctggagcctcagagcccactggtcttgtataattcaagaaccattgattaggtatgacacacgccagcccttctgtctccttgcaatcacagtttttatgggagccccaagccctcatgcccaccatgcagagttttcatagaacatttagcgttcccagaggttccccagagcccacacttttgtttgagagccttccttctgagtaaaatgaatctcctaaggctttctctttgatgagtgggaacacctgttaaattccttctccctaaccagctcctgacaagaatatgttaatcccatagggttgaggtcccctgaagttctatgaccagctctgacaggaacagaacaatagtttgcccaggagccagcacttaaaatctgcagtaaaatacttggcctgcctcccgctccctttgtgctatctgaaaaaatgtggtgtgccgtggtatattgtttttgggtaattctgcaggccagtcttgaaatgaatgcttgtaggaagctgtcaagatgaacctagcattaagctataaaggttggttggaggtggtttaaataaaggcatttgcttggggttgtacggaataatggaactcttaagtgagaagtcgaaatagcaaacaccgctggctgccaacagcacactgtgccattaacctttcatatgaagtcattggaagataactgaattatatttccttgggcggatttttttttaagaaggtaagtggcagcagggatctatttttattaaaaaggcttgagaagtgcagtgaaatggctgtgtgtttgcaatcacgtcttccctgttatttgacaaggcctgaataattggaggcagaagaatcagtagttctgcctcgttgctg

SEQ ID NO: 130851 - DNA, 1062 bp, Homo sapiens
tatcattcattgataatattaattgcaatgatgttgtaataaaatactctcatttccttaaaataattgtgattctaggtcctaggatctagaattagatctttgtatttttaatgcttaggggaagaatataagtatctccttaaaaagaacataattctcattcacgcaagaataagttctttgaattccttagtatgtagtgaagaaaatttagttgttagttgctttgggaagcctacttatggagtggaaaccaggaggttatcatggtagttgaccttataagaaaaatgattcttcttcagaaattaaaaacataactattgccagatttagctctggaatgtttagaatcaggctagaatagcattttccaaagaatattctaagagctattagctcctctagatatttttttgggggaaaaaggggattctgtggtcagatgagtttgggaaatgctgaacacttcattcttctttagcaagtacagtcagtacatcaaagactgagcagttcagtggtacataaatttatctcgccctgcatattcccaacatacttaacacagatgttttttacctgttaacatctcacccagctagtgttcctcagaacaaagattggaaaaagctggccgagaaccatttatacatagaggaagggcttatggactgagaaagggagaacatggtagggattattgaatcatttcaaatttataccagcctgaatagtgtaccagcaattgacttaggctgtgtttctttatggttttaaaactcttgagctgttataagagatagttcttttaatgtgactatgcaacatgatagccaatggtgagggaaaaggaggtttctctagaagagtctgatgaaaggccgggaaccaaggtttttgagaagtctgcccctatttatttttagtaagtatcaagaggtagcctgagcctagttagagttagacctgtctttggatgaagaagtcttaatactgaaatactgaatttttaatacattattatttggtattctgtataccccttcaagcagttgt

SEQ ID NO: 130852 - DNA, 1008 bp, Homo sapiens
aatctctcttccattttatttttgttagaccaaactatttttttcaaaatatatttttttcaaaatatttgcctgactttagtaacgtgtccctctccccctcactcacccgcattcacacacacacacacacactttcccccagacacttccccttttcggttgtttacgcacgaaaccagccagccctttccctagcgaagtgtttggcggtgtagctgtcccgtccccggcgcttcccacagcaacagcgcgttctcttcgcctcccgcagtctctcaggacaggccaggctagcgcaaagtaccgtgttcctggaacaccacgagggcgagctcgggaatctcgagccggcctgcaggacacctgccgcaccaagtggctagagcccggggagggcgaggcgaggtgggacgaggcggggtggtgagcgggccgggaaggcgaggccgcgcggactctgggatagctcctcaggagtgggcgcccggagtgggcgagcggaggaggcggggccgatgaggtgaggtggggccagctggagtaggctaagcagtccagagcagggggcgtccctcagtggaaagccgggcgactgggcggtgcaacagagtaaggcggggccagcggaagcagggagatttccttaggccgcaggcggggaaatggggctggccggggtaggcggagccccgaggcaggggaggcgtggctggcagaggtaggcggtgccccaaggcaggcggggcttgccgagacagggataatcccttaggccacaggctgggaggcagggcaggccgaggcggggaggatcccttaggccgcagtaggggaggcgggtcggccgaggcggggagaaacccttaggccgcaggcggggaggcggggctggccgaagttaggcggagccccgaggcgggggaggcggggccgggccggcgcagggagagtcactcaatggacaggcgagaaagcaggaccggcgcggcggggcggggccggccg

SEQ ID NO: 130853 - DNA, 1133 bp, Homo sapiens
aacaatgtatctgcttgattttcccttctactctgtaagttcctttagtgtaggaactctgtctcaattacctttttctctccagtgcctggtagaatgttaaatttattgaatggattcaaatgaccaacttcaatccaatttaggaacatactattgtaatctgttgtttttatctcacctggaactctgcacctttgaaatgttgtcttattatccaactctatgacccaaaactcctgtccttccaatgctctcacacttacgagtaaaagaaagttgtctcacttcttttcttctgcatttagcctagacatagcaacttattctgaaacagttaagagggaaaatgttctttgtactgaactcgaaattttttagaaaaaatctatattgcttgttgattcttttgcaaaaactgctttacttactattaatgtgacgggttgctaagtatggctttcaggttgtcacagctggatcagatcaatggctgagccaatcagttctgaaccacattactagaaacccccagttggatctcatgagaatcatgatcttgacatgtccaaaacaactcactattttcctactaagacttcatgggcaaaaggcactgctaactgcctagtctctggattagaaacttgtagtcattgctgggcgcagtggctcacgcctgtaatcccaccactttgggaggctgaggcaggcagatcacctgaggctgagaattcgagaccagcatgaccaacatggagaaactagtctctactaaaaatacaaaaattagccaggcatggtggcgcatgcctgtaatcccagctacttgagaggctgaggcaggacaatcgcttgaactcaggaggcggaggttgcagtgagccgagatcgtgccattatactccagcctgggcaacaagaacgaaactctatctcaaaaaaaacaaacaaacaaaaaaaaaaaacttgtagtcatcctagaatcctccctctaccctacactccatatccaaccactgatcaagtcatcttgagtacatttacttaactcacatgcacggattcttcttgcattccccaccaccactgccttatttcaagcttgctttatcctgtactgggcctattcc

SEQ ID NO: 130854 - DNA, 2680 bp, Homo sapiens
gccttctactgaaagaaaaatttgctagtgactcaatcttagaaaaaagaaaatctccttctataaagacctcaaaatttcctgtcaacagctttagtttgtgaaccttaaactcttattgaaaatctatgtttagggtgtaagcagtttatcatggtatcttcctcccccttacccttctcctctttttgggaagtcatccttcacatattgtttggtttcatcctgatgcatctagaggacataagaatggggtttctgaaacagttctcccatgaattaattagtcctgcaacttatagggtttccagagttattgggtaaactacagtttatttccctcttggagtgttataattcactagtaaaagtatttctcttccaacttcttagagatccagcagtgaggtcatctaccctggttaaccacattcatccttggagaaacactttatattaagcttgtttcttatctatgaaatgagtggtttagatcaacttcatctctagagtacctgttttctatttcttttcagattttatagatcctgatacttaactttttttttttttttctgtccctttatatagaattctagatgagctttcccatacaactgtgcttcaggaaatcttaagtttgtttaggtttcctagtcattctaggaaattggatatacttcattgttgtgcattataaaatgattagattaaaaaaaaagcttttccttaagagagacagacactgaagaatgatgcgtatgtatgaagggatggattgatgaggaatgttacatgttcagcaaactatttcagggaggcatatccttggttaagttaaaaagtgtaagttcacatttactgagcatcatttacactgtgttgcacaaagttttattacagaggtatgataaaacttagtgttaatatggcttattgcatgaattttgatgcatagatagatgttccccaataattactattataaaatgattctgtatcacaatgtagcagtaaatactttttttgctttattattttattatttgcattattttgctccttaatgcaaaataactttttaagataacctgtgtgagttttgaacctaagaccgtatcttttgtttggcagccttttttccactaatagacactttatggaattagctgcaagaaaggctcttagaaaccatttagtccaacagcctcatgttacagatgaaaatactgaggctctgtgacagaaagtcacctttttttcctctactaactctagacttactcctttggggaaaaaaaacaaaaacaaaaacctgtcttgaggtatgaatgatccctttcctttttagtacaagaaaatatatttaaaatccagttcaaaataatatctccttttaggttattaacataacaatagggctttgtgtatatactgccagagttaagagttaaatattaacctgttaaattcctgttcaggtttacttttggacatcaagcccatcactgccagccagtgaagaaggattccagcctatgccctcaatcacaataagaccaccagatgaccaacatcttcctactgcaaatacttgcatttctcgactttacgtcccactctattcctctaaacagattctcaaacagaaattgttactcgccattaagaccaagaattttggttttgtgtagagtataaaaagtgtgtattgctgtgtaatattactagcaaattttgtagatttttttccatttgtctataaaagtttatggaagttaatgctgtcatacccccctggtggtaccttaaagagataaaatgcagacattccttgctgagtttatagcttaaaggcctaaggagcactagcaacatttggctatattggtttgctagtcaccaacttctgggtctaaccccagccaaagatgacagcagaacaacataatttacactgtgatttatctttttgctgagggggaaaaaatgtaaatgttctgaaaattcactgctgcctttgtggaaactgtttcagcaaaggttcttgtatagagggaatagggaatttcaaaataaaaaattaagtatgttctgtgttttcattttaactttttttatggtgtttaatttgtggttggctgcaactgtgtatcatgtatatggaacttgtaaaaaagttctcgacattcagatcttaagagatgaaatcacttttacctataaaaaccacttttattgcggtttgactgcattgagctctaggatattaaatgatatcactaatattttgcatgtaatttgctcatttgagtgagggcactttttttgtacatatgatggggccaatgcacaatacttttatcacaatcaactttttctttgtatccctatttcaatgagcagtcagtctcaagaggttactgcacttcagttctaactagacatttgtactaaggtatttcagttatgtaaactcagcctgggcactttctgataactgtaaaatgttttataagatcatgattattgaagatacattttggaaaattttaaatgttcgtgagcagcttaactacttttgtatctagccttttttaagtatcttgttacatttacttttttaaataaagaaattacagaagaaatgtcaagtaatattgaagaaacaatagttttt

SEQ ID NO: 130855 - DNA, 1057 bp, Homo sapiens
ataagaatttgtctcatttacaaaccaaaaatttaggaaggaaaacagtatccaaataaactgcctaagatcttgccactccaagtatgatcctcagatcagtagcattggcatcatctgaaagcgttttagacaggcagaatctctggtctcccctctctgcattccccacccagtgaatgaatgagaatctgcatttcttgagatcataagaatactgacatacagatgagataaaactcatgtgaatatcagttttaaggctggtggttcatttgttttggtcatattgagtcaggattgactaatgaactgtagaggttttgcattatgcaaatgctcttaatttcttgtattaggaattagacgctcccccccaagtcttaaataatgttttaatctgtatccttttattataagaagattagtaatattctacagataataacaacaactggtatagtatattttatttacattcttcattcttaggagaaaatgctgagaagcttctgcagttcaagcgttggttctggtcaatagtagagaagatgagcatgacagaacgacaagatcttgtaagttaaaaatttcacaagatttgtagaaggaaatacagaagttaaaaataccatgtatgatggccttttaagtttgtaatggttggtcattttaattttgggtagggcaattatagaaggtcacaaataaggcagtttttgtttttctgctctataacaatatctgaagtattactaaagctctaagcagagtgaagtacatttagctgttaatatgctgtccttagtcccagaagataccagtttactgttgcaacatggctttttatctttatcgcactgcctacatatgcttctccctgtatacatccttaatccttttgactagtgccaagccttgacagaatttctgagtattatcttgattgttatctgcatactaggaagagagtagcttaattgtgatatgtgggtactaagtctttcaaaatcttattagtacagagccccagctaacttagaattataaattagat

SEQ ID NO: 130856 - DNA, 1653 bp, Homo sapiens
ccaggcagtctgatacagcatggttcattgctccagacattcaaaacagccttaccagttagtaatgttggaatattgcaaaaaccaagttctcagacaccagccaatgccagccctactagtcaggcccttgtaaagagtaacatcaatcctactatgttaatgtcttccccatccagggtaaaaaaaaatatttttttttttaagacagtgtcttgctctgtcaccaggctggagtgcagtggcacaaccttggctcagtgcaacctccgcctcctgggttcaagtgattctcctgtctcagcctcctgagtagctgggactataggcgcgcgccagcatgcccagctaatttttgtatttttggtagagacggggtcttgatctcatgatctgcccaccttggcctcccaaagtgctgggattacaggcatgagccaccacacccagcctgtaaaatgtttatatagctttatgactgatggtgttgagtgtttctgatccctgtgctacaataattgtgcaggctttggagtcatactgttagagttgaaatcatggctctaccaccctctagctgtatgatgttaccaagttaagttttttgtgccttggttccctcctctgcaaaatgaggataagattaaattgaattaggtaaggtactaagacaattcctggcacatcataatttctcagtaagcatctagcttttgagtttgtgtctgggaggtttgttgttgtcaatttatctttcctgagatactgacagggtagcactttttaaagattgaagctattcttaatgactagcctgtttgttattaacaaaacttttaaaattgttaaatcactgggatataatactacttcactattgaacccatagcttattcactatgccttccctccccacttcctgcctttctctcttttgaatcctaagaaataaaaaatacaggactgaattttttttgctatctggcataaaatgggaactagcattgttagagaaggctgctaaaattatgtcttgtgctttaataatataaataaatgttacatggaaaatgaagtattattgtttctgaaattctctaggcaatgaggaaaggtctactagatgtgcttccaaaaaattcattagaagatttaacggcagaagattttaggcttttggtaaatggctgcggtgaagtcaatgtgcaaatgctgatcagttttacctctttcaatgatgaatcaggtaggacatttaaaaaaaatgtttaaagaatgaactatatagataggtcagtcagcattttctgagtttctagttcttaaggcctgtttatagggtttgggaaattgctgtattactcaagcattaaaacaattttttacattgtttttaaaggtatgtttgaagtaaatagtattttgatggcttagcattaggctattcttaactcttttactgcttaatttttctaggtttcaaaaaatatgaatacaaacaaaaatttttcatggtgagcaactgtgtaaaaaaggatttgtatatagtggttaagaaaaagtaatccatgtgacaactctctgggcttttctgattcatgttgcttaaactccctaatgaaagaatttgtatgatgattgctctatagagct

SEQ ID NO: 130857 - DNA, 1754 bp, Homo sapiens
gagtcccgctccattgcccgtgctggaatgcagtggtgtgatcttggctcactgtaaacctccatctcccaggttcaagtgattctcctgtgtcagcctcccaagtagctgggactgcaggcgcatacaaccatgcccggctaatttttgtatttttagtagagatggagtttcaccatattggccaggcttttctcaaactcctgacctcaagtgattcccccagctcggcctctgtgtgagtcaccacatccagccaatggctttgaggatttatgttatagttttttccggaggtacatgtcacacatctgataaataagcatgttaaagctgtagcctcctaataattctctttaatcagacctactgatgaataattttctattagtacaagaatatcatattatgattttttctttttaactctgaccctattaaattcttaaagtgttccagctaaaatgttcttatttaaagaactagactcaaagcttggcaacataaaattgttgatatattgagtcttcagcagggtttaggaaacagctaattaaatagacccaagtttaacccaataaagtgaccttggggcaagttactaaatttccttgagtgtcagatttatcatctggatttaataatctatattttatgttactatcaagaattaataagatgtatattaagttcagagccggctgctccccataattggtgtttaataagtagtgcaaagttttgcagttttggaactttaaaactattatgcttttggctttatattttttcaaaatataacccttcttatactttgaaaagcaaatattgtcagagccaaagatttattaaacttatctctttaaatagttatatacccagtgggaaattattctatatcaatgtatcttcaaattagataaaattctttatcagattttaatttactaattaattgaatgaagatgctgtttctttcataactgagtttcatatgattacttttttaggtcaattggcatgattttgctttttttgatcctgtaatgtatgagagtttgcggcaactaatcctcgcgtctcagagttcagatgctgatgctgttttctcagcaatggatttggcatttgcaattgacctgtgtaaagaagaaggtggaggacaggtaaagcaaatatacacttttctgattctggcaagagaatttggttaaactgctgtgcttgtcttatgtatagacagtttagttagggaatgaaagagatgaacgtgtgtgtacacataggagagatggatactgtcggtgttaaagatggatcaagagttagtgagacagactgaggtagaagggcttgtactttttgtgtgtgtgtgtgtgtgagatggagtcttgctctgtcgccaggctggagtgtagtggcacaatctcagctcactgcaacctcttgactccctggttcaagcgattctcctgcctcagcctccccagtagctgggattacaggtacgcgccaccacgcccacctaatttttgtatttttagtagagatggggtttcaccatgttggccaggatggtctcgatctcctgacctcatgatccacccaccttggcctcccaaagtgttgggattacaggcgtgagccactgcgcctggcggcttgtcctttttttggcctaaaatgtttccatctcttagattctggtcaaataaataattgtgtttatatttaaaaattttaggaactagttt

SEQ ID NO: 130858 - DNA, 1738 bp, Homo sapiens
ccagatacattataatcaaacttctgtaaaataaagaaatgttattgaaagcagccaaagaatggttctttacctatagggaaacagtgatttgaaagagtggatttctcactataaagtatgaaagccaaaagtcaacaaactcatcaaagtgatgacagaattctgtatccagtgaaaagaattttcaggcaataaagtgaaagaagcttatccgagtttcattaaatgactttattttaacaacagagacgttaaagacctaataatacacaagctttgtgtgtcacattctgaaagggcaaattaaaagttcatttacctttaatattgttatacacatatatttaaatatttatgttgctcttcctacctgacttcatttgaatgatttgagagaaccatttcatatgttttgttttttcagtgaatcttggggcttactctctgatattctctgttagcaggaaaaccgaaagcgccatggctctagtcgaagtgtagtagatatggatttagatgatacagatgatggtgatgacaatgcccctttgttttaccaacctgggaaaagaggattttatactccaaggcctggcaagaacacagaagcaaggttgaattgtttcagaaacattggcaggtaaaagaactttaatcttgggtttgaattttttaaaacatttcaatttatgagattttctaaaatatatttgttttaaaatgtatgtacgctgggtgcggtggctcacacctgtaatctcagcactttgggagactgaactgggaggatcacttgagcccaggagttggagacctgcctgggcaacatggcgaaaccctgtctttactaaaaataaaaaaatactagcgggcattgtgctgcaatgcctgtagtcccagctacttgggaggctggcgtaggaggatgacctgactgtggcactgcacttcagcctgggttgacagagtgagaccctgtctcaaaaacaaaacattctcaggctggtgttcctgtttttttttgttttgttttgttttttgaaaaagtgtatgtgctgtactttatgctgaatagaaaggaggctgtagagaatttctcaaaatattaatacgtattatgtgtggggggatatatgtattctagaattatttaaatcttatttctctgtgtttgtttttaggattcttggactatgtctgttacagaatgaactatgtcctatcacattgaatagacatgtaattaaagtattgcttggtagaaaagtaagtgattttgatgaacctaattgtattcacaattgcaaaaattttcttttataaaataatcaaacgctagcatactgtttataacattcatttactattaaatcttaaagcattacagccattataaataactttaaaacatttaattatacaattatggtcaacaaaaataaaattaataaattaatgacagaaaaagactatggggagatggcatagcagagtagataacacaagtggggctggggggtctgacagacctacgtcctgttgcaaacaaatatgctgacatttctgccatgtttccccatttataaattggtaagaaacacaacatcgtaagtacctggcaaatagtaagtgattggtaaattgtatccactattattagttgtacctggtgttagagaaggtagtggtattgaaaagagccttccaggccaggcacggtggcttatgcctgaca

SEQ ID NO: 130859 - DNA, 1390 bp, Homo sapiens
gaacaatgtacatttttggtgaaaagatttttgtgagtatatgttaagagttgcgtatttagtcatgttttctgttgaatgcaaccaatgtacaatattgacagctttcacctggctttctggagtaaacagtgaatttattggtgttctagaatcattaaattcgctagagaatttgctagtgaatttggattgctttctgaacatttttctgttcttctgtagtgctccctctgagcattgtagaagtgttccagcacccctatgaagaccacattcattttgtcagggagcctttagtccactatcttgaatcatacatgaaggatctagtgatacacttttttaaagatttgtattaccaacttctctgctcatactgcattagtactagcaggtgcattggatatttattgactccaaaacttgaatgtattttgtaagtaagtccttttaaatttaaattatacgctaaattctagaagtctccgttatctggaatgtgaaaggctttttgtttttagggaaaatggagctgatagtatcctggatcttggattagtagactcctcagaaaaggtacaggtaaggaacattttattcatgtgctgataatcacagaatttaaattacaaggaaatttcaataaaggggatgaaagcaggatttctgaagaaactgtctttataaataaaatgaatgtttacagtagagagacagaagcaaagataaatatatcggtattatgcatagaatcaaataataagcttggcttaattagggctcagtataatcccacccattggttggcatccatttgagcacagcttgaattaagctttactttgaataagtaacaaattgaagaacagagagggaaagatgtatagaatcctaggactaattcaccaggtgtggtggctcacgcctgtaatcccagccctttgggagaccgaggtgggcagatcacgagatcaggagttctaggactcctgggactcattcttcaaagaagtagctggtgccaacattgcaaaaacaagtgacatatcatgctatagcataaggaagcctttttagttggcattgaaacaattgcacatagaaggtgagacttccaatttgaacctaagtaggttgattgcctactaaattcatattaatttactaagactcagagttttcacaactaattcacaatgcccaggatacactctaaaattactcagcctacaaagaaccaggaaaaactggatccacctctctcaggaaaagaaccaatagatggcaaccacgagatgacccacttgttggaattatcaaagactatcccatgttctgcaagataatggtgaacactggtgaatggaaagacagaggttctcagcag

SEQ ID NO: 130860 - DNA, 1003 bp, Homo sapiens
ttaaacataggtatatttttctctaccctacccccttctttttttctaccctaaataaaagatatttctggctctctgatgaagaaaaaaatatggaaattgagtatatgtatgtttaactcagagatataaaaaaacctaaaaagaaaacttgtcatacaaatattataagtagccttaacaagatgtggtactgcatggactgtttattccctgccaagtttctctataattgatcttccagtttcataaaagaccttactggttctgaaattttgtatttgttacccaagtttcttattttattttttttttaaataaaagattgtagatgtaattagacaagaggttttagagagtagtcaagtaacatttgttcatcatttacaggcatttgcaagtaaaatcactggcatgttgttggaattatccccagctcagctgcttctccttctagcaagtgaggattctctgagagcaagagtggatgaggccatggaactcattattgcacatggacggtaatgtgtacaattgggaaggcatttcagtttaaacatcagctacttactttcagtatgtgggtgccatcatatcttaaaatttatgtcataaagtataagactttaaatgcatttttatttattttttaaatgatagcttaaattccatgaatgagacagcttagtttcttctcatgtattagaaaggtagggttttaatagttaccaaggttatttggaaattacttgaaagaaagtacatctcaaattcacttatcagaataccctcctggcaaaggccatacatattatactgtgttcttgccataaccatgacatttcttttaggcttcctgatttgtcttaaaaattcatggaagtttttgctttctattctgtaaagtatgaatttaatataaaatctaaaaaatatctaacagattacatatccctttttccaaggtgacaagtaaaagtgacttaggaagataaggccgggt

SEQ ID NO: 130861 - DNA, 1329 bp, Homo sapiens
ggaaactgggaagtcttaacatttccaaactatctgttttgtacacttataggaaaccatactctggcttgggcttaggaatttaaaaataataataggtaatattctggtggcctttaatgctttcatgccaaaaactaagaacagaggatatttaaatgagtctagtcatgtaagaaatttcagcgttatttatagtgacactatcataaccttacttgctatatattatttcacagctttgacatgacaagggagaaaattgattaacaaatattgagtgaacatctatttcgtgccaggtatattctacacaatcacctccaaccctgaaaacccatagggagagaaaggcattaacaacacagatgctagggaaggataatctttagctgtcatgttttcttacatttgtctcatttctttgcattgactttgaaatttaaggtagttgaatttgcattcatctaaatacagtatatttctgattttcttctaggtttaatgcagagattaaggaaccgaggagagagagaccgggaaagggagagagaaagggaaatgaggaggagtagtggtttgcgagcaggttctcggagggaccgggataggtaaattttgtatctttgattcaataccacctttttggatgaattagagataggcctgtaaatgaaagaatcttaattatggattattttttagaaaagtaaagttttaattttgaacatatgtatagtaactaagaatagtctgttaataaaatacaataactaagaatagtctattaactaataaaaagttctgctttaaaaacccagaggcggttgaaattatattctttttatctgactcaagttcctatttgaatttttttacccatatcattctctcctaagtttatcttaaaaagtcttcatttttcaggccacatgcggtggctcacgcctgtaattccagcactttgggaggccgaggtgggtggatcatctgagttcaggagttcaagaccagcctgaccaacatggtgaaactctgtctttcctaaaaacaaaaaattagccaggtgtggtggcgcatgcctgtaatcccagctacttgggaggctgaggcaggagaatcctttgagcctgggagacagaggttgcagtgagccgagattatgccattgcattgcattccagcctgggaaacgagcaaaattctgtctggcaaaaaaaaatttaattttggcagattgtgctatttagaatctttgaagttttctcttgttaagatggattgcattttacttttgactaaaatttccagaattatgtgtggactctt

SEQ ID NO: 130862 - DNA, 1020 bp, Homo sapiens
ttggctttctctcagatttcagaggctttttatgtagctgtaggtgatagacacactcattaattaatatgtatctttgtgacaaaaggtgcaaacaatttttccagtttggttagtccccctccagcctcccgcccacttagcttgtcatcaaggaatctgttttttttctagtattttttttttaacatctctgatcatttggtattttggtgtatcccaaaattgaacaagattattgttttccaatagacctttgaaagaaagtgttagaattgaattaaattctgttgtcctgatttaatttgcaagacattcttgtatgctttaaagtattgtattttgtaatggataagcttctgagaactccaattactttgttgttttttaaactctcaaggaaaggctaaaactagattttcagattgtacatagaaaaattcaagctactttccaacattgaatttactactttttgacttcttgatgtgttttaataggttgatcgggatcgagatcttctcattcagcagactatgaggcagcttaacaatcactttggtcgaagatgtgctactacaccaatggctgtacacagagtaaaagtcacatttaaggatgagccaggagagggcagtggtgtagcacgaagtttttatacagccattgcacaagcatttttatcaaatgaaaaattgccaaatctagagtgtatccaaaatgccaacaaaggcacccacacaagtaagtactctacaaataacaagcagcttaaaattctttccttgttcctcaaaccaacagtggtaatcatggtttctatatgtgtgagtgcataaatttgcatttttacatacttttattctagattgatttaatcttgtttaaactattctaatggacaacaatttgctattctacggacacatttattttgataaatgtttgtgattgtactagtttttcatctcaattgttacatgttgtgggtgggtaagaggttgtaaaatacatagtgat

SEQ ID NO: 130863 - DNA, 1069 bp, Homo sapiens
taaaatgaaagacgaagataagacatagcccagggatttatccgtatgtagaatacagaaggaataagggaggaaaaataataagttgtcgggaacaagtagctatggaaaagttctctgttaggacacagtttgaagaagttaagacctcagaatattttttaaaaaaagtaagttactaccattgaacaaaaaccaatcagtctttgaaattggctaaattatttctcccccccaccccttcccttaaacttcttacaggccacagtgtagctttatgggaatggttatttcccatgatatgctgctaggacgttggcgcctttctttagaactgttcggcagggtattcatggaagatgttggagcagaacctggatcagtatgtattttgtgcaccttaaattccattctgcctgataagcatgtatttcagggaataatctgtcatgcatttttttttttttaagatcctaactgaattgggtggttttgaggtaaaagaatcaaaattccgcagagaaatggaaaaactgagaaaccagcagtcaagagatttgtcactagaggtaaaggtatttagattttcttatactatacctgtagtatgctatttatataaattttaaaacatgcaaaataacaatagctttgcttagggatatgtacttataattaaaaatttaaagaaaataaaaagaaatgttaactaccaaatttattttttcgtgtgtgtgtgtgtgtgtgtgtgtggtttctttttatttttttcttattgtaaccaccaaatttagaatagtagttttctctggcagtttggttccctagcatcctctatgaatttttttgttttagtttttaagtatcattatgcatgcattgatttaaactttttttgatgtatttaattccattgagattattattcatattgatgctcagattgtgtcttctttggctaatgggagtcttgagtcagttttgattcctgagttcttttgacatggccccaataatttttgataaactttcttactttctggtatgtttcatcttgggtatttcctgt

SEQ ID NO: 130864 - DNA, 1080 bp, Homo sapiens
gtgggtaaggctggttgtgctggcttatgcctgtaatcccagcgctttgggaggctgaggtgggtggatcacttgaggtcaggagttcaagaccatactggccaacatagccaaaccccatctctactaaaattacaaaaaattagctggacgtggtggcgggcgcctgtaatcccagccactcgggaggctgaggcaggagaatcacttgaacccaggagatggaggttgcagtgagccaagaccacgccactacactccagcctgggcaacagagcaagactccgtctaaaaaaaaaaaaaaagtagttatctgaggttggtttggtaatgcgttggaattggtggtcagccagggccatcagacaaaaggaccattgaagctccagaaagggaaaaaaaacttgcgtatgattcctgtattactaagttgaggacaaaatctaattagtttttttcccttcatttgtaacttttaaatgtaaatattcataggttcttccaacaaaaatgtcttatgctgccaatctgaaaaatgtaatgaacatgcaaaaccggcaaaaaaaagaaggggaagaacagcccgtgctgccagaagaaactgagagttcaaaaccagggccatctgctcatgatcttgctgcacaattaaaaagtagcttactagcagaaataggacttactgaaagtgaagggccacctctcacatctttcaggtatttgctaagaccctttgtttttattgttcagtacagcgttaaaaatatatatccatgtctagttaccatttatagacttgctattagcagctcagctaaggggaaactgaataactagaaagagtagaactttctagatttgtgattcacacttatctgtgctccttttccaagtttgtaattctcttacaagaggtaggttctttgtttatctaacaaatatttgttagtatatactgtggctcagtatgatttgttgactctgttttttggttacatggcataataatttttttgcttagatgggagttaaaaagctagtttgaaaataagatacactgtatatacgttgtctaataac

SEQ ID NO: 130865 - DNA, 3461 bp, Homo sapiens
gacagggtttcaccatgttgcccaggatatctgtgttttctttagttgcttgtgcttttggtgtcattttaatgaagtgattctcaaagtatggtccctagaacaacaccatcaacctcacctaagagctatttagaaatgcaaatcctggggctttaccccagacctactaaaactctggggattagaccagaggtctgttttaataagccctccaggtgactttgatggaccctgaagtttgagaatcactgtcttcagggaaagaattcattttgccattccaaaggatactggaattccttttctatacaaagtataaggctgtaaatcatgcacagtggttatatttctaaagctgagcagcaggcttaactactttgtatttatgaatattctcagctcctaattttgcatatttatgatagtgaatttcacatttgtattcttctaataaacattttcctttctgttcttatagacgtgccaccttgcttagcgcccgtcaaggaatgatgtctgcacgaggagacttcctaaattatgctctgtctctaatgcggtctcataatgatgagcattctgatgttcttccagttttggatgtttgctcattgaagcatgtggcatatgtttttcaagcacttatatactggattaaggcaatgaatcagcagacaacattggatacacctcaactagaacgcaaaaggtatccattcttgccatgaggttgatttaagaaatacttgcttggtatggtcttctttagtacattgtcaacatttggagtaaggagaatagcattgcaaaagagaactagcacaggaccatttcatataggaaagtgggcttgaatttatccaacctttccccattgccactcttcacttaaaataggaaacctaagaatctggttaaacttcatgcttgagatagtttggcctggcctgattatcatctttattttttccttttttttttttttttttaaagagacagagtctgactctgtcacccaggctggaatgtgatggtgcgatcaaagctcactgcaaccttgaattcacgggctcaagtaatcttcctgccttagccttctaagtatataggacttacaggcgtgtgctaccatgcctggctaatttcttaatgttttggagagacagtgtctcatgatgttccccaggctggccttcaactcctggcctaagtgatccccctgccttagtctcccaaagtgttgggattacaggcatgagttaccatgctcagcccatgttttctgttagagtttgtgtaggtgctcgttatttcttaggtgatttgctttttcttctgttgagtccattttgtaataatagtacctaaacctgttcactctaccatttcccagattctgaaaatgtttgaaattggttagatacattagcgacctttttagtgtgtttttgcttgtatttcctctgacttttgctcctgttcatattatacaaatacttcaagtaaaatgactcacttgtctttttaaaggacgcgagaactcttggaactgggtattgataatgaagattcagaacatgaaaatgatgatgacaccaatcaaagttagtgcacagaaaatctgctaatctacttcaagaaatggctgcctcagtagttccccttcaagctttttaacttcattattttctgtctgggtgggaatttctcttttcttctctatgtctcatttcttacattttctgtccatttttgcttacacattcttgcgttatacatttcacaactaaggatgtattaaagaaatgttataaactttccaacaatattttttcttctatcttttcttgtatttgtcttagtattatgtttacctttactcttaatatactcttattacatttaataaaatcttagcaaaaccgttgttaatattgatgcaaaatagatttaatcaagaaaatgagaattaccagttacagctcccaaatatcagaacgctagcaattaatacaatgaaaagagaaaatatcccaactccagacttttctccaaaagttttaatatcacactttggggtctagtggagtttatttgtgggttgcagttatttcaaatgggactaaataatgcattctccagtttcttattatcaactagtacttttattcagcctatggaaagacagttggcctaattgctgttttttgagaacccagccatagctcactgccgtttatacgcaaacaaggtactgccaaagttttattccattaaggagatttggtgctagtgtgctgacttactattgagatatgtaaattgctcagacattactctgcttagcaaatgctcaggtttcagttcctgatcatctcctctgtttggatttgtcagtgagttgggtcctgagtatactcatgaatctaactgtatttgggtggtgggtatctcaaaagataaagaggaggatatgggaaacctttgtccaatacaaaatggcacaatattattaaatgctgatttttattttgcattttttattgtaacatacacataacgtaaaatttgcacataacataaaacttacattgtaaccatattaaactgttacatttactttaaaaaataccagaattttggactatgaacttgtttttgtgtggcattaaaattttataaaagaggtagtaggaattttggattgagcaggttaaaggtctgttaccctaatccagtaattaaataattttcctaaaaaacaaaacattttatctttttatgtttaggtgctactttgaatgataaggatgatgactctcttcctgcagaaactggccaaaaccatccatttttccgacgttcagactccatgacattccttgggtgtatacccccaaatccatttgaagtgcctctggctgaagccatccccttggctgatcagccacatctgttgcaggtgaattaaacaagttagtcttaaggtttctttctaattgggtttattttctttaaagtattcaatgtaactagaatatttctgttaaaattccagccaaatgctagaaaggaggatctttttggccgtccaagtcagggtctttattcttcatctgccagtagtgggaaatgtttaatggaggttacagtggatagaaactgcctagaggtaagacagtaaaagtttttttgcaatataacatttattaaggacaacttgtcccagcatatagatttttagaaatgcgttaattcagaatattatattttctgaaatgaagtgtcagaaattcctgccttgtggtataatgtaggaagaattccaacactgtcattaacttgctgtcagatcacttcatccataaaataccagcctccatatgtgctttgtctgtttcacagagctgactgctgtatgtggctgaaaatttgaatttttcatgtataataaaaat

SEQ ID NO: 130866 - DNA, 6327 bp, Homo sapiens
taatgaactttgggatctgtgggtataatttttttatttttttgagatggagtcttgctctgttgccaggctggaatgcagtggtgcaatcttgcctcactacaacccccacctcccgggttcaagcaattctcctgcctccgcctcctgagtagctgagactacaggcacgcaccatgcccagctaatttttgtatttttagtagagtcggggtctcaccatgttggccaggatggtcttgatctcttgaccttgtgatccgcccatctccgtctcggcctcccagagtgttggaattacaggtgtgagccaccgtgcccggccaggatataatttttgatagcaaattgtcactaacaaatgaagattttcaaaactgcttgatatatgatttcaaattctctatagttagtggtcttcgcattttagttaactagctttgattgtctacaaataagattctggatttaggttgaggtggtggagggtgtggctggagaagaggatcatcatgatgaacaggaagaacacggggaagaaaatgctgaggcagagggacaacatgatgagcatgatgaagacggtatgcaggttatttgagaaattactcagtatgagtaaatcaggtacttttaaagggagatattaaatacagagagaaacctcatttgaatgtatagtgaaatggtcaaacttattttttgccaagggtttctgtagcatctatttagaaaatttaggcgctatatataatacatatataaaatagtttcccttttttctttttaagtcagtttcttaaaagacttttaaaaactaaaataatcatagtcgcattatgaaacatttggaaattagagaaaaggaaaataaatcacccataattacacccagatgctaatagcttgtatatttactttcagtcctcccctgcactgccctgatgtactagtctgttgactaccataatttccctagccattcttctaaggttgagtagttacttagtcttattttagtagttatcccttctctttcacaccattccccttctccccaactcctaccccctatgccttcttagttcccacccttacgatattctggcttatcagaccctgttttaaaccatagtgagtttgtgcttttttcttatttaaatgtattttttagggagtgatatggagctggacttgttagcagcagctgaaacagaaagtgatagtgaaagtaaccacagcaaccaagataatgctagtgggcgcagaagcgttgtcactgcagcaactgctggttcagaagcaggtatgttgccttatcccaactactttcttgcttatgctaaggctgtgtgtgtgtattcagcgtggattgggtcatactttgtgtgatatacgcaagggtagctaagcatttttataacttcatccttgttctctgggtattagaaaagaaagtattattttaataactctttctccagcttttctggtcattaaataatgaatgaattttaaagtttctttaaaagatttttattttcttgccttttttttttttttttttttttttaaattgggtctcattctgtcaccaggctggatattccagtggtgcagtcagagctctttgcagccttgacctcctgagctcctacctcagccccctgagtagctgggtctactaggtgcaagccaccacatcgggctaatttttttttttaaagagttgggatcttactgtgttgcccaggctggtcttgagctcctgagctcaagcagtcctcccacctcagcctcctcagttgttgggattataggcatgtgccaccacacccagctaaaagttacttattcaggaggctgaggcatacaaatagcttgaacccaggaggcagaggctgcagtgagccgacatggtgccactgcagtcctgcctgagccacagagctgggcttgaaagttattttctaataaaaactattttatggtaggttttgtggattattgaatacaatctggcattctgtttaatatgtatgttttcctgaatgagggggtacattgtaattttaattattaaactcacaatgtttttggttttaaaaataaaaattttaggagcaagcagtgttcctgccttcttttctgaagatgattctcaatcgaatgactcaagtgattctgatagcagtagtagtcagagtgacgacatagaacaggagacctttatgcttgatgagccattagaaagaaccacaaatagctcccatgccaatggtgctgcccaagctccccgttcaatgcagtgggctgtccgcaacacccagcatcagcgagcagccagtacagccccttccagtacatctacaccagcaggcaagtctgaaaacttagtattgctaagaatacttagatagattttttaaattatgcatgttcatctggggataaaattagttttatgatagttcctcattgttttgttgagtttcaaatataaaaaatatgtacatatgattatagcagggtttcccagtctttgcattattgcatctttggactgggtaattgtgggaggctgtcttgtgcattgtgggatgttaggcagcatccctagcctacacccactagatgccagtgaaacccctctcacccttcttcccctccccttggctcccacagttgtgataaccaagaatgtctgtagatactgccaaatgtgtagcccctttggcggggggaggtggcgtgggggtcagatttcccctggttgagaactttatattaattcttgtcccctccatactcctctccccaaaatagtgtggtttaggcaaagttttttgcttgggtaccacaattgaccatttagatttacgtaagtatatataatcccagagaaacacaattagcaactgacattagctcattgtggttgtcctttttccttatagcaagttcagcgggtttgatttatattgatccttcaaacttacgccggagtggtaccatcagtacaagtgctgcagctgcagcagctgctttggaagctagcaacgccagcagttacctaacatctgcaagcagtttagccagggcttacagcattgtcattagacaaatctcggacttgatgggccttattcctaagtataatcacctagtatactctcagattccagcagctgtgaaattgacttaccaagatgcagtaaacttacaggtatgaaaccactgaaaagtttcccattccactatttttttttggctgtcaattatgagaattccagtattaggggaattaaatgttagaaacgtttacatattgacatactgctgctgtatcgaatttagctctatttggatagttttaactattttagtttggtcttcatagaactatgtagaagaaaagcttattcccacttggaactggatggtcagtattatggattctactgaagctcaattacgttatggttctgcattagcatctgctggtgatcctggacatccaaatcatcctcttcacgcttctcagaattcagcgagaagagagaggatgactgcgcgagaagaagctagcttacgaacacttgaaggcagacggtatgaaattcttcatatatacagaacgtccccaacttaaaatggatcctcaacttacaattttttgtttgtttgtttgtttgtttttttgagacggagtctcacactcttacccaggctggagtgcagtggtgccgtctcggctcactgcaagctccgcctcctgggttcatgccattctcctgccccagcctcccgagtagctgggactacaggcacttgccacccacgcccggctaattttttgttttcttagtagagacggggtttcactgtgttagccatggtggtcttgatctcctgaccttgtgatctgcccaccctggcctcccaaagtgctgggattacaggcgtgagccacagcgcccgacccccaacttacattttttttttgactttgtgatgggtttattgggggtattaaatgcgtttagactttatgcgtttatgatgagtttatcaggacataaccacatcttcagtcaaggagtatctatacttgcatgtttagatagaatctttgtatcctagaaggttaaagctttttagttgctattatgtaagacctcatcttactgtgaagggagaaagaaatgacttgcttgcattacttaaattgttgaggcagaataggctagttatcatccaagctgtttttaaaaatccattcatatcgtaggaatctgatactaaagcctttttatttttgaagttattggtctatatctttgtctcattatccccaagacctccccctctcctcttaggaagttattttgactataattggttatgaatgtactttgtactcaggagggggaaagtatgtgtgattaccagtgctgctctttttttctcaaatcacatttctttttttctgcctcccctagtctgttgaattaaaataaaatatatatctatgtatttgttatgttctttctattcagttataaagtgacctttttcaggagtaggtatcagctcaaatattgaacatcagagcaatagcagtaatatagtaaaagtgcctcatacctgaagtcaaaatccaaggatttggttctgtctctacctcaggataaacaactttgttactctgggcagatcataaagtgaggaaagacaaaggtctaagagattacttagaaagacagtgataggcatctacagtagaggtaatagttactaaagtagggcagtgaagaccaaaaggaggggagagaagcattgaaataaaaaacagaatttagggccttgttgagggattaagtagcaggggcatcatttatatttaaaccttgatcctgagtaactaataggaaaattaaagagaaaaacctaagagtagtataatggacaaacttgcttttgaacatgtgagaactgggggaaaaaaaatggtagaaatgtcaaatgtgcagaattgaatgcttggcaaagatagctgtactgaagatagtgatttgagaggtagcagctttcctgtcctaggaacgctgcttcacaaagacgaaagccttatctttgttaggctgtagttgttaccccagagaacacagaattctgatagcggatcttgattggtggcagtgttctctctcccttctctctgtcagctttaatataataattcacatatcacatataattcacccatttaaagtgtccaattccatagtttttcagcccttcatcataatgaattttggaatattttaatcctctctacagaaaacctattagcagtcattcttcattttcccctactcacccccccccccccccgccttccccttcctaagcaactgttaatctgttttccctctcaatagattctggatatttcctgtaaatggaatcatacagtatgtggtcttttgtgactgggttctttaatttagcataatgattttcaggttcatctatatttagcatacatcagtacttcattctttttcatttcctagtaacatttcattgtatgagcgtactatattttgtttatccattcatcagttggacatttgggttgttttcacctttccactattatgcataatgctcatatgaacttttgtgtatagatttttgtgtagatgtgtgttttcagttctcttgaatatatacctagttatggaattgctgggtcatatggtaactctatttgtaactctttgaagaactggcaatactgttttccaaaaaggaagacagtctcagtagcagtgtgtgtatgagagttttagtttttctacatcttcaccagcacttattatctgtcttttgttataaccatcccagtgggtgtgacctagtatctttgatttgcatttccctaatggtcagtgatgttgatcatcttttcatgggctaactggccactcgtatatcttcttaggagaaatgtcttatttggatcctcccgtcgccaccaccccctccatctttttttttttttttttaaatagagtttcactcttgttgtccaggatggagtgcagtggtgtgatcttgggtcactgcaacctctgcctcccgggctcaagtgattctcctgcctcagcctcctgagtagctgggattagaggcacccgccacaatgctaatttttttgtatttttagtagagacggggtttcgccatgttggccaggctggtcttgaaccctgacctcaggtgatccacccaccttggcctcccaaagtactgggatta

SEQ ID NO: 130867 - DNA, 1073 bp, Homo sapiens
tttaaaatcatgcttttgaactgatgttttccccacacacatcagcaagtcattagttaataagctcattcaaaatagaaatcatgtcagatctcttaaaagttagatcacttctattaaacacttgctgttaatggacagatggtgctaccagagtttttagaaatagaactgctggtggaggaggaaaaatcttcctgtagaatttttcgatgggatggactcatacaaataatgtgcatcaacacagatttgaaatgacttaaaaagaaaaaacatattctgagatttatattttctgatatatagattaagtattgttggtttctaagaattctcagctcagatttaaagtcacatcctagcaagtgtctcacatgtaataaatgagttaaataaaaatatgtgttgcatatctgagctgtggcaggagcccactcataagcttctgattctttacagctccagtcagtctcagtcatcctacatcatcaggaatccacagcagaggcgcatcagccagtcacagcccgttcggggcagagatgaagaacaggatgatattgtttcagcagatgtggaagaggtgattttaattgtggtagatttaaaaagcttttattttatgagaaaagaagagtagtcagtagaaattacattaatagtagcttgagactactatatgcgtttgcatccagtttgtagatgtttattatatattctcatttgtggttatacatagtaaaattattttaataatttgtgacttactggatattaggaaattggacacaaacttgtctttaaggattaagggtggagatattctcagtgttaacagcaaagatattctgggtttttttttttttttttggagacagagtctcgctctgtcacccaagctggagtgcagtggcgtgatctcggctcactgcaacctctgcctcccgggttcaagcgattctcctgccacagcctcctgagtagctgggattacaggcgcgcaccaccacacccatctaatttttgtattttttagtagagacggggtttcactatgttggtcaggctgg

SEQ ID NO: 130868 - DNA, 2659 bp, Homo sapiens
ctctatagactcaaacggacatcaccaacagcctactgtgattgttgggagaaatgtaaatgtaaaactcttattgctggacagaaatctgctcgtcttgatctactttatcgcctgctcactgctactaatctggttactctgccaaacagcaggcaagtgggatttttagaacatacagtaagttaaatcaaaagagcgcagcacagctgagtagcttttcagcctccctcctcacgacaacattctgttttgcaggggagagcacctcttactattcttagtacagacagtcgcaaggcagacggtggagcattgtcaatacaggccacctcgaatcagggaagatcgtaaccgaaaaacagccagtcctgaaggtgagttaattagacatttatgacacttgtgggaagcaatatgttttatttttgttttggtcactatttctttttcattttagattcagatatgccagatcatgatttagagcctccaagatttgcccagcttgcattggagcgtgttctacaggactggaatgccttgaaatctatgattatgtttgggtcgcaggagaataaagacccgtacgtattcattaaaacctttttagatttatgtatttcctacgttagtgtagaccttttacagttcattctgtctttcgtttctcctcaagtcttagtgccagcagtagaataggccatcttttgccagaagagcaagtatacctcaatcagcaaagtggcacaattcggctggactgtttcactcattgccttatagttaagtgtacagcagatattttggtaagttctttgaatgtgtattacaagtacatgaaaagtatgtttttcaagtactcttctttgctgtgaaactagaaaagaatttaaaccttaagatccagtgcgaatgaggttatggtaataacacactcagatagggatggggtggcattgcatcgttcctttctctggaaaacataaaactatcagtgccctcagaacctgtcataaataaataatttacgatgtgagaaaaataaaggcatgtcacagaataatgtaaaatttaaaaacagaaaaatatcagcctaatactagtgtaatcttgaatcaaattatagcctgaccacttactggaatatgatgcagcaatttaaaaataaatcgtattgtaaataacgtaaaaaaaaaaaccaaacaaccaaactgtgaaaattgggtgttctctgtagctaacatttatacaagaagctgcacacagaaaagagactagaaagtaataatggttccatgagggagatgggattatgaatttattcatataaatatttgagtctgctttgctgttttggaaagtgccccagactgagtttatgttttcttcttctgatttcatatatttggtattgttcttctaaatattagttgatataccaaggactgtgggacaaaaaataagaaatcgtacatttaggactcactgtatgtcaagcacattggcaggtatatttcataaactgaccttgtaaatgttttggttaaatttgttttgagattttattataaaatgttaatacttaaaaaatgttagaacttataactttatgaatgtctaaacatcttatgaagtatcttaacattaatagagtgaatataattttttaaagcttttagatactctactaggtacactagtgaaagaactccaaaacaaatatacacctggacgtagagaagaagctattgctgtgacaatgaggtttctacgttcagtggcaagagtttttgttattctgagtgtggaaatggcttcatccaaaaagaaaaagtaaggcatcctttttgattttggtttagataccattttcactctgtttttgtgatagtgatttatgtatatgaaaagatagattgctgatatttctctttttgttctagcaactttattccacagccaattggaaaatgcaagcgtgtattccaagcattgctaccttacgctgtggaagaattgtgcaacgtagcagagtcactgattgttcctgtcagaatggggattgctcgtccaactgcaccatttaccctggctagtactagcatagatgccatgcagggcagtgaagaattattttcagtggaaccactaccaccacgaccatcatctgatcagtctagcaggtaaattgctaccaggtaacagattctgattaatccttctctggaaatgtcgtgtttgacttcctaaaacctttgcataagcactcaggtggtgtacatgatcatttgtgtaacataaataacaaccagaaagccggaattttaaatatttttctacaacaactgtattatcaaggacagggctaaaataactccattataaatgtttctaattataagattatttgttcttaagtttcatttatcttttctatttgtttgatagtttccctaattacactgtaagcttgttgaatcaggatgttgagcaacttaaaactttccgatgtcctttagcacactgcttctcaaactttaatatgtatgaaaatgacttggggctcttattaaaatatagatgcccactctagaggtcttgaggtggggcctccaacttcgtatgcctttcaagttctcaggtgatgccaattctg

SEQ ID NO: 130869 - DNA, 1075 bp, Homo sapiens
ttacatggactggagcagagcacattaaccaggtaagttatttctacattttcctgtattaatcatatctttgtgtcttttttcgctatgactatcactagacttacagttttcagctttggaattaagtctgatatgaagaaagttgatttaattcctaagtaaatgaggcaaaagagctgattgctcagttaaatatggcataccatgaaaattggaaattttcactgggtagtataatctgatccacaaatcttgatacagattttataactacaatgcctttttggggatgatacaaattatttttttctactggtaatatttctatttgtatatcataaactgtatatttgctgtagccctttataagttctagttttccaaagcacattaattttgtttgttgagattgaattgttctagaaaataccagaaataattattatgatgagatatatgcatacttataattattcctttaaaagtacactcttaattttaggatatttttgagtgtcgaacttgtggcttgctggagtcactgtgttgttgtacggaatgtgcaagggtttgtcataaaggtcatgattgcaagtgagtacaattctagttttctttagtttaatattataagctgtttagatttatattgctgtatggaaataatctgtactaagtcatgttttacttcagaaagcatgaggttacttacgtttcccttgtttaagtcagtttatgtataatagtgtgattcttgatttaaagtatactgtgaaatgtttggtttctttgctagttcaaacattgccctccttaaataaaagtaggtgattatacattgtaactaggatcagattagtcttttgagaagtatatctacagaatgttcctgagtgtattatgcagcggaggtctcaggtcccctgtagtggggtatactaggagaaaattgccataggcctagagggaatcatggtgaatgtttagactgtgtcttaaactaaatgcaacagtctttcattcagcaacagttaccacagctagttctgttggttttcagagacctgagaag

SEQ ID NO: 130870 - DNA, 3104 bp, Homo sapiens
tactctttatccatttacaagctctaaaattgtggctgagtgaagggatttgccttttgtgctctcttaaatcattgttagttctaaatgtattaattttgtagccgttgtaaggttttattcaaaggtaaagtatagattttcatacagatagttcccatttcccctaacgagttctgtgtttgtgattatttctttttctttttagtgatgtgtacacctgtatagtattttttttttatagcaggaggaaaaaaaccatgcccatacattaacaacacattttataaactctagtttcattcattaatttctttgggatgcaagttgtactgttaaaaatttttttgtgtgtaaaaatctaaattggtctttgttttaaaactaatcattgtgtggatattagttcagatgcttttgagattataaaagggatttagtgttgaacaatactggttttgtgctaatcagtatgattgctgatgtctactattaaacttaattattaccgattataaacgggggatagaaactttttgttttaatgtttagctgttcttttatctgaactgtatgaaagattatttctaatcttacttcaccgcagctttcgttccctgtgcttaagtttgtgtgggagcttaatatagtgattttagtgctgaacggtgtactaggagcccccagttttatttctatccctcactgacttattctgtgattccagaattggcatttgtacttcacttcccttgcctggagtgcttgcttgtaggacatactttcatcttctcagatgagaagttctgtacaccgtttcattatgtgtagatatggtagtgagctctgattttgttcatgttcttttagtttgagattacgggaaatgatgagacgttcgttgagagcagctggtttgggtagacatgaagctggagcttcatccagtgaccaccaggatccagtttcaccccccatagctccccctagttgggttcctgaccctcctgcgatggatcctggtaagagctgttatttaatttcatttagtgtttaacaaaaagagcaggtcatgaaaggaaataattttaacattttaaagggatatttagaaatttgaaatatttgaaagtagtatgatgaatattataactagtttagctataaaaattagatttaagggatttatattttaaaaattaaaattccagaactcttgtcaggtattccacttttactgaaatatttatttctataccagtaagaataatccctttattagtaatatatcaagataagtcaatagatttgcctagtggattccttctcttgtagtttggaaaagaagtttcacttaaactctatccaatttgacctttggcttgcagagaaaagccttaaggccagttaagagaacatgttaggaatatgttgcctataatgatatacatcctactgttctgtttactgaaagatggtgacattgattttatcctggcccccgctgtgggatctcttaccacagcagcaaccggtactggtcaaggaccaagcacctccactattccaggtaagaatctgtactctttgtctgcctagtcatctggaagaaaaaaggacacactttggatatagggttctacagatctacactttatctcaaggagactgttctttgcttgaaaaacatctaattctctgaattacattccatctgtcagtgcaaatatgtggtgtctgtgtacatacatttagaaatcagatgagatttgtaaaatggtgttcataggtttaaattatttgtgatgaagttaatttattactgatactagaatattgttctggtagcttatgcctgatatattattccagaatattcttttaaaaaaaaattgtaactgctccttgcagagcagggctagataccccataggcagtgtaccctattgtctatgtgcttatgtgccccataggcagggtagcccagaatattcttttactgtgtcttcttcattgttgttttgtaccaaatgaatctgcttaattacaggtccttccacagagccatctgtagtagaatccaaggatcgaaaggcgaatgctcattttatattgaaattgttatgtgacagtgtggttctccagccctatctacgagaacttctttctgccaagtaagaggatttgatatatttttcatgtgaagatttagcttagcttagcttttactattaaagtttatcttcttacactatatggacaatagttatgtaaatttaaaacaatttatcagaatccagcatgatattccctctactgctaagctctgttgagtgaaagaggctgtctcaacatcatgtagtgtacactaaatgaatacaaactagcttttatgttagtttgattgaggtgtatatttatatgtgaaagactaaaacaaaatttagttttttgttttatcatgaacatttataatcaggaaggaaaataagtagtaattaatatttttacatataatttttcttattttagggatgcaagagggatgaccccatttatgtcagctgtaagtggccgagcttatcctgctgcaattaccatcttagaaactgctcagaaaattgcaaaaggtaatttatttcagatcctaaatgagttacattcagtttggatagattctcttctgtccatatattataattattcagactggatttctatatatgtaaatgatacaattggttggaaatgatcaagatttgtgtgtgtatgaaattcatgtgtttattattccttcaagtttactgtatcttccaactttccatcaaaaaacagctgatataaatttattgatttaagaataaacactccgtaatgaacagtgtaaaatctttggaaaataagatggattactgatagaacctcttggtagttaattggtgttaagtgatataactttacagaataatagacagatgtcttgttatttctgacagaattcctgctaaatagaaagcattaaggaatatcaattcttaccttccagcctttgaaagattaaagtagttatctttttaaaacactgataaatagtttatgagatg

SEQ ID NO: 130871 - DNA, 4294 bp, Homo sapiens
tattaaaagggttctaattagatagataacatgaagtaaaaaccaaggattggcagactatggcccaaaggccgaatccagccactcctattcatttatgcattgtatgtggctgctttcctgtttcagttgcagagctgagttagttgagaaagctaaaaatatttacttgtccttaacagaaagtttaccctcccttctctattcctgtcgattgtatgttctgcttaaagtgtacccttaagttctgtttcttttggtaggccacctgaaattgtctctactgatttgcaaatctgattatatattattgtgttggccatgagaaatttttaatatatgtaatgtgctactcaaattcattgaggtttttttcccctaatttgtctgagcacagaaacaaaccttaatgcaacacattctgcgctgtgactatgaggcctgtcgacaatatctaatgaatcttgagcaagcggttgttttagagcagaatctacagatgctgcagacattcatcagccacagatgtgatggaaatcgaaatattttgcatgcttgtgtatcagtttgctttccaaccagcaataaagaaactaaagaagaagagggtgagattaagaactatagcaaggtctttaaagggagttttaggcaattttgaaaatgtaacagttgttaaagaaaagcaaatcactataaagaatttgtgtgtccttttttttttttttttactttctcagaaggtaaagatgggtatgtaagaaaaaaaattttgcaccagtgtgtttttattgtgtttaatactatatgatatatacaaactggatatgtaatgctaaatgaactttactgattttataattgcagatgacttattacatgagaattatttagcaggttaagccaagttacattgaggcaacttttatctaaatttttagaatgtagaggagaaaaatcacttagtgaggtgttatatgtttttggaaggtaaataagctttttttgccataaagtttttaattggctaaatgaagggagaaattgaggacaaagtgttaatatgtaattcataatgtgtttttttttttgaatttgctgatgatactctggtagctacatttttgaatagtggtttgcaggtttctgacctttatgtcattatcattgaatcagtaaggattatacatagtacataaactgagactgaagtactggtaagtaggtctttttctattttaataagtgaaagctaaatttcagtcttcttattaatgaccttatttttgcccttcgtggattgagaaggaaggcggaataaggaaataaatcacatgtgaaagatcagatagttcagtctgtctgaagtgttagttgctctaaggaggaaaaattgaacaattggttatctagtatgtgaattagaatactaaatatatagagattagtgtttagtggactatacatactcagtgtattagttctaaaacttaaattgatcttaattttttctcatttttcagaagcggagcgttctgaaagaaatacatttgcagaaaggctttctgctgttgaggccattgcaaatgcaatatcagttgtttcaagtaatggcccaggtaatcgggctggatcatcaagtagccgaaggtaatgtgatttttaccaggaaactttaattggaggaaaaaaccaagtacagaaagcagtatatctcttacctgtcgtgtacatgaattggtgggtccttttttgtttcatttttgttcctcccaataacaccctgggaaaaataatctgataacaaattagagtttaaggtagagctgggacacttaataaatttgaaataatttagacaagtagtttaaatttgtttctttcaatttgttctaaattcatcattcttgcttcctaggaagttagtgtgttatttggagaacaagtagtataataattgaaggaaccttaatcttttcagattgcttatttaggtcagtttctcagatatcttgatctgggaaaaaaatgaaagggtgatgtgtattatggatgtctgatgtttaaattttcaggctgagttttgggatggacaaacttttataacacattaaaaattgctaggtatttgactagataatgaatatgaagaattcaggatatagttttctttctgtaggaaaaaaatttattgtctgcttgacaagatcattaatggaagcactgctcactatgtgctaatgtggcaggttgcaaagtctacttaaaatgaagattctccttgcctattttctgttccatagttaactattcctttaaaaatgtgtattcttaaattggcaacaggaaggctaccaagttgatccaagttgatactttaccaggttcaaaaacatcctgaagtgagatttatcaaaaagtattcatgggtgaccaaattacaatttaaaacagtgcaaaaactttacgtagactaaacaaaatggaaattatcaccagtttatttattcaggactatgctaggcagacaaagtgtttggtctaaagtgggaagcaacttaaattcttcatgaagaaattagtgtctgaattatttcaggtatttcatttcctcagggaaattacaggtgcaaatcaagttggactctgatatggttggtccaatgccagtgctgccatctttttttcatgtcaggattattttgaaggcaaagactaaaaggagcttcaagagtgggtgatgtgttgctcacagaaataatttgcagagtaagctcctttgaggaatttgccgaagatttcactgcagtgctcttaaccagttcaaactcagggctgccggttgaacagatgaaagcacaggagtcttattatccacgccgggcagtaggaagtccacagactgcttcattgaagtgaaaccctcctctagcctccaatggattttctaggcgatgccccttgatgagtatgcaggctgggattcatgagctgtaagctcaaaactgatgcaatttcaatattgaatggaatactgttaaatgccttcagatgatgatttgactcagaagttttattatgtgaactcaatagttcctgagtacaaagggcagatttagtggaaagcttgattgatgcatctgattgcaggtgtatatactctagagattgttaatctggaagacacatgaccttcgcttttttgtcacagtgttatgtttgaacatgactggattctaaggcttctgtagcatggatataacgtgcttacaaagaggaaattacatcatccttgaattcttccatattgtcagaaaatacgatgactccaggcaagcctttacgaagaaatgtcaaaactctgaatcttagcagccaaggtggtatctcctcagtattgtcctcagccactgaggatacaggtgaatcttcatgaattgtgtacaacatcttgaagaataattttctttttttgttttttgttttttgttttttaagaatctatatgaggagctgggcattgtacttaaaaatgttcccaagacctaatgaagaaaagaggttaaggacaattttaaaaatgacaaggaatggccccctcatttaatattgaattgactacatcacagcaacaaagttgggagtttgcaagttcaagatgagactatggtctcaatttatcttcatttattcttaatctgctttaagctagaagttggagaatagcccacataatgttttttgtttggcctgcgcaatgttaaaatttttttttcctttaatttgaatgccttcagataagcatgtgtgcctctagcttgtcactacccccatttcttacacctgactgcccttattttacctttctgacccattagccattgagtttgtgactctggtgtaagcattcttaaaaaggccaaaacatgcatttattttcaggttatttgcagtgtctcccaattattgctgattttttttttctttgtgctttgagtaagacacattaggtaggataccaggtgtctgttgagcttaattaagattgtataggagcatcacagtgtgaacagtcaccatggtgtgtgctgttactggtaaggagtcttccttttcctctgggtgatatctttggacagggaagtgatctggactgaaacagtcactgtgccatgctcccatccacattataaaaactcttaaactcaaatttctaaattggaaaaagaagacattgatactataaaataattaactatagttattttttaatagtgaatactataatggcaaa

SEQ ID NO: 130872 - DNA, 4247 bp, Homo sapiens
tggtcacaacttttgctcaaaatttgtaaatttataaacctagacttactgccacaccatggatagaattttttcaaaaattccttaaaataaattttatggtgttaattgctttgcaatttaggaaattaaaagttagactttaatagttatgtgatagttttcttaaaactatctggcagatcttcctttttaaactctggttagatactataattttgggagtacaaaatacattttacgctatttctttgtacttgtttatactggtgttaatacaattaaacattaatggttacagttgttcttcactgtgaatttatttgaagtacagattgatcagaaaactccaattcataaagcagtagcttaggaaattgttgagaaacttcacttatgtatccctttaaagatagtctttcttataaatttagatgaaatctataaagtctcttttacattttctttttggtacttaccattttgttgttgtctaagaacgacgacggtcaacccctgcaccaaaagaagaggaaaaggtgaatgaagagcagtggtctcttcgggaagtggtttttgtggaagatgtcaagaatgttcctgttggcaaggtttgttcaagatatctaaaacttaattactaacagaattataatgatattggttatccagggatttgtggttgatatctgagtcctttcttcagggctgttttatttatcatcttcagtggtatctttagttgcacccctgcatctgatgcagatctgtcttctcagtcgctgacagatgaagagattatgcctctctttgagcatttgtgatgatatgttgctttttaaaaaaactattatttgggaatagttttagttttgtagaaaagttgcatagagatacgttactttttggtacagcccatttgttggatctcttagttctagttgagatcatcttccatgacatttaaaattcttccagagtactgaaaaaccttattacaagtcaccttccactttttctcctctcttctgttttgccttctaagaaaccatcaatttgagtgccattaatttcactcttctactgacacatatttaaaatgcacttgcagttgtagaatgtctgtaaagtaaaggttttcatgattactcagtagtttctgaaacgtgatagtctttcatttatacttaaaggaaagagcagatataccagtttctgcagcttacaaaggtctttctcatataccgtttcatttgattctcaaaatagacctgtagttcatgggtaggtgttttcttctgagaattagatacgggcttaaaataaaaagcatcaagtagcagaagtgggacccaaatttgtcctggtttcaaattctgtgcttgtctttctgtgcattgctgaccctatccctgtgttgagtgtattgtagccactagctgtatatgtggctgtttaaatttgttaaaatcaaataacttaaaaaagtcagcaccttcgtcacattagcttcatttcaagtgctcagtagccacttatggctaatggctgccgtattggacaccgccaatatagaacgttgccattttcaagaaagttctgtcagaccgaaggctgctttaatttaattaggagatgggaggatttcacgggctatatacttaagtttttcagttgattactgaaaacattcactgactgtaatcactggctgtgtgggtcagttttctctagcaaatgagccttgaatatagatgtcagtagcaaagctcagagtctgtctgggttgattttataacttggtgatcattgaagaaacatacaaagaattggattcctttaacattaaattagttcagtgaatagaatttgtatgttgattttatataagctattgctaatgttcattgaatttgcctatacttccaggtgctaaaagtagatggtgcctatgttgctgtaaaatttccaggaacctccagtaatactaactgtcagaacagctctggtccagatgctgacccttcttctctcctgcaggattgtaggttacttagaattgatgaattgcaggtaagtgtaaagaagttattcagcaagtgaatattggaactgactccgtgagtttattatggagtttgaaagcaaaattccttttgtgtcatgcaggttgtcaaaactggtggaacaccgaaggttcccgactgtttccaaaggactcctaaaaagctttgtatacctgaaaaaacagaaatattagcagtgaatgtagattccaaaggtaaattttgaaacttcttcagctggcatatcctatattccattaatacttgttcaggaaatgggaatatgataaaataattcagggcattggcatttttttgttccctatctgtaacattatggaatggcatgtatctgtttgaattgacttacaagtgtggccagagaagttaaaatattgtagatgtttattagagataagatgtataacaatttttcttctcatttatgtgcttctgaaggtgttcatgctgttctgaagactggaaattgggtacgatactgtatctttgatcttgctacaggaaaagcagaacaggaaaataattttcctacaagcagcattgctttccttggtcagaatgagaggaatgtagccattttcactgctggacaggtagaggctcatttttgcttttgaaaagtgataggacaacaatggcatttttgtgaggttagggggtctggctctggttagcttatcaattattcaaaaacctagaatatttagcacatttgaatactaggtttcttattactattactaaaatctaatttggaaataaatatgcctgtaaaaatcagatacattttttgattaggagtcaaactttaccattttcccattattataggaatctcccattattcttcgagatggaaatggtaccatctacccaatggccaaagattgcatgggaggaataagggatcccgattggctggatcttccacctattagtagtcttggaatgggtgtgcattctttaataaatcttcctgccaattcaacaatcaaaaagaaagctgctgttatcatcatggctgtagaggtaatttgagtattgaaactactgggcattttaattcacaaaacaccactaaatagtcttgaatagatcttgcaacaatcttaaatagatcattcattgcccctttcttccctaaaagagctaatggtctattaaaactacatagacaagtacatcagtgattatcgtgtaatttaagtgtttgagcaaggcatgcataatgttgtaggagcacaaaggggagagatataaatcatactgtgactgtaccaaagacttctttaagaagcgatacccggacagatcagataggccccttagacacagggatggagttgggaggtattatcccaggcaccaagagcaacctttgtgaatcttattaataagttgggagaaagtacttttttttgatatgaccagaattctggtagggatcctgtgggtcagtgagtagcaactgaaaaggctggagaggggcactagggtgtttgtgtgttcacctaacgctacctaaacttcagcctgaaagcgaggaggaggaggaggattataagccagtgaatgacgtgcttttgattttttaaaaaagatcagcagtggctggtgggtgtttagagagcagctgatagatatcagaagtttagagatcagataaaaaggttaatgtaggctgggcgtggtggctcacgcttgtaatcccggtactttgggaggcagagtgtggggtggatcacttgaagtcaggagtttgaagccagcctggccaacatggtgaaaccctatctctactgaaaatacaaaaattagcccggcatggtggcgcacgcctgtaatcccagctactcaggaggctgaggcacaagaatcacttgaaccccggaggcggaggttgcagtgagccgagatcgcgccactgaactccagcccgggcaacagagcgtgactccgtctcaaaacaaacaaacaaacaaacaaaaaacattttaaaaaaagggaaaaagtcaggcaataatccaggttagaaacaaagtaaatgtcaacttttggaaatgaggaaggaggggatggatttaagagatcttaagaaactagaacctgtaaagcttggtaactggattttagcagtgaatgaaagaattaataaagctt

SEQ ID NO: 130873 - DNA, 1051 bp, Homo sapiens
gtacatacagatttttaaggttccaaaattgtttagtttgctttccatttatactcagatgttatgattataaatttactaagtttactgctgtaattcctcagtgttaaaagtgcaaagttaaatgtgaaaacagtgattactgttaagttaaatgtaatttttaacaaaccaaagctattgcactttatacctcattaaggttttgcttttagttttcgtgttctttctctgtcttggttttttaaaaaagatttatagactttctaattacgttggattttgtactaaaaatagaagtaataaaacattttcattgtcttatgaactttgtaaagaacatttgaaataattttgatgtgtacaaatacaagattagaatagaatatggaatttaaagcctgtaattgatgaagtttttcaagatcttccttgaaatcagccatttcaaatattagcaaaagagctaagtgaaatttaaatgttaagaacatagtctttttcatgtcagtagtaccctcgtttgccagtcattgaaatgcattcactttaaaggtatgctagtgattaatcagtattggcttccccccaccatcacagcatttgtggagcagccaggagtatttgctgtgtacttattgagatcactcatgttaagatcctggtgaaaataataccagttttcttttagattatttctaaactcaggtgaaatttctgatgagagtaataggagacgagggttaagatgatggtccagtttataataggtatataaataacaaatttgtgaataatcagtgacttttctgattaaaaactgatttctaccctttaatatataaaaatatttatgtttgcaccatctgtagaatgctgtttagttgctgtagttattttcttaaacagagtattaaataactcattaaagagggctagttttttaatcctgtcaccagatggtttaagaataaatttttataaaccattgtgagtagagtttcttcttggaactctatgaaattaatggtctaatgggctttttacttac

SEQ ID NO: 130874 - DNA, 1749 bp, Homo sapiens
gtacctctggtcatctaccacatagtaagattgggatattggataaataaaagatatctccagaaaaaatgttcctatctaagatggagatactgttggtatgtttaacagtgctgtcttgaaggccattggttttcggagcatgacctgaggttagtcccctgacagagttttttttttttttttctctgtaagttatttactcctaaacccagttaaacttcagacactaatgtctacatattcttttttaatttaaaagaaaaattattcatggaaccttctggctagcaggaaacagtagtcttctgggataaagaaacatctataaagttatggagcctatcatgaattaagggaaaaagttatttcagattgtaggaaacagacaagaagtgtaattttttttttcacattttactttttaaattataatgccttttagtttcttctctgctgtttctgctctgttttttgtttgtttgtttgtttgtttgtttgtagcagaatggatgggatatttgctgcatgaaaatttaaagttaatgctaaatttttagcaaacatgttgaaattattccttttccttaatattagaaacaaattttcttttctttttcttttttttgagatggagtctcactctgttgcccaggctggagtgcagtggcatgatcttggctcactgcaacctccgcctcccaggtttaagcaattctctgcctcagcctcccaagcagctgggataacaggcgcatgccaccatgcccagctaatttttgtatttttaatagagacggaggtttcaccatcttggccaggctggtcttgaactcctgactcatgatccacctgccttggcctcccaaagtgctgggataacaggcgtgagccaccacgcctggcctagaaacaaattttcttaatgaagacctttaaggtggtgctttttcagccttattgattgggtaagattatactgggaaacctaggaagcccagtactttcatatattgtatttcatccatttgaaataaatattatatatatttttaaagttatgtcatcttgatggtggttttcttttgtttgctaggtatgcttgagaaataatcctctttatcatgctggagcagttgcattttcaattagtgctgggattcctaaagttggtgtcttaatggagtcagtttggaatatgaatgacagctgtagatttcaacttagatctcctgaaagcttgaaaaacatggaaaaagctagcaaaactactgaagctaagtaagtactatagcttaactaatcgtgctttgacaccagttccttgtttgctctgcatatgaatgggaataatcaaggaagacttagaggtgtgaagttgtaaactcctaacatgatagggtcttgttaaggttcccaggaaatttgaaaggaagtgctaaattttactgtttgtaactttgctaatatatatctattaattaattaattaatttattattattatactttaagttgtagggtacatgtgcacaatgtgcaggttagttacatatgtatacatgtgccatgctggtgtgctgcacccattaactcgtcatttagcattaggtatatctcctaatgctatccctccccctccccccaccccacaacagtccccagagtgtgatgttccccttcctgtgtccatgtgttctcattgttcagttcccatctatgagtgagaatatgcgttgtttggttttt

SEQ ID NO: 130875 - DNA, 2343 bp, Homo sapiens
tcctggcgccaagtgattctccctccttggcctcccaaagtgctgggattacaggcatgacacctggcctaaagtcactaaattcttttaaaaattggtagagcaaatgtttacttctgaccttaaagatggccttagacattcatttgaataactgctattttgatttgtgtgaaaaagtattatagtttctagtcttactaagaacctctctgaattacttatttttatagcatttaactcaaaacattttagaactccagtctttaaagtatatatgccttgccctagtttttaccacaatccttttgaaaagatggcttgattttatttaaagttctaatattttattctttaggttgctacatgggtggatgaaactttaagttctgtggcttctaaattagagcacactgctcagacttactctgaacttcaaggagagcggatagtttctttacattgctgtgccctttacacctgcgctcagctggaaaacagtttatattggtggtgagtctatagggaggaggaatttatcggtgaatgcttgtgtatgtatagaaagatgctttgagtagtggaataccaacatgagaagttcaattaaaagattatgccttatggaagggaaatttcactttggaacaaagtaacattttaaaaaactttaacagttaaatttataaaaatacatacttagtgaatataattaataagttttatgaaagtataaagtagaaacaaaagtcatttagaatcctgcaacccagagataactacagttaacatttggggtattttaaatctttttttcctctgcataaacatgtactttgcttttacataattgaaagtataggttatagagtatttttttcatttcattgtatgaatattctctaccttatttaattatagctttactgttagaaggtgaccttacattttttctttgttgtgttttaaggagttaacagcaaaattgcattttggaaacaatatataggggagtttcctaatgaagtataattatttggaagaaaatatgtctgttaggcccaggcacagtggctttcggaggcccagcactttcggaggccaaggccagaggattgcttgagcctgggagttggagaacagcctgggcaatacagtgagacctagtctctacaaaaaatacaagaagtaactgggtgtggtggtgggtgccttgtagtctcagctacttgggaggctgaggcaggaggatctcttgagtccaggaggtagagtgcagtgagctgagatcagccacctgcactgtagcctgggcagcagagaaaggccccgtctcaaaaaaaaaaaaaaaaaaaaagcaattgatgaatttcccataaaatttaattataaaggtttaataaaagtagatccagttattaatctaatgcacaaattataattaagatgaaattgtacacattaatagttttctgaggcgaaaatactggagaaatgccagaaatgcttaactgataatatgtgtaatttcagatttatttagtgggctgttttactgcttatttgaccaatttatgttttttgttttcaggggtgtagttccttttagtcaaaggaagaaaatgttagagaaagctagagcaaaaaataaaaagcctaaatccagtgctggtatttcttcaatgccgaacatcactgttggtacccaggtaagtgatggatttagcctgtcttaagggacctcgtttctcttcagaatcactttcttcccttgtaagcagttttacagatgagcatcatttgaagagtcggtttccagtaacgtgtatgtgtcacgtcattcttccttcattcagtagagtaatactgtatagattgtggttcagtattagtaggtttccctatggggcaaggttccctggctttaagaatcacttgctacttttaaaatgcagagtctggaaccccttacctgaaatgtttaagtttgtttggtggtagggccaggcatcgttgtgtttaacaaacatcccgggtgattcatatgactaacccgtttgaaagatactgctctatgaggatgttgtcagcatgaggcagggggctttggcaaatccccatttctaccactttctggtttttgactctgagatggttttaggcttctacgggtactattttctggaagctgatattgttaatatctcagtggttctctaagtgtggtccagagacccctgccttctcctcaaccctttcagggactctgaaaatttccttcatttttctattacatatttgtgtcaggctgaattagcttcctattagctgaattagctttgt

SEQ ID NO: 130876 - DNA, 3491 bp, Homo sapiens
cggattcattttagggatgtcattgtgctttttaagacagctgtaggtaagtctggagatatgagatttacacatttaaaagcatgatgctctggtagatgaagtcactgaggctgaaggtgaagcacaatttgaatacagggagaaacacagaatcagtggcagggagtgcatggtagtaccagggagatggagggaagaccatgcatggtagtgccagggagatggaaggtaggtggaagaccagtagagaatggtgacctatgaattagggagagaaggatgggttccagaacagataatgaacagaggcaaatcatttgaagagtttaaagagaagatggactgattacgtacattgagcattgatttggcagttggaaaaaatgtcatgtccatcactgaaaactggtaaggtgaaacatatgccaggcagtaattcactttaccatgttaggactgaaggagagatttgtttggatggttgttgggggatatgggaaggagttgcatccagtgtgtctgtgggttatctttaaataggaggggaggaaaacacttctttctctgagatggggagaagggaggaggtgagaatggtgctttcattaagcaaatctagagctaggaatattgaggaagcccctgcctgagagctatcattttctgggtgagtcagagatgaagtcaggggaggagattagtcatagtcgaatttgattgagtgcttatttgcactgggctctgtgctgtgtactttatccagctgacccttgaactatgaaggggttaggggcacccactcctcatgcagttgaaaatccacataactttgactcccccaaaacttattatagcctcctgttcactgggagccttagcaacaacataaagttgattaacaacatattttgtatgttatatgtagtatatactgtatttatacaataaagtaaattagagaaaatgttattaagaaaatcataaggaaaagaacatacatttagtattcattaagtggaagcggattaccattaaggtctttattctcattatcttcatgttgaataggctgaggaggggaaggaagaattagaagaggaggagttgcttttgctgtctcaaggatggcagaggctgaagagaactataagcagaccctaacagttcaaacccatattgttcaagggtcagctatatatgttactccgtttggtttttaccctgcactcccctctcccttaccatgatttgcattaccttaatacccattttagaaatgaagaaatggtttcagagaaattgtatagtttacctgaagtcacatacttaataagtgttggatctaggttggggactcacttagtctgattccattatagttaattcttaaccgtaggattgagaagagaatatgaagtagaaaggtaaaatttgatgcagtttctatggagaaagtcagtaatggtttgtagacatccatggtaaaggtaagggaagaattgctaacttggagaattccaaatttggtctcttttccatcccccaataaaagtgacttgaaaataggaaaataggtttgactggtacaggtaaaatagacgattaaaattagtattatttctgtacaacactaaggcataacctgttgttattgtgttatattaataaatcttgtagactttacaagttttagcactataacgttaccatctgaccaaataaaattgaattttgacagaaaaaccagaaagacaccatttgtttatcataccctggagccagaatcccaaagaaaatggagaagtactgtgtatagaccaacagcatttttgcaacctaaaatccgttactggcaatttttgctgtgagatttctaggtagctttgtggctctgatcatttgttttatgttaaagaaaattatttatttacatttattagccaagctttttataatttaattgcattccaaatcattgcatgtatgtcaacataaaagtgaacgaatgattaccttaaatatgggcacttgtttccatagcttgaaagagcttacagggaaagaatcttttgatttgacatcgtttttctctgtttcagctccgtattctgtttttctttttttcccttcactcattcagcacattgattgagcacctacttgtacgctaagttcttaagttacagtggtgaataagacaaagcttatacttgagtgagatagtgtataaacaaataaatatgtcaagttgtgaagtgctgtggattaaaaagaaagcagtgtaaggaactaatgtgagagtggtggttctgtacatagtgtcatcagagacagtctcttgagggagtgtcacctgagaaagagtaacacagacagagggaacagcaaggacagtggtccgagggtaggaagaagaccactgtgacaggaagaaggccagtgtgaatggaggtgagtgagttaatggagggagccagggccaccttaattggataccttgtaggctgtgctaaagacttcgtatagttgtggtttatgtgtttacataattaatctagatctgatgaagtgattaaagtgacagtgttcaaatcagtagatttggcaatttttatatttatagtattgtattttactttataggatggaacaaaattcatctgtattggggctctgtattctgaacttctggctgtcagcagtaaaggagaactttatcagtggaaatggagtgaatctgagccttacagaaatgcccaggtattttattttatgaaatcttgcattgaatagctctacatatcaacatataaaatagtaatttttttttatgctttcaaagaatccttcattacatcatccacgagcaacatttttggggttaaccaatgaaaagatagtcctcctgtctgcaaatagcataagagcaactgtagctacagaaaataacaaggtatgaaacactttgcattgattaacatttcatgctttaattcttgttttctttttttcttttttgctccttttccatcttttcatttttgatctatgttaacataaatacaaagtgtctcaagccttagtaatctaatgtatatttttgttggctagtttatactgtaactttaaaaatagctttctgtggctgggcctggtggctcacgcccgtaatccgagcactttgggaggctgaggtgggtggatcatgaggtcaggtgtcgagaccagcctagccaacccatctctactaaaaatacaaaaccccatctctactaaaaatacaaaaaaattagctgggtgtggtggcaggcgcctgtaataccagctcctcaggaggctgaggcaggagaattgcttgaacctgggaggtggaggttgcagtgagctgagatcgtaccactgcactgcagcgcaggtgacagtgcgagactccgtctcaaaaaaaaaaaaaaaaaagctttctggtttaaggaaaggcaaaaatattc

SEQ ID NO: 130877 - DNA, 1451 bp, Homo sapiens
gtaaacataggtgtggccagttaatagagttggtgttgctgggccaagtgttttttaaagctttggccgctatttcatgtctcatatttttaacagttttccttccccctttgaggaaggatttctagttaaatttatgacccatttatgttggacagttgcagatttactgattcaacttctttttgttgaaaaatagagctacaaactactgctctttaaggaaacatgcatagccactttctctagttggattgagcagatgtcagcttgctaagaagcagcaattcgtacttcataaaaacaataaaaacattgttttctatgacttatgaaatgaatgagctaaaatactgtccttgtgtatgtatttgattgttttgtatttacatacagtaaatttctttaatacagataaatctgaagcaggcaagaagtagtaggtgatttttttgtcctcttcctgtgggttcatagttgtgctattcatcttcatttgtccatagtgggttttcagggcctgtaggggtgtaattggctcatccaggccttatcaccgtgggggacattgccctatctctgaaagataaaggcaagtcagttctgagagggcctcatgcaccatgctcttgctattgggctggtttgttcaggattgtactgctctagtaaggcatttacccaaagaagctggagttaagattcatttgttcattcaacagttggtcagtgtgttcctgctttgtgccatataccaagctggcatatggtaatatagtcatgagtatgatattggcctttctacaaggaattcagtggggaacacaaacatttacatagaatgtaatgtgatcataatgtgatcagtgctaggctgaaagtatgagtaaagtgctataggggttctgagtggtaaatgaccaataccacctgagagatctggcaaaggcatcgcagaggagatagcatttaagcagcatttttaaggtgaggtgggcattgaccaaggcacaaaggtattccaaacgtatctgggcatgggcccagagtcacaaaaggtcatgatgtgtttgaggaaccatgaaaaattcagaattgctgctttgtggtggggagtaggagaagagatgggatggagatgactagacagtttgccaagcaagaagttaggatattgttttgcagcaattaagaagtcaacagagtccgtagagaagtgacttgatgtgattggtggggttttgctttgttgtatttgatttgttttaaggaggtgaacattactggcatgatgggagaaagcaacaggaaaaatcaaaagtcggttatgagaatgctacagttgttcaaggaaattgtgaggatctcaaccaaagcaggggtatggggagagagaaagagaagaatctgagaggaatttgagatcagtttagacatgggaacctgggagc

SEQ ID NO: 130878 - DNA, 2004 bp, Homo sapiens
gagacaaagctgactgaacaggaatgggctaggggagttatgctctgtatcctgaggaatagtgcaatgactggattctagaaagcatctaggatttggtaattgatttgaatctttaaaaatccatcactgccataagtgaaacagagttgatgtatcctgttgatggtatgtatgtaattgatagttcatcttcagaggctcctattggaacccatgtttttcgcttgttttttactgcgtctgtttcttcttatttccagaaccatttgggtaggaaattttctaaagcagaaataaactaaaagaagatgggaactttggggccccactagcagataaagagagcctgatatggatttcttttctttctttgatttagaacttgaatccgggatattgaaggcgaatattatttaactttccaaatttacgtttccatggttactgtgagtcttgttgtagttcatttattttcctctgcattcagctcatgtggcaagtttgaatgcaagaaggaacatgaattttaatcagtctctttggaagcaaaaggttattctgttttctttggcaactgccaaactttccctgaattgcattcttttacttatttccctaaaactagaaatgtcccaagttctacttttacttcatatggtagggactgatttaaaccattgggcttttactttttttttctttttgtacatcaattaccgtttcctatttctcttgtctggatcatgttagagttgtgtctatttcatatttgcaggaagtaaaagagactcctgaattatgttttaatagggccaccacgtattattaatctaggtttgtcatgtattatttttgattaatgaaagtatttctgaatagtgtaagtttagcaagcctagccattgtaccctctgttagatttagctagccgttgttggcctggctaaaaatatgatagatatgtttttaagtataccttgtttttagagacagttgtaagtgcatcatgaaatcttggcactgtatagacttttagtgcattattccttggtttgtttagccaccgagtgaatggaagaagagcggtatgtgaaacaaagtatatcctacctatattcttttttccattaaataccaaatttaaaatagcaacatggaaaaaactctttttactagcacatgatggaaatctagaaattcatacttgaattctgggaaagaaaacagcttaagcctttaattaaactgttaagcattatcatagtgatcagtaaataccattaggtgcttgtttgcagggctgaatgctacaagagaatgtagagagctattaaagggaaagaagaccttgtttttatgtaactttaggaaaacaaagtattatacaggggcgcaggataaataccatgtgaagaaactggtaatatgtgagacttatattggtttctcaaaattagttaggggtagtgattcctgaggagcaaaaggttttgggggaaggcttgatagggaatagagaggtaggtggagaatgcagggagatagggtgtcaggatgcacttggtatttaccattggtgagaagaggtaccagcaccagatgagagtggtctgccaagagtaggggcttgtctaatgaggggtccattaggaattcctagctcaagacagtttgaatgtcatgctaaggctaacactggaaaaccagagcagttgcagagcatgcatctatcattttatctcctccatgccacagacattgctgctaattgcctagtaccttgctacttatgggggctatattaatcacaagatcggatattgagcctgtcttatgaaacttgtgaggtttagtgcaggagacaggtggtgattagtcatccaaagtaatattcttaaaatgtgactttccttataatcttgattggggtttgctttttaaaaaaaatcttggtaacttgcattattttgactgaaagtgttatttctacgttcttgacat

SEQ ID NO: 130879 - DNA, 1031 bp, Homo sapiens
tattaatggattcatagtttaccctttttagggttttttctatgtgtgcatttttcgagtttgcttatatacgtaacatgttgaagttctaaatttatgtgctttttaaacccaccagtagacaaacgaggagtgtatattttctgatatgtaaattgaatttatagtacgcatttctaatgaaagccaacaatttaaaattctttaaaaaagaaccaaatatacttcaaaataaagcagttccactctaaaaccatgtagttgaaatatacaaaagtctgcctctaattttttaaaatactagttataatttttatacattcacttgaaagggttgatgttttgaatgttgcatgtcagccttattagatatacatttacataaatttttatgagtagataaactgctgttagttgcatcctgaagggtctttactagagagtggcttacttttatcccactggtgtgacccaattgcataccagttctccttcttcccttagagagagactctgagctgttgcgtgaacgtgaatccgttttacgtttacgtgaacgaaggtggcttgatggagcctcatttgataatgaaaggggttctaccagcaaggaaggagagccaaacttggataagaagaatacacctgttcaaagtccagtatctctaggagaagatttgcagtggtggcctgataaggtatttggaaaaaattcacactgcttccatttaaatggatccctgacaacccctccctctaaggtttccattttatttattctggtttttgtactatcactcaaggaaaaacacaaatatataaaacaatatttttgttttgttttaaaatatagatagaatatatctttatttggcactccatgagtcatctcagtgagatgtattcagtggtgcaacgtatcttactacttgataaagtaaatcagagaaattaggatgttagttctagataacacatcagcatgctattccagtacttcttttctggtaataattactccagtaagtggt

SEQ ID NO: 130880 - DNA, 2662 bp, Homo sapiens
tggtagtacacacctgtaatcctagctgctcaggaggctgagacaggaagattgagcccgggagttttgagactagcctgggcaacatagcaagacctcatctcaaaaacacaaaaaaattgggacacttgtcaggtatggtagtgcgtgcctataatccccagctactagggaggctgaggcaggaggatcacttcagcccaggagttctgggctgtagtgtactttgtacttgtgaataaccagtgctctccagcctgggtgacatagcaagaccccatttctttaaaaaacagtattattattttaaagctcagttctattaccttattcttttgtcacaacactatgtaacatgttatgtcaattagacagataactttatcttagctgaaaataataataatgaaaaccaagcaatcagaatgattgtttaaaatgctaattttataaattctccaatatttagaagccgctggagttctggagtgggtggaagtggtggaggatcctctggtaggtcatcagctggagctcgagattcccgccggcagactcgagttattcggacaggacgggatcgagggtctgggcttttgggcagtcagccccagccagttattccagcatctgtcattccagaggagctgatttcacaggtatggatctcgtagaacacttaatgtcagacaacaggacaaggtgaggttttactgaatatggtgggttgtagtcatgactcatatcatgagttctgaaacaactgttttcctattttgatcctagaaaactttttttttttcctttgagagggagtctcactctgctgcccaggctggagtacagtggcatgatctcagctcactgcaacctccgtcccctgagttcaagcaattctcatgcctcagcctcccgagtagctggaattaatgggtgtgcaccaccacacccagctaatttttgtattttttagtagagacggggtttcaccatgttagccaggctggtcttgaactactgacctcaggtgatccgcccaccttggcctcccgaagtgctgggattacaggcttgagccaccacatcctgtcctagaaagctgattttgataaagaatttaatcaaaagaaaattaccatagcacttctttttattttttatttcaggcccaagttgttttacaaggcaaatccagaagtgtcattattcgagaacttcagagaacaaatcttgatgtgaaccttgctgtaaataatttacttagccgggatgatgaagatggagatgatggggatgatacagccagcgaatcttatttgcctggaggttggtggatcaccgtcatgtttttctcatttctggagtgctctttcgactggggagtggaatttaaagcacaatagacttttctgaatattcttttcaaggtggtagatatttttcactgtagagttgcttgattttattgtaaagtttcttttatttttttcttttcttttttgagacggagccttgctttgttacccaggccggagtgcagtggcatgatctcggctcactgtaagctctgcctcctgtgttcatgccattctcctgcctcagcttcccgagtagctgggactacaggcgcccgccaccacgcctggctaattttttgtattttagtagagacggggtttcaccatgttagccaggatggtcttgatatcctgaccttgtgatccgcctgcctcagcctcccaaagtgctgggattacagatgtgagccaccgtgcccggccacaagtgttatatcttaacgagtgatctttcttgtgattatgtagtaagtagctcaggcgacatttatgcatttgatgttctttaaaatctttgttaataatgtaggttgttgtgtttttcctcaggcgatgtcattccctagtttttaaatgtatgtgaatttttagagctctttcagcagtctacagttgctctttgtgtgtatgctgcagtgatgtttgtttctgtttatagaggatcttatgtctctccttgatgccgacattcattctgcccacccaagtgtcattattgatgcagatgccatgttttctgaagacattagctattttggttacccttcttttcgtcgttcatcactttccaggctaggctcatctcgaggtaattttgcatttatttatatatttattttggtcacaggctagctgtatggaaagatagtggtagaatctactgactgtatttgaacttctaatattacagttattattagttttttatgaatgcattagcattaaaattaattattttttattttgaagagccacaatagtattttagagttgatcctatttacgttgtggaattgatgtcaaggactatgacttcacctaaatgtatttttaattaggaatatggattctgaactaaaagcagaattctactttacagtgacatgcagcattcagaaaacaagtcttagtttatttggttaaaataagtgatctgtttattttaaatcctggttagataaaataatgaaatgtgaaaaaacttactagaatggatttaggaccaatattaaatgaatagaaatgtttagtttattagaatgccttttttttttggggatgaagtctcactctgttgcccaggc

SEQ ID NO: 130881 - DNA, 1672 bp, Homo sapiens
gctaattatttttttgtggagactgggttttgacaggttgcccaggctagtcttgatctcctgagctcaagatctgcccatcttggtctctcaaagttctggaattacaggcgtgaacccagcctatggttttagattgacaaaatttcaaacatcatactgagagttcccatgtaccccatgtctagtttccaatattattaaaatctaatgttagtatggtacatgtgttacaattaatgagtggtgatactaaagtcatccataggttattcacatttccttagtttttcataatgccctttttctgttctaagatcccatccaggattccactttatatttagtcaccctttctcattagattcctcttgactgtgaccgtttctcagacttttccttgtttttgatgataaatacacattttaaaccagccacctatatggacaagacttggcccatgggctttaagtttgcaagctgtggactaattccatactaggtatgatatccttagttcattttgagtcattctgtgtaccttgagaactgtataacgggatcaaaattgtaggattaatttgataagcaaaccacagaaagtagaaacaggttttcccagtacttgttagtttaatattaaaaattatgttgctcactgtaattatagataaaaggaatcaactgattccagtactgtcttttgtgactaccaatagacctctattagaatatgcttagtttaacacattaatctttatatagatagtgagctggttagaggaatgttaatggcgattgacgtacggggactggtaggtggtttggattctgataggagaaaacactgcacacagcaggccagagtgggaatacctgtattctctatggtaacagtcaggtgaatggagaaactggagagatattttgacggttgtctttaaactcaatggagggcttgtgtagcagagattgtaaactggcagctgctggtggtgtaatggattaaatcagcagtgcttatagaaaagaatttgagtgtttttagataggcagatagtctcctgtcttccctgttatcttggcttcccttgtttacgtagcttatctacctctcatggagatatgagtttgagatacttgtaaggtctgcccaggagcagatgtgtacttggatactatttctgatcaggcttgtaatagtacttgcttgtggaaaaaaatggtgatgcatttcttagtgaaaatatggagtcttccctttaatctgtgatggccatataatttattgtctgaacagggacgtttttgagtgaaattaatagttaggcttagccaataggcttaaactggcactatcataggcaaactggtatatatagttataattatatcattttaaggctctttaatgtggtttttcctgttttcacattgaaataatttacatatttagctcttgaatgtttttaaaaatgactgaagatagtttttcctgaaagacttagtttttaaaactcataggaaactatgaagtaaaagtgctgatttaatagttgatttttgttgttgttgttggagacagagtctcactctgtcacccaggctggagtgcagtggtgcgatcttggctcactgcaacctctgcctcctgggttcaagtgattctcct

SEQ ID NO: 130882 - DNA, 1920 bp, Homo sapiens
tagttttctgagtccccttacccatttcttacactccccgtaaacccctctttgtgcctctgttctctctgccagaacagactgtgtaagcgttctttaagcattaggtccatgattgcaatactgtaaaatgtcatagtgcctcctgaccaacttgatgccagtgatttgtttacttatatttgagtttgcagatgtttacaaagtataagcagttaaattctgattgtttctcttgggctgtatgaaaaatctttgcagtttgttgaaggtgaaattgtgattaagttattttgtaaatcaaattttttttttacagtcacacatattttcctttatagtaaatgtgtttccttgatttgtacattgctctttttttttttttttcaatttctgtgttaattacaattaactttagagaagcttgcaatttataacatgtattggggaatctaggacaggcaaatcttgtgtcctcaaaggggagtctttaaaccacagatttaccaaatacaatgcaatatgaaagagactgtccccagagaccttggtcctcactcctgtcctgcagagtctaggcctgctcacttttgctgctgggagttgtcctggatcaggaagtgaatagtctctttgagagccacatttttaaagagtttgggattattggtacagttttttagcatggattttttttttttttttttttttttgagagacaggatctccctctgttgcccaggctggattgcagtcatgtgatcttgacccactgcagccttgacttcgcagcctcaagtgttcctcccacctcagcctcccaaatagctaggactacaggcatgccccaccacaccctgctaatttttgtatttttggtagagcagggttttgccatgttgcccaggctggtctttaactcctgaccttgaacagtctgcctgccccaacttcccaaagtgctgaggtaacaggcatgagccactatgcccggccagcatggataattgagaattgatcatttattttgactgattatttttaggaatacatactgatccatttaatgttttttccttagaagattttgctaattgtcagatttgtgtgctaaagatttctagctgctactgttttctttctttagtaattacttcaagtttatcctgcaaggtatttcaaaaatctcctaggtattttttttaaactcattttaaaccagcttaagggtaagagcaccagatttatttggggtagagaagggagtttatttttgtttaataaatagtaaggtgaaaatggacctgtatcgaaagttcctattctgttacttgtgaccgttgaacaatagatgataggtataagctgcttttcgttgatttgagctaccatattcctttagggtttaatctgagctaatagtacgtgaattgaaatgtataattttacttgcaaatagttgaaggcccccttcaggtgggtaagacagtttgtagcaggattctgacaaactggattccccatttttcaaggaggctgctggtaaactggttttgtctataggagaatacagggccatggttggcaaattcaaatccttgtgtccctccctgccttattttgtcccaagaaaacctgcaaatctggattgtgtgataatctcttatcttaaatgttgggactaattgatattttcatggaaataaatatacacatacacacagtcacatcattcagacttgtgtgtgcatacatgttatgtacattttaaaaataaactattttaggatagggttttttttttttttttttgagacaggatctggctctgtcacccgggttggaatgcagtggcatgattttggcttattgcagcctccgcctcctgggctcaagccattctcctacctcagcctctca

SEQ ID NO: 130883 - DNA, 1124 bp, Homo sapiens
ttttctgttttctttgcttttaggatggtagagtttgcaggattggtttttcagtacagccagacagattggaattgggtaaacctgataataatgatgggtaagatattatgtcctttctatttaatatgtatttagctcttaggtattatattaaacctgtgttttgatttcggtaaccctcaacttaaagcatcacagaaaattagatcttttaaaacagtgaaactattgctttctagtttaattttaatctttatgcaagcgatgattcacagcccaaagtactaacattaaaagtagcagaggagtcagttatcacttaacagaaacaggttaccagaagaatgatattacgtgtttagtaggtaccaagtcaaatctgctctttaactgaaatgattttatagatcatttccaaattaagcaatgcaatttgaaataacagggttgtaaaaaatgttggtcttcaaaaatttacctcttgctttcccccaggtcaaagttgaacagcaactcgggggcagggaggacgtcaaggcctggtaggacaagcgactctccatggtttctctcaggttctgagactctaggcaggctggcaggcaacaccttagggtaagttgtggccagttgaaggcaccatcttacagatggtctgtatcatcttcctgtgagtgctctcagtctgaatgatcatcttcaatattctatctagtgatggagtgagaaaattctcctgaactctgggcaggaagttcatattgctcagggtgagccaccatgataaaaataactcacacaggctaattacaattaatctaggctcttgacctttaaaaaatgtatataatgtttacatatgtttataatgtcacgccatttatttcatttaaaattttaaatgattttatctttggtcctctcttacaacttattcttggtacaacttattctttgtactataacagcagagatgagtaattgggacagactagcctccaaagcataaacttatttatgatttggccctttacagtaaaagtctgctcatcccaggttttgcttgtcaatttatatactggcgtttgttcctgatcctatttatttatttctggcatcca

SEQ ID NO: 130884 - DNA, 1254 bp, Homo sapiens
ctggtttgttcaattttgtgctataagaccgttcaagaacttgagatgataccttaagtcaattaggctttctgttttcatttcatgatatccatgtgcactcaagaatctcttgacatggataacacagttttttgttttgttttgtttttttaaacaattgagcctttggttgggcattggttcagctaccaactttatgctaccttttctataaactctagaagcttcagttttctcacctgggattaatgggaaaatgggattaatacgattatcattgttactgaggttgcaaatggggtggtgagggaacggaattgcagagtctgcttgtgatcttttcgggacaaaaatgaaaatatgaaaaacattcttaccatagcagttgttttgtgtactactattggaaattaccaaaataatggtacaagtacctgtcagaagtatttgtttacaaaagatctgtacacgtggtttgttaatgttttgttttaaaggttacgagaagtttctgagaagctgaacaaatataatttaaacaggtaagagttttaaaatatttaaatcttctgacaacaatttttctttattaagaaaaaactcatttaggcggcagcctgatatgattaagattaatgtgattattagactttaagaatcttttaatctgtcaactttttatgggttgggcttatttgaattatagattgcattcatgcttttttttttttaaatctggcatacagggagatataaatgattatggagatattatttttcaattattgctttaaagtaaatattagtttaaaaaataggttttgccaactttttttttctaattgtatttaagagtaaaccctatgatgtatttaccattaaaaaataatttaactttttctttttttatctctcagccacccccctttgaatgtattggaacaggctactattaaacagtgtgtggtgggaccaaatcatgctgcctttcttcttgaggtaaattattcactctaagatacagaaatgaaaaataaactgttaaaatagaattgtgcatcattgtatctcttccattataacaggaaaacagcagttacttgaaagttatcttgaagagctcccagttctctttcctcctctggcccagagaaagcttacatgatttgccagagtgtgaaactaattagtaacagaataggggagtctcctaaatccagtcattttcttactttgaattttgtcagattg

SEQ ID NO: 130885 - DNA, 1948 bp, Homo sapiens
tagcctttttccctagctatagtggctggcaggtgggaccaccccacgtgatagtttgaatttattgatatcagtgataacgtgaaacagttggcatgagaagcagcgtttaagaagtgtcagtgtttgtggtatggtgcaagagttgtttaaaagaactgtgtaaaaattgaggactgactgcctgtttacttaagaaagtgcatgataatttaactgcggaccatgttctgtggttagagataggttgtctttttagaaaggtgcttgtctctaccatctatatagtacacaatagttgctccaaaaaaaaaaaaatggtataggcaagaccaccactccaagacttaggctttaagatttagatggtttgcctttggagaaatgccagaaatattcttacagtatttctttttctagcagaatttatctggtcacagattttttacatgtactgcatttttgttttggcaatacctgctttctccaacatggatgacaagaggtgaatttgaagactttttctacaggagtctgtgatttagtattgtaggtaaccttcattgactgtatctgttggttctttgcatgaattattaagccctttacttcaaaataaaattgtatgggtatgtaaaagttttattccatgagtggatatccagagttggggtgaggtggggtcactttataggcagtttcctaatatgattattgagttacttagtgtttttttccttccatggtaagtgatcttttaagagttatatgggaaactatcttaaatctgtatattcacactgctcacgtatttaatttgagacggaagacctggagagttagtttttttgagattaagatcaggaacattttctgcctctgaaataagttacgtaccagtaatgtactttttttcgttgttggaactgtatccagaaaagcagaggggtaaggaaagacttggcaagttgtattctgtctttgcttagagtctgtgaagacagttcggatagaaacacaaatgactagatatgagagaatttgtagacttctgtaggaaggaaattacaactaccaggaaaggttcatggaggaggtggcatttgaactgggtgggaaataagtggaatgagactgaaggaactgcactggtggcagatgatgccacttttgccattaacgtgattgctgagagtcatgaaacatgagtggatgtaccttgtttaacagttccaagtatatggaaaccatcaccttgtagagtatgtgatgtcagaaatacctttctgtctttgagaattgaaacctttgaaggtttaattatacgtttttttttttgctttagaaattctgcaagaaaggatctgtcaggtttaatccagtttaggggtatttgaacatgcagatatgttatatgttagagttaggcagagaattatgaaaccgaagaacctgtacttagtgctgttgccagttgaggatcagtgagaagataaattacctttgaaattgtaatgttaaatttggggagaatgagactgaaattagaggggatttaaagtatagcaatgaaatatgttggcttctagcaagtaccgttacactgttttcctgtctctgttaattaacatcagtttgctgttaccttactttgttgctttaaacaaaaatttcagcctctagatctgtaaagtgatctatacatttaaaggaatgaaatagtttatttaatcagaatatagaataaatgtagcaaataggagtgtagagtacccaaggattgtcagaagctttttgctaacctattcattgtgtgttacaaccacctcaccaaagttcacctgtctacctatctatccttgaatgagattaaatgctattatgaggttattttctttgtgtttttttttttttagacggagtcttgctctgtcacctaggctggagc

SEQ ID NO: 130886 - DNA, 2445 bp, Homo sapiens
aaatgcctagtttagtctggagtgaagggtaaattaaggtttcccacagtttgtttcagtgtaggcctgagactagtagctatgtgtgcagaaggcagtagggatatagttattctgtcagtctgtctaatatctgtatgtcacctacctacctacgtacctgctttcttttttctgacagtgccattcagaagggatatggttattctaaggctgagggaatagttatgtaaacaaaaataaaagagtagtttgtgagtatgatttagttagggaattgtgtttggagtacaggctccttctggaagagagagatgcgattagagtgacggtagtgaccagaagaaaaaaaaacgctgaaataaaaactcgtgtataagaaacaaggagttacagtgtgttcacagatttctttttccaagaattcccagacttagctttcattccctggatcctcaagttcctagcagatcttaggaatcaaataaggccctatttagtttgagaaccacttcaagccagagcttggcagagttgaagtagcaatatagtgagctatccaaggatgaaaaatacatttcagtaatattgataaatggctgccatttattgaacacttaagtgcctgctctttccaaggtatattacaaaattatcttgaatccttacagcatcactgctagacaagtggtagttctatctgcatttaatagatgaagaaaccttccatgcctctgggatgttaaaataagctctaccaaagttccagagccagttcacagtagagatggaatcaaacccaggtttctgtgacactacagcgtactcttcacacctcaccaagctgcccctcacaagagagtaggtgtgatgcctggggctgatgaaatggcagcttaggacgtaaagtgaccatttcaaaggcagcaaaactgcgatttcatctttgacgttaataaaacggcaacaagaagccatctcagtaaatctcgtacaaagaaactctccagaatctaatggcatcaagatcctcgatcaggaatataaccccgattgtcttgtttctatagagaaatcagatttcatttcaggtattttatttcagtttacagttctttctcaaggactgaataacttaccaaatagcagtgtttatactatgaagtacatcagctatctcttgagatattttatttgtatgtagagttaaaattggatttgtagtaatttgaatacattatctgcatttgggagatgctttacggaatgaagtcacaggtattcagaatgtggatggtctatggtgaagaaagcctagtatattctcttgaaattttggtcggatgctacacttttttggtcaggagccctgaagaagtctttcggtcttatctgctagcatagtttgattcttgtatgaatgtatatatagtcttactgttaaacaaatgaaattaggtaagacagaaggacttatgaaattattaagaataattagtgtataaaggccatatcttgaatcttttcttaccaaatttcttcttgtttggcatgtgcattcttttccttttcctgtttcgaacggagctgaaaataacgtgattgattttgctttaaaggtacatgactgggctgggtgcggtggctcacacctgtaatcccagctctcagggaggcaagaggtgggaggacagcttgagcccaggagttcgagagctgcctgggcaatatagcgagaccccgttctccacaaaaaggaaaaacaaaaacaaaaaaggaacatgactgattgtgtgtgtgtgtgtgtgtgtgtgtgtgtgtgtgttcagcatttcgtttttcagagatgtgtttatctttcaaatggccccagtagtttgggattttggtctccttttcacttaattaggaaaagtgttatttgtggtacaatataagaatttctaatcagagtatttttcaggttagaggaagaaattggttgtaggtatacattttaacagtttagctaatgaaatgaccatgaataatgtaatttttctctagtttgcagagcatttttctctgcaaactagagaaacatgaattttctgagtttaatagaaatctttttgacagtttcaactaaaactgataactaaggggaatagttagaagttcacattaaaaaagtttatatccctttatgaagttacaatatttatttagaaacttcattttcttctttgaatgcatcttgaaggtgaatgttcttatttagggtaacatgaatgcattatatataaactggcatttatcatcttcataagcattaataaaagtgtaagtcctccttacaaactatgattcaagaagccaacagatgaaacttacctcacaaaaaccatcttttgttttgtctttctgtgttttgttttgtcttttgtgtaatttggggtcatttaa

SEQ ID NO: 130887 - DNA, 1253 bp, Homo sapiens
catataccaatatttatttagccagaatataagttattgagccttgtatttagagatttctgatttagtaggtttaaatggggcctaagaatatgtctttttaattgttccccagggatttcgatgatgagccatatttaggcactcttattttagagagtacacattacttttgcatgtgatgttacctatttcttaaaacaactttgtgaaacagataaatttttgacagaagtgggaacatgagagcaagagatgttaaatgaggtatccaaggttacacggtgtcagagctgggagtcaaaacccagggcttttgattgactcggtaggaccagtctggcactaattttgccttttcatgaaagctacaatgttgatgattgcccaaaccaaagaaacaatttaatgtgtatgtttatatccaattattcctattctggtaagcattaggtgttagaatattttattgtattacttgccattggaagacctccagtgatcggacttcctataattttcatgttaaggcacttcaccagttagattcctgttaccaatgtaaggcgcttagacagccaggctctgcactataataggcttttatctgtaattttgcttcctgataagctctccttcccccttgctattgcttccagcttccttttggtccctgtagcacatttccctaacaccagcccagatacaaaccgcaggggagggagagggagaggagaaagaagattgtcttcttaggcaagaggactgggagagtatcccacaactatgaagtattgagtaactttcctgtttgtctggtaaactctttctggggctaattctcagagtttcagaaattcctcatactcttatagcaccatttgaattataatgtagcctatgggggattattttgcaggacaacattcctttgttgtgttttataaaacctagtctgctaatattggtcacagcagaatgttttaaaatcacttttattttttattcattttatttttattttttgagacagagtctcactctgttgcccaagctagggtgccagggacacaatcttggctcactgcaacctctgcctcccaggttcaagtgattcttgtacctcagcctcccaagtagctgggatcactggtgtgcaccaccacccctgactaatttttgtatttttagtggagatggggttttgccatgttacccaggctgttctcgaattcctggcctcaagtgatctg

SEQ ID NO: 130888 - DNA, 2058 bp, Homo sapiens
tggagacttcgattagccagagtccttaatatggtagctcagagtttcaaaggcatgcatcccaagaaataaaaccaggctggaattcctttttgtgacctagccttagaagttttgcagcgtcacttctgcctcattacctttgcaagaagcaagtcatcaggctagcttatatatgaggaagagtaattagactctacctcttgatggaagaagtataaaataatttatagatttcttttaaaccactgtgatcgttaagaatagtgataatagtaaagcataattatttagaaagagatttgggtactatgaatgttttagaaaagactgataccatgtatttgaaaacaaattataaggacttaacatttatggcattggacagaataatacatattatggaagtgtaactactaacgaacaatttcctgagataattattgaactcgacagttggtttaacaccacagaggcccccttaaaagcatctaggtcagaatcacaaggcaagtcaatataaatgtgtttctttgacgtcactagtattacttacagtcagttgattgattaggtgcattgtttaggaaatgtgaaatatttgatgtattctgagacttaaagattgaaatgtgagctagcgattagttctttactatgactctgctcagactcagggtgtattttctatgaaatagtattttgtaaaacctactcaggatcgttttgtagtctattataagcgtgatgattgggtgttcatatgcatatgtgagatgtgccaccctcaaatcttgttatgacgtcatcagcacgttactcttctgatacgaaaaaaagaagaaccactcggcttcatcatccgtttaattagtaagctttaggactgaatgttttctattttcagagacatgtctgcactgaaatactactattgtgtgtattcatttaatagtttgcgtgcctactgtgtgtcaggcattgtactggggactgggtatgtagtggcattctaaagaaatcttaatgccacttccaaaaggaaaactccaaaaatcttttgggtgtggggcattattgttgaaataaatgtgtagcttgccagtatgattaatacgaagaagacacatctgtttgcatgtaaagtttattggaaatagggcttattatttcatagctgtgcctaagagagtattttgatattatttgtggtcagttttcaaggggttattagtcatatgtgccatttttcttgggtattttgcagtttttattgaatatgtgatgaacttgcaggatcttttgtgtgaatgtgaaaaagagcgtgtgttttacacatgttttatacatcacatattttgtttctaatcaaaagaggccttatatctgaaagccttcttgttactcataagacaaggatgtgagactagacagtttttaagggtctgcctaggtctaacagaggggaaggaataagttctggatgggaaagttggtagaaatgttagcgaagtgtcaaattaagtagaattagtttttagattttcttgaagccaagacaaaaacaatggctaaaaaattacaaagctcagtgtatcacagaggagcttttccttccttccttccttccttccattttttttttttttttttttttttgacagagtctcactctgttgcctgggctggagtgccgtggtgtgacctctgcttcccaggctcaagggattctcatgcctcagcctcttgagtagctgggattacaggtgcatgctaccacgcctggctaatttttgtgtttttagtagaggtgaggtttcgggttttactgtgttgcccagactgatctcgaactcgtgggctcaagtgatccatctgcttcggcctcccaaagtgctgggattacaggcatgagccaccacccctgaccaggaactttttgttaatcatggtttgatataaatgttggagaatcttttacattagagatattttaaaaacctaatggactgtgagttttataatcgatacagaagttttatttatgtgattatgtga

SEQ ID NO: 130889 - DNA, 1055 bp, Homo sapiens
tcaaagttcacatgctgcatttggtttcatttgaattttatcgtggagtaatttttacaaacatatttgtggtttttccaagggctacatgtaatcatttgatgttgacattctatgttaaagcacaattgtcactttcagttttcttttctttgagacaggttcttgctctgctgcccaggatggagtgcagtggcaccatcactgtacgctgcagcatcaacctcccaggctgaagagattctcccactttggcctctgaagtagaggtggggtctcactatggtgcctaggctgatcttaaactcttgggctctagggattctcccgcctcggcctcccaaattgttgggattacaggggtgagccaccacacccagcctcgatattcattgtcttttaattggtctgtgtatatgtttctttgtttctcactgacgtgtatgtacgttttgttgaatttctcaacattgctttccctagacctcatgaagtcttgtaccttttgcaagattcgcaacttcattttgcagatattttgcgttggactacatggtattgtcagattaacatcctatgactagcagtggcttagcttcaaaagatgtggaagcaataggccagtttgtgcacttgttaaatttacagggatgttcggagaccatttttccaagagattaatggttggtgagggttttggctttgtcaacttttgtttccttatgcactctcctgactgcagggatgaggaaataacattctatcagtatacattaccgggtgtgattgttgagagttggcctgtcagttgtatatataaaagtgtggctttttttttttttttttttgagacagagtctcgctgttgccgaggctggagtgcagtggcacgatctcagctcggccttccgagtagctgggattacaggtgcctgccaccacgctaggctaatttttgtatttttagtagagatggggtttcaccattttggccagttggtcttgaactcctgacctcaagtgatctgcccaccttagtttcccaaagtactggg

SEQ ID NO: 130890 - DNA, 1508 bp, Homo sapiens
catgggatggaccgtcatcaggagcagcaaaacttgaagaccactgagtaaaaaggctcttttaccctcttttctttgtcttaacattgattgatgatggcaaatagggccaaacttgccagttcttcactgcctccaaccttccttttccccttagacttacaggttttatacctgtctgtttgagaatagggtattttcctgttccttgattttgtgtgtctctctctaagctagagtagtttatttttgttcgcttctttttttttaaccacgaaattggaaaaatttagattaagttacataaattctaggtcctctacacaactgtgagatactgaaaggatagctttttaaaatgcatttcggtgcttgtaaggtcacagtctagttgggagaaatgaggctcatccatagatagtagcactatgaaagactgctacaagaggtagagtttgggctgtgtaaatatttgccatgctattgcttgcacagagtttgagaacagtgttagattagtttttcttgttgagtaaatgcttgtgtgcttctcatgtgcaaaaagtgtgctaggccagggatagctggtgtgtttcaattgccacaccaaaccgtcctgaaacttcgggttgagacgtgtttggaactttttctggctcagggagaaagcttggagaagagtgaggttatagattagcgagctcagggagtggcatcaggtgggtatgccatgtattgtttttctacctttctttttttttgagacagggtcttgctgtgttgcctaggctgatcttgaactcctgggctcaagcaaccctcttgcctcagcttcctgagtagctgggattacagacaagtagctaggattacaggtgagtgccactgcacctagcttgtttttctaaccttttattttgaaataattacagactcaaaagaagatgcaaaattggtacagaggggtaccatggatccatcacccaacttccttcaatggtaacatattatgccagatatttttggcatccatgtcaaaatactagagatagagacattttccccatgtgcatttttgatttttttttttttttttttttgagacagagtcttgctctgtcacccagggtggagtgcagcggtgccatctcggctcactgcaacccccacctcctgggttcaagcaattctcctgcctcagcctcctgagtagctgggactacaggcgcctgccaccacgcccagctaattttttgtaattttagtagagactgggtttcaccatgttggccaggctggtctcgaactcctgacctcgtgatccacccgctttggcctcccaaagtgttcggattacaggtgtgagccactgcacccagccaaaaattgtttaagataacatagatttgaagacatagtttaaagaaaactttgcctttttagatgtgattgtaaattgatgagatataggctgggcataatggctcacgcctgtaatctcagcactt

SEQ ID NO: 130891 - DNA, 2925 bp, Homo sapiens
aacaaaaaaacaaaaaaatcaataaaaaaaccccccagacattaggttgtgtgggatggagcatcatattaccaaatcagtgaaaaatctcaccatttgattattgagattgttacctaaaagcaatactaaatgcattatgccaggtgcggtggctcatgcctgtaatcccagcactttgggaggctgaggtgggcggatcatctgaggtcagaagtttgagaccagcctggccaacatggtgaaaccccatctctactaaaaatacaaaaattagctgggcatggtggtgcatgcctgtagttgcagctactcaagaggctgaggcaggagaattgcttgaacctgggaggtggaggttgcagtgagccaagattgcgccactgcactccagcttgggtgacagagcgagactccatctcaaaaacaaaaacaaaaccaaaaacaaacaataaaaaaccaatactagatttattgtattggaaaagtacagtctggcctaactaaaatgtttaaatgaatttgcttaagtaagattaacagcagggtgtagaatagccaagcaaaatagaaaatcaaaacaaaggcagagcaattttataaatcaggatatctgtgactgaatcataggcctaggaataaacagacacttgtgaagaaaattacaggatacacaggaatacgactaggaataataggtgaaattaggaaaggtcagggttttttcccctaacaattagaccattaggttatttaggaaatagtttccaaaggaaaatttaattgctgaagactgagttacatggacgtagatcttataaggtatattaaaggaagcaattttatgttacaggaggatgtacttaatgtctcccctccctcattttatcatacatatttattttgttttttgagtctcgctcttgcccacgctggaatgcagtggtgccattttggcacaatcttggctcactgcaacctccgcctcccgggttcaagcgattctgctgcctcagcctcctgagtagctgggagtacaggcgcacgccaccatacctggctaatttttgtatttttagtagagatggggtttcaccgtgttgatcacgctggtcttgaactcctgacctcgtgatctgcccacctaggcctcccaaagtgttgggattacaggcgggagccactgcgctcgcccatattatacatatttctaattaagaaaacagactctagttagcatccatgtttctgtcattttgactccttggcattctggtcatgtgaaaatagcctcttctcttggctcactgtggttatgaattgttggtttatttttagaactggtttttaagttttcccctgagtattatttttaagccttttattttggaaaattttaagcatatacaagagtagagagaatagtatgatgaacaaccatgttcccatcacacagtcttaacagttgtcaactcatggccaatctgatttcaactctctccccatttattctcctctatcaggtaatttaattgctgtatcttcactatatatttcaaaatatgaagcctttaaaaaaaaacctgaaaaaaccttaataacaaaattgcccagattttcctgttgtctcataaatgcttatttctgattgacaattttgataattttacttaataaagctgattgggttctaacatgttaaaaaatttgacatttgtagaataaccttagaatttggattgtaaccttagaagaaggggccactggggaattatttagttccttaaagctcagtgctgtaactttttttttttttttttttttttgagatggagtttcgctcttgttgcccaggctcgagtgcagtggcgtgatctctgctcactgcaacttccgcctcccgggttcaagtgattctcctgcctcagcttcccaagtggctgagattataggtgtgagccaccacgcctggctaattttgtatttttagtggagacggggtttgaccatgttggtcaggctggtctcgaactcccgacctcaggtgttcacctgccttagcctcccagggtgttgggattacaggcgtgagccactgtgccaggcctcagtgctataacttcttaacctccggtatgacagcattttttgtcagcagtcacttgtaattgttagataaggatgataagacaggattcttgaaattcagtgatttttccatggggtcactttgagaaataagattgtcatgtgaaaagtttgcagcattttcatgaactaatagacaggtgaggtattagtcaattgaacttggctataagaaattattctctgagatcatatttcttattactttcttgagacaatcagtgtagtggtaacaaaaccccttccaaattagaaatacgataaattcttagataaccatgctttgtaacattgtcattttgtcaggatattaaagaaggtattaatatttaatgttattttacttgtaaatacacaatttatgttacttgcacagctaaagtactgttatttgttcaatttctgacagtatcacttaataaaatgtctttgactctttcatctttattgagttatactttacattcagtaaaattaacccattttaggtgtacagtttgatgaatttcggcaaatgtgtacagttgtgtaatcaccaccacaatccaggtacaggacattttcatcaccccaaaaagttacctggtttccctttgtattttcagtcacttccccctaggctaggtcctggctacctagcaaccattgttctgctttctctcactgtaatgcttttcctttttgaatttcatagaaatggaatcatgtgtctgttttcttttgcttagaacagtgcttttgcaacagatctgtgttgcagcatgtagtagtttcttc

SEQ ID NO: 130892 - DNA, 1840 bp, Homo sapiens
tgaattgaaaccattcagtgctcagatactttggacattttgatctcctttccaatggatttcttgagttagtactacgttcctgcttaaaacattgtctcagagaaacagtaaaacaatataaagaatgtggttcgtcgagcttgaggggagagctgaaaggcctgcctcactaatagcctggaaagtgcctcactaatgagctgaaaaaataggcacagagatttacagtgtttatgcagggatacaactactgagagacagctgaggtccacctgatgggtcttctgacttttctttaaagtccagggctccattccacttcacgtggcttgtattccagaatggttctgctgtctcagacatcccagccttcaggcagtgtggccacctgtcttagtgttttgattccgttttcccctcaactgctctttccagggctcctaatgggtttatgcctttttttcagaggctgacgctcttaaccttttcttggtactaggttaggataggtcttcttaaggtgatgtggttatggcatttattgtccttgtcctgaattattcctcaagatgcaggttagttacgaaacaaaccagttcttattgcttgtctgtatgtggaattttcctgtgagatttgccttttggcattacaacgtattgtgcagtcataaacagtctttattgagattgtcatatcaaaaggatttttctctaagcttagagtttccctttcaggtgtcataacacaaggtaagatactatagacaggagtttcaaactctgcgctggtagcctagtcatttaacctcttagaaccccccacatcaatctctgaattaggtgtagcactctcctcaaggtcagggaggaacagttgagacagtagatgggaaaagatcaatattataatgtggattctacggaaaacattacgaagagatggttacttttaactttttacgtgttgcctggtttccagatagcaaagcaggaactcaaaagagttgccctagaatatccttagcattcagagcagaatcgactcttagttctagattagtacttctcagcttggtgtgattttgcaccctccacacacaaccccctccccttattgggcagtgtctggagacattttttattgtcacagctggggcattgctactggcctctagtggatggaggccagagatgctgctaaacatcctataatgcataggatagcccccacaacaaagaattacggggtccaaaatgtcagttgtgctaaggttaaggaagcccatcctagatgatcttcaatgcatttggttgtaaaaataagtgaaaatgacttttatgaagaatatttcaagcaatatacgttctttttttttttcttttttgagacacagttttgctttgtctcctaggctggaggcagtggccggatctcggctcaatgcaacgtccacctcctgggttcaagcgattctccttcctcagcctcccaagttacagacgcataccactatgtctggctaatttttgtatttttagtagagatggggtttcgtcatgttggctaggctgctcttgaacctaacctcaggtgatccatctgcctcagcctaccaaaatgctgggattacaggcatgagccaatgtacctggccgcaatatatattcttaatttttaaaacatgactgtttaaattaagattaaggcccggccagtggctcatgcctgtaatcccagcactttgggtggctgaggcgggcgaatcacttgaggtcaggagttcgagaccccttagcctggccaacatggtgaaaccccatctctactaaaaata

SEQ ID NO: 130893 - DNA, 1584 bp, Homo sapiens
gaagcgccatgattattgttattattattaaatttgagcccctgcagtgaggtttgcctgccccgggaggggatggattcaagcgggggtggggaagtgcattggattccctttactctcctcctgaaatggtgctggcagctcctgctactagcccctgtggtgcgagcttttttgtttccttttctattctaatgatagtgttttcctgagttgtaatttgacagctgaaaaccgtgcgtagagtgtcaaaggaaaactcttacgtttgcagttcgcaatgctgcttttcttaacacgctgtaaatttctgggttgggtttgctatgggcggaggatgaattatgattttattttatgttttgtcttttataggctgttttggtttggatttctccttttcttccgccaccgttccttgccagtttaggatattgaattgcagtgccgcatgctctcagggaactgagataaggcaggaaaagttccttcactgttggaaaacagactcaggaggttgagggaggcctccattaaagcatgtcttagaatctaagactcagatctaatgatgggctaaatgtttacaggatcacaaagtggagcattttaagtcttcctctctcccagtacttcactgctctctacatttcttttgcgtatagaaggccatctggtcccaagtttagaagttacatagaatttttgctaagtgaccgggtgacttaagttgcatgatgccctgtttgtcatgcgcttcccagagggaggaagaggcctaacttgctgctgagatactggcctcttgtgtcagtgtatctaaccgcctcaagtggagcagacagcttttaaatccagagctggcggtttagtttctgcacttggttcggatttgcctaatctttgctgtagccatattgtatttaacatgtttgggaatcttttgaaatacttactgaaaatactaactactcagagttgtcacatagttcctttaaattctgaaataactttttagttatttaacattttgttatgtggttcttagcctgactttacttcattaaagatcttttggagacattaacataaaattttttggtaaaatttagaaacaggctagtagtgaggatagctctacggtcattaacagaaccatgttggtagtgcttgtcttgttacttagaaaaccgcaccagagagaagagaggtagggcatgttttctatattagtcctaactttatgtaccaagaaacctgactagcttactcagttggctgtgcatgccaaaacctattttgcggttgtgttgggcactttgattcatttttgagcattccttttgcttcagctatttgagaaatttacaagtaatgtatctttttaaatgctaactcttctttttccattcctagtataaacaatcagctttgtttgattcttctatcattatacaacattaaaaatatttagatcatagtgacttttaatttcatgaaattaggaaaaaagtagacttgagtcataacatgtgcatcaaggtggcagatatttgaaaaatagaaaggtgccgtaggtgaaat

SEQ ID NO: 130894 - DNA, 1186 bp, Homo sapiens
tcccggagccccgcctctcgccgccgcgcccccgcccgccggtctcctccctcctcctcctcccgtttgcccctcccccgccgctccggagcggagcctgcgagacggagaaactggggcagaagtgaagatggcggcggcagcttctcgctagtgacgcgcggtgcgggctcatctccttcccctccttcctcacctcccctagtccggaccccgtccgccgccgggaccagaccgtccccgtagcccgcagccagcagccgcccctctcctcccccggccgcccctctcccaacgcccgtctgccgctggccggcggcgcgcccctggtcccggccgcctgcctcgcactccgcgctgtcgccgggggagcgggtggcgtgtggattcgccctcctgcccgcccctccgggccgcggacacacgcccggcagggaggcggcggcggcccctgcgtatttgcttccctccatttggggactgggaggcggcggcggctgtgggttttggggaggggtagagggctggggggcgggcgagagcgggagggggccgccctcgagtggaggacgagaaggaaagcaccatgacgtccatccatttcgtggttcacccgctgccgggcaccgaggaccagctcaatgacaggtaatagggctggcgggtcggcgggcgcggggggaggggcgcccttccctccctcccctcccccacgggccgtgccgggcgggtgcgggtgtttacgcgccggccggccagctggggtggggtgcgggggtccttactgcctcctgctaggctccttccggggcaaacttctcatcccgggggcagggggccgcggggggagcgcggtgtagacgggactcgcggtgtagactggagagcgctctgtaaacccccttccccctcccgcaaggagcggcgttgaactcggcggagatgggggggtggtttctggctcccggggggcaggcggtaattactgcccggccaaggcccgaggaatccatattagtcaaagttgaattgagacagacaatgcggatgggggatggtggaggtaaaaagagagggaagaggagaagcggggccaggggccccggggtgggctgggctgggcttgtcccgggcccccggcagctgtgtccggtggggtggtctggacctggggatcccggggtcg

SEQ ID NO: 130895 - DNA, 1014 bp, Homo sapiens
ttgcagagatcagtttactttcaacacgccttcatttctgttatctctattatctcattttcttctcccagccgccttgcaggaaaggacagggtattattaccccatctgatggtacaaagaagcagagccagggctcaaggtcacatgcctgagtggcagagccaaacccgggaccaaagtctaagctggcacctttgctcagaccttggacagacctgggggaaggcagcaggctacatggctttcaaacttgattgtgtttaccactcacccaggagtgcgtttttataaagcaggtccccagacactcaccagagcattctgtagatttagtgtgcctgggaatctgcgttttaataggcacctctgattgaagtgaagagaacattttaacttactcctggagatctcacccctttatgtggtttgcaaaaatgagtaattttattgctgagaagtccttagaaaggaaaattatacctgaatccctcaggccctagacctcagctgcactgcggcccccttcagagtgattaacctgctgaaaggaaataaatatgccctaaaaccctaagctcactgcctggcaggttggtgattctcaacaagcgtcttctgctgggcactgtggctcacgcctgtaatcacagcactttgggaggccgaggcgggcggatcacgaggtcaggagatcgagaccatcctggctaacacggtgaaaccctgtctctactaaaaatacaaaaaattagctgggtgtggtggcaggtgcctgtagtcccagctactcgggaggctgaggcaggagaatggcgtgaacctgggaggcagagcttgcagtgagccaagatcatgccactgcactctatctagcctgggtgacagagtgagactgcatctcaaaaaaacaaaaaaacaaacaaacaaaacaagcatcttcttctttcatctttctcttcaatgccaataacctttggctgcatattcttatcctaattttgagttttgccc

SEQ ID NO: 130896 - DNA, 2259 bp, Homo sapiens
attgatgtgcttttgtttcagtctctcaaatgatgattctgtagatgtctgagtagttactttaataaggtatctttaaagcctttgaatcatagttaaagtcaggaagtcttttcatttttggctttttttaagggatgaaaaaaaactgctctgttgcccaaactggtctcaaacttctgggctcaagctatcctcctgccccagccttctgagtagttgggactacaggtgcctactactccacccggctgccttatttcatgtggggaagagttttgtaaatgtgatcaagtgacaagttgaaattggagcaatacatatctcatattcatttgacagtttgatttattagcttttattatttaaaatgtatcttctcatatacttttagacagaattgaacatataatttacggcaatcttatgcataataatgatttgtatgtctttgttttaggagaaaagcctttcagctgtagctggaaaggttgtgaaaggaggtttgcccgttctgatgaactgtccagacacaggcgaacccacacgggtgagaagaaatttgcgtgccccatgtgtgaccggcggttcatgaggagtgaccatttgaccaagcatgcccggcgccatctatcagccaagaagctaccaaactggcagatggaagtgagcaagctaaatgacattgctctacctccaacccctgctcccacacagtgacagaccggaaagtgaagagtcagaactaactttggtctcagcgggagccagtggtgatgtaaaaatgcttccactgcaagtctgtggccccacaacgtgggcttaaagcagaagccccacagcctggcacgaaggccccgcctgggttaggtgactaaaagggcttcggccacaggcaggtcacagaaaggcaggtttcatttcttatcacataagagagatgagaaagcttttattcctttgaatattttttgaaggtttcagatgaggtcaacacaggtagcacagattttgaatctgtgtgcatatttgttactttacttttgctgtttatacttgagaccaacttttcaatgtgattcttctaaagcactggtttcaagaatatggaggctggaaggaaataaacattacggtacagacatggagatgtaaaatgagtttgtattattacaaatattgtcatctttttctagagttatcttctttattattcctagtctttccagtcaacatcgtggatgtagtgattaaatatatctagaactatcatttttacactattgtgaatatttggaattgaacgactgtatattgctaagagggcccaaagaattggaatcctccttaatttaattgctttgaagcatagctacaatttgtttttgcatttttgttttgaaagtttaacaaatgactgtatctaggcatttcattatgctttgaactttagtttgcctgcagtttcttgtgtagatttgaaaattgtataccaatgtgttttctgtagactctaagatacactgcactttgtttagaaaaaaaactgaagatgaaatatatattgtaaagaagggatattaagaatcttagataacttcttgaaaaagatggcttatgtcatcagtaaagtacctttatgttatgaggatataatgtgtgctttattgaattagaaaattagtgaccattattcacaggtggacaaatgttgatgttgtcctgttaatttataggcgttttttggggatgtggaggtagttgggtagaaaaattattagaacattcacttttgttaacagtatttctcttttattctgttatatagtggatgatatacacagtggcaaaacaaaagtacattgcttaaaatatatagtgaaaaatgtcactatatcttcccatttaacattgtttttgtatattgggtgtagatttctgacatcaaaacttggacccttggaaaacaaaagttttaattaaaaaaaatccttgtgacttacaatttgcacaatatttcttttgttgtactttatatcttgtttacaataaagaattccctttggtatatggaatggtcattgcatttcttaaaaaccattctcaactctcaccttgacattgatcacttatattatccaaggacttagtgtctgaatttctctaagggtctcattcaaatttagaactgtaggagtatgtctttaacatgaatccatttagagagtatacaaagtgaggccaaatatctatttggtg

SEQ ID NO: 130897 - DNA, 1648 bp, Homo sapiens
aaagacctcataccatacctgtaatatttaagaagataaattttttgccgcactcttagtttttttgcccgactccagttgcaggtagctactctggaaagtctatataaaatactccttttcttcttagccaaatacttctccttttggatcacaaatgcattgataattttcgtcttagtccccttaatggtagtaggtgtgcctctctcccatgaacggatatcgctttatcagtgttaaagtctaaatgttaacagaaaaaatgaggaagattttattgccactactgtgaggtttgggttacctacctaacaagtgtagctgaacttccttagtatcatagtaagtgtgagaggaaaattatttctgattttaatttggaaagttgtgtgagttgtaaaaaaaaaaaaaaaaaaaatttgctcatttttctgtgtgtcatttggatgacaaaaaatatgcttataagctttcctcttttgtttttataggaggaaagaatggaaatgatttctgaaaggccaaaagagagtatgtattcctggaacaaaactgcagagaaaagtgattttgaagctgtagaagcacttatgtcaatgagctgcagttggaagtctgattttaagaaatacgttgaaaacagacctgttacaccagtatctgatttgtcagaggaagagaatctgcttccgggaacacctgattttcatacaatcccagcatttgtaagtattattgtttttaagatagacgtaaattatataatttcttaaaatttatataataaactgtagatttctcatgctatgtatttcccttttctttagtgtttgactccaccttacagtccttctgactttgaaccctctcaagtgtcaaatctgatggcaccagcgccatctactgtacacttcaagtcactctcagatactgccaaacctcacattgccgcacctttcaaagaggaagaaaagagcccagtatctgcccccaaactccccaaagctcaggcaacaagtgtgattcgtcatacagctgatgcccagctatgtaaccaccagacctgcccaatgaaagcagccagcatcctcaactatcagaacaattcttttagaagaagaacccacctaaatgttgaggctgcaagaaagaacataccatgtgccgctgtgtcaccaaacagatccaaatgtgagagaaacacagtggcagatgttgatgagaaagcaagtgctgcactttatgacttttctgtgccttcctcagagacggtcatctgcaggtctcagccagcccctgtgtccccacaacagaagtcagtgttggtctctccacctgcagtatctgcagggggagtgccacctatgccggtcatctgccagatggttccccttcctgccaacaaccctgttgtgacaacagtcgttcccagcactcctcccagccagccaccagccgtttgcccccctgttgtgttcatgggcacacaagtccccaaaggcgctgtcatgtttgtggtaccccagcccgttgtgcagagttcaaagcctccggtggtgagcccgaatggcaccagactctctcccattgcccctgctcctgggttttccccttcagcagcaaaagtcactcctcagattgattc

SEQ ID NO: 130898 - DNA, 1303 bp, Homo sapiens
ccacgtggggctggccctccgcagtgcctgggcgcgctgcagtcgccgcgcctccccggccgcggcaccgcctctctaggcaggggcgggggacgaggggcaaggagtgggcgaggggtgggcgaggggcggggggcgtcactcaatcaggtggcctctggagttccccggggcagggcagagggaacacgctgccggggattgtgtacacgctccactgacaccagcttcacgctgccgggcagtcgccgatcacgcgtggccccgcgagcccattggccggcgcctcacacacctttgccgttgattggccggcctcaggctccgcccccacccccgcccgcggcgcggggcaggctgagcggctacctgaatggggagggggcagacggcgctgagcgcggcggcggcgggagcggcgtcgagtgtctccgtgcgcccgtctgtggccaagcagccagcagcctagcagccagtcagcttgccgccggcggccaagcagccaaccatgctcaacttcggtgcctctctccagcagactgcggtaagtcatttggggatgcccctgtgcttcctcgcctggtcttgtctggggggccaaagggggcgcgaaccccgagccccggacatcagccatgcctgagaattggggctgcagcggagtcgtggggaaggaaagggcttcctgcctgcagactatgggcattagtgagggcgtgtgtgttcgggagggggtcgaaccagggggctgggatcttcagacagggacaggggtcttgctctagatgtactgaggggaagggacaactccgcatggagacccgagagggctggtgaggaggaggatgacgagcgggggaggagtggggagggggccgttgccctgcagcgaggttggggtacagtgtggaacgagagtcgcgggagggacaagggggctaccctcacctggtaccgaggagagatgcccggtctggctcaggaacgcgagccaggggaggaaggggctgctcgcaagcactcgggaggcggggtgtccacaggagaggcgagtgggctacccatcctgggggtctgaacccacgcttggaagacgggggctgctcagcagatagctcggggctgggggaaggggcgcctgtcgtcggagcggggggatgacacgagggcccgccgacagccctgggggacgagttgctcccccagacgtctggagggggactcttaccccaggggcaggtggccgccttctgacgactccttggaagaggcggggagccgcctctggggcaggagggtggga

SEQ ID NO: 130899 - DNA, 1012 bp, Homo sapiens
ttttttctaatgtatctaaggcccaggctagcgaacaacagcaataataatgatagtaatactgttggccaggaccagagaggcccagggctgcggggatgaggagggaatggcctcctgtcaccgcccctcctgagtctgctggagaggcgccagctcagcagcccggcagctcttcctgcctctccccaccccatgtccctgcttctgtctgcggggtgtccctccccacaggtttccttccgcctgggctgtcccatcctgttgacccagcctgagggctggagcagttggccctggacactgtggcgggagaggaagctcctgtatgcccctccggcaggcctaccttccttcctgtcgggccctcccctggggtggcttctgctagaccctccaggccagaaccctgtcccttcctcaggaatgtggggcctgctggcctggctccccagcgggctaagaagcagggagcggtcttgacttgtgagagtgattcaaaacaggaaagaaaagagaaaaggggtaggaggaacagtgtggtggtggcacaattcctagagattcagagaaacatgtttgccgggctcctcagacaacatatccaaaactagaattgctgattctactccttcccggatgcgtgccttgtctccttccagccttcaccttctctctcaaagccctggatctgattgttccccaggacccagcagttttgcctcagaaatgtctctgttctcactttccatttctaccctccaaatgttgcactagatcaatctgtcatcaagtcttgctctgattaaacaatctgcaatccccccacccaacctccacccacactccagcttattttccattgcccaagctccatactgtgactggaatggctttttaaaagtcatgatccaatcataacattctctccttaaaaatgatccatggctcctgttgccaggatatgaaaggccattcagttctgagctatccagtcagcctccaactatag

SEQ ID NO: 130900 - DNA, 1379 bp, Homo sapiens
gatctcagaatcacaatagtaataaacaacaggggtcattttttcctaacttactctgtgttcaggtgtggaatttctgtctcccaagaggaaatgtgacttcactttggtgccaatggacagaaaattctacctgtgctacataggagaagtttggaatgcacttaatagctggtttttacaccttgatttcgaggtggaaagaaattgatcatgaatctctaataaatttaaatctcttaaaccagtaggtgcttaatattttttgatttgattaatgcccatttaaatctcatgggttctattaaaaatatatatatatagggccccaatccattgccatcaaattgcccttggacttttccaaggtatattatggggttttatgcaaaattccaagctaccatgtaactttttttaaccatttaacaaggagggggaactgtttcctaccttctttacatgttgtgcattgttgtggtccagaaatgccaaacctttttaaagatggtgcaactttgagtccttggcttgactatacaggccttgaacttcatggcatatcaactttgccatatctgcaggagagctgttctataagaaatagctcagagttgcaaatatcacatgtgaatgatacggtaacttttaagaaatgtctgtattgtatttgaagactgtttgccataaatctgaaatttgaacctatgtatttcaatttggtatgctaaaaagttctgaattaatgtaaagttttttgttataatattgtaatctcagttcaaaagttaactgcaaatataaaacccaatgatttctatatagtaaattgaactgtaaaggtaacttgtgtgtgattctgaatacatagataaatgtttttattcctcatgttttactttggcttctatctgaaatagaggtaaaattttacatatcagctttatgtgtattaacaatcttgctttattagaaagaaaattgattctgctaaaaaatgctggaagttatatatagaacagtgaaattttggtaaagtccagtatatatgtgagcactgtttccaggacagccttttctagacacttcagttcactagcctcctaacaatttaaaacccggactaaatgaatagattgacaaattaagctagatttattccaagtaaatatgggcattaataccattaaatggaaatactgggttagagaagccacacattgcttaattccttttttcttctttttagagtatatattttagtttcctaacctgtcttggccttaagaagtcttctgaactctgctgaaatgaaaagcatcatctctttgttctttgaacactttagttaactgggtgacttaatattttggggagta

SEQ ID NO: 130901 - DNA, 1099 bp, Homo sapiens
acaatcttattctcttaattcttttggcaacaaaaactattagtaatagctatttgggaccagacaaaatcagctttcatctataattcattggggataatgggagatttagataatgtatccagatttaaacctaccagtttgtcctaccccttaagcgtttaaaataaaatatgcaacaaaatggatgacttagtggagatggaagcccattaattgggttccccattaaatcgtttacatacaagaacacagtttttatactaaggatttgtgtttaaagtcttgtaaagttcatgtctttcacccagatatatcaaatgttagaagaccagtgtgacttcattagataacgtttagtgtatttagaatgtgtaaatttgtgctttgaactgtagtttaataaatgtaaaattgcatcatagtatttgttgacctaatgtaacccttgtatgattgcaataaaattttgtgtagattttactgttttttcaggctaaaactttgggaaaggggctagctagcaaaggtagttttgaaatagatgtgtatatggactgttttgaagggtttttttctttatagcccagttaagttttgtttggctcggtgcatttttcatttatttaattagtaatttaagtaaagtgtttggtaaatcattgtgaagttcagattcattatggagagttgatgtgcagtaagcatgatgtttaacaattttaacaccaaaaatgttaatcctgcataaatcaactgtaataataaataggtgtttctgtatagatagaatgcatagagtaccttagtaaatctttgaatcacaatcttttggctgaaatggaagattctgttaaatactttgaataaacttggggggagggaaataaaattgcagaaaactgcagagcactaaaacttaaagaagggctacatctttatccagaaacctgttgctcttttgcacggaatgtttaaattcagagttgggatgggggttggggtgaagcacacttattatcttcagttgcagtgatttcaaatttaggattttttgttgttggtttgaactgtccccttagtttcttgttatttccaa

SEQ ID NO: 130902 - DNA, 1035 bp, Homo sapiens
gatgaaccagccttcatgtattatatgaatgatggtgtttatggttcttttgcaagtaaactgtctgaggacttaaataccattccagaggttcacaaggcaagttttatcagaaatatcaaaacctatttggcattttataagctgagctgttatttttaagatgcttcccagttttttgaaaaacatcttagaatggggaaaaatgtcctttttgaggatttgcgttcttctggtggagtcccttttttagtttgttgcctttacgtggagttaatggtaccatcgaggcttaagtagcaccctgcccttggctctaggccttttttccatgagcacattggatctgagacagtgaaaatacttatttactcacaaattcaatacctgcgtaagtatgagtaaaaattaaattgtaaaacttttcctacagaaatacaaggaagatgagcctctgtttacaagcagcctttggggtccatcctgtgatgagcttgatcaaattgtggaaagctgtcttcttcctgagctgaatgtgggagattggcttatctttgataacatgggagcagattctttccatgaaccatctgcttttaatgattttcagaggccagccatttattacatgatgtcattcagtgattggtaaggtgattttattttaaggcagatgggatatttgaactgtccttttagacttgctaataagttttaattctgtaatgaatgctaaacttagaagtacagtcatgtattgcctatacagtgtagttacttaatgatgggaatttgttctgacaaatacaacattaggcgattgtatgatggcataacctactacataatctaggccatgtggtatattgatcctaggctacaaacctgtacagcatgttactctgtttaatactgttggcagttgtaatgcagtggcgtttgtgtatcttaagttacttaaacatagaaaggataatacattgtgctatgacatgattgctgcgatgtaacgaggtgataggactttttaaactt

SEQ ID NO: 130903 - DNA, 1819 bp, Homo sapiens
acctgtaatcccggctactcgggaggctgaggcacaaaaatcgcttgaatccgggaggcagaggttgcagtgagccaagattgtgccactggactccagcctgggtgacaagagtgagactccgtctcaaaaaaaaaaaaaatcttaaagccaaggtcccattccgtaagacttccaaatccaactttcttggtactgatgtttagatacgtgtgttttagataaatgtctagcagatgattaattctcatccattattcagaactacttttattgtgatcttttctgttctccttacctcacatgggtcagagggaggctctgttttcacactttctcacataagggccacaaagagtccctgtaatctaactcaagtcaaaccaacaaaaaggcactagacagtaccatcttgttggctaatattgtaggaaatactgttttacattaagaagacttttttttttggctgtggactaatccacagcccataggaaagttgtccatttccccaatattgtcttttttttacagctttgtttttccttgcttagaatccagtccaggaccacattgaattcgtcatttctccttgaatctagataaagtttctcagctcattactttgtattttttaactttgacatttttgaagagtagaaatttcatagctgatccttagtttgggtttgttggatgattcctcatgattaattttttaggctatgcatttggggcatgaagtccactaaagtgttactctgttcttctcacttcatcatgttaggaggcacatgatagtggccaattctaatattgatgatgctaggtgttttttcttgttgttttgtcgcccaggctggagtacagtggctccatcagggctcattgcagtctccacctcccggcttaagcagtcctcctaccttcaacctcttgcatagctgggactacaggcatatgccaccatgcctggctaggtttttttctatttttattttgtagagggtttcgtcgtgtttctcaggctggtctcaaactcctgagctcaagtgatccacctgcctcagcctcccaaagtgctgggattacaaacttgagtcaatacacctggccttatgattttttttttttttttttttttgagactgttttgctcttgttgcccaagctggaatgcagtggcatgatctcagctcactgcaacctccacctcccaggttcaagcaattctcctgcctcagcctcccaagtagctgggattacaggtgcgtgccaccacacccggctagatttttttttttttttttaatttaaatgctagttttgagcacttgtttaaggttgtgtcaggcaggtttctttccattgtgaagtggcaagtttaaattagagactctgtaaactacctgtttttaaccagattttcaccccattagttttagcatctattgttgaatttctaacttcattattgtttatattagttggcctttacttaaagaatatcttttccttccctcctgtttatgagtttagactcatagatctttattcaataggtttatataatctgttactcttatttttcccttgacatgtctccattattctcagagcaattcgttattttttggtatatcaagatgttccaggctcattttaaccttttaaatgagcctcagtcccgtaatcagttgtttctccagggagccttggtttgttttcgtggagagtgatattttaaaaacctgaaaattagtattggttgtgctaagagtagagtagctgtgagtagaatgggcgttttcaaaggttt

SEQ ID NO: 130904 - DNA, 1809 bp, Homo sapiens
tatcactagtaatactagtgaataatagtaatgctgttactcagcttgattaatgttcatttttatttatttcacaacagacacatttttgtatttggttgggtaaaattgaatgttcagttttatgctcaactgaatgtgatacgatttggtagtgcttgttacttcactatataaacataaaagtgccacatatacataaaagcacaccttattgtataaccgtggaacagtactgataattgacttattgttaagaatttttgtttatagaattacagttttatcttggcattgccttttctataaagctggtactgtaacttttgggtaattagaagctaatgcttctaatactttaaatatttggtaaagttaatggggatacttaatggtatgaatatgatgagtgacagttgaaagaaattacaggaggtgtctctacaactttctgctcctttaaatttagtattctatgtgtttcagatttcatgtttcgagtgcttgcaaagaatctcaagtatatgtacatgctctatctgatgctcgatgtgtgtttgacatggctgtaagttctttcttttaagttattttgatattttattttagccaggatgttaagttaaagactaagtattttctgcctgtgtgaattactctgactacattcaacgtgacacacacctcatttttattatataagcattcagagctctgtacagtcacaccttttaagcaggtaaaggagtgaaatagtaatttacttgcataagtctagaagagagtacaaataaaatcaaagagacagcatacctaacattgaataatctgtttctatcagtaaaaaaccaagaatttgctgtactaaagatcagaacagatatttacctccctaggagggggtttttaaaatgttctcatatccattacaatttggaaaaacatttaaattttttttttccatctctagggagaaattggctttacgatgaacatgttagacattggtggaggattcacgggaactgaatttcaattggaagaggtaaacttctcagtagatgacattaacagaataattgctttctttgttacttaagtggtggatgtgtagagcaggatttttacaatggcagaaactaaaccctataacatctctttaaaattatgttcttagaaaaggaataggcagttagtagacctagctaactttgaaaagtttgatagaattctttgaacattatcataaaacattttctatttcagttgtgtttctgtacttaatggcacaaatgatttaatacttagaaaacttcactactacctttttttttttttttttaaagtcttcctgtgttgcccaggctggagtggagtggcgcaattatagctcactatagcttccaactcctgggctcaagcgatcctcctgcttcaacctcccaagtagctgggacttaaaaaaaaaaaaaaaaaaaaattgagtctttctatattgcccaggctggtctcggaactcctggcctcaaatgatcctcctgtccccaagtgatcctcctgccccagcctcccaaagttttggggttacaggtgtgagccaccactcccagccaactttagcatttaggccagatacacgtcacacctgtttctcaccttcctgctctgccctccttccttctgtgatatctagaaactatgatttgaaaattttacttctgtttttagtgatcaagtatagaaaaatgacttaaaaaaaaacaaaaacaaataccagtgggtatttgttattagagctatttttaaaat

SEQ ID NO: 130905 - DNA, 1011 bp, Homo sapiens
aactccatctcagaaaaaaaagaaaaaaaaatttaaaaaatgcttcctatttttttccagttagagacctgctgggatgtaacaatgttagtaggaagaatgtttgcagtaaccatggaggtttagctagttagcacaatcaaagaaatttgaagacatttaaagccctgatatttttattgaaagacaatgatggcattgctattcaatttagtcttcctaggtggatttatggactgatggacttcatttgaaagtaatgtcgtctttcattacagagcccaaccaactcttgatgctacaacagagtcttaacttgctgcattttccaaaatcccatccttgtaagcttcatgctttaggccctaattgctagttttttctctatacaggattgtttttcattaggttcacttgattcatccgtcgctggatttgggagcactggcaacataatcaacacacttcctacaatcttcaggcttcacatgtgctgatgatgatgtaaaccaactctgccccaatcatctccccttctcttagggtcttactacatattgcaacagaagataatattggaggtgaagagggtaacatgaagtttggcactaccctgaagaactgtaggcatctcttggaatgtgctaaggaacttgatgtccaaataattggggttaagtgagtatttgttttaaacttttaaagctgtgaacattttatggtggtaacctgtctttctggttattgatttaagactttatttgcatgaaatctaagatgcaattttttctagtcttttaacacacatgtatgtgttttcttcttagtttaggcaaaacaacttaaatatgccttgtcccttttcatactgttttgtgactgtacctccttccccacaataaaaagaatagcaaataatattttgattcagttagtgcagagtaacttaaatcgccgccttttaaattggatgggaggggatttgctagaattcttaatgaaaataaaagt

SEQ ID NO: 130906 - DNA, 1381 bp, Homo sapiens
gatggtctcttattttaccatgttgtcttaaggtgcagttttaatggcgatatatagcttgttttatttagcatttctgattctacttactgtattaggaaattatatcctgaactgccaaagtattttaaacagtgggggaagcatgggagaaaataggttcccttccttcaactgccaaaaagtaaaatcaaggcagtttcattctgacttttgtcactgtaattgataatagtttttttatctcaaaggggagaatattttatatgctagtgtagcacagcaaaagtaatcaaatataagaagaaagaacaaatgtattcagagtctcttttaatgtttactaaatctagttaacaagctttaaatgtattactgtatgtaaatatatgtcttgacccatatatttgtggaggaaaagaggtgttctttcctgttttgatacttgattttcaatggttttttgttcatatttgtctttttttttataaccataatagacagggaaaaatgcattttttgtgggagatcttggaaagattgtgaagaaacacagtcaatggcagaatgtagtggctcagataaagccattctacacagtgaagtgcaactctgctccagctgtacttgagattttggcagctcttggaaccggatttgcttgttccagtaaagtaagtatttttcattttttaactaaactgaaacattgaataatttaacttaatgtagttacagcggttagagaacaaatgcaaggaagtttgacttttggatggagtttcaaaataattgtttaaatctccagcctcatgttggaaaattacaagcttttcaagtgcaccaatgaaagggaagtttcagtgtaatgagcctttgaaacgttttatctttattaattgaaaactttaatttgttcctcattcttaggctagagctacttctagaccaaactacagcagatatctaaactctgagatttctttggtgcttctttttagtaatgtttaggccaggagcgatggctaacacctgtaatcccaccactttgagaggctgaggtgagagttgcttgagccaggagtttaggatcagcctgggcaacatagtgagacctcgtctcactttttatttatttatgtttttaaataaaaatattggtttggctaggcacagtgactcatacctgtactcgtagcactttgggaggctgaggcaggaggatcacttgagcagccccagagatggaggctgcattgagctatgattgtgctattgcacttcagcctggaatacaaagagtgagaccctggttttaaaaggggtgggggtaatagtattagaggaagcattaccagaatatgaactgtgacattatgta

SEQ ID NO: 130907 - DNA, 1161 bp, Homo sapiens
ataagacatttatctgcaattacctggcagtgctaatacgtggctgacagtatattggaagttgagactggtattttgatttcttggatgcagatacttatttcactagctttctttactcttaaaatgggtaaaattatgtgtgttataggaacgcaaaacaagataataatacagattgggtctgcaactctgtaagtaaggtgaccatataggcttgtaatacattgtgtatatatgtgagttaccccttcaaattatattgacctttttgggtaaatgtattttaattcatgtatttgcttttttaaatgggcgttaaaggaaattaataatctgatgtttctgaaattgtaaaattgcgtaaattcctcactaaattaggcacttagcacactttcattgactcgtacattatgtctattgaaataatacagacttttatataacttatattttgacagtttgttgcatattctaaggacccagacataggcttggtggcccgtctcttgtctttcctggtttatgactttcggctttgtggaatacggctgagatgaaaggatttattgatgatgcaaactactccgttggcctgttggatgaaggaacaaaccttggaaatgttattgataactatgtttatgaacataccctggtaagtgccatttctcaaatacagtgtttgtcattttccaagctctgaaacgagtgctttttaatttccaagatggtaatctgatcagaagtacttggttcatatgctatctgatttaacttgaccttcctcccccacacccactccccttgagtagtgatccatttttctttccaatccacattattttaaaatcctccctatggccctttaccttctatgccttttagcatctggcacccacatatgttctgtttattctgttgatgtgatgccagccaaccttctaatcagtacatggcttcttactcatttttctcaattttcttttttttttttttttttggagacgagtctcacgctgtcgcccaggctggagtgcagtggcgtgatcttggctcacgtgcaaccctcgcctcctgggctcaagcagttctctctcagcctcctgaattagctagaattacaggcgcacaccaccacacccggctaatttttgt

SEQ ID NO: 130908 - DNA, 3151 bp, Homo sapiens
ttgttatgcaacgcatgactatacatctggattgcttgcatatcaaagttacgggcttcttttaagaatgtgaaagagctggacagagtggctcatgccggtaattgcaacactttgggaggccatggtgggaggattgcttgaggccaggagcttgagaccagcctggggcaacatagtgagacactatgaacaaagagttttctacaaaaaataaaaaattagctggacatgatggcatgtgcctgtagtctcagctacagggactgactgagtggaggtgggactgaaggctgtggtgggaggatcgcctgagtggttgaggcttcggtgggctgtgatgccactgcactccagtctgggtgacaagagtgagaccttttctcaaaaaaaaaaaaaatgggaaaaattgagctactttttcaatacacttccagggagttcattaccaccacccctaagtttaagaactccccactgtttgttgtgaagtcttttgtccatttgtttctgagtacctattctgggctaggaatttacagcaatctcaaagccttcaagagagcatcaaagaaaataaacctccattagagctttattgtttttttttttttttttttaagagatgggttctccctatattgctcaggctgatctcaaacttctggcctcacaaaatcttgcctcagcttcccaaagtattgggttcaatcaactactttattgtagttctctgtataatgaaagaaaacaaatgttaatgtactacatctgtggattcaggtgatccttaatccattttgtcaagtactgccaatatagcaaatgaattttatttcatttttgcaacagaatgattttgtcactcagctgggacgtggttaacaactctgctgttacttctgaagtaacagttccatttcaaagatgaatagtcaactccacaaacattttatctttcctttagaagaggtcatattttttcactatttttatttatattgataatgacactatatgtcagctgttttggtttagccttcagttgattaaaattatttagcttctataaaagtcttaatttatagtgacaagaagctggtcagtggttgcctggggtggagttggggatttgctgcaaaagggacatcatatgaagaaaggctgtgagtaggcgtgataatgtttttataccagtgtgaataaacttagcatttttcaacaagtatgagtgttcatatgtctgaaaggggttagttgattatgtggatatgataaagttcttttaaagagactgagaactgtgttggatttcccaaaaaaaaaaggagtcctgtgttttatagggatggggtgctggggaagcaaggttttcatattgttttaaatgtagtttgatcattagtatctctagagctaacctacttaattattctattcctcagtatatcaatggagataataccgtcattgtggttttaagggttaagagaattaatattgaatagatgaaacacttaggctgggagactgctataaacatgtttactgttagatttaagctagcttagcaggcagtcagagttgaacctatgaaattatatggtttgaaaatatttgggaaaaaatatctttatccatatcatcatactactgtagcagaagctctgaagaatgtaggtagtcagccagtaagacttgatccagtgggcctgatgtttttataagtactgaggatcctgactgttaaaggaaaattacccttcctaagaacactatggttgtaggaaatggaggtttatcttatcctgacttaaaagctagaccttctgtatttggcagcagttgtgtgttgtcgtttataatcaataaccaaaggttttcaactaagtactaaatactacatatatattagactatgcccagagacttagcaacagcaactgagatacaattaagtcctcattgaacatcatcagtaggttcttggaaactgcgactttaagcaaaaagacatagacagcaagccctcaaataacatttcattataatgttaagaaaaaaaatggtttcgttttacctcttacttaaaagacacagtttgcaagaagctattgacataaagtgaggacacaatttacttatttttttttccatttcaaagtattttatttaggccaaaagtcttgatttcgtattttttcatttattaatagtaagataaatgaaaactggctgctatgccaaaaaggttagtgatgttaaacttaacaggaagtttctaccttattttcttatatttatctttttaaatgagtgacctttatttttttaattgttcttagtgctcagttgaatatccccccaaaattggtgctttaaattgcttaaaataaacatgtattcttagcctaaaatgtctatattttctgggcacagatttacagcagtcctgttataacagtctttagagaatgtgcaggctgtgatttgacgtcactgcacaggtattaggtctatttagataggcctcaattaacttggtaaaataaaaacatcctaaacttttcagtctgtgctatatggcatgaaagatctgatgagttgaactgaatgtagttggcttcttggaaatgaagctgttagtgtttgaaaagttaaaactgagtatttgtatttcatgaaatttgactaatacagcttattaaggactgttttggtgcagccaaaatgctgacacttttaagaaccatcgaaatggagtatactttcaggacagtggccatcacccaagggtgaactctagtttggggcattagggagggtggaggggggtggtgggaggaatcaaggacacaggaaaggatgtgcaggttttaaaacaggctgcccagacagctggtcaatggccattattaatgtggcaaccagaaattagtaccagatattgagtagtatcctgtctggtggacctgttttatctcatttatgtcgaagttatttcctaaagtaacctaaggaccagtgaagttcaacaaagaagataaacctttatgtcagtatagtatgtgctgccttaggacaatgagtgctccgggggagtgggcaggtttatttcattgatttgagtggagagggataggatttagcc

SEQ ID NO: 130909 - DNA, 1506 bp, Homo sapiens
catgttgtattgtaatagttatctttaatgttatcacatcttaattgccaaaagggatataaatatttcacttgagtgcaggtacacacacactttagtacacacacattttctccagaaaaaaaatttagtcttcacattgaatagtcaagacatttttaagggagtctaattgtgttaattccacgtgcaaaaataatattgctgtgagaattgtgtattttgttttctcattaagctacattttaatatttatggtgaggcagttcattgggcagtctttacacaggcacttcaaacttagcctgttgggcttataacttttgggattttttgcccccttatatatttcctattcattcttgttcttctcttttaaaataaatctttagcagtcacctttagtcttcttcctctaaggttactcagttttttcaacctcatcacctgaaaaataagtttaggggtatgcattgtgattactggctttcttattgaagcaagccttgtcctgatttatcctgagtactcaatgtaggctgttgttattgtctatcacttattttggggtccagggtggcagaagtttacctgatcttatgatcactaaatttataggatttcctaccagtttcagtatatagcttcctggaattcttttgtagtgtttcagacctactcaaggtctcacatctatggtagatgtcattctttagaagcttctagtgctcttctggtcaattacttttaaaggtattctatgtggtaagtaacattttctgttgtaggtagaatgcagaggggacttaagcaacgttgtatatttttaaagctgtgagctgggtgctaagtcatcaaatgcctatgtaaaaataaaagtagaaatgcacctaggcatcttcagagtaacagtaatagtgtaaatttcagaatatcttttctcatttttaatgagtaaaaatccttttagaaaaatggttgatgtattaaggttgggtttcctgcttaggtatctctgaaacagtattctcaacctttcagctctccctgttctacttccagggaggtcttcacttcagaaatccaagactcatattcatccagcttggtgtcaagtgggctgttgctgccagaattatcttgtgattatttgagagatgtatcagtttcttctgaagtacaatcaactgtagaagcctttgtagcaggtgtgtaacaaggcaagtgcccagctcctgcagccactactcttggagctaccctgtcgatgaacatgaggactcagcggcctcatgaaaggctccagggagcagtgtgtggttctttggagccttttgtttcttttggcagctcttcatggaaaaatgtattaaaaaaacacccatatgaaggtgtgaataagggatgttacatattttttcttctcagttatgagtctaagaggaaattattaataaaagtagtattgtggttatacgctactgtattagtgtaaaataacctgag

SEQ ID NO: 130910 - DNA, 1050 bp, Homo sapiens
gttctgggtggttccaaactattgggtcatgctagtacattattcatataaagtcttgtatatacactaggttggtgagggtacttggaattttttaaattctggaccacttaaaaatgtggaattttagaggacaaataaaagcaaaaatgaagttttcatcttcaaaaatgaaggctggtaactcttgagtaggcagataaaacgacttggtaagatggctatgacatcaagttctgtgaattttttatagcagcttggaaatgtttactgcataaagtacttggtactgtggtaaaccctttgaaaatatcacttgtgtaatgtgactttaatgaaacattgttataaaatgaacacgtattctacagttcatgtttaagtcagcctaaacatttttttaacataggactatcttctgctacttttatttccttcttttagggcgaactttctgaccaagtatacaactacccagagggcctaggagaagtgctgtatagagagcagttcgacttcaacgctgagccaccttgggaacctagctgatgataggggggttccatctcccaacttgtccatgtaagtatttgcacatttgttggtggggaggaggtctttaaaatcgaaggaagagtgctgccttgcttagtatttttcagaatttgaaattgcatttacctcttaaagtgcagtgacttttaaatttctgaaatagagataagacagttactggttacagacttgactgatttagttgtgtgcattgtttaccaatgactggatcatttaaaactatcttgtatgcataacttagaaaatatacgttgaagagggcttttgggaaataaggtatagtttatcacatcattcaaccatttaacttagtgaaatgatttttgctactcagctggtaggaacaactaactgattgtttttagaggacttgctgaaagatgatagagatagatagagatacatatatatatctcaatttatatatgtatctaaatatgtatatggtattaaaatatatgtatggtattaaaa

SEQ ID NO: 130911 - DNA, 1876 bp, Homo sapiens
caggcccactctaggccgcacagggttcgcgccacctccggcccaggacagctctcagacgctgccagcgtggagctcgacccggctcacaatgcgctgggccccgcagcgtgagcgcaggcgcccgagaggcggcgggggtcgggcggacggcgcgctccagccgagccgcctccctctctcggcccacacccgcgcggccgcccttcgcctgccggggagctgcgggtggctggagggcgggaagcgaccggccagtctgcacctgcatgacccggtcgcgcgccgacccctcccctctctctcccgggctcagtcctccttcctcttccgtccccctcccttttctccgggctgcaaccgggttccgccccgctcgcgcggctgcccggccagctgtgatgtcaccaggccacgccccctaatataaatactggcgtcgctggcgccgccttctcacactttcaggctctgatcgcggccgcagtttttccttttttcttctgccgtcgccttctctgcctcttctcatcctttctcgctctgctgctctgcagtgtgacgagtccgaatcctcttcccacccagcccgcgcctttcttcttttgcctgcgctgttctatttctccttcggccgccgccgccactgctgcacacagctggtgtcggtgccgcgcttttacccccaagtcgttcccgcagcctatggcccaggccgccttgggtatttctgctcaaggtaaccacatccctctttaaaaattccgccgaaaaagagaagacgctttacccgactctttgggccgttatctcacgtgagtaccgagccgaggagcgcgggaggggccaggacgcggggctggccttggggggcggctggggggctccggctgggccccgccgcccttaagacgtccccgcagcgccccgcggccggccgcctcgaacatggcggcggcggctgtctgtgcccccggcggcggcggcggcggcggggctgggcggcgggccgcgcctcaggaccttcgggcggctgctggacgcttggcggagccggagccgcagcagttggggcgagggggcgtgtgccagtgggggagcgcgcgggggtctcgccgccgggggtcgccgtcccctcctggcggcgtgcggcccccacccctctcccgtggtgcattgctgtttccggggagggggcccggccgcagccctgaggggccggggtcccgcagcccctactccgcggtgcgccgccgccacctttgcctcccgaagcccggcgggcgggcggcgctgtgggctgcaacggctggggtcctggttatgaatggagcggggcgggccccgcgccggcctctggtgacagctgcggaggaagtcggattcctggggggcgcggggagcgcggtccccctctggtggaggaaagttgacgccacttggggcctggcggcggggaagccccggtgtcaggtagccagcgagaggcttttggccccttctggaagcctcgaggctgctgctccgcccctgcggcgctcctgattgggtcaagtcgccttcactcaccccagtcacctcctggagcctgaggattagtcaccatggcttcgtttttccgtccgcgccatggttcctaggcagaaagagggagattggtagacgggtggcttatcaactactgtcttgactgccaacagttggtggtggtaacatgttctaacccttacacggtatcctgaatgtgtgtttcgtagacaaagctgctggttcagaaacccgaaacagtcggggacacagtttaccgcctcatgtttcagcacatttaactgaattttgtggtggcatcttggttatattagttctgtgtcccgtc

SEQ ID NO: 130912 - DNA, 1030 bp, Homo sapiens
gaggcaccatttggtgcaaaacatgcatgtggtgtcagtttatttgttggacaaatattaagatgttgaggttacagaggttaaaagtaatattttaataaactgcatataatggaattcaagtaatttaaaatctagtgtttgatgttttaatgtaactcctttagtgtaaaattactgaaactatatcctaatatttctttgaggcacttgtcttttgtaaaactgcatgaataactcaaatagagtccccttaatcccaataaaatgtagtcactaaatgtctttgggcaactaatttcaccagctgttccctcatttgcaagtgggggtggtgataacacatcttgtgagggaattaaatacaaaattgctttagtagatgcaagtgcttatcactgggcacaacatgtggtacatattcagtgatagttgttaccagtaaacagaatctcaagcttacttagggtcatgagttggagaaaactaatcttaaagtctttaagttggtgaatttcaggccaaaatacattgtattggagatatcagcaccttctagcagaatgtggtaccgtggtccagtcactattataaattgccagccatgaagaaaagggaagtcatgttttgggagccatgagtgtagattcagggaatcccctggcatggaaggaattatttgcccactgggtcaccgctgagttgcctgtgcagaggaggagtctctagaagctgagaaggttttggtgattacttgcagtaatgggtgtacgacagggccctcctggccatgtctgccaattcagtagctttaccagaagttactagaaattttccaacattgtattatgtattacatccccagcccccactccacaatgtcacagtgtgtttccagtttttgtgataggtatctgtgtgaaagtaaggctttgcttttacagattgctttctaggcaaatgtggaataaaaaaattgtagttgataaaatgagtctaataaagattaaattgcctttcatatttaagt

SEQ ID NO: 130913 - DNA, 1037 bp, Homo sapiens
aatatttttggagttacggatacctttgagacaagatgtttcctccaaaacgtactcacttatgcacagttttgcatgcaaatttaattacagaccctctagcgcacatccgtggacctcctacttaagagcctgtgttgtaaactaagacttcaaatgatccagtgtcattgaatagtacaagcacagacctgtctttgaggagtcttcaagtcttaagtggtgcttataaccatgaattaaaggattatcttgtacatataaatagctttgaaatgtctggcaaacatcttttaactgtacttacacattatgaaataaaatagggagaatttaagatttgtgagaactttaggtcaagatgaatcatcttgttttttttttttaaaaaagcatgccacctaaataacaatatattttccttttaggttggcacgttggatgtcttggttggcttgtcagatgaactggctaaactggatgcatttgtagaagggtaatgtacttatatgcatggagtagagcaaaatgggagacactattatcaggcttcatggacactgggtttattatcacatgtatactctgcttattggaatggttttagaaaacgacttttttcccttcgtatatcaattttatgaaggtacaatttacataaaatgcacctgtttgaaatatgaaaatgctgattctctttttactatctttaatgggatatagtttacatgccatgcatttcacctatttcaggtgtacaattcagtgattcttagtgtattcagacttgtgtaaccattgccacaatcagttttaaatatttcatcatcctctattcctgttcccattagcagtcacttaccgtccccaccacccacaaattgttctgccactatagatttgcttggtctggacatttcttgtaaatggaatacaatacgtggtcttttgtgactgtcttcttttgcttagcataatgttttgaagtttatcccagcagttgcatgtatcagtatttcatttctttttattactaa

SEQ ID NO: 130914 - DNA, 1484 bp, Homo sapiens
agtattcttctgagaaaaacagcttttgtaacatttatgaataaattcaactataattttaatttcatagaaaaatactctgtgtaatagtgatgtttgcagtagtcaaaactcttcatgtaatttagtttactttggaaaatatccttcagtcttgtgaattgaagccttgtaaatagtaatctccaaacccagtggcctagattccatttccatggtttaagaagtaatataattaaaatacatgtggactaaaacattatttttagttgaaaagatttatgtggaaattatatttaaaatgaagtcggctgttttttaaatgacctcctaaagtcgtgcttttaaaataatagaatattcttacactagaaactagtgggtttttttgtagaagttaaagtttagctactttgatagtattagtagaggcagatttaggaaaattttatctatttttcttctttttctttttcaaagggagtaactcagattgataatgacctgaaatctcgagcatctgcatacaataacctgaaaggaaatcttcagaatttggaacgaaagaatgcgtaagcagatcaagtatatttgagtactaagaactggggaagcatactagcatgcaccgaaggagatattgttgggatttagttagtttcagtttatgttgttctgtaatcaaaatggtatttcttttacttcatggagaaaagctcactaaggtaagtttatagaattcagactagtccaaacagatgtgaggctgatttattatacttgttttataaataatacttgtgaactgggtcctggcttattcctttatccatttgatatttcactgaaaaatagtctaaaattaattgttttaaatgaaatcatagtttaactgcatagtaattacctatcacttaactatagaataatccttttatgatgtaatagttattctcttatctgttttcagaatttaggtttttcacttgttaggttttttaaaataggactgaatttttttggttgatccccttgtactatgactacttcaagtgcaactttaagcatgaaagtattcaagttgtgccttcatatcctagagggaaagttggttggatactgtgagtgatacaaacagggcaagacatatttattatgggaaagtgattactggaagacaaatgaggactgatttgaaagagttaattattgggttagctaccaaaattgcctagtatcaaatgatacccaagggagggaagaacactaaaggtattgtgcttagatgacatagtttcataattatatgatggaatagactttaattgatatctaatgagtagatagttttccagtcaagatattatatatgtaggcaagagaagagctgagttataataattaaagcaaacacaaaacactagaggcaaattttggtagaagatatttcgttggttgcaagggtaggatatattcagctaaat

SEQ ID NO: 130915 - DNA, 1028 bp, Homo sapiens
cgtagttgtctctccccacacccctggaagccagtggcctctagagaaggttgttgcacaatgttttgtggcaacatagtttactgtcacttcatttacttactacctcatggtactctgtgctttccataaatatagttttttttcagtccttcataatggccactgagcaggaatgatagtgattttagcatgaccatttttaaaaaatgaggcacaatacatatgaactatgcagcttgaaaacaatttagaatctatactgtgctttacttcctttccgaacatagttctaggatgtgcctcttttgcaatggttactggaggtagggtggtgatctgtttttcctgcattactcagtgtatttgaaattcattctcagtaggaaacccgaattttttttgttaaatagagttgaagtatacttactatagccagatttcctatttgtctcataattttttctcttcctggatatggcaggaaataggacttgtttttcttttccaatgtgtattgtaccttttctgcaggttaaaccacaacgactggattaagcagtatgaaacactagccgaaatggtagttccaaggtctagcaagtaagtagaagtctttgtaaaaccatttgtttcctagaattccttttagagtttggatgttggcttaggaaatatgtttgctgtcttgcctttgtgataaattaacctcatgagtgagttctatgaactctagttgtaataattttagacctagaagggacttggcacagtctgtttgacaacctcctgtttatagacttagaagtttgaggccagtgaggtattaatagtttgcccaggatcacacatctcatttgtggcagggctagaactagaacctaggtctttggtgtggtactttttctgcctcactgtgctgccttttgaaaattctttattcattattgcatacctactatgtgtctataattcctcattttacttggcaaaggaagtgtaccagaatggctactggactgccgtgt

SEQ ID NO: 130916 - DNA, 1079 bp, Homo sapiens
tttttgtattttttgtacagacacagtcttgccatgttgcccaggctggtctcaaagtcctgaactcaagcaatcacccacctcagcctgccaaagtgttgggattacagacataagccactgcacccagcctgtcagtttttgattgagagatgtcatgggagcaaaggaaagatccaaggtttaaggtactggcaatgcagagaggctaggctgggcatcagtggggctgagttggcctggagaaaggaagaaagaattaggcttccagaaaagaagagtgtgcttatcaaggagacactggaaacaaagcagcttggcgctgatgttgattgaaaagtgtggttcttagcgtttggatgctttactggagttaatgtctaattttgttggttagtaagaaataaatgtagagtgttaaggtatcataagcaaaataaatcataaacattcagtatcttcggtgtttgaggcaatccagattgaaaagcattgaggtgatttgggaagggctattataccctacttttctcttccacctgtttctgaattttgcccttaatatgaaagacagcaatacgtataaatctttaaatggactttttttttttccatagtgttctttcagaggaccaagacagttacctgtgtaatgtcaccttgtttaggaaggcagttgatgacttcagacacaaagccagagaaaacaagtaagattattgtttttttgtttatttactttgttagatcagctgtatacaatgtgaacaattttgttttttttcccccaaatttagattcattgttcgtgacttccagtataatgaagaggagatgaaagcagataaagaagaaatgaacaggctttctactgataagaaaaaacaatttgtatgtgtttttaatatttagtattatcagtactaagcagaagaaaaagtggtattgctttcctttgatttaaaagaaagtaaaaatctgctttggttttaagacatttgattttagtttttttttttaattgaataatcagaatgaatttcctctaaagcttaactgttctagagataactattcta

SEQ ID NO: 130917 - DNA, 1079 bp, Homo sapiens
gtaagccaggcgtggtggctcatgcctgtagtcccagcactttgggaggccaaggcgggcagatcatgaggtcaagagattgagaccatgctggccaacatggtgaaaccccgtctctactaaaaatagaaaaatcagctgggcatggtggtatgtgcctgtaatcccagctactcaggaggctgaggcaggagaatggcttgaacccaggaggcggagattgcagtgagccaggattgcaccactgcactccagcctggcaacagtaagaatccgtctcaaaagaaaaaaaaaatgaatggtaattgaagtaattcctagtaattggcgtagagatttctagtggacagtggggaccaaaggtttgcgtttctgtttatattgaagttttttgtgtatattagtttcagtttctatatatattagttgaacttgtaaaggtaaagggagatattctctccccgttaaccatgattaaagagtatgagaatatttgctttgaaaagaaaatctctttacatgtttgcttgtattgcgtactgtatttctgcttttttgtaaggtatggcttgccagtgaacttccaagcaatgctacttcagcccaataagaaaactttgaagaaactgagagaagtattacatgaattgtataaacatctagacagcagtgcagcagctattattgatgtaagtacttattagcccagtagagtaagaattgaagtgaatttcagaaaaaaaatgattgaaagaagatagacagaaaagggagggtaagtatgaaacttaatcattttttattactttgaggttctcaatttgttatgtaaacatagtaatttacattgtttaccctgttttatactaattatatctgtgttttgcttcttggcatttctacaagctagtaattatcttgctgtgtatcagatgtttatagctgcagaaatacagaaaccagtgatactagttatttacaaaaactataaattgcagagaggaagaaaataagcagttattttaattttatttggtagaagcgatagagtcaatagatgagtattttcaaggtaggtt

SEQ ID NO: 130918 - DNA, 1267 bp, Homo sapiens
ctgtctgtgtttcctaggagaagtcagtctttcagagattgttttctcatttgcaaaatgggaataatgtctaactcagataaattagccttaagtgcatacatttagcccagagtagatgttcaataaaaaggtaaatgttaatacttgctttctttttttgagttctgtaaatacaaaattgaataattgtctgttttttccataggctcctatggatattccaggtttaaacctgagtcaacaagaatactacccctatgtgtactacaagattgattgcaacttgctggaattcaagtgaaaatgggctcctcccccgacaatcctgtccttgtgtttgtgtgtgctaacagaaataagttgcagtatggtcgtacttttaactctagtatcctttgcttgcttcttacgccctttcctaggtgaattctcccacagtggtctgtatctcaacattttctttttaaaggaaaaaatatatatatatagtttctttttattgatcaggtctgtaaatgtgtactaaaaaaatcagagtttatttataaacaaaatagtttatttaaagagaaggtctcttccttattgatatcatggtatgcattaattccatttgttactattgtgcacaaaagccctgttcacaggggaatggtgtaaacatttatactgttttgttcactgtatttagtagacataactgttgaatagttactgaatcatgatgtaaagaatatgtgaccatcttcaggtatgggatttctgaacgtttcaaatttcaatcaatgagcactgtcaacacccacaggagagaataaaattacctgtgcaaaggtgtattgtggtgtgtgtaacttaagattacagttctgtttgagagttaaatgatgtcatagctcacttgctatgctgcttccaggattttgttatatgctgaggtgtaaccatttgtgttgtctgactttcgtatgatttaattgagccaaatttgggtcagaacacaaatttgaagatgacttttcagtatatgatgggtatttacatttgaacactagaattttaggtctctcaaataattaagaatagagccagttttgaataaagtctagcagaactatgcagctttagtcatttgttttgtctaagtctgtattttatgtgttgtcttcttaagatctataattttggcatttatgtcatttgtgacatagtctgaaaatagagacattgttggcctttaaaatctcagaaatgaatgacttaa

SEQ ID NO: 130919 - DNA, 1027 bp, Homo sapiens
acacagtttatttttaataaaataggattataccacacacatcctgtcacttgcttttttgcttaagagtatatctaagagaatcctttgtgtcagtgaagctggagctacctcattcttttaactggctgcgtggcgttccattgagtgtctgtcatcatgtgtttagccgagtggatggatagtctgcttgtttttagtttttgctcttaacaaacactgctgcagtcagcatccttgcacagatttctttgtatacttgtattagtatttctgtaagatctgagaagtggaatttgtagggtcataggttatgtacacttaagtttttgacactcactgccaagtcatctgtcagaattctaaactaaagacatgtttggagtgtggatttatcttcagtttttctttggacaagaggaagctgtgaaagattttgctatcagaaaattttggttctttgtcttttgcacatgttctttgagtcttagtatctgtaacgtggcgctactctctctatcatgggggggcatgttttgacattaaattgacttttaagaaaaacatgtcactaacctgaagctcagccacacagtgacttttaaggttttatttagactttactgttgttctcatgagagtaggtacagactgcataaggtttagaatcccagcatatgtctgaaacgacgggactttcactgtgatttccaccagagaaattatagcagagtggctgagcatgtgctctgaggccaggccccagctctgctgctgacgagctgtgtggtcctgggcagagtggtctccgagttccagtccctcctctgtaaaatgggcatgattagagtgcccaccgcattagggatgttggggtgagtcagtgtgaccccacgtgcacagaaagtgctgcgagtggtgcatggtgagaggttgatgcaggtacttagcccttggggaacacaggtagttccttttcactgtgtttaatttgggaaaatccagatccacatcattgtagagtctg

SEQ ID NO: 130920 - DNA, 1042 bp, Homo sapiens
gaaatgtggctagtgtgactgaggaactgaatttttttatctaatttttttttgagacaaggtctggcattgtcgcccaggctgccttctgggctcaagccatcctcccttctcagcctcccaagtaactgggaccacaggcacatgccaccacatccggctatttttttttcccggtagagactgctcaccatgttgtttaggctgatctcaagttcctgagctcaagcaattggcctgacttggcctcccaaagtgctgggattacaggtgaaagccactgcacctgaccaatcttatttaactaattaaatagctacatgtggctggtggctactgcgctggacatagaggtctagttggtcacacctggctaatgagcctttttgaccttgagtttccaatatatcccatatcctttggctttttttgtttgtttttttatgactggaagagccagccttgcttctgtttactttgattgctagatttaacatccccacaagcctgagaaaaagagaggaaaggattgctcttggaatcattgttggtgtgcctcagattgctacgcaggacagcattctctttgatcacaaaagacaactacatatactttgtgcattgatgtgcacgagagtaaactggttgtcatactgaaagaccagaagctgtttctgatgggaaatattgaatcagcagaattgaaaacacagctgtgtggttctaatgggaatataatttcttctgtcaatcagtgctcacttagtatccattgtgtgcagagcattcactattccagcctctgcagggagacatcagggagatgctcaccacgtgcttttgaatgatattatttgtctttattgactctaagaaatgtaagaggttcataaaacattgaagccattaaggccttatttgagaagtctagcaactcacagttgcccttggaaagaggcaaataggaaggggagagccctctgtcagacttgttttccatcggtgacatgtggcatggattttacctcctaccgttagctgg

SEQ ID NO: 130921 - DNA, 1021 bp, Homo sapiens
agaggtgcagcttccttagcaaatgatatattccatgctaaggcaggtggaagagtatctcgttaggacagaattttccgttgtttttccagtgtttgttacctggggtgaaaatcttaactctgcactttgactccacatttgagtttatgacaaatgttgctgatacaccctccttttgtttttacagtaattgacccaggactcattttcaggaaagcctgaaaatgagtaaaatagtgaaatgaggaatttgaacattttatctttggatggggatcttctgaggatgcaaagagtgattcatccaagccatgtggtaaaatcaggaatttgaagaaaatggaaatgtttacatttttgttgacgtgtatttttctacccctcctaagagggcacagtctcttcacctgtgaaccaattactgttcccagatgtatgaaaatggcctacaacatgacgtttttccctaatctgatgggtcattatgaccagagtattgccgcggtggaaatggaggtgagtagtgcttcatacgtttattgaatagtagtttatgctctgttctagaataaactagtaaaaataagtctatttttaaacagagccgatttcttcaagttgtgtacaagttgtgttttgaaaagtccttttgaaaattaaatccctctactgacttatgttttgtgtacctttgcggccctgtttagtagattcgtttgaatagggttcattttatataatgaagtatggttacacatgatttctaaataccttgtacctagaaaatattttgctttcctgaatcaagtatgatagttcttctagaaatgcgaattctgaatatttttctacttcactgaacatgtaatatttattgcctggactaaaactgaagaaatttacaagtttttataagtagttgtaatattcacttggtacagtttttctgaaataaataaattatcagaatattttgttgctgtagactgtattttaaggctatcacaaagtcactaaa

SEQ ID NO: 130922 - DNA, 2192 bp, Homo sapiens
ttagctctacacatattcattagaatttgcttaaagaatttgatttttaaccatttctagttatttatatgaagtaaaggaattcaacttttgatcggaccgttggattataagctatatgagtcagttttttttttttcaaacattgtactttagtccttaagtgtatattccagttgagtactaaattatagctgcttgtaacttggcttttactaaaaatgtgttttatagcttctctaaagatcagattgggttttacacctccaacccgattacctttagtttctgctggttcctattgaatttccaggattcactgtgaattagtgttaggatgaggggctgaaaaattgcctgatggctatggcaatgaattgtactctcttagtcactgagaattccgtataagtcaaaagatctatctcactccttttttgttcctagttttcattttgtaacagctagcctgttttatagaatttaagcatttatggtcatttttaatctgtgattatatgagatggtttagagcagtggttcttaaactttagttcatagaccagcagcttgtgagcttgttggaaatgcaagctcacagactcctatcccaacttactgaatcatgatctctgaagatggagcgcagctgtggtttcacaagctgcccaggtgtttcttttgagtgttaaagttcaagacccactggtttagaagtttggattgcaaatttttactgtaaaagaccaaattattttgactttccagaccatacagtctccgtcacagctattcaactttgaaattgtagcacagaagcagtcagacaatatgccaacaaatgagtgtggctgtgtctcaataaaactttatttacaaaaacaggcagtgggctatatttggcccaggggctacagtttgctgaaccttggtttaaagtacttgaaaatgttttaaggatagtatagaatgaaataagtggacattattgtgcattcttatgttaatacattaactgagttatttgttacttactttccacataaattttttaaagtaaaatttatcacaaaccaaaaggatctgactgggacatcttggttctttagttttgtttcagagattgcttaaaatgagggacttcagttttttcctaattttattatgtgaacctgaaatcatttgtattacaaagagttaatttacaattctgcatagtaacggggctttgtaatgaaaaggatgtacagtctaactctcccaagtggaaaaacaaatggctactggttttccattgtgttccttttgtttcatatctagagcattgtgagattgaggtcccttgagagactgatttcatccagaaagagctgagactgatctagggaaaatggaaacaggaatgttgtatttttctttttcaattgccttcattgaggtctaggcaaaagccaggtcacgtattgtgtttggagcagcaagtggtcattccctttttaaacagtctaaagggaagtgggccaaaagaaaaaaaacaactttcctttccacctgttaatatgtgctgttagaatgtctctattcagttaaaaataaatggagaaaaactggataaacagacttttaaggaaaatatctatttctgttgtatagtggcttttaagcatttttattttcctgcttttagaagagtccagtcccttcctgctttcacctttcttccatattctctacccttgtatgtccatacacaaataaagaaaatgtttagtgagattaacctgtttgtttttcaggaaagactatctgaaaataactgtagctattctgaaagtaagacattaatcatataaaatgaaataaatagtgagaagtgttccaagccagttgcgtgtataatgactactgttgtgttttaaaggtagaaaccttccttcgtgatgttgcattgcagtagcagggaaagtcccttgactccttcttttgaaactgcagaataagggcaggcctgtatgtgaagagaaaggatatttctcctgggaggctctgctgataagcacaaggttcctagtccattccttagtattccatgggaagactgttgtgattatttcctttccccaagaatgtggcatgtaaataatgaagctttattactctaggttatatatttgtcatgtgttcattcatat

SEQ ID NO: 130923 - DNA, 1037 bp, Homo sapiens
gtgattgaagttctgcctgctagggccacctctgaatggagttataatcctatagtagctcacttacaatagctggggccagctattgtaagccaggctgtaattgtttcttcatgagtcatttggtgagagggaactctgcttgaagacgtaggtgtgttttaaggaaagaattataatatggcagaagcaggcattctgagaatgcaagcaatatgctactttcccgtatctttgagatctatccagccacttgaagatggaatgcagttggtccctgacatcatgagtaggtgagttcagtaacactcaattcatgagaggtaacttgacctgatgatctctagatgttctctcctgtttagtttctatgaggaactagtagcaaaagccaaggtcccttttaattatgtagggttaatctcctcatctgcacttgtatcttactatggcatctagggtacatgtctatggcctcatcagctttatgtctttgataagttagattagtgtgatgtcctgtgaagtcggtgatatgtttcactgactgaaattgaggcacagagctgaagagctgatgatgttcccctaaagctgaagctcttaagctttgatgtgcatcagaatcatctgaaggacttgttaaaacacagatcactggctccatccctgagttcctgaatcaataggtctgggatgggatggaaaaattccacatctaacaagttcctaggggatgctgatgctgctcactcaggggccacttgttgggaaccactgctctaaggcaagttggcaaagatatgctgctgtccctactgggtgagaacaaattgcttttgtagaagaaagaactggctagcttagagaggcatacaaagtgcctgagctttactatttgctacaggaaagagaccacatctggagaatcaccttagccaattgagttgaggttgcttaagacaatccactggaaagttgaaatgagcaggtggtaggaactgttacccctgaatatgtttctagtggtgttgcca

SEQ ID NO: 130924 - DNA, 1413 bp, Homo sapiens
tgcactccagcctgggccacagagtgagaacctgtctcttaaaaaaaaaaaaaaaaaaaaagtgttaacttaccaaggagaaaatttcaccatagcacctacagttgttttgaaattgatctccagttcttctactcaattctttgttaccctcttcataaacttttgagccatagaagttaggtatcataaatctccttagtgatcatcgagttcatcactgtcactttactgatggatactctgagactcagaaacagaaaactacctgccaaaggtagcacaggtagttaaactaaatagttagaattaaagtattagaattaaataagaattagaacttagttagaaataaaatgctagcattatttccagtgaaggattatagaaaatactctatgtattttgattctcatttttcatttatcttactgttggctcaggctgtttttcacgatagagatgtgaattgccttctcacttgccctcttctttctcatctctgccagtactaatagtaactgctatttccagggatttctgccagggactgaccatttccttaaaggagcctaccttttatttcttgatttttgaaactgtaattaataacgctgttttagttattgaatggtagaatctcagaaccaatattaatagttattagatgagttttttgagaatgaaatttgaaaggaggagtttataagtgagatcatgaaagcactgggttactaagagagttgaagaaggtggtgtcactaaaggtgagtaaaaggaacagactgatgcgaccaggtttgatatttgctcaattcatagatttgcactttaattcatgagtttaattcacaggtttggcacttaacgtgctaaatcctagtttaatgatgtgatgaaattcatagcataaaattaaggacataagaaatatctcaatgagtcatgttagatttggtttctgagaatggtacccaggacattttgaggaagaacataaaacatttcaatcacaatttttacttcaaaagactgtgaaaatatgttcatcccagttatgtttcaactgattggtataatgagttcaatactaggctgactacccattatttaaagtgctgtgatttgttctgaaagtactccatatgatggaatacttgctcttgcttcaggagataacgcatcatctggaatgtgatcaacatagcttgaggttttatagtctttgatatgtatcctgtgaacatttattttttttaactgaagagtttctttcatgtggaagagtcccaatcctcttgatatattttcttcccttcatcctcattggcatttttgcctgtcgctgtgctttgggaaagggtaattttcagggagaaatgggtagcagcacagagtgaaggttaaagagga

SEQ ID NO: 130925 - DNA, 1190 bp, Homo sapiens
agaagaacaggttgtgataaaggaaaatggtatatgaaaaagcacagtgcctggtttatggtaagtaccaaataagccaaagctctgatttattatcagtagccatagaattggtaaaagtagcattcgatcaggaataaagatacctaacttctaattcagagtacattttggaatgtgagtaacaattttaataagaaattggcttcagttttctcacttgatccaagggcttagattaggtcagtggttttccaattgtgatctctggaggtgctctgaggtcactggtagcaaaggggaatggtgagaagtatctcagcagggagagcttccttttcagcccaagaaactatgcctttatttatttagtatatcggcctccttttaacttcttatttaaagaaaatgtttcttggcaaagtgtgcatgtgtgcacacacagacacacatacacttcgaaaataattaacttaaaggttttctctcaagtcccttccaagtctaaaattctttaagtctattcatctgcaactgaacttggaagttggtagcccacactggatctgacctgagacttgatttttctgtgtgtgtgtgtgtgtgtgtgtgtgtgtgtgtgtgtgtgtgtcagggaaggggggggccctgtttcaaatgtatagattaaagtgccaaaatctaaaatttgggaaattacacataacaatctaggttctgttttcttaggaaaaatggatatacctgacaattctatgcccccatttccaaataatagtctgctggagttgagtagcagcagcttcccaaatactccctatcatcttacaggcattttcatttacctgcctggcctctgaaggtatctgagttttcagcattcagtttatcctctacacagtgcaggaacatcaacattattggattagccaactttggcactgtaaaagaattaaattagggaagtgacttgtgttttccatgtaagaaaattgtttttgtatagcaaaagtacatgtattgcattcattttgcctgcccttgaactatataattacttcttaagtgctgaccaccagttaatcatggcttctgagttagaagaattaaataaacatagtgtgttttaattctttccaccaaaggatctgattaccacatagtcaaaaaatttaggaactaggcttttt

SEQ ID NO: 130926 - DNA, 2198 bp, Homo sapiens
aggatgggcaggaatgcctctttgaggtgaattgagtggagactcaaatgagggcacaagactcactatctgggtgaagaggtgaggggaacagcaagtgcaaagactctgagacagaaatacacatggaactataagaagtagaagtccagtttagtggcaatggagtaaataagagacaaagtggtcagaaatgaaactggagacatagcggggaacacggaaatttaaaggctcatgggaattggaaaagactttggaatttattttactggagtctttgaacaaggataaacttacgttttaaagaatcgcattggttggaaaattgactgtaagattagcaagtgtgggaagtagtgagacctgttaggaggccattttagtagttgaggtgaaagataatagtggcttagactgggtggtaatagtgagaaatggtcagatttggaatatactttaaagggagagccaacaggatttgctgatgggttggagatggagtgaaagaagagaggagtaaagaataagttgtaagaccagcctggccaacatggtgaaacttcgtctctactaaaaatacaaaaattagccgggcgtagtggcatgcgcctatagtcctagctgcttgggaggctgaggcaggagaattgcttgaacctgggaggcagaggttgtggtgagctgagattatgccactgcactccagcctgggcaacagagcaagactctgtctcaaaaaaaaaaaaaaaagaaagaaagaaagaaagaaaaaagaatgagttgtaagattcttggcctgagcaacttggtaaatggtggcattatttactgagatggagagtactaagggagtgtttgggaggcagagatacggtgggattgagttgtattttgcatactttgggttcaagatgcccattaacagccaaatggagttgtcccggagcagatgctcattcaagtctgtggttcacagtagacatggggactggatgagtttcccttgagagtcagtagagatagagaagaggtcttggggactgagctctggagcatttcaatgatcataattgggaaatggaagaggactagaaaaggaacagccagtgagacagccagaaatccaagagaattcgtgtcctagaagacaagtgcaaaaggggcctcaagaggaagctaggagtcactgtgtcgattgctgttaagagctgagtagaagggatgttcagaatttaccatcagatttgacaatgtggagtttgttggtgactctggcaagtgatttcactggaataatccatgtcttcttgaaaaatatatgattgaataaaatagtagtatcccattgtgtatgaagagttcataagtctgatagagggagatttaaagattcttttgcagtataagtgaaaaagcatatactttaaacagtaaatatattaattttattcatttgttattaaaatgttttctaactgtatcttgatgtctttaatagcattttcttcctctcgcaaatctggaatgttcaccaaacattgaaactttcctctgcaaagcatttgtaccaacctgcatagaacaaattcatgtggttccaccttgtcgtaaactttgtgagaaagtatattctgattgcaaaaaattaattgacacttttgggatccgatggcctgaggagcttgaatgtgacaggtaaacaatgtttttcatggaaagctactaatggtattttactactggtactagctctctgggatgttagtgagaagctttcattatttaattccataaatgtttattacacacttaatatatgtcaggcactatggtgctaagtgctgtggacacaaaggtgggcaaaaaacagacttggttcttgctctcagggaacttacagtgaggtgagagggacagacagtaatcaaataattatgcaaataagtgcaaaattatgactgtgatagatacaacaaaggaaaggtagataattctatgagaatatataatgatacctttgacctaaactggggaaaggggaaggaaatgactgttgagctaaagtacgaagggtaagggtaagacagaggtaactaggcaatgagaggagggaagagcatttcgggcagtgggaatagcttatttagagaccctgcagggcccctgaacagggagtgagggagcatggcatatac

SEQ ID NO: 130927 - DNA, 1302 bp, Homo sapiens
ctcatttcattcattttaattatcatcactttagttatatggttgctttacttttcttatggacattagaaaataaaagtgaatagacaagatatatttcatatgatataaagacatatttcatatgctataaagagacaagccagtacttatctggagcctaccaattaagataaattcttttaaatatttagtcttaaaaacagaaattattttaaaattatgaattggctaattttttccaagtaagtgcattttcatgttcacctgctttgtatttaatataaattattgtgttgaggccccattaacagccacaagtttttagtcaacttcaaaaatttctactcaactcttatctgtaatccatttagatttgtatctcttcccatcaatcatgaatacataaggtaatattttatagttggaaagcattgcttaatatattgaatcaataaaaatgttgatttcatatatttaatttttataatctttacagattacaatactgtgatgagactgttcctgtaacttttgatccacacacagaatttcttggtcctcagaagaaaacagaacaagtccaaagagacattggattttggtgtccaaggcatcttaagacttctgggggacaaggatataagtttctgggaattgaccagtgtgcgcctccatgccccaacatgtattttaaaagtgatgagctagagtttgcaaaaagttttattggaacagtttcaatattttgtctttgtgcaactctgttcacattccttacttttttaattgatgttagaagattcagatacccagagagaccaattatatattactctgtctgttacagcattgtatctcttatgtacttcattggatttttgctaggcgatagcacagcctgcaataaggcagatgagaagctagaacttggtgacactgttgtcctaggctctcaaaataaggcttgcaccgttttgttcatgcttttgtattttttcacaatggctggcactgtgtggtgggtgattcttaccattacttggttcttagctgcaggaagaaaatggagttgtgaagccatcgagcaaaaagcagtgtggtttcatgctgttgcatggggaacaccaggtttcctgactgttatgcttcttgctatgaacaaagttgaaggagacaacattagtggagtttgctttgttggcctttatgacctggatgcttctcgctactttgtactcttgccactgtgcctttgtgtgtttgttgggctctctcttcttttagctggcattatttcct

SEQ ID NO: 130928 - DNA, 1048 bp, Homo sapiens
agattctgcgtgacaaaaaaaaacaaacaaacaatccataatcaatgtcaaaagactaactgggaaagtttatttgcatatgacatcatagctgaaaggctaatttctctaatttataaagagttgctacagatcaataagaaaaaaaccatccatctgatataaaaatgagaaaagagtaggaaaaaggttcacaggaaataaaaatgaaaaaactattcttaaacatgtgaaaaagttatagtaaaataaatgtaaaattaaaattaaattatatttccatgtatgatacggcaaacatcttaaaggtgttctaaccactgtgtggtgaaacaataaatagcaaaatacatattttcagactttgctattaagagttagttcaaccttctgttgaagcaatttcgcggtatgtacagatgtataatgtgtgtacactgatactgcccttctgggaatttatagacagatttgcttacaaatatgagaaattaaataataccaagatagtcactacaacattatttgcaaatgacaatagattggaagtaagtatctattaacagggatagtagaataagttatggttcactcacacaatgcaacagcctttacaaagaataaagagctctggccgggtgcggtggcttacgcctgtaatcctagcattttgggaggctgaggagggcggattgcctgagctcaagagttcaagaccagcctgggcaacatggtaaaaccctgtctctactaaaatacaaaaaaattagccaggcatggtggcgtacacttgtagtcccagctacttgggaggctgaggcgggagaattgcttgaacgcgggaggcggaggttgtagtgagctgagatcacgccactgcactccagcctgggtgacagagtgagactccatctcaaaaaataaaaataaaataaaaaataaaagaaataaagagctctatttgtattgatacagaatggtctccaagaaatattagtaagtaaaaaaggcaagaaatgcagagtatgtaatatcgtgacccttgtgc

SEQ ID NO: 130929 - DNA, 1055 bp, Homo sapiens
agtattttaagatgtactatgctattttacttttttgatataaaatcaagatatttctttgctgaagtatttaaatcttatccttgtatctttttatacatatttgaaaataagcttatatgtatttgaacttttttgaaatcctattcaagtatttttatcatgctattgtgatattttagcactttggtagcttttacactgaatttctaagaaaattgtaaaatagtcttcttttatactgtaaaaaaagatataccaaaaagtcttataataggaatttaactttaaaaacccacttattgataccttaccatctaaaatgtgtgatttttatagtctcgttttaggaatttcacagatctaaattatgtaactgaaataaggtgcttactcaaagagtgtccactattgattgtattatgctgctcactgatccttctgcatatttaaaataaaatgtcctaaagggttagtagacaaaatgttagtcttttgtatattaggccaagtgcaattgacttcccttttttaatgtttcatgaccacccattgattgtattataaccacttacagttgcttatattttttgttttaacttttgttttttaacatttagaatattacattttgtattatacagtacctttctcagacattttgtagaattcatttcggcagctcactaggattttgctgaacattaaaaagtgtgatagcgatattagtgccaatcaaatggaaaaaaggtagttttaataaacaagacacaacgtttttatacaacatactttaaaatattaaggagttttcttaattttgtttcctattaagtattattctttgggcaagattttctgatgcttttgattttctctcaatttagcatttgcttttggtttttttctctatttagcattctgttaaggcacaaaaactatgtactgtatgggaaatgttgtaaatattaccttttccacattttaaacagacaactttgaatacaaaaactttgttttgtgtgatcttttcattaataaaattatctttgtat

SEQ ID NO: 130930 - DNA, 1033 bp, Homo sapiens
gtgtacccaggttaagccacgtgtctctaaaatgttcatttaggcggcgctgtgttacctgcgggaatccccgacctgcggctcctgaccacgggccaccccgcccagaccctgcaggcgggctctccacgagggtctgcgcagccccgcgggggtcctgacaggccgagcgactgcagtaggagggggcgggcccggctctcggtccgcccccacgccgggctcggggtgggggctcggggcctattacgggatggaagctccgggtgtcgcgggggcgggaggaattaagggagggagagaggcgcgcgggtgaaaggcgcattgatgcagcctgcggcggcctcggagcgcggcggagccagacgctgaccacgttcctctcctcggtctcctccgcctccagctccgcgctgcccggcagccgggagccatgcgaccccagggccccgccgcctccccgcagcggctccgcggcctcctgctgctcctgctgctgcagctgcccgcgccgtcgagcgcctctgagatccccaaggggaagcaaaaggcgcagctccggcagagggaggtggtggacctggtgagtccgagggagccgagccgggaccgccgcgctggtggaggggacctggccgcgcgccccacgggcagggcgtcagtctggctgttgggggtgtctgtctgtacagctgtgtgtcgtgtgtcttgctgcgccggggtgtcatgctttttatttacaggtgaagaaggacctggttatgcgtgcagtgagtcttggaactcagaggggagaccaaaatgggaggccatcgtggagcggacatgcgatatgggcccggtgggtctccccgaagtacagggagtcccccaataatttctggccccagggggaccccttgggaagggtgggagggatagggcggcagtgagagtaggatgaggagcttgggtacgtccgaagtggacctgggaaaaaccctggcctcgctgatcacatggacctgggcctgggccagggcggtgcaacgtg

SEQ ID NO: 130931 - DNA, 1057 bp, Homo sapiens
gggaggctgaggcgggcgggtcacgagatcaggagatcgagaccatcctggccaacatggtgaaacttactaaaaatacaacaattagctgggcgtggtggtgcgtgcttgtaatcccagctgctctggaggctgaggcaggagaatagcttgaaccagggagtcagaggttgcagtgagctgagatcacgccaccgtacaacctggcgacaaagcgagactccgtttcaaacaaacaaaaaaaaaaaaccaacttgctggagctgtgcaccagagaatgtaatcaaagacaatggacaatgatgggtactatgccttgtgaaaagaagactatcatatttcaatacgtgcttttgtagtctgacaatatttagaaagtcatgtcttctaaacacactaaaagagggatatcaactaaaaagtatgttggagtttatgagtcatcagagttaatattttcttttgaatgtggacacttaatataaaatcctccagataaagtatgtattattaccatttttataacaaggtctctttagctattgtaaaatagcttataggaagaaaatcctatgacatgatttagttaccgttatgcctgttttcaaaagatgtgttaggtaacatgcagaaactatgtgaggtttggggttaaagtcttaaatttcattctaaaggcctaaataggagaaagactctggaagtacctgtaatgaatacctgttaattggctgcacagcatccgtctcttcttccttcttggagtagtagtctaaagttctttttttgttgttgtttattttttgagacggggtctcgctctgtcacccagtttggagtgtagtgacgtgatcacgtgatcatagctcactgcaggctcaaactcctggactcaagggatcttcccacctcatagctgagactacaggcatgagctacctcacctggaccctgaatttctttttggaacctaccccctccctccattttcagttttgtgatttagatgggatcagcctcacctgcgccagagataggccctaataaacagagccga

SEQ ID NO: 130932 - DNA, 2037 bp, Homo sapiens
attatctatttttccctctaaaggaaagaaggcgtcggtggattttacaagggaattgctcctaatttgattagagtgactccagcctgctgtattacctttgtggtatatgaaaacgtctcacattttttacttgaccttagagaaaagagaaagtaagctcaaagaggacaattccagtatatctgcccaaggcagcaacaagctcttttgtgtttaaggcataaaagaagaattctgcatagaaacatggctcatattcgaaattgctctatagtcattagaagccagagaactgctaagtctcctgcaatgtttttcttgctttttgccttccccatatatatggaacttggctacctctgcctgaaatggctgccatcaacacaatgttaaaactgacacgaaggatagagtttcacagatttctacgttttattggtggaagctgatttgcaacatttgctaaatggattagatgaatgtacttctttttgtgagcttacttgcctggattgctttaaaattaacctttgtgcaataccaagaaaatagctctttaaaagaatgtctttgtatgtctcaaggtaaattaaggatttactgaataaggtgttgaccaaatccagaccattttattttatttttttatttatttattttttgagatggagtcttgctttgtcgcccaggctggagtgcagtggcgtgatctcagctcactgcaacctccacctcccgggttcacgccattctcctgcctcagcctcctgagtagctgggactacaggcacctgccaccacgcctggctaacttttttttatattttgagtagaaatggggtttcaccatgttagccaggatggtctcaatctcctgaccttgtgatccgcctgccttggcctcccaaagtgctgggattacaggcgtgagccactgcgcctggccagaccattttagaattgggaaattttagtgagaaaaaatgcactgtaaatatgctttagttttaattcagttgggatgcactacctagcgaaaattgagaaactatatacttctcagagaaatatctgacatctattgtcattccattgctattttttttccccagagacttccataatttaaaataaaatcctagatccagttcttgttttttggcataaatacttaatctattttaaatttataaaatctgagcttctaggatccagctgtgtcaacctttatttagcatatataactataaatcacttattacagatgctaaatagatcaccttttacagatgctgaaatgtttgggatatgtttgttgacaaggtaaatggaaatgagaaactttatacttcagttttcagatatatggatctagatcccaaataaatgattaatcttcattggtttctcaaattcaggttgaaatacaaattaatagcctttattgattttacttttatgagtcattgtagacatctataaatataaaagggcctgtacccaaaggatgccagaatactagtatttttatttatcgtaaacatccacgagtgctgttgcactaccatctatttgttgtaaataaaagtgttgttttcaaagccatctttaaatagttctttaaaaataggtcttttttttatattttggaaaaggcattgtttttaaagtaaagataaaatggtaagtacctaattgtatttactgtaatatcttataacatgcagatgaatgctttataagttaaatatgatgtattttttcatacttctggattatactataattcatatgaaatcttgatattagtccccacacggaaaaagtgaactgcagttgatatttggtgtttaagatagcaccattgtttaaataccgcctatgtactcccaaatgaataaaacataattcttgtcctctgagagcatacaagcttgtgtgatagataaatatgcattaaataattacagctatagattaagaactcgtaaggaatatctcacaaagcctggtaagagttctgacagaagagaa

SEQ ID NO: 130933 - DNA, 1055 bp, Homo sapiens
cgtaagtctttgtaactcctactttaataccttgatttcttaatgttgattagtcaaaacctaacttaatcatttttgaacacatagccactagcaaaaacctgagtcataacaggaccaaatatttgttgaataaaggactacttaggaaacctggcaaatgagaaacttaaccagatgaattttttaataaaattgtcactctataaaggatgtaaaatgtgacttactgtattacataattatttaatttttgaggggtagtagttactttggatttgaggaagattgtgataaagttggggtagatatatgtgtcacatgcacagattattggggtgccagattcctggttcttttcgcctatcttcaacccctctgggattataccatgtgctacacctaaggtctgtatctgcttaccatctgttctctgcaccaggccacgttgtttaggagtcaagacatttttgctatccttacacttcaaagagaaagcatttcacatttccatctcccttttaatttacctctagctaactgcatgaggaactttttatgactaccaaaaacaatgtctaccttttgaccctaagactgtgcctcagaaactacatttcacagtttcagatatggtcctgtgcattatctttttttttttttttttttttacataaatgtactgtttctaatttgggttgtcataagtgcgaaagtatctgtatgctgaataatcttattgaaatctcattttaggagccatgaccctctgcattacaaacccattatgggtaacaaaaactcgccttatgttacagtatgatgctgttgttaactccccacaccgacaatataaaggaatgtttgatacacttgtgaaaatatataagtatgaaggtgtgcgtggattatataaggtaacaaattatcaatatattttaaataactgaaaaatttgaatttccgttggctctgttgtcttagttctgaatgacctatagtaagtcctaaaaagaagccacacttaggcaaaaaacaatttaatgaaaactgaa

SEQ ID NO: 130934 - DNA, 1601 bp, Homo sapiens
caggtgcaagagaaatttgtgatgtggaatcaaaaggacttgttatttgataaaaagggatgggaaggaggagggttcatggatagtccccaggtatctggtgtgggcatcaatgcagatgatgatggcgtttgttgagttatatggaacactctagtaagagcagcttcagaagggatggggaaaactagttcaattttggatatgttcaagtgaaatgcttttctactttctacttggattttgacatatgttggtggggaggatagaaagaatttccaggaaaaaaagtttaccccatcctctgcattttctttcctgccactcctcagtcttgatagcattcgatataaattgaggctcctagctagtttattttttgagtaatattttttaacattcaaatccttaaccttggagcaaaaacaaaacctaagtgttgaaacctagttacctaagagacttttggattaagagctaatctaatatttccttaaatattatttgagtgcttagtatgccctcaataaacacttgaataaattcatgaatgtagtagttttaaaatattaaagcctgggctgggcatagtggctcacacctgtaatcccagcactttggaaggccgaggtgggtggatcacctgaggtcaggggtttgagaccaggctggccaacatggtgaaagcctgtctgtacttaaaaaaaaaaaaatacaaaaattagctgggcatggtgatgtgtacctgttatcccagctactaggggagctgaggcaggaggattgcttgaacctgggaggcggagattgcagtgagccaagatcgtgccactgcactccagccggggcaatagagcgggactctgacacaaaaatgtatattttacatatttatatatatatatatttatatatatatgtaatatatatataaaagcctggaaaataattttttctacctaaaaaagtttttcttctaagtttatctcctttatataaccaattgtacagtgtctgtgtttatatgtgatacagagctagaactttgttcttacctgactttgtgtatcccttgatgcagtgagtgatggattggaactgagaccgaaatataatggaattttacattgcttgactaccatttggaaacttgatggactacggggactttatcaaggagtaaccccaaatatatggggtgcaggtttatcctggggactctactttttcttgtgagtagatttgggagattttacagtattaaattaaaaaggaatttttgttttcggtgatttttacatgtaaatgtaaaatgataagttgagtcatttaatcagtttctctgaattggaaggatcaggaagaacaaaatggctgattagttatttgattagtttgattcaaaatggcttattagtttgattatcagatgcctattaatagctaatggcttattagctattatcagaggcattatttggtctggaagaaaattcttaataggaaaaaggcaaagagatgaggtggaatgatacttttagagaagccatttctgtgaggtgaattcaggaagatgaaatgtataactgattacttttgta

SEQ ID NO: 130935 - DNA, 1068 bp, Homo sapiens
cggcgcccagggccgcggaggtgggacgcgatgcagtggccgccaccgtggcgacggtcgccccttgtgagcgcaaccccacctccgggaccaacgagaggactcttatgcccaaggcgcgtgagcgaagccggagactctagtactgagggggcaagaacggggcacagacactacgtcacgccggcggaaagcgcgatggaggggaggtcccagcctctcccgagtctccgccctgcctcgcccacaaatgctccagcccacggacgcggaagcgactgcacagctaaagaaccgccccttgctaacgtttgccggcaaaactacggagcggcgcaggatccagttgagccagcaggccgccgctccgcgagtcacgtgactggaagtagtctgggaaaagcggaagtcgcctgtgggaggaggtggcggtgggcggaactcctagcggacacctcgtggagtccggccggaagagcaaccgagatgaaggtgaagatgctgagccggaatccggacaattatgtccgcgaaaccaagttggacttacagagaggtaagataagttggtagggagaaagggacggtttccgcaagtcgttgggtctagcctcggctttcgcggagtaaagccgggggaggctggcactctggtctggttctttctcagttacctttcgctaaggcaaactttgtgcttacggagtcgctgcggaactggatggatagcaagtaaagtctgttcaagtcctttttctaagaatttcctctagtggtgagtgggaaacagttgtctatagtggagaaaaattccagctgctgctctgggattgtcttcaggttcctattactgaaaagtggacttgaatgagccaaactcgtgggttgaagggctgagagttaaacaggcttttaaaaccttcctactgctcttcttgccgctttactacttcacattagttgtggatgttggaagagacaaagatgaatttaaaagcatcagttttctcttaccatcccttaagaagtttgatgaaagaatggttaaatgaaattaatttatccttc

SEQ ID NO: 130936 - DNA, 1153 bp, Homo sapiens
aaaaaaagaaaaaaaaagacatctgataatagtgtaaattgccgccaaatcaagtagggatgatattaaagtagcccaagtataagataatgaagacccaaactgcctgggaatgcagtggctcacattcataaacccaacactttgggcggcaaaggtgggaggatctcttgagcccaggagttcgagagtagcctgggcatcataaggagacccccgtctctacaaaaaatttaaagattaatggggcatggtggtgcatgcctcaggtccaagctacttgggaggctgaggtgagaggctaaggtgggaggatcacttaagccctggaggttgaggctgcagtaggctatagtcatatcactgcattccagcttgggtgacagaatgataccgcatctcaaaacaaaaacaaaaacaaaacacaaaaaactagaaatagagagttgaaagatgagtaagtgttgcaaagagatgatgagtaggactttgagttttggtagtagggaatatggaagatggaatacataagaatgacctaggctagagctttgttgaatgttagatataacaccattaccagggagtcagaaagaaacagcaggatgaagtcatggggtaagaagatgcatttactttttactcactgagtttttttagacatacgagcttaaaattactttctaagcataattatatatatatatatatatatatatatatatatatatatatatttttttttttttttttttttttttttttttttttgagatgaagtcacactctgtcagccaggctggagtgcagtggcgcgatctcggctcactgcaacctccacctcccaggttcaagtgattcttttgcctcagcctcctgagtagctgggactgcaggcacataccacccccaccgctggctaactttttgtatttttagtagatgggatttcactgtggtagccaggatggtctcgatctcctgacctcgtgatccgtccgtcccggccccccaaagtgctgggattacaggcgtgagccaccacgcccggccctaagcgtgattattaaccaagacaatgtgtttagcagcgtatcaggacagttaaaacatagattctggagccatactgccttggtttgaatcctggctc

SEQ ID NO: 130937 - DNA, 1194 bp, Homo sapiens
catgtttataattaaagtatttaagtatgagttttttcacagatgttgtcaacacctaatttcctactatggcaagtgaaaaagttttgtaacactttagaatcaacagagtatttgtcaggttgtattttttgctcatcagtatacttatccatatgcattgcattgttttaatccaaaggattttggttttagctgcccagtagagtgattcgtagccttgtcagtgttgaatttatcctgaacattttacatttatagttcactgaaatttcctggtatgccttatcataggttagaatttggaatctaactcagcggaattgtatccgtacaatacaagcacatgaaggctttgtacgaggaatatgtactcgcttttgtgggacttcttttttcactgtaagtataataccattaagtcattaaatttgatcaacataggtaagaataatctaattgaatacattttttttcaagttcatttatttgttcctaggcccttttggagtttcacaatgcaaaatagcttattaaaccttgaaaattactagttttctttatataattcagccttccccataacttaacatgattaaactaatattcaatttaccacaaaagtggaattaatgagaggtaagtctagaaagagtttggcttactctggaggatttttgatgctaagatgagtaatttgtacttttgttagtcagataataaggaatcatcgaagttttgtgcctgtgtgtggcaagatatccggaacgtaaaatttactctctgtttttaaatatacagtttggtggcatccagtacattcacatcactgtgcaaccatcaccaccatctgtcttcagaactttttcatcatccccagctgaaactatagtcattaaacaataactcctctgtcccctcagtccccaacccctggtaactactattttactttttgcctctgtgattttgactattctgggtacctcatataaatagaagcatattttaaagaattataccattttgtgtatgtggaataaggcttttgggtctggcttattttacttaacataattgtcttcaaggtttatccatgttgtagtacatgtcagaatttcctttctttttatggctaaataacattccattgtatgtgtcacattttgtttatccgttcattcatcaatgagc

SEQ ID NO: 130938 - DNA, 2108 bp, Homo sapiens
tagtttctgcagttcatgcagaaaaggactttatctatttcaatattataacaatgccttctctccagtattttcatgtttttcattttattttttacatttaaaattacctggaattttattttcacataaggcatcaaattggctcaatttttttgaatgactaaccagatattataataccattttttataatccattttttctccaagttgaaatgccatgtttatcacaatatgcatgacctaactttgcccctgttcttgtttttcttttgctctactcattatatttttagttttatgtactttatgtatttgtcacaaatctttactaaaacaaggtgggatataaatggatcaataagtgtaatactggaatgatatggtatgttacctgttttaaacaagatacttatttgatatgtgttggcaagttttaatttataactgttgttccttaccatcatcataataaaacaaatatttctaggttggtgatgacaaaactgtgaagcagtggaaaatggatgggccaggctatggagacgaggaagagccattacatacaatattaggaaaggtacaaaagtaaattgactaatagcttgcctattaacattcttttatttaaaattattttatagttataatttcctaagatggggaagaagatgcagataagaaacgaaagactttaggctgtaattgttgacccatttacgcaatatttaatgcagctaaagtcctttgatgctaaagaattttaacagttttttttttttttggtattcattgtagtagagtttgatttctgtttttagccagaggatacaatgaaacatttcccatgggaagaccacggagaaaaagatagaagttcagaaaatgcttcagcttgtctagttgatgtcatcatagatcttacacaaaactcagaatttcttagttgaaagactcctttaagaaatgaagaaatttaatagtattatgcatcatgtataaatcttattaatgtttctaccaaattattctgcaaatcaggtgatgggtggtttagttttagcataagaataatttagaacatttggtctatccatgttttataatgtttacatttttatattaagcaaacaattccaaaattagatttaatctttaaattaaatctaccttttaaaaatcactttgtcgtttcaatattatggttagtatataatatttaggttctgctttaggtttcaagaagactaaatgttcttaaagggataggggaatggggtatgagtatgaggtagagataatttgtagttggaaacacgttagtaatttctaaaacaaaattggtttcattcttaaaatgtcttgtctcattatggtattgtttccccctttaagtaaggacttcaaagaagtttctttgtgaacagggcttttctctaaaaagatagtatagataaatatatttaaaatattattctgcagatttgaattagtaatgaaaaaaatcctcttaacctttttgcttttaaagacagtgtatactgggattgatcatcactggaaagaagctgtttttgccacatgtggacagcaagtagacatttgggatgaacaaagaactaatcctatatgttcaatgacctggggatttgacagtataagtagtgttaaatttaacccaattgaggtaatgtttttttttaagtatgttttacttattatggcttaataatttcagttctgtttagaaaacttttgaatgtatgatagaaacttctgaattttaatggtgttttggcattttgtcagttttcccgattgtaaatgagttctgatacctttgctcaaatcccaacatgtttcccagcagtttagtcccagatactagagttaagcattgttagaggagtggtgtgtgcatttgcccattggggtaaaatccaagtaaatatagtcttgttttaactttagttttactcatgccttcaacttcatgttccatagattatgtcattgtacatttaggaaaatgttaatttttctacctgccttggaggtcagaagaaggagcattggacatcattttgtctatttgtaattggtaag

SEQ ID NO: 130939 - DNA, 1077 bp, Homo sapiens
gcttgaacctgggaggtagaggttgcagtgagccaagattgcaccactgcactccagcctgggtgacagagcaagactctgtctctaaataaataaataaataaataaaatacaagcatgaggattttacagtgaaaatacttggtttaagttgctgagattatggatgatttattgtaccctcttaaaatggactttgttttttaacataaatattaagggcaattaaatcatttgtttactgaatggatgtggtttgctgccaggtctggctttgaactggtgattgttatacttgtttttagacatttctcttgggaagttgtgcatctgacaggaatatagtactgtacgatatgaggcaagctactcctttgaaaaaggtgagtttcagttttgacttttgctttatacagttggcattatatatttctctgtaaatagagtgactaacaatatggagcaaatattttctcagaattaaaaaaatcttttatacaggtgttcttagaactctacatgatgatagtcatgttctttcagctccctattgctttttagagactcttaaatttctgctaggtattgtatcctagtcaccaaccttgtgtcttccatgatgccagtacattttaggcctctaattaatacttactgaattgaaagttcttaaaggtattgcatcctgttacttaacagtgtaataatattcaaataatattcaataaattcaagccccatgattatcgtatgacatgtacactattttattccagaaggttttagaactcattcacgtaaccagctttatttgttcagttacatgctgatcaatactagtttgacatttaggcaaccactatcctgttcaaagtaacagatttcctaacaattctaaagtagtaatttcaggacttacatatcagagctaataatacaacttaagctaactctcaagagggagacagatactgtctgtaagtaaggaaaggagtgccattgtaagtaaaagggtataaagtttatttcaggtactagaattttgagtgacagaaagggctggacatcattgagatg

SEQ ID NO: 130940 - DNA, 1034 bp, Homo sapiens
aaagtgtgttgacctgaattgatttgatatggggaagaggccttttaagatcaagtcctttctttttgttacaaagttaccttggttgaacatcatattttatttgcattttatgcttttagttattctgtgaacttttctgtacatctggttttgcttagtttgttcatatttatttctcttactagatagtaagttctctgagagcagaaatttgtttactaccccagcacttaacacggaaccttattagttgggttcaataaaaatacattgacaagaatttgagtttttattttatactcctataggactcagaaatagtatcctgatacttaataggcagtggttactcaaaatctgtaccaaaatccaaagggttttaacttaattcgttttctatagggaggtatatcatacaaagagaatgcaacatgttatctgtgtaaaatggacttctgacagcaagtatattatgtgtggatctgatgaaatgaacattcgcctgtggaaagctaatgcttctgaaaaattgggtgtggtaagagaattcattttctttcattgtcataaagctgatttctaattttattagatattacattatgaaaatttacttttaggtatttttgggtattttgattaaattgacatagctgtgataaaaaaagcaataaatggacaaggttgtattgataattatttgcttcattctgatctattattgtagacactgtacattcaaattgacatttaagaccttcagaatgcctttgttaattcagatgtttgataatattgagtcttactggttttttgtgttttccttgaggtagggacagaagatgcaggaactagaggctcagaacttagagctcgtatctcttgttagagaaatagtcatccagcaactcaaaggctgcaagtccctgggagatcttgtaatatcaaagacacaatggaacatttaataaatacagaaagcttcatactttaaaaaagattccatgaaaaaatagcaggtgttatcattg

SEQ ID NO: 130941 - DNA, 1045 bp, Homo sapiens
cagtcatctgagttaaagattcactgggtcacttttttaaaataccacctgggcccataggtcaaatgaatcagactctggtgttaggaccctggctgtgaatatagtttgaaagttccccaagtgattaaggtatagcaaatgttgagaactgcactatatgcattgcaaaataaataacggagaaggaaaaaaaaagtgacaaactaaaaaaaaaagcgacaactaaaaccaacagttttaaagagaacataattttttacctgaaattgaaattgacgcttactatccgtactttcctctcatacacaatgacaggtaccagtaaatacatttatctttgactttcgcttaggaaaacctaagtgctgctaaaatccacaaactgctcctttagaagaaaggagagcagaactaaaaataatcaaaaggaatgggtggaacagtctaccttattcaactatttctgtgccagatttaaaaaaacaaacaccacttcccacccccagctaactatcaacccaagcagaaccagaagccagaatatacacactactctgaggtttaaactttttgaggttaaaatagcttagttattttgagtctataaaatgtgaacttcaaagtcatggtccaaattagacgattttggcttcctttacagtagagggtcaccccctgggccctgcactgctttctagcggtcatatggttagcatgctgggtgcctgaggctgtgtctccctgcacccccacccatgcttcgcctacctggagacagtgccagctcatgaaatacagtgggcatgagccagtatcactggaacatatgactttttacaggaatgaagcagaagtgagtggggttactgttacggtgtttcctttttacagtttttactacaactagatgtgtttttcctattaaagggactacttaggagtggaaggaagtcttttaaaccatcttccactgttattcacacacctggacgaagtaaaaatttgtcacagtatttatatatcgcatacatagaatatatat

SEQ ID NO: 130942 - DNA, 1744 bp, Homo sapiens
gctacctaacttagtcttagaaaggagtcttacctcaaaatggctttcatggtttcacattcttgttatatttattttaacaaaaagttatttggaggttaaagcataatatatttggacatttggttttaaatgttcttaatttttttttaacgaaagagtaggcaaggaaatgaaatgaatagactttataatggaattatagtaatgagagacaaatcattttgaagattttgacagtttactaaataatacattatcaatattgggtattaaattacaaatacataagaaaaataatactaacggtcttcaatggttactatttcccatgaagttttagggttcgcttacctagtcattactatcctttgtttctttttagtgctgttcattacattgaaaattaacatgtattttaagagtagagagaaaaataaactgaaatttaaatgcatgtctgctgccttttaacatttatgttaaaaaatacatttgatgtgtgaagatactgcaatggttagataaaaatatttttgcatgatctgtgagtttcaatgttcatattaagtattcatgcaaagtggagagaaagaaggaatttgaaccttattaatatttaatatatagatgacaatacctagatgcatataattttaaatatgcatgtagtgaaagattcatgcttgagatatttttaataagagaactgagtgatcaaaactgagaccattactgttatctctcaccttaggagcctgaataattaaaagctattcctaattattagtaatttcctcaaagtccagctgaacatccacataggaagtctatcatcatcaaataataccattttacatatgagcgaggtactataattttggaagcatttaaaaatctcagtagaaccctaatcagtaattactttaaagaatcctttcatgtattgctgtagcagtttaaatttggctaattcaatttatcagtaaaatttataatgtccttttactgactaatgtttttttttcaatcttccaagacatctgaatgattaatgtttttaagtcttgtctttcaagattgtaaacttcttgagggcaagaatcaaaatttaccctttttttgagtttgtgttttgcagcatccttaacacctgcacgtaataagtacttaataaattgtgtttatttaaattgtggtaatgttaatgaggtagcttatcaattttgtgggacaatgaggaatcattgtttgaaagaaaaacataatttattaaaagttgaatttccagtgggtttttgtgtaattgtgaaaaaatgtctgaggaaagcaaacccactaaatcaatagaaaagtattcagtaaatactgagtttctaatatgtacatatcatagcctttcagataagctttttgtaacacaaattagaaattatgtgtttcttgatgtgtatattttcattcatagtttagattttctgttaaagggttaatttgcttcccaaataaaggaaggcaataagtaaaaattttcctgataggttaggataacaattagtatatatttagcacatatatagtgagcagttctctattttttaaaataattcaattttaaaagtattttctaaagttaatttataaaattttgaaataaaatctttttttttctttcttttcttttctttctttctttttttttttttttttttgagatagggtctttcttggtttgaggcccagg

SEQ ID NO: 130943 - DNA, 2869 bp, Homo sapiens
ctcttacatgttatttgttttaggaccttgtttatgccttttttactggtcacgatttaaaaaaattgaatttattgtagttttgttttatggattttgagtttgtgatcttcttagaatgatcttccctattctagtatttttaaaaagtaccaattgaatcatgaatacttttaaataaaaattgcatatgtaaaccactgttgccattgccaaaaaaatgaaaaactatagtttttaaggattcaaaatgcattctaaaaaattgattgacattttataagaaaacaagcaaacaaaaaattgacttatattttatgaaagagtacccaataaatttatatatattctattttgaaataagggcaattaaataatatcttcctcttgacaatagattttgataaagaactaattatattgtgcgatgaagaaagagatagtggaagcaagtgtgataaaccagatgaactttgacttgacaccttactttactaattaataatggtaacgttttgcttatattattaaactctgagtttcctcatctatactatttgagtaataacacctattttgaaggattgtgattgttattattaaactctgagtttcctcatctatactatttgagtaataacacctattttgaaggattgtgattgttatagactaagtatcctggcataagtagtggtgcaataaataatcattattgttaactgacatagatagcactctttaaaccttatcataggattgctgggtgaaattttcttattttctaaaaattgagagattcttttccttgtctattatgaagtcaaaatatgccaggagggcttttaagcgacttcattatttgtttagaagactagggatggggagagggtgggtgacaacttgaaaatagtttcctcagcaaataccattcttaaggagcctgataactaagacatagcagtgaaaatagcactgacatcaagttattggtaatcggcaagatactgatagtcaaaggtgaattgaggggacttacttgtggaaactactttgtaattgactttagatttgccttggttaaactttttactctattatttaactaaaatctatatttacctatttgtcttattcacattgtatctaagaacccagagaaccgtattaggttaagctaattctgaagtatggttattgagcttagaatgctgatcttcacatcgcccctcaaatacacttaagctttgtatgattgccggtttctcatccttctggcttagcttcaaatttggatctttagagagctcttttctgaccactctttcttatgtagattctctccattattctttataacaataccttttatatttccccaattatgcttatcaaaatttataatgatttatttacttgtttatggtctgtccactctgctagattatcaactcaaagagagcacacaccatgtctgttttgttcactaatgcagcttcaacttctaatgtaatacaatgccttacacatagtagtactcaaaaatattaatcgggtgaatgaacgcacattgggaatgaaatattatgttcatctaggtggtacaaactttcaaggtgaactccaataatcttaaaaaaagatttgcttatgtagtagtgtccttatttttgaaatcaaatgtaatttttaaacatgcctaattttgcttattttacatggaaggaaacttacagtgtttgtgtatgattgcagcttatctttcttttggactaagagcatatcttttttgactagaaactagaagaacattgtgatagatatcatttttaaatttaaggaatattaggaattagggaaaatttggctgtaaaagtgatcctttaagagaattgatacatttccattgtgtttagcacagatgagtgataaagagtacacagaaggctttggatagaaatagttcatgccctccagggacagataatctaaggccaaccataatcatatgaacacataaaaatgtaaagtgtcatgaaaaaatactgtaaaggtgtttttagtacattataaccatggtaaaaaatatgtcagactaatcttactagtagtttattgcctctatggtattgtttgattatattgtgttatattacatggtgtcacatagtttttcctgttaaaatatctgaaagtttcactgctagatattaaaaacttttgtattctctagtcacctaatgaaatacagatatctctgggagttgaaataattttaaccattatcaggtaattcttaaggagctcattgtaagaaacgtgataaaccacatgaaaattttgcatggtaagtaccaggagactactgtgcactacagtgtatcatggatatattttacaagaggagcacgtgattcagtcctgggaagatgccatctaggctgaatctcaaatgatgagtagatgttagctgggcagattgttctctaagcaaaaatcttaaaactcccaattcctctttgcccccaaaacctttcatttgttaaaaaaaaaaaaaaaaaagaagacgatgcaggacatggtcaagaagtttgcttgaagtggttcagaagagcacagatttaaatggtgatgcgtcaatagaggagactggagagatggcaaggttcagagcctaaaaagccttctatgctattctttggatttggcaatagggagtcatggagggattttaagcagtgacacaatataattagacttctgttggaacaaaaaccactctcatttaatagattggttagaaggtgtaatactagagataaaggcactatttaggagattcttacagtaatccaggtaataaatgatg

SEQ ID NO: 130944 - DNA, 1092 bp, Homo sapiens
tatgttcagctcgaagagacaaatagtttggtagtttcttgtatcctgtaactaggcttctgggaggctaaaactaggggaaaaggatacactaaacaatataactgggtagcagaataaccacaatggtgtttggtgctttggtattgttcagttgacagatggaggtggtgctcacattcatcttgttttgttggcatatttggtatctgttatcatttttataatagtttgcttcccaggcacatagatgaaaatctgttttatcacacataaaacagtcttcaatctgaaagaattaattaatacttctattagcacacttatttttctcactgggccaaaatctaggtgtaggtagggccgcatttctttctagaaactaaaggaggattgtttccttgctcatttgggttgttgaaagaattacgttctttaagttataggaccgagattcttgttggctattcagctgagggctgttcttacctcctagaggcctctttctggtacttgcacataacttgctatatctctgaacaagcagtggggcattttgaatctttattgcgatgccgtctctctgacctttcttctgtcattgcatctctctctgcccacgactaggaaagattttttctcttttaagaactcatgtgattagcttgaattcacccagatattccggaataatcttcttattttaatcatatctgtagagttctttttgccatataaggaaacatatttatgtgttcctgcaattaggacagaacatctttggggggccatttattctccttatgacattcctctaaagagtgccagtagatataaatttggatatatatttttttataaagtagatactgaactattcttattttttaaaaagtattttgtattcagagatacaaattccagaatatctctgaaataatattttactatatatgttgtactatagtttataatactatattgccttcaaagtgccgccaatctgcattccactttttatttatttaacagtttcctccagagttaaaatgtttgtgtaactgggttttaggtggagggactgggggcaag

SEQ ID NO: 130945 - DNA, 1036 bp, Homo sapiens
tttaggaaacagagaggaataggacacagtctctgcccttgaggtgcttataatttagtggtaaagagtcatgtaaataaataatccaaatgcatgataagtgccttaaagtagttatataccaagtgttgaacagaggaaggggctagtatacgaacatggaggatttaaggaagtctttataaccaaagatcacattcaaactggccttgcaggaaaaagtatgtggagaagaagggcattttagacatatgctgtgaaaagcatttagacacggactgtgaaaagcatagtgcatggtgtctttggggaatagccagtattcctatattgctaggtgcatggaagatggaaagaagggatggagtggtggaaggtgaagctagttggtgagagtcagttacaaagggcatcatatgcaggactgatattcaattgacctgcaccagtacagagacactaatttttaaaaactgaatcactttgatgcatactactaaatattattgagagaataaattatctaatgatgttgtctagtgcagtcttatagaattatgaaacctagtaaccttgctggtatgtattaacatggtccttggaaggcatgtactgcctgtagtgtcagtgcctacctgatacccctgtgccctgttgttggtggaggcaatggaaggctgcagtgcaagtggttttcgtggtaactgcattttgcagggagtgtcctgaggcacagtgctttcagtctctgtggaaaacactaacagctagatctggggtatccaatcttttggcttccctaggccacactggaagaagaagaattgtcttgggccacacataaaatgcacgaatatgatagctgatgagctaaaaaaaaaaaattgcaaaaaaatctcatcatattttaaggtttacaaatttatgttgggccacattcaaagctgcccttggcccgcgggttggacaggctcaatctagatgtttatgtgactatgacatgcaggcagcctgcccagtttgttttaaagttgta

SEQ ID NO: 130946 - DNA, 1286 bp, Homo sapiens
ttacatagatgcagttatggtatatatacagttttatattttgcttatttattataattttttacttaataggatatcataaatatttcttccatgaatagattttctcagccatctacctcagcatctgtcacatgcttgccatattcaattaaatgggttcctctccattctagttttcagtaattgcagaaaatttcattgcaattaaaacaaaaatagtcaacattttactattcatttttgctgtgtgttttgctttgatttttgctccggtgtcatgccaaatgtgggacataaccctatttcctggattctaaagttgtactcatatcaggcagctgcattagtagcatttctctggagatttggggataaagatgatgaggttcccaagagtggataattcaaaattgaagtagactttctcattcttaaaaaaaaaaaacaaaaaacactttgagcatttctacccacttatgtccattttgttgcccctgcttcttcctgctctaccttgcttctctcatttcttttccactctccaatctctattagttttgtaatatcaggctagtaatgttttttttctttcagtctattttctgttggagtttcctttcaactctgcagtagtttatcaaagtattttcctaaatggacagtttcttcctcaaagaaaaaatcttcaatatcatttggtaaagtatttttcctccattctactgcatagtcttttctatcaattgttgttcaattgaattttgttggtctttaggggattccttcagacttaggtttgcctagacctaactaatattaagatttcagtaagggttttactgcatctacttaagcgaaaggtgaagagccattaggttgtcattataattagatttcagcaattttttttcttaagatcatatggagtagagtgatactttgattaacaattcttcgaggatatagctcctttaaaatagcctcggtaaaatagaagaaaaaattattggtcatgttaaacagagttgttctgattcttgtggctctaagacagtgttactagtggcagtgcagtttctatttatctgcccaagtttgataacaatgaagcctgggccaaggtaaagtagtgagcttgttggaacctatcttgtgctctttgtcattttcccatttgatacctttctttttaccacttacaaatgacttcttcctttgggtatctgatggtttccaactctttattctctcctcagtccctagtgcattagaaaaagagtaat

SEQ ID NO: 130947 - DNA, 1732 bp, Homo sapiens
tacatttgaaatgaagcatttgaaatgaggagatccacgccaccgaaagttgtgtgattaagaaaacaaaaaccacactaaatattttaaacaaagaaaatttaatacatacggaatcaattgccaaaagtcctggtagggctggagaagcagaaaatggacagtgaattcatcaaaagatcagtaactgcaggaagacactactgctcctagggctggcagagaaaaaaaggaaaatggtgttaaacagctaatgagtactatgatgctaaggttgttggagtactactgctacccttgaagctgctgctgctgctttacaggatgctatgagcctgcacttctattgatccagaaaacctatagtcctgttgatggtgctggactcacctcagaggatgctggagcctgcagtcacccattgctacccctgccagaactgcactgttgttacagtagccagaatttgcattgtagttatctggtgctgctattgctgctagaaccagagaccatgggcaatctgctgagtttcctggaatactgatgctgctcctgcaggaattagaaacagaaggaagaaaataaaatgatctaccttcttctgtcatccagtttttaccagtgcttcccagtggcagaacataattggaaaccagctttcaagggagtgtgacaaatgtaatctttagagaggatagtctgaaataagagcaggaatgggctgagagccaatataaagccagcacaggaagaagttacaaaatattgattctttaatcataataagaagaaagaagcatttttgcaaattttctgaataacatcaagactcttcttttttttgtggtcaaatgattaagttacaggggctggtagaaaaactttgaaagtgtgatagttcttcattgaggtatcaaggtatttttgtttcaagcagcaaaaatggcccctgttaacttaaacagaaaataatttattgtaagccctaaggaatagctcttagaaaagttgactagtccctggaaaagacagaaattaggttagctctggatagctgtttgcagaaactaatggatggcctgttcaatgtgctacccactgtttgtatggatcagcttcactatttgctgcttgaagttcacattacatggaaagaggcagtccggcctagcttgggttagttaccaacccttggacagaggagggtatggcaccttgattgacatcaagactatattcaataattgaggactagttctcaaagaaaatttgagatattagaggagaatagatactagacaggcaaaaatgacaaaatatctactaattgaagcttgttttaaattagcaataggtagctcaaaaccatacctgaaagttcttgagcccttaatatgtaataggcactatgatctcttttaataatatctttgaggaagttgtcattattatcctcattttacagatgagaaaaattgagaggtgcacttctgatgatggtggattaggcaatttggactaactcttccactgagaacaactagaaaagctggatcaaatataaaaatcatctgttcgtatcagagagctaacacatcaatgaaggctgtggagacaagatcctggagaagaaggaaacccaaaaggtgagctgtgcatttgaagcctctttctactatgggaatctcgctgtttccagtagaggtggccaagaggctgagaagctaag

SEQ ID NO: 130948 - DNA, 1082 bp, Homo sapiens
gaatgcccgcagagctttgccagaattcaacgttagcttttggctagactccaggagccagtggtgtactttggccatctgttctgcttcctcaccttcagttcttcccaaactgtggggcaacaatttggtgcattttgattaatgataggtttagcaatgggtgatggcttagtctttcaggtagctaaatgtgacaagataagtagagctcaactttaataagcttctgaatactctgagattcgagtgatgaagagaatgtgaaatcacataaggaacaaagttcagaaggagctaacatgtatagagcagtaggcatggtgtgaggtgctttatgtgtatcattttattatagcaaaaaatccagggggaagttgctaccatgcttattttataggtggaactcagagttcaagtaattacagtagcaggtagtatgttaaaagccaagtccatctgtcttcaatacttgtattcttatgatatagttgacacaagtagagactatagcaaaagtagaagcagctaataataaaatagtagtttgggtcacctctgactttagtgtcatcatattgtgttttactggggagccaattatttggttcagacttattttctgggaatggaaactgcagagatattctgataacctactttggttgtagtaagttctagaaagatgctctcttgactttgtgttagcagaaacaaacaagggcacttttgtgtgtatgggaccaaattaaaaatttaaagtttatttaaatacttttataaatgtgatttatggcagagaagactttaagactctccatggacctaagaacaagcagtaagaaaggagaagtattaatgcagagtatagaaacggtgaaataatcttaagatgtacattggtcactgtatcagtccattcttgcattgctgtaaaggaatacctgagactaggtaatttataaagaaaagcaggttaatttaattaacctcatggttcctcaggctgtacaggaagcatgatgctgacgtctgctcggtttctggggagacctttcaatcatggtggaaggtgaggggga

SEQ ID NO: 130949 - DNA, 1014 bp, Homo sapiens
aagatttagaaaaggatagacttactctcaaatctatgaagtaagaagagaagtgttggggctgtggaaaattccaagagagagacctaagcagtcatttggatttgtgcttagacatggcaaacttcaaatttaggaactgcagtataagaagatataattttctgtacttagcagttgggtcagtcagttcattcttcttggggagcagtggagcatctcaatggaagagatgtagttgttgctaaccttagtgatttacctcaaccctccaaatagtatggtatttagtcgtagtataattttaagaagaaatgaggacttcctcttcgatcccatcccacagaaaacctcttccatcttttttttcctatgaataaacagcgggaggtttttgttcttgtttttggtaactaattaacataccaagaagttactttcaatatttctctctcttacaaatcatgttgctgtgaacacaatggctaattcatggattgtagggcatttataccttttacactcttagatctttctaacctaatcttctgaaatttgtcttaatttgaacttattttcatatctttttcttttacaaacaacttttatgtacttcttaaataataagccaattaattgaatagggacaatttctaaatttcataattgttcaagatattatcagtgctatatgttttattttttgaaatatttatttaagttggtatgtgtttacatgttattcacttgcttattgaaattatttaaccataaataatactttgccaattaatttaggtgatcgccaattaatttaagtgatcaccaattaagatgacagcaaatactcaaatactttataaaccttgggtttttgttttgtttttgttgttttttggtagaggtggtgcacctttgcttaatagtgaactggattgaataggctttgctgaattaccatgtggtgaattagctctcctcataaatgtaaatatctcaaatattaataatatc

SEQ ID NO: 130950 - DNA, 1063 bp, Homo sapiens
tttaaatactaaatgatgtgactttcattcttgcaaataagatattacactctgaattttataaagagaatacaggatataattttattgttaatatagaaatagataccaattatatttgttattgtgacacaaatatgtctaagaatatggctttcatttattactatatcattaaaaaatgaacacagtgtaaaagtgaatcaatttgatctaaagagaatttaatttacagtgttaggtatagccttgtaatgaaagtctaggattttgctgaccagttttcatgactaattcttagtttccctctgagagggtaaaaactaataaactgatcacatagtcataagtttacctcttaggataagttctaggaaattgtgagaaaccaaatttcagaggcctttattatccttgtgcatgatttttctctgccttataaatatccagtcttatttcattttgatactcagtgatctatattgggccagtctcccttaatttcccgaatattgtgaaaccagtacacactaataggtctgtagaaggaataatttaattttaataaaggaatattaaaaaaatgaataatattaatttcatacacgtccatgtgaagagaccaccaaacaggctttctgtgagcaataaagctgtttatttcacctgggtgcaggtgggctgagtctgaaaagagagtcagtgaagggagatacgggtggggctgttttataagatttgggtaggtaaaggaaaattacagtcaaaggggggttgttctctggtgggcagttgtggggttcacaaagtgctcagcaggggagcttttgagccaggatgagccaggagaaggaatttcacaagataatgtcatcagttaaggcaggaacaggacattttcacttcttttgtggtggaatgtcatcagttaaggcaggaactggccatctggatgtgtaggagcaggccacaggggatatgatggcttaacttgggctcagaggcctgagaattaatcccaagaatgactcactaaatgtgtgccacgtgaggtagaagtttt

SEQ ID NO: 130951 - DNA, 1092 bp, Homo sapiens
tccagacctattgtagatctctgcattcttgttttttttccaaacacaatgtgggccagagggaaagatctatggtgggactgcattccttttgtaacatttaccgtaattataacaatatttgtgcaattatttgtttgcttattgtctccctagtacactttatactctgtagcaaaatgtatatttgttgagctttattcaccagctgttagcatagcatttggcatatagtagccatttagtaaatattgtataagtaaataaataatgaattggtgttaatagttacttgcccatctataaataaattggaattctatgatttcaattaatttttatggcaaattatagcttcatctaagtttatctactaaactaaatgtaatattattcttttagtagaatgtagtgaatatattatagtcactggtgtgttcatacgtgctaacaaccagctctcttttagaaaaatctctgacttttggcattttccaatttatttagtctaaatacatccaccacagctgatttcaagctaacccacattacttcatggaatgtggagttagggagaaagcacacaatttgttttcatgagttagtgaacaacaccgaagctctttcatattcatgccctggtaatggattgttcttcacatacaagattgtgctagtaatacacattgaataagcatgtactttaaaaagactgtgaattagtcaaggtaatgcaatcaattatagaaggtaaactcaaaaaatctttaaagctcaacttagtagaagtttagttttcacctatgtgaagtccacactggtaagctgatcagctgagtgctctcctcctagtgattattcaggttcccaggcacctttttttcctgtggcttccttatctccaaggtcttggctgaacagcatgaagatagcacatgagaatttttaaaagtttatgaaagtggcacacccattccacttataatccattggtagaatataattgtatggtcatagctgcccaagataacatggaaaatgtagttttctaagaggaaaggaaataagttgttgaatagctagccagaatct

SEQ ID NO: 130952 - DNA, 1726 bp, Homo sapiens
ggtgagaccctgtctctactaaaaatacaaaaaaattagccaggcatggtggtgggtgcctgtaatcccatctacttgggaggctgaggcaggagaatcgcttgaactcgggaggcggaggttgcagtgagctgagatcatggcactgcactccagtctgagcaaaaagagacttctgtctcaaaacaaaaacaaacaaacaaacaaaaaacaaagattacagataggctttaccttgtctatgatgaattaattactcataaatttattgaatttatttttaacacacgtaacttcctgatgaaatgcattccaaaacttaatattctattatgtgacctagtgctttagtatttcattttattcttactaaccctgcctctctaagctccacaaaaagctatctcatgtggttaatttttaaacaaatggagtctatattcctattatccttttttttttagtctgatcttatcgatttgttattcaaaaaatcttatttctgactggattcagacttagaagtagaagcttgcagacaggaaagcctgcatttcttagcaatttgttcctgacgcttctgtttagcctccttcattctcttggccaaaagttaagcatattctgcagcctcttcctaatttttcttagtatgctgcttctccagagcaatatggcaccatttgtgctgcaggacacatggagtaataagacgctgaattttgggtgctttggtcctaggtttcttaccttctttgtttaaaggctttcttacaacatactggtggacatcatcttctttagagagattgaaaagtttgtggattctgctagctcttttgggccccaggtgatgaggcatcgtagtatcagtcaatcctggaatatttttatctcctttttttacaataaccaagttagagcactccgattggcatccacaatgcaaccacgaactgattttctctttctttctccagttctccttggtctgtaacaggaatgccccttactcattagcaggcggacacggccatgaatcaagacacccctcttcatggggaaccattgtttgtcattcccaccactgattaggaccacataacccttccattcttcaaccagagcatcagcagcaacttctgtggccatatgcttctcataaaaagtgcagagtttgcgtttatcatccacttcaatgagtttctggcagccagtggctgggaaagagatgtccagcttcatcttgaagcaggtgaatgcctccaaggcaccacgaaaaagagcccattattcattttacttagtcattcattcactcattttttaaaaattctatctccactggttatctatttttttcatataccttgaccattataactgccatttggggaactttcttgatctctgaagtcactgtgtagcagatactaccagcaacccaaccacattgcctcatcattcaccattccctacatagcaaaatctgctgactgtaagtgtttgttacactctgcctgagtgctttctctagccagtgagtttcagagagttaacaattcccaggatcagccctggaccaacaataaaggagagttgataaattaaatactccaacttccttgtcctctatataggataactctgaggtctttctacccagtctcccagaggaagtccccacaagattaagatgattgttttccccaaagataggattaca

SEQ ID NO: 130953 - DNA, 1141 bp, Homo sapiens
atgataaacgcaaactctgcactttttatgagaagcatatggccacagaagttgctgctgatgctctggttgaagaatggaagggttatgtggtcctaatcagtggtgggaatgacaaacaatggttccccatgaagaggggtgtcttgattcatggccgtgtccgcctgctaatgagtaaggggcattcctgttacagaccaaggagaactggagaaagaaagagaaaatcagttcgtggttgcattgtggatgccaatcggagtgctctaacttggttattgtaaaaaaaggagataaaaatattccaggattgactgatactacgatgcctcatcacctggggcccaaaagagctagcagaatccacaaacttttcaatctctctaaagaagatgatgtccaccagtatgttgtaagaaagcctttaaacaaagaaggtaagaaacctaggaccaaagcacccaaaattcagcgtcttattactccatgtgtcctgcagcacaaatggtgccatattgctctggagaagcagcatactaagaaaaattaggaagaggctgcagaatatgcttaacttttggccaagagaatgaaggaggctaaacagaagcgtcaggaacaaattgctaagaaatgcaggctttcctgtctgcaagcttctacttctaagtctgaatccagtcagaaataagattttttgaataacaaatcgataagatcagactaaaaaaaaaaggataataggaatatagactccatttgtttaaaaattaaccacatgagatagctttttgtggagcttagagaggcagggttagtaagaataaaatgaaatactaaagcactaggtcacataatagaatattaagttttggaatgcatttcatcaggaagttacgtgtgttaaaaataaattcaataaatttatgagtaattaattcatcatagacaaggtaaagcctatctgtaatctttgttttttgtttgtttgtttgtttttgttttgagacagaagtctctttttgctcagactggagtgcagtgccatgatctcagctcactgcaacctccgcctcccgagttcaagcgattctcctgcctcagcctcccaagtagatgggattacaggcacccacca

SEQ ID NO: 130954 - DNA, 1140 bp, Homo sapiens
tagaatacaggtgaaacaaaaaggcaacaaagatggctatgtctttggtgccactttctgtgaattatgcacattcaataaatgcttggtgcatatgatgaatgagagaaagctgtaataattaaataacaaatgtctttaacatgactgatgtcttttctgtagcatttttatcttttattgaaaggatgattaatcaatagacttgaagacaaataatgatctgttcttatatggccaatgcttaatagacttctattttcaagaatatgatatgagctctgaaagacaaagtatctctcttaaaaaagatgtttaacatagtataataattggttttactgcatagaagtcagtttgttctcatggaatatgtaacttaaatatttcaatttttaggtgaaaaaaagaatctatttctattttcaactgaattaaacttgaaccattgtcaagtttccttcatttaagtgacctataaatagagttgcaacatgtgccagcttgcctaggacagtcccagtttacacatgctgtcccagcattcttcatagattgacatttgttctggattttatatgaagtattttattaagagttgcattaaaataagctggggtgagtttggaaggtctccattttgtacttacatactgctgctgccatgatttcatcctgtgtgggatgcatgtatggtgaagggttctcaactgaaatataatcagcaataacccatcttttccctaacttttcagacacaagacagctaacatttcttgtttaaggacaggatgaaggtaccactactaaaacgaagtgtgatagaaagatctttggtggtggtggtagaagtatttgacattgctgtgccatttgccttttgatgtattggtcagtttagtcatgatccattctttggcatttgagatgggagactataaggttgttggagattataaattagggtaggaaatagaggttgaacagtcctgtcatagaatgtacagaaggtagtctggatgtttttttctccagtggttttgtcatttattgtatagtgtaaatttataaatatttttgtattttattatttggtaattttaaaaatttgcaataaatatttcagcagcaagatgctaa

SEQ ID NO: 130955 - DNA, 1047 bp, Homo sapiens
caggctggaggacggtagcacagtcatgctcacagcagcctcaacctcccaggctgtagcaattcttcctcctcagcgtcccaaatagctgggactacaagtgtgtgctaccatgtccagatatttttttctatttttaaactcttagtagagatggcatctctctagcctgtttaggccgatctcaaactcctgagctcaagtgatcctcctgccttggcttcccaaagtggtgggattacaggtatgagccaccctgcccagcatgtgtttttcttttatggctcttgatttatttatttgtaatggagatataattcatgtgtcataaaattaacccttacaaatgtacacctaagtggtgtttagtttaattttgaagttgtccaactattacgactatctaattccagaatatttccataaaccctggaaaacttgtgcccattagcagtcacttgtcattcttctctttcctcagtcctctggcaaccactaatctactttatgtctctggagttgcctattctggacatttcataaaaatagtatcatgcaattatgtagccttttgttactggctctttcagttagcataatgttttcaaagttcattgattatatagcatgaatcaataattcattcctttttatgatggaatatttcattgtatgtttataccacatttcttttattcatcagttgatggacatttgagtttctcctttttagccttatgaataatgctattatagacatttgtgtgtaactttttgtgtggacatatgtttttaattctcttgtctgtatttttattataatcattccagggagtatgaagtggtttttatttgtatttccctaatgaccagtgatgttgagcatcttttcttgtgttcaatggctatttatatatcttctttggagaaatatcaaatcaaatcctttgttggggttatatttaaaaggccctttcttcttcactaagattaatacatatttctgttattgtaatactgttatgattttatgtttacattgtaaaa

SEQ ID NO: 130956 - DNA, 1357 bp, Homo sapiens
caccctgatccctggaacccctggatgttaccttacctggcaaagggactttgcagacatgattaaggttatggaccttgagatagggagattaacttagattgtctatgtgggcccaatctaatcacacgaagccttaaaggtagaaaacttttttttttttttttggctgcgtcaatgagatgagatagaaggaggagagattcaaagcaggaaaaggacgaaaatgcctattgttgagtttgaagatgggggaaggggaccatgagtcaaagaatttgccagcctctagaagctggaaatctccctcagtttatagccagcaagaaaatggggaccttggtcttacaaccacaacgtgaattctgccaatagtttgaatgagcaaaaaatagactcccctcagaacctccaaaaagagactcagctggcatcttaattttagtccaatgagacttctaccagactttctgacctacataagtgtaagacaacaaacttgtgttttgaaccatttaattggtggtaattttctttacctcaacaatggaaaattaatagatactcccttgtgtgaatatactatattttatttgacatcccattagtgatggacaatctaggctatgtcaaaactcgttactataaactgtgagtcagtgaacatccttgtacatgtctccttatggacctatgcaagactttgtagtctgtctatgtagatgtataattaatgtggcatagggtatgtatactttatttcactagttttgttctcaaaaatgcctcagtccatacttctacttgtagtgcttaaggatttgtgatttcccatatcattactaatatttgatattactaagcatttcatgtgtttgcagtctggtggatatgagggggtatttttgttttaatttgcagtttcctcattacattgaagctgaggatcccctcacatacatattagctacttggattgccattactatgaagtatttatttatctgtcaatttgaaaaaattagctccacatcatttttgtctgttgttttttttagcaggcattttaatgttgatgtagttaaattcattactttttaaaatttatagtttgtgctcttttagtcatgattaaaaagtcagtcatcattcagaatccctagaaatactcttttacacttctactaccagctttacagtttttacctttctcatgtatattttaaattaagtcagagttcacttgtggacatgatgaagtatgaatcccaagttttatttccccatatggtgagccactgttcccagcagaagctattagacaaactattctcacatcactggtttttgcacttat

SEQ ID NO: 130957 - DNA, 1053 bp, Homo sapiens
tttatagagctgttatttctttaaatgtttgatagaatttgcctctactgccatttgggcctagagttctcttgtagctctgtctttatttttatttatttatttattctatttttttctatttttgagatgaagtcttgctttgtcgcccaggctggagtgcggtggcatgatctccgctcactgcaatctccgcctttggcaattctcctgcatcagcctcccaagtagctgggactacaggtgcacaccaccacactcggctaattttttttgtattttaatagagacggggtttcaccatgttgcccaggctgatcatgaactcctgagctcaggcaatcctcccgcctccgcctcccaaagtgctgggattacaggcatgggccacagcacccagccagcaatgtctttaaagactatgaattcagttttttcaatgattatgcagccattcaggttacttatttatccttgagcatatggatatttttacagtctagtaaatatatagccatggtagctatatttattctagggttgtctaaataatcatttaaaagtattctttcttttccttttaaaatattagaggcagaatagacattttcatactctttttcaacataacctttttcatgttccatactaatctgtatatcttacacctatatttaattccaatttcaactaacctttatatctgccagtactattgggataattttagtgataatttctcgttgtctcaggctggacttagtgactttttacttttcatctgagatattcaatcattgtcattcacctttaccttgcagaagttttgccttttagtctgctatccacttgttttgtccttcttatttaaagtctagtgaagccgttatccatttcctgtagggcatgacttcactagattgtccacttttgaagcacttgcttttcaataatactttaactattttatgccaatatccaatgtcataatcggtgacatttaattgagcaagacactacttattacttgctatttcttgacaatatctgtaa

SEQ ID NO: 130958 - DNA, 1085 bp, Homo sapiens
tgttcatggatttgtgttccattttgaagatagagttgatagaacctaccgatagatttgatttgtgtggtggagtgtgaaagcaaaagagatatcaaggttaattcctagataaatcatggtgttgttttaagacagaaaaaaaatgggaggaacaggtttgggtgaggaaatcaggaattctgtttggccttgttatgtttgagatgcccttttgacttccgtttggggattccaaattgacagatggttaaatgagtctggagttttaggggaagataagggcaaagatatacagaagatatttaaagccatgggacctaagtcaccgggaagggggagctgtaaataaaaagagcagagagggttcacaacacagccaaaacagggccttggacattccacacatttaaagatctaagagaggaatgagagccaacaaaagacactgtgaaaaaattgacactgtgaaagaaaatcagaagaatgtgtctcaggaatgaagagtaaaaatggtttaaaagtcatggatagcattagtgtcaaatgatacagataagtcatggtaaaaaaagaacagagaattgtctgtttagtttgataacatgcaagtaattggtgagaacaatctcaatagaacattagtgctagaaaattgattagtatggatttaaaagaggatgtgaaatgaaaacatggccatagcaactaaagacaacttcttcaagaaattttgctgtgaagaggagcagaaaaatggggtagtacctggaagggaatatgaggtcaagggaaattctgttaagataggaaataatatagtaataaaatcactgataacttgattcacatatacaattaatattatttgtttatcattacaagtatcattggaaccaagggagttctaaaatagactaaagagtaaataaactaggtattttatggaggagctggtaataaaaagggtaagacagatggaaaattgatagaatagatcttgtttatattatattttcctttcttttctattttcacatttggtgcttaaacacctttacttttaagtagctaggatctttgat

SEQ ID NO: 130959 - DNA, 1091 bp, Homo sapiens
ttactttactcaagcaaattaacatatcctaatgttcttaaagcttctaaagcacttttttctgacagccaatgtcaaagtgaaacaaatatttgtatttatagaataggtagcctttgggagaaaagatccctcaccgccttttttcatagtgtaatgagtagagagaggaattatatgaaagaaaggaattatgaatgggcactcttggaggccaatgttattccataatatttcatttgttcacatattttgctgaaacacatttatagttgtgcaaatgactattatttctaatatcttatataatagcaatgtgcagtcaatatttgtttctcaaggaatctaggtgtacttggaagttactagatagcagaggtgacttgcagaggcagtttgcaagtttaggtgtgagttcttgaagttccagggctataaacattccttatattgtggctgttggtgaatgtaactattggagatggagttgaagcttattcatgttgatatagctccctgaaattgtaatgttgctttcagtggttctcttgttagttaccaaggaaatatatacttggaacaagcagtcctaacgctaaaaggattttccaaatttttttttcagggatcttggtcctctttcttttaattggtagaatcttcaggtgtcactctggacattctcattgtggagcttaaatctaggtttggtactctataactaactcttgtattcaacaagaaatatatttctgctgttgccagcttttatttttatttaattaaattaattaatttatttttgagtcggagtctcactctgtcacccaggctggagtgcagtggcgtgatcttggctcactgcaacctctgcctcctgggttcaagtgattctcctgcctcagcctcccgagtagctgggattacaggcacccgccgctacatctggctaattttttgcatttttaatagagacggggtttcaccatgttggccaggctggtctcaaactcctggcctcaggtgatgcacccacctcggcctcccagagttctaggattacaggcgtgggccaccacacccagctgttg

SEQ ID NO: 130960 - DNA, 1048 bp, Homo sapiens
tgtttttgattgcaaatattggttactcttgtatttatgacccttatagaagatgatgtggcaggctaaaaataaacaagcaaaaaaataaataaataaaataaacactgtagaaactgagaaccagatgaagtcctgtggcggtttcctatcctgtctatgtaagtgattgaaaaagaattaactttttgataacatgtaggcatccatttattcaacaaatgtttaatgaaccgcctaccctgtactaggcactatgctagatgaatgagacaagaatgcaggacttaacctcatggaattgagggtgaaagatattaaacattttttcaagtaaatatatggtcacatatatcaaatgttgtgaagaataagcacagggtataatgagaatgtataataggggacctaatttaggtcagacaaagtctttctaaaggagggacatttgaaaccttaaggatgagtaggggcaggtgaaagggtggtaatggagagggaaggtggaagagatcatttctgggatactgagggaactagaagaaagctgctcactagcatgggtgtagtatagtgagagctggaaaaataagtctctgaggaaggcagttgatgtatcgttgactctttcaaatgagtcatttttaagtctcattctagtgtttccattacttagaccacttcgatgctttttctatgacttagtcttcatatccaattttgaaatataaaagaaacctttttaacagtaaatgttgatttgcagtataatcaccttcttacttagtagacttgtttctaaaggggttctgattatttataaaaattaaatctatttaaaaggggaaaatttacattttttcccctcacagatagtatgagctgtgaaattgacttgaaaataagaaatttaaaaatgtttgtttacacttgtagaaattgacctttcaaaggtgtgaaaaatcaactcataatcagaggcttaaaaattaaagcacctcaggttgcttctgcttgaggtaaatggaagaagcccatttaaagttac

SEQ ID NO: 130961 - DNA, 1022 bp, Homo sapiens
gatagatgttttctttgtgatcatggcagtgattacattgcatatataaggatggggctatataatcatatgtgatttgtttgaaaatgtgaattagctcctgtaaaacatgtggaagatgttttctaggtttaagacatttctctatgctgggtagctcaataatcacttttaaacaagatatattgtggaaccgcgaataatgctttgcattaggtcagctaatttggcaggattctttgttataaattcctattgctttttcaacctgatcatttttctatggtgaaggctgttaaattatgaacatatctctcagatggtttctctggcttacactaaaagatattctattaaagaatgtttttggaatgcagttttatcatccagttctttcctcatttaagttgtttggcttttgagaatttctcatgttacatgcttagtaaaaaaaagaccccatttaactaaatatatgtggagaagactgagaaagaaattctgtgaacatggcaatgcactgaaaccttctggaaaccgatggggaactaatagtgcataaaatattgagtggttttacttgtctcttcttcttagtatctctgaacaatgtgaggcatcctattttggagattaaaaaaataccggttatacaatatgtattttaatttagcaaatgaaaaaaaggcttttaaaatttgttggcatttaaaatgtttactgatgataaatatatttataacctttactttgaaaatgggataacatatctatttcttataaaatttcactttctttcctcaatccagttctgttcaataaactaattggattttgtttatattttatcttgagacaaattaaaaacatcaaacagtatatgaaatgttaggatattctaaattggatatctgtattttaagatgctgttttccttttttaaagtgatacatcactttagtgtctataatttatcataaaaatatatattttatgttatatttaaattaaaaagcaagtat

SEQ ID NO: 130962 - DNA, 1095 bp, Homo sapiens
ggccccaacaaaagaattcctaggactcatccacaattttagttttgctttcaaatttgagaaattgtaagtattttagaaaaatgtgtgaacatttcttatagggaaaaatggaaaaacccattgcacgttaaaaattatagtatcttaaaatatgagggctctttattttgcctagtgtgttttaaactatgctttctgttttgggcagagaacgctttcaaggtctaactcaatatgcaaagcagatagaagtagagcagctctggtatagaaagtgggacatgggacccatgtttggttctaagaaacacatttggagacttttttattctactgctgtcattttactcttgaacaaactaacgtccagctgcttacttaaactcaggacttacggttactcatatggctttaaacttttcatttcatcataagtcctttgaaatgtgagacgtagagttaatggaaaatgataaggaaaactgctgcatttaagtaaggatttatttgtgcctgacttttctgctacacattgtagctttatgttgggtagtattgaacatagaagtcgtgctcatatctagggtctgctgcttactggctatgtgttactggtaaagttgctgtcctatgagctccttgaattaggggctacatatttattaatctctgaattcccacagttatattcttcacactccttcccagtcaatacccactcccctcagcctccagaaccaactgttgtactgcttccccacctagtgtagattagttttgcttgttctaaaacttcacataatgaaattttatagaaggtaatctttttttgataaggcattttactcagcataattttatttatttgtttgtttttatttttattttttgatgttgtctctctctgtcacccaggctggagtgcagtggcgtgatctcggctcattacaacctcccccaagctcaagtgatcctcccacttcagccttctgagaagctaggaccacaggcatgtgccacaatggctagctaattttttttttttttttttgttagagatggggtttcgccatgttgtccaggctggtctca

SEQ ID NO: 130963 - DNA, 1006 bp, Homo sapiens
gtgctgaagaattttatgataattatttataatcatggctgatcttttaaattaataagttttcaagctgggcatggtgtttgtaaccccacccctttgggaaacccgggcagcaggatccttgaggctaggagtttgagaccagcctgggcaatatcgtgagatccccttctttacaaaaacaaggaaagaaagaaaaaaaatagccagtcatggtgttgcacacctgtcatcccagctgcttgggaggcggatgcaggaggatcattgagcccaagagttgaacgctgcagtgagccatgacatgtttgcaccactgcactttagcttgagtggcagactgagaccccatctctaaataaataaataaataaataaaatttcctatgccaatgtatttttttgcagtaagtttctcaacaataattttttgggtctttctgagttatatcttaattttggaacaaaacatgatgaacataaaaataggacacactaccttttctagagaagttgaacagcttgttataaaaactatttgcacaaaatgtaaatctgatgatgaaaatacacatagagaaatgtgtgctttaaaaactattaccatatttcccatgaaacacacacagctaaggacattcttatttgtattttttagtgttggcattgcaacaaatgtatagatgagcagtttcaatgaaaagtggtaccacagtttgatagtacagtgcaaagattatatggaattgttcacctgcatgagcatatgaatcttttaattttctctacgtattttttatgacggttaatacaaagaagattcattactttataaaatgcttaatgcaaatacactatatgttagttgtctattgttgtctaataaattaccatagcttagtgggttaaaacactccacctatttactgtcttgcagttctataggtcagaagtccaggtgggcttgtttgagttctctgcttagggtctcacaaggttgaaatca

SEQ ID NO: 130964 - DNA, 1065 bp, Homo sapiens
cagaacttctattcctatttctggagcttattcacttagctctcttctgccctagtactttgcatcaaaaattctagctgccaagaccatactttcagggattatttctgcagttcattactaaaagaagtttctatgaatatgtagcgcaaaacaaaaacaaaaacaaaaacaaaattctagctgtcttaacaagcctgaattttaatctctatttttaacaccggactgtgtttcttatgctccatgaaaccaatgctttctgcttggactccagttcctaatactacagttggaagattgtttccaggtggaaagctaatgtgaagcttaccgctttctcaagaatctcagccttatgttttgtcttgtccaacacattaaagtggttgtttcatattctgcccagttttatagttgtttatagaaagaaggcaaacctaatactagctactcaggaacctgttaattatttcataataatgtaataaacattcatgaacataccctatcaagcaagagctagaaccttggcaatcatttccttgactcctccagtttgtggctatcatgatattcagccccaagttcatcatttctgttttttcttctatacaggtttcttatatgtatttctaaaaatctttggttatttcatctttgtaaaaagtcattgttctatttttcccactagttctacattgcattcatattgttgtgggttgtggtaattcatttattttgactgctgtataatattttagagtttgattatatcacagtttttaatccactctcccacagagagattgttggggttgtttccctcttttgccactgtgaaagtgctgctgtgaagatttttgtgtatgttttctgttgcacatatgtaggaacttctcgtggatacattccgttcatatgttaactttaggaaaaatactataagtatttcctatatactatatacgatatactatatatatcctatatacctatatactataattaggaataataatagttttaaggcaatgacagttcagtgtattcactgtatactgt

SEQ ID NO: 130965 - DNA, 1041 bp, Homo sapiens
gaatgctatgtacacacacacacacacacacacacacacacacacacacacacacacacaggcaactcaaaagtttaagattcaaagaatgacacttttggactgaaataaattaaaccaaacaaattatgtgcactgataagcaaaatgggactttattcatattatgatttcatttgctgcattatttttgattgcattgcaaggacatgtagaatatgaaaatgaattgcacttttagaaaaatcattaattgtatggttcagccctgtaaagaacaaaaaaaaaaattagaactagctagattgcatgtttttgtatctctcatgtgtagatgctgcaaatcgtactcgggcagatgggcatttagaccaatcctccactgcagtttccgtattcttctcccttactccaagacgggatagacactaatgacttttccccgaaaacattacttagagagtgaagaggctattttaacagtaggattgtgattgcaacttccagcaagattggatcctgttttttctcttatgtcagaaaagctggtttgcctgaggggaattagcattaattgaactaagaagcaagctagtgacaaaagaaaatagtatagatataatagtgatggactcacatagggacttgggggctaattttagcaatttaatcatgaattaattaaatacattttaaaatgatttcatttatttgaagtctgaaactaagatcataggtagtattacagtagaattaaattttgtagttacaaagcattttctttttttttttttactttttttaagatacaagatgtacatgggcaggtttgtgctcaattgcagtatatctcagtgggtatattgcaaccaggttgcaagcatggtacctaataggtagttttttgacccaaacctcgctctctccctcccgcctcaagtgcagcacagtgtctattgttcccatgtttatgtccatgggtgttcaatatttagcccccacttgtaagtaagaccatatggtatatggttttctgttcct

SEQ ID NO: 130966 - DNA, 1771 bp, Homo sapiens
ggggaaacattgcctttttactgaagattaagaaacttgttagtgaataattgaaaagaagttacagaataggcctgttaaactattactatacattttatggtgaaagcttaagcagcacaattatcaataacaagcacatagttattttagaaatactgcaattcatataggagaaggtgatttataaatttctaaatccaccagttttaagcgtagtgcccagaaatgccttggatgcagcttgcatttggtgttcagtattgtgaggcactaatcagctaagtaccataatcctccttacagggtacattcttacttgacctggagctatatacagccacatagtaacagcattaaagaataacctttttcttaacaggcccatcactagaggattctatgactccatcctttgaatgagtgttgtttttgtgtaattttttagtaacttagttttgaaataaaacaattgtaaacaagtagagactttcaaatcatctgattaaggatggctcctatgattttgccagggctagaaggattaaatgaaagcactgcctggcacactgttgatgtatttttgtcaacatgatgcttcatgctcgacagatgtgcattggttgaacaaaggtaaaataatgaaaatatattaaatcttaattgtgatatgtaaaaatttatatatttttgtttttttataaatagaaattgatttattcaaagctttttgtaggaattatagaaacgggcctttgttttcatgttttacaggattatatacttctgttaaatccttgatttaatgtgttttaacaatttaaaattttagaatttggttgcaatgttatgcttaaactgcatggttagttagcattgtgtaattgtattcatgaagtattacattagtttatttagcaatatccatgctttataaagatttttaaaaacaagtaggtattttttcaggttattgatttttaaagagtgatttacatatttttatttataaagtaacaattttttaatgatctctactaataatgcttatgagtcaggaattttcatataggtagtacttaatttaataatataaaatttgaatttacaaaaattagtaatcttcaaattttgcactgtatgtccagtgttgtcataatttttaaaaattgcatatttctacagttgagttaaaatatgtaaatattacagtgtaggtttccatgtaatttttcactgtttataaatgttttcaaatgttcattagactatattttcagagatttgatgattcttttatcaatatggtcagaattatagctggtattagtaacacaaatcacttaagatggtaaagcctgtaaatattaaaatggaagttatggtaaaaacatgatgaattaatttatggcatgtaaaccctggatgcctttgggaaatctggaagtgattttaattgggaaagaagcttctttggagttttcccatcagtcagtatgctttttggacatagaatttaaggagtctaattggtaggatttcctacgcaaactattttgcatagttagaataacatttataatggagcatcagatgtgttatacaagctagaatatttagaaatagattgaatagtccacatgacaaacaattgtaagcaaggaatagaaatgatacttactacagtagatttaggatgtttaaaatgtggttttctataaactggttctaattaaggacagaatactctggcaaaagagaaagcaattct

SEQ ID NO: 130967 - DNA, 1099 bp, Homo sapiens
agaggctcagggaccaagttcttatgcacaaaggaccacaaaccatagtcctcctacccccaggaggagtccactacccatagatagaccagacttgaggcgtactgactcactacggaaacagcaccacttagatcctagctctgctgtaagaaaaacaaaacgggaaaaaatggaaacaatgttaaggaatgattctctcagttcagaccagtcagagtcagtgagacctccaccaccaaagcctcataaatcaaagaaaggcggtaaaatgcgccagatttcgttgagcagttcagaggaggaattggcttccacgcctgaatatacaagttgtgatgatgttgagattgaaagtgagagtgtaagtgaaaaaggtaagctttctaatcatacattttgctgtaattgattagataagcgttttttttaatagattgcatttctgagtgaaaatttaataggtattactagtagctttattttaaaagtcttttaatggcatcgaacgtgtgaagaaaatttcgtgttataaaaagtatcttctgttgttcatgtataagaacgacagaatgatgttctattgatttttaaaaattgccttcttgctttgtttctgaaagttttcttgtatcatttgacagcatatttcaaaaatatccattaactgtagtttttaaaataacatttattttttgtctccttataaaagtaacaatatattcactataaaacatctgaaaaagtcctcaaagcataaagaatgaaatgcaagttatccatatttcttcccccagatataaccattgttaaccttttattgtattttctttcttttttttcctatgcatgtatggtttatagatttataaaattgatatcatgctatatataattttgtatactgatgctttcaattgttatcacatcataaatgatttttttcaagccattagatgttctttagtaatacgttttaaatagctacactaatattctatcataagattataccacaactaaatatttctttatttggggcattgctgtggcttccatttgccaatgtaaaaattataatggttatctttatacatac

SEQ ID NO: 130968 - DNA, 1004 bp, Homo sapiens
cctttattttctcccttatctcataatggacttgtcttaaatattttctttatatatgttgaaaaccacatcagacaatgtatgttctgcactttaaatatcagaaacataatttagaaaactcaagaggagaagaaaacccatatttttgtttagtatctttatttcttcttgatactttcagattccttctttttttgtttctcttttgtttcaagaacttcctttagttatttttttaggatagatctgctggtgacagattgtctttgttttcttttgcctgagaatgtatttctcattcatttctgagagataatttcatcatatttagaattcaggttgacatttctcttattttagcaattgaaaaatattgtgccacttccttttggcctctgtttctgatgaggggttggctatcatttgaattgtttttcccctttaggtaaggtgttgcttttttcttggagcttttaagatatttcgtttttagttttagtttgattatggtgtatcttgtaacagatatctttgggtattgtttgtatagggttttacatagtttttcaatctgtaggcttatatctttggccaaatttgggaaattttcagtctttatttctttgaatactttttttttttttagcccattcactttcttttctcctggacttacaatgatatgagtgttagactttttgctatagtttcttaggcccttgaggctccgttcattttcttttcttttttttttttttctgtagtctgttttctgtctgtttttcagattgggtcatttttattgttccatcttcaagttcattgagtcattcctctgtcctctccattctgtggttgagcccatcaatttgctttttgtatttcagtaattttttagttctaaaatttccatttggttctttatgtgctttctagttcttgttctagaactggaaagcccaataatacatttttgtactgttactaaagaaagatatttt

SEQ ID NO: 130969 - DNA, 1179 bp, Homo sapiens
ctttttgaatattagctttcttttggcatatatatagcactcactatatatatatatatatagtgagtgctacagacaaagttcttgagaccagacaggatcacacagtttaaaatgtttataatgtctctgtctgtcccttttttcaccatctcctttactgcactcttttgtctgactctcacaggagacatggattacaactggttggatcatacgtcttggcatagcagtgaggcatccccaatgtctttggtgagacatgtggagccttactatttaattttcgttatcatttcacttttccttttttatttacacctttgcatgtttcttttttgtatcttttttttttttttatcccatacctgtaggggacagtcaaaagggaaaaagaaaaactagtgagcaggcagttttgtcggactctaacaccaggtctgagagacaaaaggaaatgatgtactttggtggccactctttggaagaggatttggaatggtctgaacctcagattaaggactctggggtagatacgtgtagtagcacaacccttaacgaggagcatagccatagtgataaggtactgagattgtggagcctgccttttaacctgctcatttggtcttcgtttgctctctgtcactcattaaaacagaacataataaaaggacagggcatctcaagggtcactgtagcatttcttaaggtgcagaaaagaaaaacaaaaccaaactaaacaaacaacaaaccaaaaaaaacctcttgcttgctttgctgtttttattgtttgacggcataccaaaaaataagtatatgaaaataaaacttaggaacaaaggaatgttttgtcttttgtcgcatgagagaactttgtaatgttattaaaaaccacaaataataaataagttttggattggcttatttgattgtttgcatatattttccttgggatgaaaattaaattattaatagtttgaatcccaggcaaaagggagataattgggtctgtttgcacagaaaaagttgtttttcttttttccctttcactgtcattttggtcttttgttttattgtcatagcattttaatgtggtattaattagtattagagcccttgccatctgctttgatatttatcattgttgctcttaggatagtgggacttttgatatctttt

SEQ ID NO: 130970 - DNA, 1179 bp, Homo sapiens
cagcaggtatacatatgactccacagcattattcctaacatttttattcattttctaaaagttatattttaatagaaacataaaaatgaaaaattgggattcagatggtctgaattttatgttacttctgatgcgattacgtaaattttgtaatttttttcaagaaagatccatcatcattaagcacattatcagtgtttctaaaagattatcaatgaaaatttggtggtatatcctaattatagtaaaagaaacaaaaattttgtattaaagtatttacatctataactagaaatgtttatataattaatgatactgtaaaatgtttttgtaaatgacaaaagcaagaattcctgaatcaggacaaaaattaccaattgttatgttgtttctaagttatgcaacacttcagcaaattatggattaaatggcaaaacagttggaatatgtgaaaaagacctagctcttagggcatgtgctaacctaatagagacaataaattatttaagaaatcattttctgtacattaaattagcgttttaggtgttgcaaattgttctaggtattcttttacctgaatcttcaaccatgctcattttaacaatattcccatgttaatactttcctcttttaaacaggttgtaggaggaaagatgactgaatcaggtcggctttgtgcatttattactaaagtaaaaaaaggaagtttagctgatactgtaggacatcttagaccaggtagggttttacctttgattatttacatttaaaccattcaactttagtagttatgagttattttcatttatttagaagtgatttgacaataacaaagagctcatttaacttagatataaatctctattcattaatggaaaggcaaaactattatttcttgagtcatagtagataaaaatcatttttatttgactttatcttacttttttctgattggtgttctaatctgtatctaatattaacctgttttgtttcccctaagacctttttcttttgagaaaattccaacatagtttagaataaactttatggataaaggcatatttcctaccgtgtgtgtcaccccttatctctttgttaatggatactgttggagaaatccttgagtaccttaaagaggatttgataatatactaattattaaggtttttacaagagaat

SEQ ID NO: 130971 - DNA, 1021 bp, Homo sapiens
taattgccactgaattgtatactttaaaatagtcagttgtatgttttgtgaattttaccttaattgaaaaaatattgtcaacgcaaaaatatatttttatagccatatttaaaatataaactcatgggtgaagattaggtgtaaattgccataggtttcagaaggttgatttcagaagtctgtgagatgcatgtctgagttcattttagaacatggaaaaatgtttgcttttaaaggattaatttatttgaaagtattccttttaaagtgaatcttttattttatgacataatatttacttgtaaaaatattctgtaacgttaatatttttggtctaaaacaaaacaggtaggaagacaggggaaataaaatgtatttctaaagtaccttgtttagtccctttcttcaacatgccaaatttctctatgaatttcatatatcccctctgtcatttgctaaagcattataatagcctgtggttatgccaacagacatcagtaacacactccacatctgaatatttctttcttcctttgggaatatttccacataaaaaggaagacagcttagatttgaaactgccttggttttgaaagagacagagacagagagagagagattgagagagagagaaagatgactcatgactgaatgacagtctgcttttaagtctgctttcctttgggttttagatttatgtcttaaataaacgtgtctgttcaatgccaactgaattgagcaaaagtactcctagtactcattatctgtttccagttagcagtggaaagagagaagcctttaactatttatgattttgaagtaggcaagagagacatccataagaaatgtgaggaatgggatggaatcttggtgatagaagcagaattaaatgccttgaaatccattcccaaacctgattatgttctgattaactgttggaatgcctaataaaggcacaacattctgattattgtgatgtcttttggaaactgtttcaacatgaaaacaaaagtcagtaaga

SEQ ID NO: 130972 - DNA, 1011 bp, Homo sapiens
agtatgggcaagtatgactagcccttttctgtgtttcctcatctacaaattgtaagtagaagcaactacctcataaggttgttggacataccatgaggcaataaacttacaataaactgtcaataaaggcttggaaaagtataacgaactgtataagcaaaaagaaacaagatattgtcattaataggtgtgattagcagtaagcagtgttatcttgagtgatacataataaatatctgatgatggtgtttcaatactagaacctgatagggattcaccaagtatgaatcaactaattagtccaacgtatttctgcacacttttattttaatgtgtttattcttttaagaaattctaaagccaacttggctaatagtttttggactttgggtagacatactttggagaagtcacacaattacttccacagatggcttttcactaatgactctgtaatacattttcaactaacttctttttgcactattctattttttatgtagtgtgtttaaggataaaatatgaaatttattgattcttgggttatgcttataatcattctttcaaagtacatgagcccaaatatattattttatatccagtcttaattcttgttatgtgaactacatttgaaaaattggattatacaaattctaatattttgtatagtttttaatgttttttggcattggacaaaattaatttattcatcacactgaagtacttaattttgataaatattgtcatggaaaaattgtatttaagggatagttgtatgtgtttgtttttacttttggtcttttagttccagcgtgttgtcctttttggttttgttttattgcttttttctttaattttgcttaccagagccaaagccttagtagaagaacaacgccttttgttcctagggttcaggtaaaggccttgtctgcctgatagaaactaaagttgtgtttaaccctatttgtatgtttttggaaaatgcgttagtaggaaaactttttttgttat

SEQ ID NO: 130973 - DNA, 1048 bp, Homo sapiens
cgaactcatgtccaaccacctatgaggcatctctatctgcaatcctataggtcatgtatgcaaatgtgtctaacactgaacatattttctccatacaaatcttctcctcttgagtatattattgagtatcagtactagagacctggtagtcatccatatgatggttatatataaggatatatgatagtccttatcatatccccactgttattagtttaatttgagctccttgtgctgcatctcttgtagcagtaatcttacttaactgtcaaccttccactgaaacttatacctttagttagagatgcaattaattaaaacaaaatttggacttcaccatatagtgactttgtctttttctactgtgctttaaaataaacctcgtttcttagtgtttcaaatggtttactaagatattgaatagatcttgttgttttagtcggaatgtggaacaggggcttcgagggacccgcactatgaccggacattataatacaattagccgaatggacagacatcgtgtcatggatgaccattattctccagatagagacaggtaaatatgattaaatactattagaccttattattaatataatcactgctttcaggaaggggttaccataaaatattttcacatattcctttttcttagtttctgaaacaatgtttttctcttacaacgcttacattatttcttatgactgccacattgttaaaggtaaataaatacaaacaaccttttctctggtaagaaaaaaacaaaattatctttctcctgccattttgtttttggtttaatcaaaccagttaagttagtgaatctgtataagtgattataatgttaattatagtgaaaccaagatgttttattatttttcttgtcataaacaattatatatataaatactttcatgagacaaaagattttaaagtcttttacattcatcagagaaattggtgtgacttttcacatatggaagtattgagacggagtctgatttgtttaggaaacattttatgattcatgaagaggtttttcctcatg

SEQ ID NO: 130974 - DNA, 1006 bp, Homo sapiens
taatggagtactcggcatatagttcagtgtatatgaactgaactataagttaaataaagactatttttaatagctagagaggtttcagaaaccaaaaaaggagagagtattaaaaaatagaggtttgaaaatcaatgtctaataccaaacgtaagtggagtatgatgaggattaagaggagacgaaagaattttgggggaattgcacattcataagacagcttcgagagtgtggtagaagcagaagtcaaattacagtaagcttaaagcatgaaagcaaactctagcagaggtggcaagaattgtagatatgtattttaagatgttctatgttgaaaagaaaatgagcgagatacagtggcttgagaggaaggaaagattagcaagggttttatttttaggattaagtgcagttgaggaagggaataataaatgaagcaaggtcatatgggaagcaggattacaagtagaggcatctcttttggtgcagaagacaagaacaagtgaagatttaaatgtatgtttactttatatttagagatagaattgtggaatttgagagagttcaaggttcatttccattgtttatggaaacataatgataatctgctaagattaattgttttagtattaaaggttctaagaaagtaggaaattttaaattagtgctgtggaaagaagagatgggtaaaagatcagtgtgctgcttggattgcttatggtagttatgaggcatgaaaggtagcaaagccaatagcatgtaatacataatacataataaacatagtgaatggaaaaatgaatagcacccaataaatttaataaatacaattaataatcaaagtaatttggatcagtttactctttattaaatggaattgttaaggccctttgtagttatttttaattattaataattaaaagagaaatagttaccttttaaatttcccaacttttataagtatttgaaattacctcatttattatttccttcttaaactttctgc

SEQ ID NO: 130975 - DNA, 1074 bp, Homo sapiens
tattttcttataacctcattttgattcttctgtttaaatgttcaggtgtatagtgttttctgaaagcctttttatatcttagttggtatagtactaaacagcttcaggtgctacagaattaatgcttatatggttttcttcactcttgaaaatgttaggaaaagtcattgaattcttttaaaatagaataattcacatatttcacgtattccatttagggaattcattttggaaagcaggcagttttgtttgttgtttattataactgagcaactattatctttgctgggaattactttgaaaggcagattttggttttttagaaattcttaacaagtttcgtttgaaattgctcagaatatgttggggaaaagaaaaatttttacatactccataattttaaacaattacctttttcaaaatcagtttgatgcatcataaccaaatagcagaagggcactaaagatcaactgagctgctttttgactaacgtttcagggattgtgaagcagcagatagacagccatatcacagatccagatcaacagaacaacggcctctccttgagcggaccaccacccgctccagatccactgaacgtcctgatacaaacctcatgaggtcgatgccttcattaatgactggaagatctgcccctccttcacctgccttatcgaggtgaaagataaatcaatcagactaatttcccctttgccccaccagcacaccattttattttcccaacagttaactggtctcttctatcatctttggctgatcactagtaacaatcgatactaaccttttcaatgtaaacacactatttatattcactggatataatagtgtgtggctaccattgtaatttgtttattaactgtcctgactgcatttgttttgtgatttctcattaatcaggagtcctgggtaaattctgtcattaactgtcatgttcctctcctacagaatgagaaactatctgtgtccattacacatcacttttcaaatcatcataatgattataaataaaactagattttttaagtttctttctatcgatactaatattatgta

SEQ ID NO: 130976 - DNA, 1524 bp, Homo sapiens
gatgtcctttcgttgtgtagacttaaatacagtaaaattattttgttttatgatatctgacaaagtattcaacttttttttaacttggaaattataccaaggagttaaatatctttgattcatcaaataagaatgcaaagagtttaaattcttttaaatgaccagataaaatgtgctctttcataaaatttttatgtaccttttaaccagaaactagatttcgagtaagactttaaccaaagatatcaattgcagtctacgtttacatcattgaggatgtacacatagtgtagttatatttaccatcatatatttcattttttatgatgatgtttttaattattaaatttggctttctagaaaagaaagttgttgaattagaaagtgattgtggcttgcgtttccaacatcatttttcatgttgtagcaagactgcttacagtatatcagagttaaatatgatatagttttattatcaaacactacattatgactcagaagaaaatactgaatggtgatatatggagtgtcatacatttgctagatcaatacaaaatcctctaccagttatggaaatctgaaattaactttgtatctttaaaaacttgttgactgtttacttatgaatctctagcacatagaataatgcctggcacattgtagaccctcaataaatctttgttgaatgaattcatgaaatatttatttaaaaagggaaaagctacctcaaatagtatacaaagtaccactaaaataatctcgtcattatatatatgtttatattaaattcgtatttctgtaacctatttgtaacaaatttgtaagcgtgctgcattcgagcagcaatattttatacccttatataacttgttgatataagttgtgttcttgttaactggatgatggtcaacttctgttttgtcgttctttctatttccaagtaccataattttgaacaatccagtgatattgtgactgatggtctgttatgctgcctgagaaaaagacttcacagcatttttatagttcttaattatttgcttaaaattgggggcatagaattttaaatcacttttcctaaggaaagtttagtaatatttatggaactttttgtctcttcagtgtttttaaagatggagtttcaacatcatttattggcatttaaagtcagaaactataatttatgcacatttttaaaattgaatttttaatgttgttcatagcaatagtctattgaaatataagtagctctattctttgtaatagcaagtatcctagaaaacagagcctattggtaatactgaaattcagagatggtgaagtttctgatgggcttctcaataaagattatctttactattgtttttgtccctataaaattaattaaaaccacagttttcctttaaagtccccaattgtgatttttccattttttttatttcataaaacaaagaggagccaaaacctcccttatcctttttagtatgaaataaaaggggttttgttttttagttttgttttata

SEQ ID NO: 130977 - DNA, 1891 bp, Homo sapiens
tgaccactttttatttatgaataatagagtgtactttttgtgcctttttttcctctggttttcatggtgtgaaagcaatgccattacatatattgtacataagatatattttcatggaagcattctctcaatggagtttttagttttacaactgaaaacatctcttaagctactagaattactcattatcagtaactttttaatgtcataaaggcgacaaatatcatcagtcatctgtaatggaaacaggcaagtttaattgcatatttctagacatgtagaattgctttggttctgaatatctactatctaacttttagaatgtcacccttcttccattttcctgcaataatttaggaattgcatttttatggaatactataagaatgaatttcattttagcttagctgttaagttaatgttttcccattagctcattcctctgtatctcatatagtccatacaaacactgcagcctttcacactgttaattgtcttccacattaaagtcattttttaaggtagcattagtttggggacttcagcaatagttaatatcacttttatttattttaaattcattaagataaagaagcccatgtgctaaaccagtttgttgctgctgttttattgtcaaaagtaattagtaagttgcatcagtttttaaattaacataaaagcataaccatatactataaaaatgatttttcatttatttggttttttttacttttcctatgagataggaagtatatacttttctcttgtgttcattaatacagagtgtcatgtttagtgcatggatttgtttccctattgtgtgatttcatcttttttgatgtgcttggtttttattttggttattaatgatcttaatcattaatcactattgtctattttcaatattataaagacaatgagggagaaacatcaacaccacctactaatgggaaaaaaggcaagtcttaaaatgaagtttatggtgtctttctagatattagacactccatactgacatttgtaatatatttgaatatgctttttaaaataagcataagtattagtctcaatttaagttatccagtatttaaaatgtctattcttttttatttctgaatatgaaattagtcttcaaaatacttacctttaatgattctgatgcaattctattttattgaatgtaatggcattaaaattggaagatttactttgttgatcatgttaagggaaaggattctgaggaagatactagtggtcatgttatacatttacaaaatcacagcatggatatttttcaatccagaaattgttttaaaattgaattattttaaaaacattttaaagtagaagtttaaagtagaaaatgagacaaatttaatcataagttaaacaataatataaaaggaagatttataacatttgtagatttttcatagttctatacacatgaattaatattgcctggaaagtaaaaagatgattgattttaatacttagatttgattttcctataattattgctgacataattctgtaatctaccacaaccaaattctatcaaaatggtaggactgtgtatgttttgcagtaattgataatcaaatatgtctacatatattgatttagaatattagcattttaaaatgattttatcaaaaaagtaacatcccgttctatatcataaaatttggcccattactggaccaaattaagaaataagtagttttatgcttcattaatttcattgaaatggtttttagtcttgaatgtattcttccctgtcttcatcttttataaagaatgtctacagtgttatttgtaaaacctaattaacactaaaatacagtttttcttactgcgaagtattaattattctttaatgcacattcta

SEQ ID NO: 130978 - DNA, 1157 bp, Homo sapiens
tgcattaccgcagattaatgctgatcagggagcagtagtgtatccaaaatcacctatatttgatgttacagtatagcatatttttccatttttggcagtggtttcatctttccagttatgttttacttagcttgatattataaaatatgttagtattccactatttatggctaaaggtagataggataccagagcattgtgtatggcatggtgaaactctatagggattaaaatacacatagagcctggcaaggtggctcatgccataatcccagctactcgggaagctgaagcgggaggataacttgagaccagaagttcaagaccagcctgagcaacatagcaagatcgtgtggctaaaatatttcttaaataaaaatcaaatatatataattaataactaattgacttatagtatggctttagaaacatataaataaaaagaaagacaagttataagatatataattatttgtgaatgctactatgagaataagattaaatggtggccagtgaatcttttgttccatggcctataaggccctacatgacctgtgctcccccacttcccatctccattactacttcaatcttatctattacttttttctttgtttgttatgccccagccaaagtgacctccatgcttttctggaacatatcagacatgcttctaactcaggacatttgcacatgctgctcctctgcctggaataccttctctttaaataaccatatggctaactcccttactatcttaagttctgtactcaaaagttgccttcttagagaagacttcccttcctgccttatcaaaaatttcattacctctggatattttatttccttcttacctactttgtttgtctttttagcatttatcaatatttaggtcatagtatattttacttatcttgtttataatcactctctcccattaaaatataaactttatgaatgtatggggttttgcctgttttgtttgttgttatatccctgtacccagacatgcctggattatagtaggtgctgaatatatatttattaaatgaatgattgttaaccacatgagaaataattgtagataatcttagatgagccaagtaactcatattcaatgataccaagctgttactactaaatatctttgtcttcct

SEQ ID NO: 130979 - DNA, 1030 bp, Homo sapiens
tttctaaaaggaaattgggatatttaaagaatatttttaattatcaaaactttggagtgataaaatgggaggaaagtagtaggatgtaggtatagcagatgatatttcaacaacatgtttatatatgcctatgctttacagaagacatgtttggagttatttctcttatgtttaagtgcatttatgatattaataatctattgaatataaagtgcttaatgtataatttttatgtgctgaaatctaagaaacccacttcaataaattgtcaaagattccttgtcaaagggttaatggggcaaacttgtggcatcagaaaaactgtatgggaatgagcccaaacttgagatggaaagttggctgtgcatcaatagcatatattgttttctttttcaattggtgttttatgaaaatctatgctagaacaatttataatacctgggaatttgccatttctgggatgtttactagcaatacaaataacacttgaaatttttattttaaatgtgagactatagaaccaaggagctaaatggtatgacatggactagaaaacgagttaacaagtatttggatgaattttgagtactatgactagtaattgctttttttaaagaatgatcttggtatttctgaactgggatgtcttgagaggattatcagcaaaacaagtgatttacttgcagtatctttttttttttttttttttttttttgaaacagagtttcactcttgttgcccaggctggagtgcaatggggtgatctcggctcactgtagcctccacctcctggttcaagcgattctcctgcctcagcctaccaagtagctgggattataggcacccgccaccacgcctggataatttttgtatttttagtagagacggggtttcaccatgttggccaggatggtctcaaactcctgaactcaggtgatccacccacctcagcctcccaaagtgctggaattacaggcatgagctacggtgcccagccctacttgcagtatttttaccttaattgacatca

SEQ ID NO: 130980 - DNA, 1070 bp, Homo sapiens
tactatatgcaaaataaatacttacagcatattatcatttgcctaagacatggctgcttacgtaagggagttgactataagtttctcttttaaaatgaggctgtttaaatgcaatagtacataataaaactataaccacaggaaatccaaaaaaccaaaaatgttttaaatatatctgatacaactatagttatatattgagattttatgcattacatgaatttttatttgctaaagttatatttttatgtaggcttagttatggactaattattaatggatcatattcagataaactatggcaaatgacttaattgatacttttagtagtgaaatcattttcaaaatatttcattttcatcaccttattaatcatataaattttgtacttcctgaaaaaaaaatttttattgttgattctaagataagttttgccatattccttataagaatgaaagcattggtgaattacttgacagttgtagaatgtgccactttgaaaaaaactgtttccaattaaatactatataataaaatatccagttcaggcgtcaccatgagagaattattttttcttctttgtttgattttgtattttacatgtttttattgggtcatatagtacctagtccaaagaaaattgacctggtaatcaggagacctgtgttctatttctggctctgcaactgaacttgttttgtatcattgggtaagtcactggaactatgtgtgcctctgctattcactaaaattaattcatgagtgaattgagaataatttttcatgtttggatccacataatatgaaaaccattgcattgatgacacataaagtaattcaaaatataggaaaatactagatgaagaaaaaagcttcatttgtttacgtagtttttatactttctgcaaacaataagatcttttcttagagatggaatatatggaagccattatttcatccacttcataccaatttcatttttacttgtgagggaactattttagtagtatggaaaatgtgtatctagggaaattttgtgtataaaaacacaatgcaacatacgaaagtcg

SEQ ID NO: 130981 - DNA, 1474 bp, Homo sapiens
tttatcactattcatataaagagacaaatttgtcataggaaatcattctctaaagagctataattttaatatgttgatattgcaagtatattttgatgcaatatgctttgctatataagtcaactcaaaaataatgatgcaactcttgcagaacttaaatgtggtgtttgattttagaatttgtagtatctgattcaaagctaagtgtttaaattaaaataggagattttggttttgtggcatattgttcatctgtgtcaatcatactagtacactaatatctttggaagaaattttttcttagaatgctcagtttaacagacatttttctgtttccaagtcactgtataaaatgttatttgaacttcttcactagcactagggaaaaaagtttttccaaaacatatcatgtcatatctgttatagttgatggatttggatggatacattttagcgtaaattttaataatctataaagtggcatttgtaagaatctgttgaatgaataggcattaaaagggaatatgatcaaagaaaatttgtctacattgaagtttagtttggatttttaatgctgaaatgaagccatgtatttcagctactcttctagtaaagacttgtactataattattacttcataaaattttaatgatattttgctgtattgaaataattcaattaaatattggcctgatgaccattctttgtttttgtgtgcacactggtttactggggaaacataaaaggaatagaaatctgttgaaactatttttattgctctttttggtgatgactcaattaaatcttttcttcagataattaaaagtttgaaagcattgtaacagactttaaattgactcagtaatgtcttgaacaatgtggtcatgcaactaacactgtttttactaatggtatctttcttcagcattggtgttcaggatttgctgtacgtaaataattgtaaacttctggatcttctttatttctacactaactttatttttctgaatccgctaacctatagtaacaaaatcaacttgccatcagttcttacgtattttttgtggaatgcatttgattatatcttccctaaaactgtacacaggattctttctcaaaatgatctgaggccctttccatcagtgtcactttttaccttttgagtacatccactcactcccatctcctttgtctatgtctgtccattacacgatgtgatcacagaagaactggactctacaaggagaagatatgcaggtctgtctcttctgctttttttgttattattttatttatctaacttgtcctagaaatgtttaatcatttttttactcatttcatagtttttcattcctttgtaatataacaaaatattaaatcttatgagcattttaatttaggtatttgtgtattcaactatcaacagcaactgctccaattagatggataaaagtaaaataattaatttttatg

SEQ ID NO: 130982 - DNA, 1983 bp, Homo sapiens
tacaagaacctctttgttgatcctagttctagaaaattcaaattcaaaagtttctgataattggattcacacatatactggggcaaactgcttcaatgcatagcctaattttatgataacagtttctaaatgcagttctaaaattgtatttgaaagcaacttataactttaatacctataaataaatcatgatgaattaaaagtcagagttcacatgatattattattgtcaaatttctgtgcagtcaaatgtattctggacatacacataccagaaattgttttctatctaatgaagatttgttatcttctctttaaacttatttatattttattcagattgaaattattttacatatttaacatcatgtttttacttatgaaattgtatactttaaataaatctgtaaaataatatgacatttaatttgtacatgctacattgagtgaaagtaatataccagcctggcttttcttcgtttatacatcctgtaagtcggactcagaaataagaactgaacattaattttatgggtttttttctactcgataggtactatggatatagaggagagaaatcgccaaatgaaaattaacaaatacaaacaggtagccggatcagatcccagactggaacaagattaccattcgaaggcaagacatttttctttttaaaagttgtaaaataatcaatcatatgaaacagttagattcttttaaactactaaatgcagattagtcagacacaaacatataatgccatggccccatgatattattaagtgctaaaatttatgtgtttgtataccgctcttagcaatagaatttgccttacttaaaaaaactattataaaatacagaagattaaacatctgaaggacaaatcttttacagtttttcattttgtaaaatctatagcccctcaaaaatgtttaagaacttaaatgatcttatggttttctttcatatagattttttcccattttatagtattttaatggaatctggtttattactgaattattggaacaaaatacaaatggtgcctgccttatagtggatcaacttacaagtttttgactttagggtagtgtaaaagcaatacacattcagtagaagccatatatcaagtactaatacaaccattctgtttttcactttcagtattcaataaattacatgagctattccatactttattataaaataggctttcagttagatgattttgcccaactataggcaaatgttaagtgttctaaacatgtttgaggtaggctaagctaagctgtgatgttcagaagatgtattaaatgcattttcaacttacagtgggttcattgggacataagcccgtcatgaagcaaagagcttctgtacatattcacgaagtgctgttagaggttcaaaagtcttttggtatgaatcttttttaactactttttgggaataagttgaagtatgaggtctaccaagggaggaaataaagtattaattaattgttctttttttttttttttttttttttgagatggagtctcactctgttgcccagactggagtgcagtggtgcaatcttggctcactgcaacctccgcctcccgggttcaagcgattctcctgcctcagcctgccaagtacctggggctacagacatgcgccaccatgcccagctaatttttgtatttttaggagagacgaggtttcactattgttggccaggctggtctcaaactcctgacctggcgatccgcctgcctcagcccaaagtgctgggattacaagcgtgagccactgcgcccggcctatttcattgttcttgtactccattacctttttatattcaagacatttttagttgcttgatattattcgtggtcaaagtcatgaaaatactttgttctgatatagctattgaagatttaataaaagaattaaaatagcaaaatttactcataacatgtagctgttatatgctgttat

SEQ ID NO: 130983 - DNA, 1043 bp, Homo sapiens
aaattttagcgattttgtatttttatttgtgattaatcttcgattttaaaagtttctagtttaggtttctttttccttaacatcccatattagttgattagggctgctataacaaaataccatagaaggggtggcttaaagaacagaaatgtattttcccagttttggaggctagaactttaaggtgttggctaggctggctccttctgaggcctttccatggctttcagatggctgccttcttgctgtgtcttcactttgtgtgtgtctgtgtcctaatctcttcttataaggacaccaatcatattggattaggaactacctatgtgacctcattttaccttaattacctcttgaaaagctctagcgtcaagtacagtcacattctgaggtactgaagactaggacttcagtataggaatttgggaggaacacaattcagtctataacacatctctacaaagtagctaatgatcttttaaattaaaactttattgcattgtgaaagcatatttgattagaatgtgaatagggatttttaggcaactaaccgtagctgttttgctttgaactttttatttcttttttgattttattacttttctctatttcttcctatttttacaactgccttctcaaatcctaagagataaaatattttggttttgtgtttgcaaatgcatcttaaaaattagctgtcttagccatgaaaaccacatttaaatatgactcgcgtagccataattttatgctgatattcaagcatgggtccctttcctttagatgtatttgtgaattgctaccttttaccatatattcacattttaagccaggaaatataaaaagactatttttaattatgagtaagtcttccagtgtggcagtattatgcaaaaaaaaaagtcatttgagatgacaaaaacagcaacttgtatattatagaacactgtagaattatagcagaaattttaacttctccctttttagtaacataaagtttctaaaaactgacaaagagagaattgtagataagttgcaggcag

SEQ ID NO: 130984 - DNA, 1786 bp, Homo sapiens
cctgagtggcaatatctaagaagtcattatgggaaattttcaagaagggaggggaaagaaaaaacctaaaaagataccactgactggtaaattaggatgttattggggaattttgttctggtgggtttttttttttttttttttttgagaacagttttagtacatgatagaatggcttaagagttgttgattctcttgaagaacatggtaaattcatttgttaagggcaaaagcataagctttgcagctacctgagatctctaaacctggggtttcattgcagcgctggcacttctatctctgaaaactgagaaatcgatagaagtaaattaagattgtttctcaaggagaagctgattactaatagacattgagttcccacaaagccaagccttagggaaggtcataattgactactggcaataattcttcctctgtaaattatccaggaaaaattattcacctcataaatttccttcatatcaagcgacagctggttcattagtaagtcttggcatacatgctaatggctaccctttcttcgactaccgctttttactttaagctgttcttgctatgtcatgtttcaaagacttccctgagtgagtctgtttctagatctatagaatggagaaaatgccttcttcacaggtccaaggtgaactttaaatgagatcacaggtcttgatacacagtaaatatttattgtcccttactcattctctcctaaggagtcttagccctataaacaaagcctgtattcctaaaccccacaaccagtggtgtgcccaactgtctgttcagtgaccacttggtaacttgaaatcagccataatgggagtatttatatcacggaaatcagaaaactccgtaaattggaattttttttcctcagaaagctagttgttaaacatttactgtaacagcactgcctatacccaccacagagaatgaaataattaggtgactaaactctatacagctatcaatgtatcttgtacactgatttgatacttcataatggaataatacttcagtatatagcccagataaagctaaatcattccattcattttgatcattaaacattcattgagttgcttctaaatgccaggcccagatatagataataagattactaaaatcaacaaaagtcattatcctctgggagtttataatctagtggggtgggtacattacaaatagatggctaaatagctggatagatgattgatacatggatggatggatggatggatggacaagggagaagtacacataataccacatgataaaactgtaataaaggcatgagtaaagtagttgaggaacattcgaagcagtgcttctctttgaaggagttaaggaagacttcacagaggaggtgacatcttaaactgtgccttagaagatgactagacctatttaatggagagggtgttgagtatggctcatcctacctaactgtacttccttctgactccagctatcacaaaggcgacctcataaggtttgggagaactaaataaaataatccacacatattatttacaacagtatgtttcacagggtatacaaataataattgtagctagtttaattactataccaaactgaagaggccatcaggcctgaggaccaacaagggagaaaattcagtgcctcagtctccagtgaaaattttatgtcctagactcctttccagactgaggcatgatgttcgttaggctcagctttactgcagactccttccttttgagctctgcagctatcagaaatctttcaa

SEQ ID NO: 130985 - DNA, 1052 bp, Homo sapiens
tgcttactacatcactggaaataatatcttttttcatgtttgtaatttaaaaattaagacctcttatatctttattgaaataaaagtgatggctgagacttgaatttttcatgttccaaggaatatgaaaaataatatattttgttattagaaaacataagaatgttactttttcagtaggatgctttcctatcctcttgaaatttttatatatgcatagaaaaagtcctcatcttctcaagaaaatttatacatatagtatataagttagtataatttgcatttcttacttgtcctatagattttatagatgcctaagctaaattttgttttactcttattggattaaaaattttataacagggagatcacaacttttaccttttttcatgtaattttgtaaaaggaaaatatgatttaaaaactattacaattaagtgctatttatacagtgcttctctagtatacactgaagtaagttttcaacatttaaaagatataatttttacttatgttttgatagtttttattacctttctgtttaatttcataagtgttttttcttgactttctttttttgtgtgtttatttgcatgccttcaatttctgttgctttcaaaagaccaaagggaatagaagagggagggaaagaaggggataagcatgaagagatagttcatgagaaggaagaggtaaaggaagaaagaattaatgagaatgagaaagggaaagagattgccaaaacgtgtaataaggagaaaaacagagaatcaggagacgaggaaaaaacacaagatatacacgagcaagggaaagaaaaagaacagtggaataaagaggatttgcaaaggagattctcacaagatgataccaggtaaaatatgttatttgtaggcatttcccattagtaatgtagtcttttttaccattcctaaaaattattttgccatttccatttgctttattttcttgtgttttatctatttagcttctaatattactaattaatatgttggcaaactattatcaaatagattgatttattaaacagt

SEQ ID NO: 130986 - DNA, 2075 bp, Homo sapiens
ccttccacttcactgcagaataccttttgaagacataaactgtgacaagaaaagataagtgaaactctttcagccttatataaggcagaaaaacattctcaaaagaaaatctataatttcttgctgcctctaaccattaaaaagtctttttctgaattaatagcttaagaacatatttgagaagcttaaacagtttttcttatccttgatccaaaccaagcataaggtttttaaactgtaaaaaatacagtaattaaaacattacatattattttgcacatgagtcccatgggttctcttgttaagtctttttaaaatattccagctatgtgaatctgagaggacatttagctaaaatcagtcaacaagataagaatatgagctatgaatacttagaaatataaaattgaatcttttaaatcagtgcttttcaagtgtattttcagaaagttaatcccctgcactgatgctttaaaaaaattattccactatcaaataaatttgggaactactacacatacagtccttctcatcaacattcacagcatacctgaacactctgagatgcactataataaagttgtatttaaaccagcattttccaaactttgtttatagtggaactattttagtgtaatactttcagagtcattcagggaatgtgcttaaaactcattgacatgctttaattttccatttcaaactttggcctctattctttcagtaaaataaatatttttattcttgttgagtttaagcataaaattatggtacaaaatatggggttgtctagaaaaaactcactgtagggattgatattatctctaaaaaagctgacagatggaactagcaaatgaattgtaaaatcaagtaaggattaacaaatccagtaaagaggaaaaatgttatccaaggaatacaagatgagatttatctctcaagcaatgacactaatagagggaatataaaaatagtttctatagttcaataaatattatgagaattgatcatttttgctgacttcccaaatatattttaaaaattcagtctgtctgttgtttggggaatcacttcaaacaaagcagttaagccacagtataaagagatggaattgacaagtggctcattttctttttgtgcgtttgtttgtttttgagacagagtctcactctgtcatccaggctggagtgcagtggtgcgatctcagctcactgcaacctctgcctcacaggttcaagtgattctcctgcctcagcctctccagtagctgggactacaggtgcctgccaccacgtccggctactttttgtatttttaatagagatggggtttcaccgtgttggccaggatggtctccatctcttgaccgcgtgatccacctgcctcagcctaccaaactgctgggattacaggcatgagccaccgcacccggcctcccattggctatctgtctgtctttttctatgcttccaacaatacgttggcttggaaacattagctgtaataaaggaggttacagctctagaactcccttttatgtcatatatacatgtgtgcatgcatgcatatgtgtgtctatgtatacatgtgtatataccatgctctaatctagcgcatgcttagaagactctctcccagtttccctctttatgaattgctctatcctattcttgccataatgtctgtttatttctctcctcctcattttcatttccaggttggttttacattgttatttaatgattatgagtccattattcccatatctaatatttcaacacatcattaaagtttcctatttccactattaattggaatataccctcttcattaaaagaattaattttacatattacacaaaatgagcaaattcccttatatttgtcaaataaaatattcaaggtcaatcaatgtaataacgagtgaatgttataaggagatatttagagacttctgttaagataaaatattgctacctcatttcctgttatactttcagagtcttcaccattttattttaatcatgattttaacaaataataatgttgatatctcatttgtagggtgcttttctg

SEQ ID NO: 130987 - DNA, 1031 bp, Homo sapiens
cagagaacaatatttagggcatactgaaattttaggttcatgggagcaaagtcttcatctgttgtgagcactgctgtatccccagtgcctagaacactgcctagcacagcacaggtcctcagcaaatacctgttgaaggatgaatgagtccctatttcagtcgtttttaaaactgcagtttttcattaaaactactgaactcagacaataaatgagaaagataattctaaaaatcaaattttaaatatcaaagtattaggtaaaatttagtgcccttttcattaatcctttaactgttatgaaatataatcatcatgttccttttgttcatacttttctgctaatggttcattcttaaaattgtaacatagtacttctctttcataattagattataatatccagaaaaccataggccatcattggaaaggactttagaagttaactatctagtaccctgaactaaactaggactcttcctatgtcagtggttgtcaaatcaggctcataaacaaaacactgggggagctttttaaaaacataaattttctggccttgacatgagaattctattccagtttgtatctaaatgtgatgaatgctctaacgctatacgatatcactaatagttgattgtccaatctgcttgaacagttgagagccctctaccttatgaggcagttcatattcttggacatttgtaattattataaagatttttcccaattgggccaaatcctacctgcctataacttctttaaaggagactgctctttacttgggagatgattagaaagatattaattttaaaattatcttttgattgagcatatatcttacgcatttctgtatttatgatatgtttcacggttcttaaaacatgaaaacaggactggaagaaagaattgcatcagggactatcattttggaattggctctagttatgctttaacccactgactatatatataaagtaactagtggattacatacatatatatatcatatatatacatataatatgtacatat

SEQ ID NO: 130988 - DNA, 1708 bp, Homo sapiens
gtaatcagaatgacacaaagaagccaatatggttctagatatactaagaactaactgaaaataatgcagaacatatttaaccaaaaaggaaaatgtgaatagctggggctggagaaatccagtattatctattatctgctttctgcttgccagtggacttagaaatataaccataaaaatcttttctaagcacaggaaaagcaaaactaacaaagtgagattaaaaatatatcacttggttagatggtgagttagtgagttcattttgcctcttctcactcaatgtcactttttgttagcctctaccagggttctcaaatggtttttgtcacttgcaatagaatcgccagagaaatctcaaaataaaatatctgcccctcatgccaaaagtatcttattagaattcctgaggctaagaccacagactgtattcttgaaaagctcttcaagtggttgtggtgaatactaaaatttgagaactatttttctaattaatttagaaattgtatacttcatatgctcttccaattggaccatataattcaagggcaaaatttagtgcttggctttttgcccagatgccttggagaatgtccagctttatggaattttcaccaaaagctttgccaaaagagaagcagacctgtccaacctgcagtaaaaggagctgaagaccaatgatgacaatcagcattctgtgatttgtcagtttgccctatagagaacaaagagcactttgatttaatggtcatgtctatagatattttatcattaaatatgaaaaacaagaagacaaagcagaaaaaaatagatcaaatcttagtgagtggggagtagctgcagcaggaggcagtggaggtggtaagcagcagactaccacccagaaaagagaatcagcggtagaggaaagactaaaatccaaacagtatatagaattgtgttgtgctgcccgtggtaaaggactatgtctgcatacatataaatctggatgtctagaccatgttctctctcagttattgtagctgaatagaaagtaagtgtctgtatgttctggtcaagttaaaagtctaaacacttttaaatgacaattgactgagcgatatgtattttaagaaagcttcacttcaagagagacagcacaaatgctagggccatgttgcttttgttgaaaccctgattccaacatcctcctcaagttttatgatttctcagttttctcttctttaatctggataatcatagtacttatatcagattctttatgaggtttaaattagtgcatgtacctacttagaataatgcctagtacataatagatggttattgtcatcattgttactattcaaactaagagacaaaattaaagagcttgagtaaagtgttagtaaatcataaagctttaaaaggatgctgtggcactatgaataacatctctattactacaggagatatcttaaatgatcctagagaataatttttttaaaattgatatgttaatgatgaccaacttataccatgatattgaatcagtaaatcaggtgtctccagtttgaaaacaaataagaattgactacctgttcttaaatgtatggtattcttggtgacaaaaaattataattctaaaacctttcaaaaggtcacacatatttaactactcaaaaactgcaagctaaatctaatttttatatttgcggggaaagttttcaga

SEQ ID NO: 130989 - DNA, 1006 bp, Homo sapiens
tctttgctatttattatctttaagccaaaccacttacctctattcattcaaacctataaatgaaaactttggccctatagcatataaacttcatttgatttaatcacatcttccaataatccctatatgctatttatgtatttggggaatacttgtgtttcacttgctttgtagttacttgtttttctcctaatgattgacaatactagatttgcctttttctttaaccattcaggatacaacttttcaacaactataattttgccataaatcaatctctgtattggcagttttatatatttaacttcgataatactaaatatatacagtttttattgtttttctaaagccaaaaattagaaatatgcacaaaacaatatttagaaatgtaaaaacagtgtccttttctagaaccgaacaccctatatcaacactcaatctattgtgtagtaatctgttaggattagctagaaatccatactgtacctttaacccatgacaagaactaatgtgggttgagtaatttgatttacataaaagaagaagcgatgttggaccttgattgctcttttcgtttgtctgttttaattttttttagttaccgacactttttatgtttattctggaaaaaacaaaatagaaaaagataaactttttttaaaacatagctatcaaccagaaaaaattaaaatgacttttagcagactggtcacagtatatcctttcatatttttggctacatacatttatatttttcccctaaaaataaaatttttctgaacacataattttatttttcttcatatctcttcattcttcttttgtgcagatgactggcgcatcatctcatgaatctaggcttctcaaattacttagtttagcacaaaatattgcttcttttttttataaaactatttttggatttctgtgactggaaaaactctgggatttgaatttacctgtgtcccctagtagtagggtaattccatatttgatacatatgtcg

SEQ ID NO: 130990 - DNA, 1084 bp, Homo sapiens
gatttttctttctttcaaaagagtgcaagaagaaaatctttcttttctttatttttgtaatatagatttatatcagtaatgattaagtaaagtgaaataaagttattttttaattcaaagctaatgaaaatagcaagcctttttagaaaatttaaccattattagataaaccttattataagaaaacttacagggccactcttgaaatggatattatattatcagcctttttttttttttttttttggtaaaattttcccacttgtctaattaccttttgaaggcaacagtaaaatagagaagaatgtttttgtaagcttctcccttatgtcgtatggctacctttaggtgctgcaggacagcatagtgtcttaaatgaacccactgatttttcatgaatttttttcctgtgatcatgcaaatttgcaccttgtctttgacagcagaaataaaatcataaatctgattttgcatatttgctctaaggttggcccagagtaacaaagcacaatcaagaccatggtatttgaaattttttaactcctaaaaatatattccatagatgatataatttaattatactccaaatgttttatctaaaatgcattttctgtcttttcctttttactcttgtcctcacttttaatgatccatcggctgacagtgtctttacatccaaaatgcaaagcagacaaatgggcatatcagggaagaacatgacaaaaagcaccagcatcagtggagacatgtgctcactggagaagaatgatggcagccagtctgacactgcagtgggcaccttgggcaccagtggcaaaaagcggcgctctagccttggtgccaaaatggtagctatcgttggtctgtcacggaaaagtcgcagtgcttctcagctcagccaaacgggtaggaatttcaatgttacttttaacttgatatttgagttgtcattacaagatatatttcttttctcttactcattttattgcagtaatgtgtggatgatgacatgttccagagggaaagggcattttaaactagttaacctttctgaaatcaacaatgatgttttttccagtgatca

SEQ ID NO: 130991 - DNA, 1066 bp, Homo sapiens
aacttccttttcagtttgtaagcaacatttaccagtagttatcaattttctcactgcaatttttatttccctgttaaaacttcaaacagcaatattctccagcagcagggatggaggaattttctgctgacagtgaagatattcaaagctttgctactttaaaattcagttgctaaatcacatctgcaaaaataaattatatacaacactcctactcagaaaagccactgttagcaattaagaaatttgtgaatcaaagcaatgtcttttttcaaatgggtgtagataattaaacattaaatccttggtatcttggaaataatagcatatcttctacttgacaaacaaatgcatgtaatatggtgtttcttttatagcaaaataaattataggcagctggattaaatctaatttgtgtttgactactaggactcttgtacatagaagtcagatataaatctacagcacaaaagaatttaaggttacattaattcctggacccggctaatcttgatttttgcaaaccgtacttgtgattctgggaatttagtcttatttaacaatattatattgaaataattatttggtggtattttttatattctggttgtaactaaagatatttaaagtgatttttgtcataggatttttaatttggtgttgtaaaatactattttgcattttaatatataaatagaagtttaatttatggacagtggacatacagatcatattttaatgatttttaaaattgttagtatttatacctaattaactatgttgtgctaatatgatacatgttggccttttgaaattgaggtttttttatacttctctaatagaacttcattgcatgtttttctttaaaacttacaaacatctgtcaatctaaaacttctctaaaaaataaagtctactaattttttttaaattaggaacctaaaatggacgttagtaagactacaagttagaaaatatatgaaactaaataattaattccattcactcagggttcttatttataagtattgaacgcttaccgtgtgccagacacatgaagaaaaaa

SEQ ID NO: 130992 - DNA, 1052 bp, Homo sapiens
tagaacatttaaataaacacttttgaagcttgtgtcagaagcagggacataaatctgagagttacaaagtttaggtaatacttaaactcatgaacgtggctgaaattgcccaagaagaattatacagataaaacagcagtaggccaagacaatgccctgtggaagattaacattttagaattgcgcggaggaagagcccaagaagaagaagaaggaacaatcacaaagaaaagaccaaaattatgagaggatagtatcacagaaattaagagggtagaatattcaaaaacagaagggtcagtatttctcaataatcaatttcatgtctttacatgtttggcacaactgtcccatatatctttctttgattgtatttgtattacaaaattatagctctattgaccatacattgagattctgtaacaacactgattttcatgtatgagtagttataggtttttgtctcaaaaacattgtgatgttggcagatttaagaaatgtagtcttgtttcttgttatatcataaagttccttcctatatattacatagcaaatgataaaatctctttgtcactgtcttcattactattcagtgacattataatgggtacatttttaattgttcttaaaatttgcagttattcatacctactccccttaatagatttgacctgctgacaatagaattcagattatctctcattttaaagcccaagtttaactgtagcatagccaacagagattgttttacaattactggatttcaaacttccaatgggtttctcagttctgtatttgtgtgcatatgtatatgtgttcaaaataaggttttaattatgctttattttcttaagaaaaaaatggaatcataagctccaaaagtatttgaaacaaatcttcaaatttcagtatttgagcatatgatctagtagcttagatattaaattatcaaaagtcattatctacaataatgaactagttttataatgctggatcttataatagcttctttcttcagacataaatatataagatgtattgagtaacttgcc

SEQ ID NO: 130993 - DNA, 1070 bp, Homo sapiens
taggggataaatattttaatgtaccattattgcagaaactttaaatcccacaaactactgttaatattaggaatattttcttctaatccattagcatgtttttatacaacgggttctgtgtatattccaaataatattatgacacaagtatattcttaggttatcacagatattttggctacaaaaataatctgtcacggaaatataatacaatttaattaacattgtacttttaacaatgtactgaatttagaaaaatatcttatttttaacagctttattgagattcatacagcacatatctgcatatttaaaatgtacaatccagtagtttttagtgtactcagagatatgtacaaccatctccacaattttagaacacctttattacctcaaaaagaaaccgcataccctttagctattcctccccctcctcatttcacccattcatccctcctcccctcaccttaatcaactactaatctactttctgtctctatagctttccctattctgggctttcatacaaatggagtcatatagtatgtggtgtctttgactggcttctttcgcttagcataattattgcacatctcagttcacaccagcaacatttcaagtgctcagttgccatgtgtgacttctggttgccatcttggacagtgtaggtttagactctatcggttttataggtgtgcattttcttcagccctggttttctcctctatgaagtgaagataatatccatttcaataggctaagatcaagttatataatttgtgtgaaagtatttgtgcactgtttacaaatattgatgattatttacttttaatataagccatggaacagctgcagctattccagtgatccagctaaaagcacactcttcctttgagatttaggggaaaaaaagaaataaatgagccattgaaaatgaatccataaggatatagaagtgactaaaacttttacccatattaaatgttgcttgcaggtctgtattctgctctgcctgatagagtacaacttaacaaaataaatccaatcacttagcccactagctttctaaa

SEQ ID NO: 130994 - DNA, 1244 bp, Homo sapiens
aagtcttagttgtataaagattatgccatggattctgcttctgaaatggagactctttcacaaaatatagctgttttaaattcccatgtttatgaatcagcatactctacctaataggtatttttgtggtgaaaatcatcttctaattcactagtttcatatatatatgagtgtcagaactctgatttatcagatctgatttagtaaagtgtgacaccaatcatacatgtatagagtgagttctatgcctttccaagaaacaattgagcttaagaccaaaagataaaagaagtttagcaggaagtatattgaaaataaaacatgattagaaagccaaaagaaatatttagaagctttagccgtttcaaggaaattattatctaagtgcaaattagtttgtattaaccagtctttaacccttatgatatttggctctttctaatttgctaataataaacaattaaatagcacaatgaaaatttgttagtgtagagctgatcagcgtagccccagagcaaaattcttttattattattattactatattaatttttaagacggggtctcactatgttggctaggttggttttgaattcctggcctcagccaatcctccctcttcagcctcccaaagtgctaggattacaggcagaagcctccgtgcccagtcacaaaattatatttaagtaaattatcttatgccctggaatagaaattcattttccaagaagagcagttatcctagaaaaatatttgttcccagaagaattaagcctaatgaaaattttcactatactatgtatgagccaaaaaatgtatggttttactataaagagaagctagggtctttatgcaagttaattcattagtaagagttctctcaactgcaggcagtagtgataggcatttataaattccagtaggaaaaacatatgaaatgcaaatatcaacagtatctgcattgaaagaatagggccatttgttcagtataatacagtatttagtgctgagtgatatactttaaaaatgcatgctttgtgaaactgataggtagagtgctagtctgaattattttgtagtaattattataaactctgaaaggaaaactcactgacagcatttgtggctaagaaattccattaaaaaaaagcataacaatcatattttgatgtgaaagttccaattcttatactttaaatttcattttcaaaataatatttcttgttatttgagcagtagtgttt

SEQ ID NO: 130995 - DNA, 1047 bp, Homo sapiens
accctctccctcctcccaccctctcccctcaagtaggccctggtgtctattgttcccatctttgtgtctatgtgtactcaaggctgagacaaagttttaatcctaacataggaagtaatttttaaaacataattagatgtaggtgctttgtcttattctttttgtgggaaatttttaattgctgcatagaattcagggctttccaagctaattttgtaacaacttaaggtttctatattttttcagaaccatcaaaaaattctaaaaagattctcaaaataagttttaagtctcttcaatgaaatatatgtcattaatgatatctaagagaagaatatagtcataaaagctaatgcataatcgaggaatgtaaaaaattcggcatcatagatttaaatgatattggattgagacattttagaaatgtaagattttatgtttctattatatttaattaagtagctagaaaattacacagttaatttttagtgtattctgtcttaaaaaattatccaggcttctagtactgaaccctttaaatgatgaaatgagaaacatgttcacttttgatttgcttcctgataagtggagatataaaaatgggttcggggcatctattttctttggtgatttgaacgagttataattccattttgtagagctttctaaatatcaaaaatagaatttgtaatgatttaggatgctaatgtagaaaaattaatttcaaaagctacaatccacagtaatagtattcagatgactcattcagctctattgtagaagctagtattaacagttttcattttaaaatattttctgtagaagaataatgaaataagagttgaagtatgcctgttggtaataatgtagtttctttattacaatttgtttagataaaatagcgtccttagaagcaaatcagtgagctgatcattgtggtaggccctgggaattagaataacatcattattaaaataaaatttttgcttttaggaaacttgaagtcttacatatgtaaaaatgcaataacaagtgtggtttttaaga

SEQ ID NO: 130996 - DNA, 1001 bp, Homo sapiens
gactttattacaaatcttatgtcttcatacataataaaaaataaagtgtctgcaatttgaaaagtcaactagacagttaagcaaaaaatctatgaaaaatgccaaattttctatttttatgtcagcatatcaagcagtataagcaacttataaccatttatatccactaacatatgacttagttgaacaaagtggtaatcaaaagaagtctttattgccataaatgttgtaatgaatacatgaagcttggctagtaatgaaaaaaaggaacaagtaagaattagactttaattgtggttaaggtacttttttatttttccattcatacctaatattattctagtcacactatggtgtaaggagtaaatgaatagtgaatgaataaataataaataaggaaaagtgtaaatatgcaaactttttacaaatattgcataaagttattgacattggtatctgaaacttaaagtttttagatcttgccatatatttgtgtagaatgtttacactcacaaaatctcaaagtgctgttcatctcataatgatataagaagttgctaggtgatgttcatctggaatttcaaggaaattataataggagacatgtttcttcttttctcaagtgtttgaggatattcttctaacattgccatgaagactttgtatgaatttatcacaaagctggagcattgcttggaacagtggaacagaatgcgtgagcagggaatttcttaaacttggaaaccatccttgccactaccactgccctagggagactgggaaaaatagaagccctcatgagaagcccaaactcttgcccattttcaaagatcaaaaataggcatatatagtagttattatgggcagggtagagaaacttccattttcagttttctttgtccctattttctgcctaccaaacatccttcaaaatgtttggtttatgattgattatatttcatttttggaaatatactttcatgggtggccaaatagcaatg

SEQ ID NO: 130997 - DNA, 1010 bp, Homo sapiens
caccaacctggcttctggcccactggtcccggaaccgctgcggacgctgcgccccagccgccaagacgccgcgtatcttgtaccgcgggaaaagcgggtcctcgtccaagatgggccggcagggcttggggggtgccagcgctgcggggcgctccatgcagcgctcccagagccggagtagcctgtctgcctccttcgaggcactggccggctactttccctgcatgaactccctggaggaggaagaaggaggtgagacaccccttcccccgtagttggtgtctctatctgtttagaaagtcggtggctggagggttggccggggcagagagaactccacgtagcagtgtcccagcccctctgctctccgggactgtgccgggggcgacagccctagagcacgtcagctgagcagagaagttgtttcttggttatttggagagctccacaggcgccgacttgggaaaaggctctcctagtggagttgtattacaagtgcttggaagttgaaagagaatgtaaactggtgggaggcaaggcggcgcctcttcggtgcaccccactctgttttggtttacccttcgcagtccgggtattagcattcggcctggaggacagaaatacttgaaaactggagggaaatgcagcagcaaaactttgaaacaggaatgtcagcctatgaaaacccaagatcggatgaggtgaaggggttacacagtggacagacagttagagggttgctagtaccgaaggtgagtttgtgctcaaggcacaatctctggtgtttcagcaatgccattgtaattaagctaatgaaaaacacgaggaggaggactcgctgttttaaacttttcaccagttgatttggagttcgtaaagttttgaataacataacatgtattttcttcatgaactttcctataagatttaacaactaacactgaaaatacaatttgtcaatcaaaatgataattgactggtaaatagtaagtagtgtcccaacatttgaa

SEQ ID NO: 130998 - DNA, 1062 bp, Homo sapiens
ttgtatatttagtggagacagggtttcaccgtgttagccagggtggtctcaatctcctgacctcgtgatcagcccgcctcgacctcccaaagtgctgagattacaggcatgagccaccgtgcccggcctagcttcactctttaagaggtttattcacccagcaagaagagtataaagagacatatcttattctagtctttgtgtatagtaaataatgtacttaattcttaataatcagtcccatttgattaaaatagtttagaactttgcccttacgccgttgaaataagaaaaattcttcatacatttaaatgtaatcctcttaaagtgcaaacatcatacctagcacagtgatattcagtgtctattaataattaacagtatatagttccaccattcttttcacactgaatatcagtataactgactgccatccatccattatatttatactgtttaaaatgtaacatgtgatagagacttttttaaatgcagtgatcatagtttttacccatcttcatgaagccaaccttggaagcaggacatggatagacagttactatggttctttttataggggatattattttttctagattatgtgtaacaaatcattccataaatgagttcataccttgttcaaaaatagcacaatatttttttatgttagatttacattataacagacaaagtgaagcaaaagattttggaattaagaaaagtaaattgagtaacagttccactcaatgcctatcaaatattacctttttcatataagattcagaatctttcaccaccatgtgtccaaatagtgtctttaatttaaaactttaatagactgagttctacaaaggaaaaaaccctttaatataaaagtaaaattaaacctcaatttgctttcatcctttaacaggttcactaccagtaacaggaattagtttccctgtagaaacatcttatatataatgacttatgaaggaaactcactagaaagttataataacagcatcccatttcttccaaggactgtgttttaatgtaaatgttctctgctattattaa

SEQ ID NO: 130999 - DNA, 2291 bp, Homo sapiens
aattgtgtgaaggcctggttcttttactatgattaaaagaaagggaaaaatatggtaagcagaaattaatctggcatttaaatattacaatgaaaacaaaagataggcataaattaacctgcatttaagtattacaatgaaaataaggcttattttttttccttaggttgaatctttttgtttcttatattaacaatttgcacactgttttaaatggaaataaaacaatggtgttttgtgcttctacagattttttagaaaatcttcatcccactcaacatgacattgtttaaaattgttttaaataccttttctttctgcctccttaacaagagcactttttatttacacagttctttgcatctgatgatctcagagccttcgctgatatttcttaccacatagtgattacaaagctgttacactttttgtttctatctctgcagaagcaggaggtaaaaaactaaggagcactgtccaaagaagtacagaaacaggcctggccgtggaaatgaggaactggatgactcgacaggcaagccgagagtctacagatggtagcatgaacagctacagctcagaaggaaagtgagtgaggctgcatgtgatgtgtgtctcctccgtgcctcacctatctcactctatgtgctttcacagagattttccaactctcatgctcttcagaaccactttaattttcactggctgatttcctgtgaagagaactttgctcacctgccactgaacaatgtgacatatctggctttttatatcaagtgaaataggtttggggataaagtgttttgccttaatggcaagttgctaaagtgtgactcttacaatgcaatgcaaataaaatattttgccctagcttgaaataatatataaaagcccaaaaataataagcatgcatgccacaccatgtgaacaatgctagttttaagaatcgccatcctgagaattattgctaaaaaatatggaatgctggcgtatacttagttccatgttgcaacaaacaactataattatttaattatattaaatataacagccaaaaagaaatgccaccaaaaaacttggggagccttttacatagttatgaagtagctttcctttgaatcaactgtctcagatatttttaaagcatttttagcttgtgtagttctgtcaccaacaaattaatagtacttagcaactaaagatctggaagtggggctgtaaaggacattaacaaaggaaaatggggtttactggcctcactgtcatcactgtgtaagtattagatgtttagataacctatgtgtggccagtttacagatgtgaggccgtaggagctgttggcacaacatgaatggtatgtctcaggataatttgtctagcacaacaacataaatacaagagatataactggtttctctacatttgtaagtaggcttatttgggatacttatagaaacaaactaaaacatttgtattaactaaatatttgagagttgaggtcggggggagaaatagattcactattcattaaggaagtctaaaaagagagggaaaatcaactgaaaagtgaatgtgcactgagcactaatcattgcaaagaactatattagatactgttagggatataaaaatgtttacactatagcccctgctccagatgtttatagtcttattggaaaaagaggatgaatacccataaattcattcaacaaatattaccataccttccagtgggccagtcactgtgctgtacgttggggatgtaagtcataggagggagggagtaaatctccatggctaagattatgggctttgcagtcatataggtctggttctctcatctgggtcttttcttttctttctttcctttttattttttttgtttgttttcttttcttttgtttcctttcctttcctttacttctatagaacatacaatatttcaggcatggttctagatgctagagatacagcagtgaacaaagcagaccccatctccccaaaaataaaatactctcatcacatttacactctcatagagaagacaaacaataagaaaaattgttaaaatgtatataaaagaaaaactagtaaaatttatagtagattagatagcacacatgctaaggagaaaaatacagcaaggaagagagatgatcaagacggtggaggtaagatttgccacaggatagacggggaaaggaaatattcgagtgaagatctgaaggaatttagtgagcagagggatatctgaaggaagaacattctagaatgaagattgcttcagaggc

SEQ ID NO: 131000 - DNA, 1054 bp, Homo sapiens
tcagcatctctactgattgacttgtaactttcactctgaacttttctatccttgcagaaatttttaattataatatataatctgttgtataacctggcactggtgattaagacagttgtgtttatatatgtcttagagctagtcaactcactctgctataaaaaaatcatgatttgtacatgcatgaaaatggtttttatgaagtgtctgttggataaattttaagccatagattgtctaattagttgcctcttagctaatttgatcaatatcacatgaaattccactactgttatacccacaccaccaccagtaagtaagtacttttgagtgataatcactatttgtggggatgagtgaatgaaacaatatagcttcaagcatgttaaatagatttaagtattgataaattaaagactgagcaggacatctctcaggactggaagcatttccctttatttaatgcagtgtgtaaacctatataaccagttgatgaaaaaaatgataataaactcagaggttatgtcagcatcccctaaaactccctgaaagacacagttatccactgtttatctaatgattttgacagaatgcagctaggccagtggcatgattgctagctctttcagccaaagattactaaactggtaaatgtcaccgtgcgtcggccatttcatgtccatagtttattgctcattctcctctgtgttttctttcccaagcaccgtatgtaaaagtgtatctattagataacggagtctgcatagccaaaaagaaaacaaaagtggcaagaaaaacgctggaacccctttaccagcagctattatctttcgaagagagtccacaaggaaaagttttacaggtatctacttaattgtttatcccttacctaagaaagtatttttcatggggtcagacattataccccaaatcttttctgttgtattcttttatgttcctcacaaaggaaattctttggaaacttttcaaagcagtggcccgtgctataaagcaatatacgttgtcattttctttaaagtgatttacagacatg

SEQ ID NO: 131001 - DNA, 1050 bp, Homo sapiens
gaataaatacgtgctcctttaaaatactcagtggttatttgtacagcagcgatagcagggaaatgcagctggacttaacacagcaggagcagggttccgtgagagcacgtggagcgagtcccaggcccaggattgtcactgtcatttctgccgcattcgattgggcaaagaagtcacaaggccaggtcagatgcaaaggatggaggaatagacctcaactcttggtggtggaaggtcaaagaagctgtaaagtcatatttcaagggagaggacacaggaagagtaaagaattatggccacgttttttgtagtcagtctaccaccatggcctttacgaaggtcagaggacattcaaaagtaatttctgaccttggtttctttttcattttcaggacgcagggagcatgggtatctggacctcaggcactgatatcttcctaagtctttgggagatttacgtgtctccaagaagccccggatggatggactttatccagcatttgggagtttgctgtttggttgctcttatttcagtgggcctcctgtctgtggccgcctgctggtttctgccatcaatcatagcggccgctgcctcctggattatcacgtgtgttctgctgtgttgctccaagcatgcacgatgttttattcttcttgtctttctctcttgtggcctgcgtgaaggcaggaatgctttgattgcagctggcacagggatcgtcatcttgggacacgtagaaaatatttttcacaactttaaaggtctcctagatggtatgacttgcaacctaagggcaaagagcttttccatacattttccacttttgaaaaaatatattgaggcaattcagtggatttatggccttgccactccactaagtgtatttgatgaccttgtttcttggaaccagaccctggcagtctctcttttcagtcccagccatgtcctggaggcacagctaaatgacagcaaaggggaagtcctgagcgtcttgtaccagatggcaacaaccacagaggtgttgtcctccctgggtcagaagctacttg

SEQ ID NO: 131002 - DNA, 1045 bp, Homo sapiens
ccagttgagcaagataggtaaacttcctgagcctcagtttctctattgaaaaagtaggagtaattaatcatacctctctttcacgggatggttgaaaggacacattgggatggcacatgcaaagccccagctctccctcagtggtagacagattcaaccttgtctctttctcttgccccatcacgactgccactcttttcgttcccatctatccaatacagagccccctgaagggaaatatttaattaggttaatttttgacaaatgaactttctccctttacttcgttttggagaatatctgtgcacgagttaaaatttaaaaaaaaaagaaacacagagcgtccatcatttattaaacaccgactgtttataaaacacagaagcaaaccccttagtttggctgccactgctcctcaaatgccttgcacagggagtggcacaaagaagtgctcagtaaatccttgatgagggaatgaattaaccttgggaacagaagatgacagaggaggaggagaggaataattcatgaataaaaagtaacactatgacaaatcattatttgtgtccagggctcaggactccatttgtcttaagagccatcctagtgtgaatggtgattgtaaaaatataaatggcactggggagtggccttctgagactctgtgggcttaggtgagcttgcataaccagctgcagtagtgagaaagcattcagggctttttcaagcagtggttctttttttgttgttgttgtttttgccttataataggatgcagtcttcacaagaacataggaccttggctttttctttaacaaaacctataaatgtgctcaatagagtcttaatgaaaatatttattaggcccttattaggtgcccagacttgtgctaaggtctgtatagatgccatcatttaattgtctctgcagccctatgagggcaatattattttattatatattattttattaatattattaataaattattatttattattttactactattattaacaaattatttttattattttatattat

SEQ ID NO: 131003 - DNA, 1024 bp, Homo sapiens
aaaatctaataaaagcaacaaagggatttccacattcatttcaaatgtctttattgatgcagaatcctatagctattttattctcccgaacagatctatcaaatagataatgacctgtgctctccatttaaagcagccttacatgaaaatgttctacaaagtttgtccctattttgttgagagttctcactaactttatgaatttgagaactgaacaggaactccttcacttcctcccttatctgaatattaataaatatccattgaatacccatcaattgcatggtactctgctagatgctggtgaaataatagtgaaccagacaggccctgtcctgaagaagctttcagtttcctagaggagacagacaagtagaacagctattataaggcaacgagataaggcacggtgatgggtgtatgctgggcctcctacggaggagcatgtcagatctgggtaaggctcttagtggggtgctattacagctaaataccaaaggatgagtgggaattgacttctgggtaagaaagcaatttaaatatttctttcgacaggattcagtagtcttattgtagactttccattgtcaaccaaagcagagaagagaaataaatattttgaagtatctcttaacctgagaaaaaagagctgtagtttgattgaaccagaaggattttcttcagatgcagctcaccgtcctttctctttgtgctcaaaacaaatcacaattgggtaaactgaatttctactaccctttgttaaatgtgcaaatatactcctaagtgagtatgctgggggcagatgcacctgcaaggagagcataatcgccccaattttattccatcttttaaaaatccctcttgacctagttacctaggagaagaaatctaagcttagtttctctgcacacacagaaggatcataccatagactaggaagtgtgggggaaggaaggtattaaggcagcctctttcagccatgctgattccatttaattccctcaaatctcgaattcatcattgt

SEQ ID NO: 131004 - DNA, 1020 bp, Homo sapiens
tctctggtactgatgtgttgagctgatatttttctcttccaaaacttagttatccttcactatgtttatatctttgtcttaccaaaatgcaacctctctgatgacaggtattacaccttatatttatgtctccctcagtactcagtaatttctcacacatttcttacacacaatgaacatgcaatcaatatatgttttcagataactgattaacattgtcctcatccccctcgcctccaccatgtgaggaattcagcaatccttctacacagataaaggctccatttgtttttcttgtgggtaaattgccttctcattattctgcctccagaaacttagctctcttaaataaatgcctggtaggaggacagaactgagagcaaagtaagaacatttcccttctctggtgagaagaaaagggcacaatcatagcacaggatgatagtggagggctcacgggaagaaaatataacaaaaacgtgaagaaaccacctttaagaaattttggagagggaaagagcattgcaaatatacaaaatgatagagaaaacatagggagaaaaggacttcacaggaaaggaaaaaataaaacaaagctatttattagaagacagccagagaaatgagctgagagcccagcacaaatgctcagcaatacccctcatgggaggggcagcccctgttaccccttccaggaggtgcctcctccacgcagacagctggcctcaagagcacatctggggaggcccttccttgcccagacagcacgcggccccatttactggactaaaggcaggcatagtgaaccaatggaaaattttcttcaggcaacataacctcagcataaaaaaaaatatcaatctatttgcctcccagccaaagagaaatcaagttagacaaaggaaattaggcaataagtttaatgtgactgcagctgcagttgtgaaataaacctaatgtactctgactctccttcccatgtgctctctgggttgcacaggccactttttggggagggca

SEQ ID NO: 131005 - DNA, 1055 bp, Homo sapiens
gggagattgtatacaagttggagcaatatccatttattattttgtaactttacagttaaactagttttagtttaaaaagaaaaaatgcagggtgatttcttattattatatgttagcctgcatggttaaattcgacaacttgtaactctatgaacttagagtttactattttagcagctaaaaatgcatcacatattcatattgttcaataatgtcctttcatttgtttctgattgttttcatcctgatactgtagttcactgtagaaatgtggctgctgaaactcatttgattgtcatttttatctatcctatgttaaatggtttgtttttacaaaataataccttattttaattgaaacgtttatgcttttgccaacacatcttgtaacttaatatactagatgttaaggttgttaatgtacaaaaaaaaaacccttatactcacctgcgttttcatttgtttgacatttgtctattattggatttcattatcatatgaacttgtcagtgggaaacaaactgtctaaaaatttttctcttacgtttaacatacaatcatgtgaaatttaggcagagttcgataaattactggcaaaaacaaaactcttttataaagattttctaatgttgactttaatactctaacatggtacaaaccaaatggtaaaatcccaagtcatttcttttttcatctctatttagcaacagaattaagtggatgaagatattctactatgcattaaatcttgaactttataaaacatgtacaaaaattgtacaagataagttccacctggtaatgtctttccctaatacagggttgcgcttgcattggaccctagggatttgcactaaaattatatcaaggtctcagatgagcttagtgcacaagcactatcactttaaatactattatttgctaccacagcaactatatatttccatagcttttggctgggggcgggggacatttttattacaacttgaaattgctttgctggtttcatatttatttgttgtatttaaaaaatacattgttgtaagagtgatttt

SEQ ID NO: 131006 - DNA, 2109 bp, Homo sapiens
gcagccataaaaaggagcgagatcatgtcctttgctggaagctggatggatggatgaagctggaagccattatcctcagcaaaataacacaggaacagaaaaccaaacactgcatgttctcacttataagtgggacctgaacaatgagaacacatggacacaggccccagatttattgtggcctttctagggagggtggggtgggagggagagcattagggaaaagacctaatgcatactggacttaatacctaggtgatggattgatgggtgcagcaaaccaccatggcacatgtttactcatgtaacaaacctgcacatcctgcacatgtaccctggaacttaaaattaaaatattaaaaaaccaacctgttttttaaaacttctagcacttgggctttatgaacatttattataaaaatatcacttgctgttttatgtcttttaaagattataatttttctccttctctttccatctatttctactcacatcttcacagggaaatctgaggaaccaaattgtgcttgtgatcagtttcgttgtggtaatggaaagtgtataccagaagcctggaaatgtaataacatggatgaatgtggagatagttccgatgaagagatctgtgccaaagaagcaaatcctccaactgctgctgcttttcaaccctgtgcttacaaccagttccagtgtttatcccgttttaccaaagtttacacttgcctccccgaatctttaaaatgtgatgggaacattgactgccttgacctaggagatgagatagactgtgatgtgccaacatgtgggcaatggctaaaatatttttatggtacttttaattctcccaattatccagacttttatcctcctggaagcaattgcacctggttaatagacactggtgatcaccgtaaagtcattttacgcttcactgactttaaacttgatggtactggttatggtgattatgtcaaaatatatgatggattagaggagaatccacacaagcttttgcgtgtgttgacagcttttgattctcatgcacctcttacagttgtttcttcttctggacagataagggtacatttttgtgctgataaagtgaatgctgcaaggggatttaatgctacttaccaagtagatgggttctgtttgccatgggaaataccctgtggaggtaactgggggtgttatactgagcagcagcgttgtgatgggtattggcattgcccaaatggaagggatgaaaccaattgtaccatgtgccagaaggaagaatttccatgttcccgaaatggtgtctgttatcctcgttctgatcgctgcaactaccagaatcattgcccaaatggctcagatgaaaaaaactgctttttttgccaaccaggaaatttccattgtaaaaacaatcgttgtgtgtttgaaagttgggtgtgtgattctcaagatgactgtggtgatggcagcgatgaagaaaattgcccagtaatcgtgcctacaagagtcatcactgctgccgtcatagggagcctcatctgtggcctgttactcgtcatagcattgggatgtacttgtaagctttattctctgagaatgtttgaaagaaggtcagtatcaagacagaactattgggcctcaataaaagcaggcccaagtgtttgaaacaagttctttgatgattagcaatgtatttttgttttatattagtttagaaaatggataaagattgttgatgatgtataaaattagcgtgaaaaacccgagactcagaaggccagacacattacaaactaaatatttagagttatgagaaaaagcccatctatttaccagctcctgttttcagattaatctgttttataggaatattgtaagctgcagctctcagttttagtgttttaacctgtatttttctaaatacaaattcaaaaattccagttattctatatgctatgttcaaagcatacaggtaaatagaaaaatgaataaggcataatatcacaagcagtttacagttaggaggaaggaattggggcatggaataagatgacaaaagtataatactataaagagctatgaaacaaaatggtataaagtcaaaaatacgta

SEQ ID NO: 131007 - DNA, 1093 bp, Homo sapiens
tcattatccacccgcctcggcctcccaaagtgctgggattacatgcgtgagtcaccacacttggccggagacttaagttttatctgttttatcaatattataataataagccacctcaaatctataatgtaaaatgagtaacagtaatataaatatgataaactaggaaaaatgaaattacaggttatagtaggtactggagctgaagtattaatgataagttgggactgggaagccatttataaagcactgaaataatgaaaaaatggaagacccagaggatttcctttggaaggttggggcagatgtgtaagagataaaacaggccttggttccctaagaagtggtgaaggcaggctcaatttctgactgaaatttccggttttaatctctgtgaggcctaacttatttcctgtccttgaaaattcttgaaaacgcctgtagtattcttcaatttctttttacttcagtacctattccatcaaacaaatgctgcctgagatgatgtagattcagaatataggatattctgaagacggatttgggaaacacacaggtctgatcatgttgaatttgaggttagaatgtccagtgggcatttgactatgcaaagcctctgggttaaaaattttaaactcatgaccatagttgaaattgtaaaagtggatgaaatcttccattgagagtgagaagagcagagggctttggaattaaccatgaaaccagtatcaaggactggctggctggctggccaaggacagaggatctagtgctagaaaattaacacagaatagagttagaaggagaattagaggaggtgatgtccacaaagtctgggtagtacagttccaagtctgggtagtcagtgtcaggtgctccagaaagatcaagtaccttgggaatgagtgtccattggatttagcggtgaggtcactgatggccttttcctgctagcatggtttctgtggagataaggtcagaattgaaagtctatttcagtgggtcagagaaaaaatgcaaaggaagaaaatgaaaaatttatcaatgtatcccattgagctatcagaaatatagtgggaagaggtgcatgatt

SEQ ID NO: 131008 - DNA, 1037 bp, Homo sapiens
gtgcttcttaaactttaatgtgcatatagatcactaagtgtgcatataaattcagattccataatctggaatgagcctgagtctctgcatttctagcacactcccaaggtggccagtactgctagtctactcgtgagtagcaaggatttaggcagtttatactgacctttggcaaaccttcttaggtgttttattgaatcagtttcatgttttgtttctgctgcctgtttttataatttttgtgtggtaaagaaatgggtacagtctttctggtcatttcaattctgtatgtgtgacatttaacaataaatgagaaaaagaaattgtgccttttttggcatcagtgcagagtacttaaaatgaatataatcatttatttgtatacttaatatggccttcccacctatctcatcatttccactgtttcattcttaattgagggaaatataatgtatgttttcattttgaagggtataactgtagttgaaccaaaaatattgttttatcactgttattttttctttagtaacaataatatactttacacagttacaaaaatcaacacctgttcaatgctatgtgccaggcactatatcaagtgcttaatgggcatgatttcattttaatcatcaggacatccctcattcatctttcagctatttgtgcgcctcctctgtatcaggaactgtgcctacagtggggagccaaataaacacaaattctgttctcctacagcttagtgcattggggtggggggtgcaatacaatattcaagcaattatagaagtgtgatacttgtaaacaaaaagttgttaattacaatatttgctattttctccactctcaaccatgaaagaaaattctgcttttgccttctaagctttttctgactagcttccttccccacctgactccgaggagaattctttgtctgttcggtttctgagctgttgtgatgccagatccaactaatgggtaaagagagaaacctttagaactaatgatgtataaaatacaaaattttaagacaaatatct

SEQ ID NO: 131009 - DNA, 1746 bp, Homo sapiens
tgtctattaaagctgtatgtaaacatgtcctgtggcccaggaattctgcctctagatatgaactcaacaggtatataatgtgtgacaaaagacatgtacaagaatattcatagcatccttattggttataatcccagactagaaacaaccctatggccatcagcaatagaatagatgaataaattatggtatattagcataagataattctgtttagcagcagtttccaaactttcgggtcgcaggactccacagttattgaggaatccaaagaatggtttttgtataggagctatatatgtttttaagaatattaggaattaaaattgagtaattattaaaacattaattcgtttaaaatgacaataagaaacctattacatattaccgtaaataacatgttaaataaaaatatgtaagatgacaactatattttccaacagaaacaaaaattttttgagaatagtggcattgtcttagtttttgcaattaccatagggtcagatttatatgtaaaacatatttagtataatgccagacaatacttgttgaataaatgaattcatctatctataaatggagtaaattacatttatgtgattcctaatgttgaatcatttttgcattcattcatagggcataccaccttgctaatgatatattttaatctgctagaatacatttactgataatttttatactttgcatttatatttatgacatcagtccatagtcagtcttagctttcttctgccctctacctctttttttccttcctgtaacctaacctccctcttcttctgcttgattttcatatctgttaatccattcttttagatgcacttacgatcttttttttgttgagttcagtgtttagaagtagtataaaagattctagtgttccagttattattattttgccttttaagattagaaaaagagaagtaagtgattgtttatgaactatataggtactgtaacaggaaagcaaaaattaaaaattttgtactaataaatgccgaggggagaaatgttttcattcctagtatgtttagactttatttcactaaccaagataatacagatgagcctgtaagaagtagatcccttcttacgcatcagctataggattaagtaagccagtaagagacctcagtggagatagatcagttccattagaagtggaactcacatctgaaggcaggagctgtgtgggaggtaaaatggagatgctaaatgaggactgagctcaagtcagggggtaggactcctgtattctgtcagtagggtacatccggtttgtgtggatgacactttaagaccaaactaatttgctcaaaaagtagcagacataaagttaaccaaaatatggctccagtgctatctaaactatgacctagtagtgtactaacatgattacttgtatgtaaaagtatttgcccaggtacaaaggatgggagattaaggagaacctactactatcggtgctgctggagtggatcactgcacaggggctaggagccatatgaaaaatacaatcgagtattaagaaattgcataaattacatttgtatacgattcaacttaacattattttttctactacgtaagaataagaatctgagtgtttgatttgattgctttgtgtgggtgggttagagagaattagaatacatgatttatctctggtctttattttattaattcttttattccctgatctaagtagggggctagctacgataa

SEQ ID NO: 131010 - DNA, 1097 bp, Homo sapiens
aattcatttttaaactggttttcagcttattacagtcaagagtctttactgttcacagtagtattctagatgttgtggtagcctaaaataatctttttactttgcatatatgtaatggatgaatcttttcccatgaattttatggaatgttcagtagcacttaataactggtttaagggtagacaagaaattccaattttagaaaggttgtagaagtaactggaacatgagggaaaaatctaaaccagataccaattacttcttacaaagtcaagtttgattacataaaatgtgttgaataaaattgaattaattgcttaacataaacccttccttgagttcagaatctaaattatatccatatccttgggagaatatgaaggtgggcagcacattccacaaaattctaggtggttatcagggcagaaagtattaaacaagcactgttaactgtattctagatagagtatggaggagatttgaatgatgtatggtaaatgatttataaggttcctagaaagtaaaatttcttttgaagaacataaaagggattttagcctgaaaagtgagcagcagttaaagaaaatgttgagatttacttttgtaattagaaaatttaaagcttattaaaatattaagggaacaagagggcctttttgtgtttctgatatgagatgttgttccttttttttttccccactttaccagtgataccacaatttaaggggtgaaagttcagtaaaaatatatatgaaatataagtgagaattatatagatttaagtaaacatagaatatttttattttagatattaatcctgttcttactgcaagtctttataagaagaggaaggttgttctaaatttaggaattggaagttgatgatctctaatttctaaggttacctttcttttctgtttttcttcttttctccttatcactccctgctttttgagagagttaagtaatagatgtacattatttattcccattttctaaaatttaggattagatcctgcaaatacaaattaccaatgtatctattcaaatacatgttatcagagtctcttctttttaagtatatataaatatattat

SEQ ID NO: 131011 - DNA, 1048 bp, Homo sapiens
gaacagatactagctgtaatttatgaaactgtcctctatacagtaaaaagtgtgtgtgtgttttaaaaggcttcaaaaataattagctctgttaatgaaactgaatattcacaatcactgttaacaaagaaaagcaggttgattggccaatatttagggaactccaatattaattcttcacagagtgactcttaaatgaaatgactctaaggtgtgcttcagatttttgaaacatttcacatacataaaaaaattttttgttgtttattttggtgctactttccagatgacgattttatgggctctgatatgtgactgttgtacttccaaattaacttttctgaatgccagagtcttacctgaaactctaaattgtaatctagaatataatgttttctagaagtagttgttcaaggacctgtaattatctttcaggggctactgtatcttaaccgcattcaatgtgcctaagagttaggagagagtaaaggttgacctctgccacctttgaaagtttgaagggataaaaatatcagtggtgacaaccacaagctttgctacgcattgtcctaggcttactgtaagaggaaaaagtgctttgtcatttttcacatagggatgtctcgcttttacaaatctatgggagtttccaaaacctctgtctcctagtcaatagaagctgttagtcttgctcacctcctaaaccacaatttggtaattctgacagttccgttgctttatcctttccacttctgtttgtctcccagattagtgtttcctaacttttactcaaacccacccttaaaatacacattgcttcgggtactatgtacatagagaaaaaagttaatgaaatcgtactcttaactacctgtgcactcagatgttttctatttattcctcctctttctcacccttcccttcttcatttgctggtctggactcattaaataaattttggatccactaataaattgcagtccttagcttgaaaaacactacccaagatgaagccttaaaatatagtttagaggccaggcgtggtgac

SEQ ID NO: 131012 - DNA, 1038 bp, Homo sapiens
aataatctctaaaattcttttatttttcacaaaatttgcaaaattttaaaaatatgaatagagtgaagaattaattacaaaatttagagttagaagcaaacattttttctttattttctgttaatatggaactttaaacttttaatttctgtattaattactcccttggaatattgaacaatggtatactcttgaagaaaaactatttgcttcactgtggtatgtcctgaaattattgggagcctgcagtaaattgaggaatagaagattaaaaatagtgaattgacgagtcttcaagttcagttgagggccacatttctcttattctatacagaaaaaatagctaaaaatcatgtatttcaaagtactttaaaataatgatgaaataaaaattgtaaataaaaaatacactcaattttgtccattttccctttgcatgctacattaagattacctagtttggaagagtggctttaaagcttaacacacaattcgattaaaagatctgattatttataattcactgacaaaatctgtcatagattaattgtagcatatttggtattcaagaaaagttttaaatttattttttattacttacaatagcataaaaggcctttttttcattttctagtagaagcttgtttaatttcccatagctaatgtctcctaacagtaaatgccatggactggtaagccttcatgctccttgtgtgtgctgagaagttcaaaggcatttgtgtgtgtgtgttttttctttttaataaaaccctgtgaattcagtgcgaatcatttggaatgatgtgtttctcactgtatacaaattattttcatggtgtgcattttcatccatgtccaatatgtcagtgtaatactttgtgatgttatatagcccatacttacatgattaaagtatgcatttatttggataaattctgtgaagaaattttatgctgtttttaaatgcttttcaaaatatagctcagtgaatgtattattgggggatggatgtatattgacaacattacctattaatgg

SEQ ID NO: 131013 - DNA, 1064 bp, Homo sapiens
tgcccgaaagagttcatctctcacccctatcaaatgttttgccttctgagtgattttaagatgcttatttttatacatattattatatgcagacatagttttaaattggccctgggcccaatgtgttgctctttttcgtaccttattaaggatttttttatccttgaaagtcttccaagctatctcaagtgttctcgtgggcagtagcagcagcagcagcaacagcagcagaaggaaatgaaggagtacatggagagaccaaagcttagagtgtcagtggggtttgaaaggatgcccctgaataaaatagaaaggttttaattcataaatgccagcataaataccccctgataattatgacagagtggaaagaaaattaaatatgttgaatttttgtcagataattttgaaagtggacataaggttaggaaacaaataacacacggagttgagggaaattataatccgaaaacaaatgaaatatttgtttctctcatttgaaggaacctagagcctaggaacattaatgcaacttgagaaaggttgtttttaaccgtggagtctcttagcattttcagcctcagtggaatattataggaccataaggtcagttttatttaattcattctcatagattctgaacaacctaggtagtgctgaagattttattgtattttgtaatttacattctgagtttggacagaggtgctacaaggtgtatgctactgtaagtaaattcatctgatcagtggcattatacaatgactttatgcaaatggagaactaattttttgggaaaaaagttaatctcttgtggtatgtcttgccatcaagaattctattcctaaagacccaaagaagtaaaggaaagaatcagaggaaaatgaacccaaagtgcatccagtccctggctcccatgtggccagctgatgttccagccatcaactgttgaaaagctacaagtggttttcatgatgataaagttagtggtcagcaccaaaaatagatccagagcaaggcctagtagaataaattactgaagatgatcaagttagaactacctc

SEQ ID NO: 131014 - DNA, 1175 bp, Homo sapiens
tgtgcaatacatattacttctggaaaaggaaggaaaactttcattgagagccttcctatgtgctaaggactctgttaggcactttataagcatttaacttaattttcttacattatttacctgcattatccttttatgtaggacagggataattagttccattttggagacattgttttgggccacactgcaattgacagccaatatttggaatgggttaaggggttttttttcatagctccattttgtcagtgaaagggcttctgctgcaaaatgacaggatccaacgatgaataagatgagatcacgtaggtggagatggctacaaatagctctggcacattagcactcagtaaatgctagtcagttttgaatcatgggtccaattctcacatggctgtcttacagtctaaggaaaccagatgtagccataggtacaatgcagaatgaagtgtcaggagaacagcacagatagatttaaagaaggatccatgcagattaaagtttggcctttagttctcttatttgagaaagtatattattggaactttaaacaattttgaatgatgtaacaccccccaccccgccccccaaaacccttaggtgtcagatagaaaaacgtattgaaggcactttttatatacttttcagaaagtattcaatctaagcgtgattattcttttaacattaaaaattcaatttactgattgcaaattaaaagcctatatgaaacataaaacttccagtcattgatgtcaataaaaaccttatttttttcatagcttgtgagatttagcttagggttggtatagtcttacaaagttgctttacttttactctatggagttaataagatatatccataaaccttaatgtgaaaaataaatgcatattcagtatgaaatgtgtgaaaactcagacaaagccccagttcagtgtactctgttcctcctgacaccaagaggttatgtttcaaataggactactaaaggttttaacatctagtagtatgaagcaggtacagaaaagagtgaatgacatgccaagccagcagtgacacacacaaccccaaggtggcatgtgacatacctttacttcatttacagacatggcatatgtcagagtgcttggccctaccgcacagttggtttgagcaatttccattccattatgtt

SEQ ID NO: 131015 - DNA, 1021 bp, Homo sapiens
cccaaaatgctgggattacaggcatgagccaccgtgcccagcctaaagttgttctttattattcattgactcttacttcaattttctcataaaaccccttgtcccagcttgacaaaactgtggcttcttgattctaataatttcagcgtcttctgtgccattttgtatcactttctattttttaatggcaggaaaccagactaaagcatagagttatgtaggttggtctgtggttttcttctcatacactttagttccttttctgatggttaaaaataatgagcacaacttgtcgcaggcataatgtctcccacaaggcttcaatcaaggggacagacaggtcttggtgtcatctgaaggctcagctagtggaggatctgcttacatgctcactcaaatgactcttgattcagtgcttggcctagtgggcctctacttaaggccactcacaatatggcagctggcatccctctgagcaagcagatgagagcataggacagggagcccaagacaaaagccacagtgctttggtaacttaatcatgggagtggcatcctatcacttttgctgaattctagggaagggaattgtgcagagcttgaaaccagaaggctgggatgactgggggccaactcagaggctgtctgccacagaaggtaatttgcataagtagttaacctgacctgtggatagggaaggactttcaaataccaagagccatgggagcaatcacaaaagaaaattcagtgaacttgaatacagacaacaaaactgtatgctatacagcatcataaccaaaatcaaagattaataagtaaaagacatttgtgaaaatgaggtatattttattattattcattaaaatatttatggtttctcacatctgtgatcagtggcttcctgattaatttatttagatattaattttgcaataaagacaaattaaaatatacaaaacgtgatttgtacaaaaatttggtgggaattggggatcaaaagtagtttgctgagtgtttcttct

SEQ ID NO: 131016 - DNA, 1070 bp, Homo sapiens
attgtcattaaagaaacaattttttctttagtattccacgtgtcattatatgccacagagtgtatggttaatagaaatattcaacagaaggtttacttatgatttaataaataagaacgcacagaataataacaaacttcatcctgatttaggatcagattgttaatgccataatgagcattgtaaatatcaatggaaactataaaaatgtaattatgcctgtggagttatgaaggtacctctcttttatcagtttgctagtatattcaattgcattcaatatacagcattattctaaaagcattataaagaaacttgagctccaacttaagccactctagtgaaaagtcacttcatagtggaatctgctttattcccacatattccagtgatcaaagcactgctcttaccaagatagtattaatattaatatccaggtgaagtggccatggaatctaacactttcacaatgttaggttcactaggtaaattattttaaaaattctatcattttacaattggtcaacatgaattatgtagattttcagatgaatcacatctgcagaatggaagcaaattactgagaaacttttaaatgctgtatatattaagaatactctgaattgtttgatgataaaagatattcagttcactggagtaactggagtaaaactggagaaactggagtaaaacaatataaaataaggtaagagaatatcagattgtagtaactgattagctaaaatagtctgtacttttgcttgtttctactgatttccttcctttcaactttaagataactgtgtgtgcactagcaaaagatacttggagaactatcaagaagatgcaaaatgaaaatggtaggctgcccattcctttagatgctgtcaaagcaactgaaagaagatgtcatgcttctcctttcaaagctctcagtagctaaggagaaacaaaaataacaatcaaaagattgagtatacttttatcctctatcacttgagtggtatgtaggatttgtgacaaatagtagcaatacttcgtaatgataacattattaccaaagaactcta

SEQ ID NO: 131017 - DNA, 1067 bp, Homo sapiens
tctcttatcatatttgagatcccacataccacattctactcgaagacatttgttagcagaagttctctggaatttcactctcatgctgttcttacaggatattttgtagaactgtgctccaagaaaactctaatttaatgaaatcttcctggaatctccattcataaatctattctgtgcctaattatatagtgtagtggttctcgttataggatgttgctaatgtctttcccacttgtccttttcacatattttctaatttaggagtattcttaatatcattgagcttcagtttcaaaagtaggtatagcatataatttttttcaagcaatgcaactttgataatgttttaagaagttgagttttgttatttcccaaacaataaacacaaataagataggttcttttaataggagtttggaagttttctaagttacttgctgaaatctccttatatatagaatcacatatacacacatgcacactttgcaactctcacttaaaggacatcccaatttaattcagtggccattttactccatttttcaatagaatcacaagattttaattgaagcaagtgacatggctcgctgtgtttggtacttaacattaactggtcatggggaatattcaggtgttatctgtgaaaacctatttttttttttttcagttggactttcactcttataccccaggctggagtgcagtggtgcgatctcggctcactgcaacctccgcctcccaggttcaagcattctcctgcctcagcctcccaagtagctgggattacaggtgcccaccaccaaacctggctaatgttttttgtaattttagtagagacggggtttcaccatgttggccaggctggtctcgaactcctgacctcaggcgatccaccaacctcagtctcccaaagtactgggattacacgcccagcctgagaacctgtttttatatcacatcaataatgttgaccctacaggatcacatggaatggaatgattttgtttatgtagtttaaaatgacactctattttctggaaaaaaaaaaaagagaaagaaagaaa

SEQ ID NO: 131018 - DNA, 1044 bp, Homo sapiens
attattagagttggatttctgttttcacatttcagtgttttgttaagtgcagtcaccaaacacatttgatgaaatcagaattactcatgcatgctgagaatcactcaaaaccaaagaaaagaaaggtgcttaagatatttttgcaggttggagacattagagaaataaaatattatgagcagaaaataggtaaatgtactattatagaaatatatagcgtatatttttacatatttaagtcatctctacattggacttagttaatttttcattttttcttctcttttctaagtgtagatgatcccactttagaaatgagaaaaaagagtgcttttgtaaagtagatggaaatgaaaacaaagcagtaacctcaaaatgtgattttcttgctctctgcagaatctttgtcttacttttcatgtttaatgttgaggcctagattatatttttcccactttctttccataactatgaatcttgtcagtaattagggctcatctctaacagtgcaatattaatatagcatccctgctgtgaacataacagtaggcacacatggatctaccttattttgagagtctctgctgaacacagtgagaagattagggattcaccaggtctacccctttgggccctgccgtgcaccatcctggtgttctcaatggggtcactgtaggaataggtctagctaaggtcgtatcctgggcagtgaggcggagaaattgcctaccaaatcgagtaagtcttttaagaatccttcacttacccttatatgatcgtggacatccttcccccttaatccctttcctctgtcacctgcgtaataaagtgtgactctcattcaacatgggtatgtagcataaaatttaagaattttcatttctattaactttgaaactgaggattatgaccagaagagagctttatttctgagcactcatgtataggctcacttccttccactttatttgctaccaaagttattaaaaattagagagctaattatttacgagataatattttttcaccgaggatatgcgtaaa

SEQ ID NO: 131019 - DNA, 1001 bp, Homo sapiens
gttttaaaattcagagcaaagactttccctgcttgaaggaggagaaagcaggcaggggtaaagaggaaggaaaacagaagaatgtaacttcagatactttgtaaagggttacctcagttttctatgtatgatagtctcaaccattcaaacctgttgttgttttcctcctcagcacacataattccccttaaaatttagaagcagtatatgtgtgttggtgcaaatatctgttcaaagagttttattataagaagactttaaaatatctgtgatgcaggttatgaatccattcaaaaataagatttttgcatccttcatttaataaagcaaggtggtaaaaagtaaaggaatggaaactgccttattttcaccagaaaatttagccctagtcacttggtgagtttatgttatacttcaggaacccaggcttctgttcttaccctgtttcagaggggaaagttacatctttatgctttgttatcttgacatgggcacgtgagttgaatgcagtgccatttagttgagcattggaggatagtctgtaaattacgacgaagttgtttagtcagttaacataaatctttggggattataaaccttggtgtagcaacttaacatttaaggtagaatagaattaaataaataaagcccacattctcttttcttctggctgacttcaaggaatgcactgagcgccatctgctggttgttactttttcaaaactattttcttaccaaaccactgtcatttgaaattgactctaggtatatataccaacatataaaggcagctttatgaagagaaggaaagggcatctatgtactataaatagcccttatatcacatgacagtgttttattttaaactgtcatataataattcaaaatttgccttaggatagaaatctagtaacctttcagataaggaaagggttgaatttccatattttagaatagaccattatgaaagttttagatgtagaagtaataagcacagtatt

SEQ ID NO: 131020 - DNA, 1008 bp, Homo sapiens
tttattacctgaatttttcaaagccaagatcgaatctacctttctttaaatgcctctttctggagttaatcatttctcacctgcttcttctgaacctgattcacaactatatcatattctcttagattgctttttaattttcatattgagtctctctgttacttgtgaagtcatggatgtcccagtgacttactcaactatttattacttctataacatctgatgcagttcctaaagcatggaaggtgacaagtgatgtgtgctgaatataattagagagagtaagacccatcaacacttttctaaatactgtgtatactgactagtcccattttatgaaatgcacatatattgtagtaaaatttcacttgggtgcttctgataacccacaaaagttcaactcctccagctttaaggagtcttaacccaccatcctctatcccaggatataaaacaccactaccacccttcctgttgctttgtaataatcaaggaactacattccagttagacacaactatcctaagtttctcagttgagctcttggaatctatgagcaaattattgggcactcatgcttatatattcccagggggttcaaaaccccaatcagtcagctgactgtctgagaatcactgcttaagggttggcatttggaaagttcaacacttttcagaacttgtgctcacaccaaatacatacatattaaaggtgtctaaggtggagtgggaaaaaagagagagcagtctattgaagaatagtaagatgatagagaaagaaatattcatatatattttacagcaaatccttttaattatctaatgtttaatattttaatgccagaagatattattgaaaagcttataaatatgcatacactggagatgagagatcaaaattttttactgataaaatatactttcaaatttgtaaactacctgccctattactgtatagagctttctctttgaagtaaaagaagctattttcaccttcttctttgtatgt

SEQ ID NO: 131021 - DNA, 1049 bp, Homo sapiens
ggctggcgcccgggagagccggctggcctctgccccctgtgcctggcgcctctccgagccacttagccaatttgaaagcgggtggccattgggatgctcgagcggggacgacgggcagagcaggagggcagaactagctccagcgggggcccagagggcggacttgggaagaaggaaagaccgcgcggcgagggaggagaccgggcggcgagggaggagaccgggcggggaggctgggtttggggcgcgggagcccggccagggacagccgcagaaggaaagtgggggtgtcgccgggggatagagtgggagcagcgtgagagcagtgttgggggcgcagagtggagggcaagcgtgtcttgaacagaacggcaggaggatgggtggaaagtggggcgcgtggaaagcggatttggacgagagcaaaggacgccggtggaagggacagtgggctccggaggggcgagtggattcggataatttggggaatcagtaaaaggctagggggcacatcatgatggagtcagcctggaatctgtctcccgctagagtacccgaggccacatgttgggaactggctggggaaaggatggatgtagaaagtggcctggagggccgactggaaaatcgctgagggatttgggtgaagagggggggagctgtgcagtatcgggcggaggaactgggctgctggtagggcctgaaaggttcaggagagggttggaggcttccccgtgccgccccttgaatagtgatttagtactgttatctgaggttcactttcacccctggctcctcctccgtctactacccggcttggacgcacctcggctcgctgtaggcgagctttaggagatttaaatagacattaggcagtggggaaggtagtcgtttacggggggagctgctcgggcttccgttcagtggttcccggcacgctcagggtgcagtgtagggtctgaatgtgtgtattgcgggggtagggggagtggtgtcagttctaggccacaggaattcgtggtctggccccagaggtgcggtgtttttgg

SEQ ID NO: 131022 - DNA, 1001 bp, Homo sapiens
ggtctcataactaaaaggtccagtccctgagatcttgtgtgcaaccgtcagaaatagttcaggacatcaaattgcacagagaagattcagatgaagggaaacaagaactctgtggaaaactgttggggacagtggcacgagttgtcttgcaaggtgatgtctgtcccgtggagggacacaagagcgaggacagcatggttctaatggccagggcatgtcttcttattccatgtgacagtggctggctgagttgctagtacgtttttgaaatataccctttgaaatatgttgattattctggacatctgtaaggtgggagatttgaataaaaagacttctgctgtcattattggcttttatggctatgatttttttcagtcattattataaatcatgtgaaggtaaaataaatgatcattttagccattctgttctgcacagaatgctgttcaaataaaacatcatctgatatgtttgcctgtattgttttgtttgggggtcacggaagagggaaagtcggccaaattgattagggtatcatataaaagcagagattaggtccgggtagatcttttgagtgtgtgcaggaaaaggcttcattatagaatgctaaatttaatgtgagatgagagaatcttttactcccgatctcctgcatttgaaatacaaaggattgtacccttgggctggttcctggtccttaagtggaagcctaactggacactttttttctggaggattgttccctaaatcctgggaagctttagaaaatagtcaatggaatttttgttgccctaagataaagtcattacaaagaaaaaaaaaaaagaagaagaagaagaaagtaaaggtggtgaaatggcttgaggaggcagaatgagaaatagagatgtcagtcaaagtggaagaagagaaatcactttctctcactttagggatagatcttgttgataggcttagagcagtgattctccactgggggcagttttaccccctagggg

SEQ ID NO: 131023 - DNA, 1032 bp, Homo sapiens
gaagtgagatttttacctctttgccagcatgtttttaaatttccaatcagcagttacattggtgggtgtataacagagaaagcataaagtcatgtgaatgtttcagatacagtttttaattatctgaaatatgaaatgaacaactaagaagaaaaaattaccattctggcatggtaaaaatattctgtaattttaagaaatacctagagagaaatcattttaacatagcctttaaggcatagctgttgattatatactgtattaagagttttgtgtttgagtatcatgcacacattatgtttgttcctaaatattatgggtaaggttttctttggtattgcagtttttaaattatttttgctgtctaatgggactgaaaataaaaggtttttagtagcttaattagaaactatgcacttttaaaaagttttccatcaactgcctcttctgactgaagcacagagatttgcaaaaacagtaatagatacattatagataactacatagaaaagctctgaactaatcatttagattactttgtggaagggaatggagtaaggctgaaatttcactggaacttactaatagtagtaagtccaaataaggtaaatcttaaaacaaaacagaacaaaactcaaagttatgatgttgtaacttatcagagttccttcactgacttcaatagaagtgtattctattcagattaagcagaaaggaatccattggatggttatggaggagttcatggaattgaaggaaattctgaagagcaggaccttggacaggataatatcccagtgctggaatggatcagctctagctattttccatcattgtgtcactgtcctcaagactcagcatttagaaaggacagagagagagagagagagacagagtttgggggaagaataggccattttgaccaatagtcctaaagcataatctataatctgttactactggaagaggggaataaatgataatgtgcctgctgggcaggcacattagactgatgtccattcaggatgcaga

SEQ ID NO: 131024 - DNA, 1040 bp, Homo sapiens
aacaagattagagggacaatcagtaaaaataataaaagacaaattatcttgtcaattctctatttctagtaactcagcaataaaagccatttatgttctcatttggacattaaatagctagaaaataggagtcagtcatttcggatgcaaaattctgccacagcttcattccatttggtatcgtaggtatcagtttcttacagacatttccttttaaccacaggaaagaaaagatacccaatacggtaataaaaatgagcatttcaaatgtcctgtagacctaaagtagaaagcagaaaaacagaggaactaaaatgacatttctgatataagtttaaaatagaggcttatttctcatgatttctttatgaaaagacgtgtgaaacatgtataaattaggattgttcatggctaaaaggaggtcaggggtattggaggtattattaagattcactttatcttacattgatacttgtcctgtggataataatttctgctaagatgggttataagataagctttttaactaaaaatagaacaaggttactaagctataagaagagataatctgcatattaattcagtgaccagaaaacagtgtcatccaaggtgtggtctgaatggtctccaagtacattatgaaacaccttggttggctcacttccaattagagggaaaagtgcaataaacaccaatttcccacatggcatcatagaatgtactaaggtgtttattatcccttatgatactgcaataggaaaaatagatttctccttcccaggtaatttaatgagaagaacatcccatttcaaaaaaaaaaaaatctgtgcaaaagaaagtagcatgagcataatgaaactctgtgctgtatttaatgaactgatggcttaataaactattgccttggtgacaataaaaagttctgacctttgtatctataagaaatttttctagtaagcaaaattagcattcacatttaaatttggtgtttgcttccaatacttgatttgttattagttcctatttctacaagcctatat

SEQ ID NO: 131025 - DNA, 1021 bp, Homo sapiens
atgaaggatctgcctccatgatcacctcccaccaggccccacctccagcactggggattacaattcaacatgagatttgggcagggacaaacagccaaaccatatcacagggtaactcaagcaaacccttacttgttcttgaaaacttaactcatgtgccacttttatgcggcctttcatatcttttaaccattctacatgtttttcctttgtgttttcataacaatctgtgtattttaccattatcatagcattattataaatcaagaatagttgacttacctttacctgcctcctcctaaactggaagcaagtagaaggaagactgtgtcttataacttcagtacctaataggatgtatagaatattgtagatatttaattaaatccttacaagctaagtgatgtgatcttaatttcaaggaacaaaaggataattgtgtacactgctgggcataatggttagcacttaactttggggtaactaccaaggcaaagccttcattaggctaatgacagtccaaggtaaatgatatcagttgcaacctcaaatataaggataagaggttttaggatttaaatgaggattacacattggacttaaccatctctattaaaagagagcaactggcatgagtgatagtgcttcaaaaataaaggacattatagtatatattgtgtatatatacctacatatacactgtatatatgtctatcatatatatgtgatgtatacatattataatgtatacatataataacctcattgtcacgttatacaacatgttatgcacgactcattatatgcataactcattagataatgttaccataagatttgaggtgctgggatctagtaatttttttctcttatttgctttagtatcagctggagttcagaagtggtatttggcaaaacctctgagaatctaaagagttgattatagtttacaagctgaccagttaccatccagtgcatctaggtttcttaacaaatcacaatttgtgaagctacggtgttt

SEQ ID NO: 131026 - DNA, 1050 bp, Homo sapiens
gaagtgtgttcacctttgtcgtgattggctgtcatgttttcttttttaaggcaaatagagctatttaagctgatttgtctatagctgattgatttaatttcactgaatcatgctgtgaggggcaaaaacataacgcttgcatttttatgtttagggttaggatttccaggaaattgggatgacctaaattttgcttaagtgtctatgggtggttgaccatgaggtatccaaacagtagcccccattttcatttatttatttttagcaataggaatacaggaaactataccaaatttaggcaactatttactaaaggaaaaccaaaaaagggtatgagcccattactttgttcagtaaggtctggttttaaatatcgatcttattaatgctttttgcataaagtgtaaccttaatgtgtatttttccttgcttcatctccgaggtgactttctagttaggacaccattggatcaaggtgctcaaaaacaggggggcccctctcccattacacagcacagtgcttctgggtatgtcctgtttctggcagcttgaggatctgactgacatagcaggatgcttcagaatatctttttgtaggaaaactctctctcattctctctctacttcatctgttctaactaaattccaaaaaaaaaaaacaaaaaggagtgggagagtttgtattgttcttctgaaaataaaaacttagaaaatagctttttttggtattcagccacaataatgtgcattaatattccaatcttccttctgctcatgaaaaaggacacagaggaaagactaacaaagaaaataaacctgtaaagaatagtattgaatgtgagaagataaaattaatatattcctaatgaccatgacaggaaataatgatagcattaaactgtagtgtcttttccataagttttagatatactgggcatatgtgatgcttattatacacgtaggcatctcaagcagaatttaaccttgagaataattgttaacaaaattgattattaaaaaaaatcaatggctttgttatttgagtgtaaa

SEQ ID NO: 131027 - DNA, 1063 bp, Homo sapiens
gtgtattgtgttgaaataaaattcacacactacacggtaaaggaattagaactagaatcctggtcgttcaacttgaaattttacaatcttttcataattcctgctaatagtgtgacctcctaaactgtaaaggaaattttgtaggttaaaaaaaagatgtatttatcttctgtaagtggatagcaggacctttaggaaaagaataaaagtaatagaagaccaaagaggaagagactcttgggaagaattttttatttcacagaaatctttctcccccaatagaacaatgaattgcttgtcctaatattgtttccttacctcttaacatattgccatataacatattctgctaacagtataaagacttggctgtctttactttgctattattctttctgaatctacaaaatttttctttaaaaataatctgcatgtgttctccttcatttatttccacacttttccttcggaagacttgctagtcattggagaaaatatggtgtaatggttaagggcccaagagcgcaaatgagatttcctagtttttttatccccaactctattaatctttatcaaataacttctctgtgcctagatttctcaactgtagagtgtgtataataatagcatctatgacctagggttgctgtgaaggttatgattactgcatgagaacacacattgtgtacatgctggttactctccagcttgctcagtacatgtgattctttaccactcttgtttttagtacaagtcagtccttgagtcaccctgaaatttgccagtcacatttatttacttgatttatatttttcactcagatctgaatgctttaggaatatacccataaagagaaaaacttaaaatatattttacatttacatttttatgcaaatatgcatagattattttgattttaattgctctttattaaaagaagagtgccttttaaaaattaagtttactataaggtaaaatcctcattcaaggtgaaagcatttgtatttgaggatctgaagaagaatacatttaggtgatgttatctaagtgcaatgtatttttg

SEQ ID NO: 131028 - DNA, 1030 bp, Homo sapiens
tcactaggatgctgactgtctgtgcatttctctcacttcactaactcctgagtttagcatcattttcaggcaccacatggcagcaaattggcccctgtcagtctcaggcttatgcggctcatagctaacaatccagtgtttattatttggccacaagggctatatttggccattcttagccatgagaacacccctggataagtctttgtccagaagaatgggaaactgatatggattaagtgctcaactgagataggaaaggtgaaatggcaggaacagagaatgggagactttaaaaccagagatgcaagatgaacagcagcaataccaaattccagtgtgggttagtttcatttgtttcacaataaagggaaagattatgatgacatttttatcatttgtttgtttttatccctgtccagtaaaatcctcttttagattttaaaatatcctacattaaaagttaaaaataaatttaataagcaaaggcggtcctgctgtattctgggaagtgtctgtaaggctaccgtgctggaagctggttgtttggggtatgtgaaacttcaatgtcagtctgcctgctttctgagattcagatattgagatggtgacaattttgtttcagagcaaagaataaagaataaaaggcaagaaagtaataagaaaaaagaaaacccttgagcaggaatagtaacataacaagatcaccaccatcctttcagaccaacacatttaatgagtctcagagatacatcaagagcatatttcttattccagagtcaatagttagcaactgaaataacctagtggcattaatgctcctgcagggccatttccctttttcatttctgctgtcagaattttcgacctcatcatccctagcctggattaccactttggccctctgcttatcacacctgctttgagggggtcaggagctcaacttggggtcaggctcaccatcatttttttctgagttggagtctctgttgcccaggctggagtgcagtggtgcgatctctgctcaccg

SEQ ID NO: 131029 - DNA, 1035 bp, Homo sapiens
agcttatagaaaatgtgacactagcataaactaagaaatatagagagaaggaaggaaagcctgtaaatgcttgacattttatgagatatttcatttactgtgtcacattagactgatgatctaattcaacttccttgtttcacgaatagagaataaacttgagattcttcaaatggccagacgaggatcacacaacttactgacaccatcctggggtagaacccaagtttctaagccatcaattttatgttgtccccataggaaactctcattatgaaacaacttctcagatgcctattgatctgggtttaaaaaatacttaaacattgtcagaatgtgttatatgtagtcttaagtatctcagagtttcaaacataaatgttcttgaggtcatatcttttccttcatgatatgaagaaaaaaataaaatatttttcctaacaaagaaagtggaagtataaagtctattggaaatcacctttctcttatgttgatgtataaacagaattccatatcttgtctggttataagcactatcaggacaatttttatttcaatagttaaaattgtacataataaagaattataatagctacttaaaacactaaaagttaatgtggctttttataggtttaggagaacaaatactgaactcttttgtgggaaaactcagagcattcattgttccggttatatctgaagttatttacaagtataattcatgaacttctattttatctgttaaacaaaattataggaggccattgttttggactgagctcctgttctgggccccaacaaaccagaccaaaccaaaatggagtcactcatgctaaatgccaaataatcaaacggaaactttaaaggagcatatgcagtcccaagcagaccagtttttcctcaaaataggagattctattctatccgaatcagattaataaggaagtccagtctgctttgccccttacaaaaaaaagtaatctagggctgggcgtggtggcttatacctgtaatcccagcactttgggaggccgg

SEQ ID NO: 131030 - DNA, 1076 bp, Homo sapiens
atatatgcttttttttttggtaaactgaaccctcgataaaaatgaggcaatacagcttggaaacttttgaagttaactgttgtggtgtcagaatttggagttcctttgcctttacagatgtaagtctatatgccgtaacaattttaccaaggacaggatagacagcctcttttggaatgtaaacagacaagttaggatgtggatgaaacttcatagctgcttacttcactggcaggccaatattattattctggcagtcagggtccagctaaaattagaattcattaaaatcatggttcttgctttattccttgatagccactcatatgcgcttgtatgcacacaacaattttcagagtgtgctttatttttgtgcttttttaaaaatatgatggcctctatgttaaatggttttttataggtaaatattatattttattaatccttgtatcattaatactaatagtaatagggcacgagaaatattttgtttgcttatgaatgacttaaggaagctgaagtttgatatttaaaattataaatataaaatgtaaaattgtcagtaaacaatggactgattccatctctcctttgccccatgttttccgctttgcagtaagtaaaaaaaccacaaaactttgggggtcaaggtcaccaagtctcaaacgtggtggcagacgctgctagttttctgccagtatccacttccccaccttccttaccgacaggcactttggtttacggttaggacactagatgcccggaataatggctgcattttccaattgtctttagagtaagagtggccaagtatctaaactcaggccaataaaatgtaggcagaaatgtcatgtgtaaatgttaggaagcatccttcttttcttcgtcctcctttctgctggcaggaatgcagacatattcgctggagctcagcaacctcttggaccacgaaggcaaacacatgattgagaagggtggactacaagaaagaatacacctccttccctggtgtccatggagttgccatatatgccttggccttctcaggtcgagatttatttgtatgaaagaaaaat

SEQ ID NO: 131031 - DNA, 1031 bp, Homo sapiens
tattctgtaagtgcatgcttggaaatgagtgaaaaaatgcaaagcaggtaattcaatggtaaataaatgttatccttctaaaagaaagctttaaattgtgaggctatcttatagaattcatctatgtggaatttgtaagaattctttccatgttacagcttcagattttatagaaatgattcttggatatttttatcagcactatcctcgattctagctagtgttctgcattagatttccatgcagggagctattaatttgttttaccagtgtcacccccaccatgcagctgtgaggtgtttggcatcctcattctcccacttagcatttgggttgcccaagtgctggcagcaaaggagacaagaaagtaaatctaaagcatgcaaaacgagtcactgatttatgtcactgatacctagtttagacatcgttaaccttctattttttttataataacctttgtaattcttctatattcctaacatcttctaatttttattttggggattattgttttataaatattttaacaggaatgcacagtaactcatcattacattaatttagttaagctgttatagtccctcatcgggctctctgttttgaaatccagaaacaaagacatgaaaatattgactgatatgggaaaattaactgggttgaaagattactaatttaaaataagacatgtaacatttaagtgtatgccatgcttgatttagcctgactagtgcattctctaactgttgtggaaaactacatgggaatctaaatcagaagtttggctgataaccatataatcataacaaggagagctacatgcttccagtgttcaaaggaatcaggataggatacacttggcaggatacacctgtcaatagaggatccacctgctaaacacagaggtcagcctcgcagggcagcttcttcgtgtctaggagttggattagcactgccaatgtttgccccgatgattctgagttccacttctgccagactctgtctgcttggctgtcttgtcaatgttacca

SEQ ID NO: 131032 - DNA, 1086 bp, Homo sapiens
aatctgtgaacagtgtagtctgcctactatgacatcgtattagttgaccatatccacgtgttgattttaaaatgtaactctgaggttaatgtgggaagtgcaggatgcctgttgtgactctcgtagaaaacctaggaattttaaaagcataggttagtatagttacaggcatatttacaaatacctaagcaattctcccagcttttaaataccctgtataagaaagttatctttttatacattaaagaaacttcttgctctaatagttatgtgtatgatacttgaaaaaatatataaataatttagccatttcatgtaaaatctaagaaatatatttaatctaggaaacttccaagtttccaggaaactacagtctcagttggaaaaaaggaatagtggaacttgattgtttcatgaatcttcctatttagtaaataatgatcagagagagacaatgagtaagttgatgctcgttgaaatagaaacaaagggatgcgcagaatctgttgcagaaaactacgaataagtgacaggttccaggctaatctgagggaaagaattgtttctggtagcatggataagtaattggagacaaaatactggtcagcatatgtacagtaacactaaaatagtgggaacttagtgtgtagtagggcctggagattagcaaggaattggtttagtagtggagggtctcagtatgttgatagagatcctagtgaaggctcaactgattttgcaagatgacatctttttgacccaaattatttttcactgtgatgcctgcacacactttaattttggtccccaaatctgttaaagactggacagcatcttgtggaggtgatagtaattcttctagagccatgtatgggagaaagaagtcactggatgaaaggcagaatccaagtagccactcaaaaactagtgagcatctataacatgccatgtcctgtgctaagcacagggaaacagtattggttaaaagtaatgactgctctttttggagctcatttataagccagaagactgataagtgatcaaatagctctgatttaatgtgataagcgctttaaaagataaaag

SEQ ID NO: 131033 - DNA, 1054 bp, Homo sapiens
attattacctgacattgacgggggatttccctaaaattgtagagaattttgtagaacgaagctgtgaaatcataaaagacagggttacaaagcctgagttcatgatcaaggactagtgaagacaaagaatcttgttacaaaatgagaaaaataaaaataatattggcctaagacttcaaaatgagaaaaataaagatagttattggcctaacattactttcttcctttagtttgaaaatgatgtccttcctgactttttgttattaaaatggacattcttttgtgaaatgaaggtgataataaatgatcattgatgtcactaattgataaaatcagaagtggttagccctaaattggggttccacctctgatttccacatgtgtgctttcatagatctaagaatgtgggaactactgatctaattcagctaattactcaaaccatgtatcccgtcaacagaaatgctaacaagtggtaatccagccttccctgaaaacccttcctgtgggttctcagccagatgggctacccattatgcttttggactcttctaattaatacaagtatcccctacattggatgtaagtcttctatactaattgctactttttaattttacccagaactgtatatgctatgtctaatgtaacattttcctaattgtgttccacagaacattaattctatggaactctatggaataattaatatctattaatagatattaccacaaaaaggggggagaactacagtcaaattattttggaaaacaatagttcaaactataggttatttcagtacttcagaaatgcatttttgggataatacacacacttttcttttttttgagacagggtttccccctctcgctcaggctagagtacagtggcatgatcatagctcactctaacctgaattcctgagcccaagcgatctttccgtctcagtctccccggtagatgggactacagcatgcaccaccacacttgcctaatttaaaaaaaaaaaatttatagagatgaggtctcactttgttgcccaggctgatcccaa

SEQ ID NO: 131034 - DNA, 1718 bp, Homo sapiens
tttgttatgcatgaaagaagcaaaattgttcattatgtggggagtctgtgaggcagtcactgcacattggctcacttgatatccaccctgctcccattctaaaatgtcttcctgcactctaaaggctggaaactagaaagccacatttttaagagtcctttactgctagacttctacctgtgctctaggttctgccaagcagattcagacgtctaagccttggaatgtgtgaaaatgaggtacgggcatggcagcaaagacatgtgatgggtacttttgtgcatgctggtctggtctttggcattatagctgttgagcagtgggcagcagcagcagcagcaaggtttcctctagaacactcttagggtatggttggaagcttctgtaactgtctactatcccgtaataaaattcttgctacttaagctagctagattacattctctgcaaacaagatccctagtggatgcagagggcttcaagcctataaagggatattggttcaggagggtctctgacctttggtgcccatccagtgctggaaaattgaactagaaggctcattttaagtttaaaatttttctgatttttaagacagaagactctgaatagggtagagaggagatccttcatgcatttgcttaagcaagtttttctatagaaattatctcctccctcctgagttagccatatgacaaaaagcattgcatttctgggagaaaatgtgcctcttgtactgccttgaagaataactaaaccaaaataattaaggagagcccaaatgaacattgcctgttatgtgaatccaatcaattctggaaaagcaataatggaatggggagttctctgatctctcttgtctttgtttttcttctcctgccctcctccaacccctaagtcaaggggaaaatgggaagggcactggaccttgaaggtggatatggtgatgtgggaagcctccctggaagggaacagtcattgagaagggcaggatgttttggaaacaggagtctgcaagtttctctggtgtaaagggaagtgtggagaagcaggggaaaataagcatggggacaggagctaagaaagagctaaggagatagtcttccatcatgtggataggctgatgattttttagcagacttttaaaaaaggcttttttaagaagattaatatgaaatcagtaagttagatgattggaggtgggaatgaaacagcaggagaaatagtgatgaagctgcttcagtaagccagcaatggcaaataaacacctgaaataaaaaactggaaacagaaaggacaagagttagcaaagatgcactggcctaacttaagaaattgttatgtaagctgggtacaaaaaaagagtttttaaaaaatgagagtgagcattagtgccatgcctcttacatataaataagaatacagacatgttaaactatagaacttgaagattaattatccttgaagcataattccaaatacaatgttggaaaaagattgcaaatatcagggaatgcaggtttgcacagaccagtcattctttttagttgtttgttagtggaaaaattatttatttcacaattgaaataactagcaccaaatatctaaaagctggtgggtttaccacagaaactctctctctctccatctagacacaattatgttttccaggttgcactaggagaaacctcatgctacgttctcatgggtctgaaaaa

SEQ ID NO: 131035 - DNA, 1169 bp, Homo sapiens
tacataattaagttacttataagacacactctttttaatacattttgatggttagttctactcacacttattgcttacatagtcataaatttttgcctctttgtctgcattccaatattattttgaacttatataatttatttattatagtaagccttcttcctttttccttttaactagattgtgtgtctctcaaagacatgtttatgcgtttgatgcatagcatggcatcttggctcatagtatattttcaaatatttattccatggagtttaagtattcctttcttagaactatcatgcttgggcttttgctcattccacaagtcttgagaatatcctaagtattttgccaggtaaacagaacagagtccctctcttagaaagcttacagccaaaggatcagaaaatgacaatgtagtctgtaagtgttattggtgtaggtaaacttgaggttagagaatggctaattagaggaggtgaccttttatctgagttgtaatgcaattaaaaaggaaaagtgtaaagatgagaaaacaggagctatagttataacaacatctacacagtcatgagtgtaagagagaatcatgggatcagatcacggctaattgtgtgactgaggggagtggtgagtaataaatctggtttaacacaaaaaatcagttacaaacagatttctatattgtcattttaaagctacaatttaaaattaattggttgctaaattcttgacaaaggggtcaattgctgtggctatccattggtatttctttgaaaaaataaaaggttgtctggtttaaaaataatattattttatttcattattttagaccttataagcacatttagaatctgtatggaattagagttctaatatatatgtatacatatacataatatataaaaataatagtactttcttttaaaatttgaattttcaatgagataatgcaagcaaagtgaataccatagtgcacagcaaatgtaagaattcaatttgtattattggtatgttttgtggagtgttctgtctgtattcatgggaaagatccagtgaggtatgaagcatatttggcctggtgagaatgcataaatctggccaatgctcccttgaaagctcgtcattctggtctaatattttttaaatatttgccacttggtccaagg

SEQ ID NO: 131036 - DNA, 1398 bp, Homo sapiens
ctactgaaaaactttcagcaaagttaaataaaagcaggcttgaggaccttctatatcctaacctaggggaagtaaatatacatatacgtacatatacgtacacatatactatctctctctctcttaggtttttcaatttttaactttgtgtgctattttcattttagccattgttcagccagcacctttcttgttttttgtttttgttattttcattttcccttcaggctcccaggtctctgaacctgttccgtcaggttgttaagactgtggttgacgttagcctgtaactaacaaagccagtaagaaagtaacgttattacattctgagagaggacagattacattgtgggtctattttgaccttgcaccttgctttactttggaaaaattgaatgacatccaggcccttcatagggaagagtaataggatatggcttgggttgtgcaggcattacattatttcccccagatataatgatatcctgtaatttttgtattttaacatttaatcagacagttgtaggcaatcagtccaaaccaatcaaattaccaactttagtgtaccatattagcccagcatgtctttggccttgctttttaatgaacaatagcagcttttagtgtcttcagtctatctgagacaaaagttactaaacatctagtatatgggaaagaatggtgtgtaggggagacaaatccacccaaaaagagtgtggctgctttggccttgcttgttacttcaatttggagagatttggtcacatccaaaagctgtaatagtagagactgtggcttaatgggttaaccagtgttacatcaaagagggcctgttttctttaaaatttaccatcctcaccactccagtatgagactgtttgctttaagatgattgaaatctttttctttgattttttagtagccattcctagaaatgatcatcaggagaccagatttctagttctattgaaatctttttctttgattttttagtagccattcctagaaatgatcatcaggagaccagatttctagttctaattcctacaacaatttcctgtgtgactctgtcaagtcattttccaatgtctttgggttaaattccttccttcaagctgaagaaatgcctccatgtaggtttagccttatttcagaatttggctgctaaaaccatgctttctctttccaccattttatgtcctcttcttatatattcattctcaggcttcctttttccagatggtcaagtcttattttctaaaaggcaacaagtatggtgtcaatgagactgtccatagtcaggtaatgagaattaataaaagtgtagacaggcacatatttccatttttaaaacctatgctagcacagttcctcaaatcaattgactagaaaatctca

SEQ ID NO: 131037 - DNA, 1051 bp, Homo sapiens
tatcttttgagggagaaagcccataatgtgtccttaattatgaccaacaaatcttagcattctgtttgatcattaatttgataagcctctttcataaatctgaaccttctgtcttacagaaaaagactaatatgctttgtagaaaaaactaatatgcgttggatttaaatgaactcttttaactaatgtaacataaactcttaatgaatgaattattatatttataaaccctcttagtatgagaaacactatggattaggcatatagaggcagctcaacccagtatacaaatcagtaagacttttaacagtatttgcctccctgctgcatttcaatgttctctatttgctaggatttgtactcaaagattcttggaggttattgtgttgcttaaattttcatacatgttgatagaaagggcattgatatcctctcttagttttctgagctagagggggcaaaaattatctttgataacatattgtagataaaatatcataggtgcccacagagagttgaaccttgtgactctgatttattgagtgtcttacaggccaattcaatagaatttcttttccagttagatagattccgttttgaagtctttttcaagtactatttcaagggaggcaagatgtggcaaaatcagcacaataatatttactctaagtaaagaaaaaaggtacgtggtgtgctgtttggggtacaaagtttttacttcctgctttaaataattctctcaagttgcagatcttttgtgatatgaaaaacactcgtgtaaataaacgtatagtgagtgggatggaatggggatagccaaaaagatgcacttaaggaaaaggggaatataaataataactctgtctctccatgctttcttctttctttttcacctccacccctatataagcctgggtaaacctcaattcagtggacaattttaagaatgcttactcattcatttaaaaatatgattgaatgcctacattatcaactaccaatagttggaaacaaggcttgagagagaggagagggagtcttgtgtgctaca

SEQ ID NO: 131038 - DNA, 1316 bp, Homo sapiens
tcttgtatcatctcttttctactattttttttcccctcccattaagttttgttgttccaaatctaggcttaactcattttccaaaatgtaccaatttaaggttggacttgtttattgctcattcataattctaaccattcatcacattttgttgttttgcagtttcataaacttctttatttagcacaactctattgctggattaaaatgagcaacctttgtaataattaaatatctgtatagaaagggatcttttctcaacatgtatgctctttgttttggtttcatgcccccagatagttctgacaaactcaacaattgtgaatagcataaaaacaggctttttgcatgcagtaaaacaaagttaaagtttgctcaaaaatgcatgcagagtgaaattcttcaacgtggggaaaaggaaaaagtatggaactgcatatgctggatgctatgcattattatctcatttaataatcttaaaaaccttatgccgtaggttttttacatcttcattttacatgtaaatttcagtgatattctatggcttgcccaaggttgcctacctgtaaaggggtagagtaaggctttaaatccacatttgacttcaaagcctgtcttccttccattaaattttactttctctgggtacatgtcatactatcttgtggccacttatttatcagatgagataatgactgtatcaactctgtataaaccataaagtgctacataactatcacttatgttgctgtagttgataaaagtgaataagccatttaaacttcctaagtaacaaaaataagtaattgataagcccaattatgcacttagtcttactgccgtaattttacttctcatgtgtatatctaaacagtattttgtaatcaatacattactgccactgaagcattgaacatgcccgttccatattgtcaaggtttgaaaattcattgtatgatttagttgtgctggggaattgtgtgtgtctgtgttcttcagtaaaaactaaatacgacttctataatttgcatattttactccttagtaaattatgaactgataaaattacagtggtttttttgatgaaaatcaaaattaagctcggtaaacatattgctaaggaaatggtaaattagaaaaaccaaaagaaaaggttaggatctgcagtgggatgtagtatgaattctttaagagtgaatcatgtccaacaacttttcttaggaatatgaaaatgccatagagaagtatgttgattttagcagatccttttacaaacttatggctgtcatttagaaagaaagagaaatgcacatgag

SEQ ID NO: 131039 - DNA, 1064 bp, Homo sapiens
gcattcctcccctgaccttccaaaattcatgtccttcttgcatgcaaaatatatttattccatcccaacagcccccaaattattaactcattccaagatcaactctaatgtccaaagtcttatctaactctcatgtaaatcataggggtgagatacgggtgagactagaagtcgaattcatcctgaagcaaaattgctttccagctataaacctgtgacaccagacaagttatgcacttctaaaacacaagagtgggcaggcatagaatagacattcccattccaaaagaggaaaaaaaacaggaaagaaggaaggcatgatgggtcccaagcaagtccaaaatgtagcaaggcaaatatcatcagatcttaaggctcaaaaatagtcctttttggtttgatgctctgccctccaggtagagatggcaatgtcactcccatgacttgatggggtagccctgcccatttggcctgggattgctgcccctgtggctctctgcagggtccccactctttcaaatggaataagaaacaactcttccccctctgcctgtgatgggagtggcagccctggtgatttcggaatcaccttcaatatcatccttctcttttcttgaagaatagtgcattttcacaaccaaataactcaatggttccatcctatagattccaaaaagtctgacagccttccttcattttacctagcttccatcccttcagttcaaactggtaatgacccctatggtataatctgatctatatttctggcttccgctgggatggctgattaaatccattgttttcaccatctctttatcaagttgtttttaggccacatgtttagtgttctcttcagaaaaagctttctcaatttttcacaatataggtagcctgaaaatcttccaaatatccaagctcttgcatctatgcttaaaaattgcttctacaatttatttctctcttcttgcattttactgttagcagtaaggaggacccaagccctacctttgatattttgcttggaaatctcgtctgctgaacactgaatttcatcacatgcaagt

SEQ ID NO: 131040 - DNA, 1050 bp, Homo sapiens
caattaaataaatttgactcagttaattaaatgaaaatggacattcacagccccttgatgactgatgagacctcctatggtttcacatgtaccagcaatgttaccatgattaaattctcatattttgatcatgtattcatttcttgttttaatgcaaatatgaacagtcctgcctgtgttaagcatgaaggcaggtacaaagtaaatgaagatatctcatttaatgacccctacatttaatgatatacaattaatttaatgatagcaatcaacttgatccatccaagaaccttgaagaatatattaaaaaaaaaaaaaaagagaaaggggcttgaattactgattactgaaataaatgacacctcacttatgtgccaaagctcatgcagttttctcagaaggaaagactttaaattcttatttcaaagcacattaattcttaacctagataaaatcctaacacatttgattatatgattttcaaatacgtggcagattaaaaacagcaaagtagaaaggagcagcagacacattaacaacaaataatggtcactgagaaaatgacaaagagaagagatagaaatgtttataacacacacacacacacacacacacacacacacacacaaaaccctgaaattatgttttttaaaatggtgatgtttttaataataacagagtttaagtaaattatagctcatctattcaaagattattaagaagtccttatattatttttacaagaacttttaatgtcacagaaaaaaatcacttttatactaagagggaaagctggatataactttgcagatagaatttaattacaaatatggttttaaatagttgaagagatatcctggaagtactgttcttaggaacagtaagattattttctgtatctcgtaaattttctaaaatgtatatgatgtattaccttaataaagaaaattaactttatgttatttttagaataacattctggaaattttaggagtagaaattattcttttgtatattactaacaaatagaattatacagttatttgtgct

SEQ ID NO: 131041 - DNA, 1122 bp, Homo sapiens
tatcaagtttatccaggcttcccatttactctttaccctattcccaccctgttcccagcctgttccaaccactgctatagtggcatctttgactttagtgaccacctaggtaacctcactttttctttctttttttttttttttgcctagtatgaaaatatacccaataccaccttctttattgctgactgggaatgtcctctcaaagctcctaaaattcttgactgtctccttttttgcctttctctagctggactattttgattatacccttctgaactgactctgggtttctggcttgccttgggccacatttctggcttacagtttgggtttcattgtaattccctatttatggctgtagttggttgtacagtgttcacttcaaacccgtcacttcctgcctgaaatcctgtaattgctagtgtttgacattcgaaactcctgatccctgatttgcctcaaacttctggctctcctgtgtgtcctttcatcttacctgaggccctggattagctctggccttgctgctttccaggcctgctgaaataaatgagcaagctatttctagctaaataaaatgagctagaaagaataggctgaactgagagaattaggtgactttatgcatgtctgattatctacgagagtgcagggaaggatgttgcaaagccttgggactgagcttgctggctctggagcacttccttgcctcatctcatgcactgctcatgagaaccccatagggtaggcatcaccctttcaccatccagacttaagaaagaaagattaaagcttagaaaggttacataacttgtccaaaagcacatagtagctaaggaggggagccaggaattaaattcaagctgtttctggtcccactttttttttttaatcactatgctatatatgcttgatttcatataattgagccctcacaatctgtctagttcttcaattcagtgagttttggggtagtaatgattggtttcaagtccaaaaagtttcactggtctcatggcagcagagcaaatgcttttatcatcctaggctcacagcagaagcatgtgcattctgattgaccacacacttcccgccagctgcataaaatcactattcatg

SEQ ID NO: 131042 - DNA, 1298 bp, Homo sapiens
tttcgtagtttgaaggcaatttagcagacccaagaaagctaatgctaacagtgggaataactgagaagcacccaatttacagtgtggaactcctgaaagtagttggtgatgttgagtattttaaaaagtaggagtaaagataaagctaaagtatcttttcgaaaagcagattgacctaggagagaagacttaacgttactgacattaagaattctcttaggaccagctcaatcagagcatgctacagtcaagaccacagttactgcctcacttccaatctgcttttttagtgtcttgttcttaaatgggaaatttattgaggttcaactcctaatatgagaacactgactaaaccaaggacacagaaaagaaaaattggaaggaaaagaaaatacttgggaagaaagaaaaccatctaaagagattcttagcattctcaaaaggataaaatagattgtatccaggaaaccaaaatagggtgatacaaaaagggatattcaggaaacaaatttctaggaagttaaaggtataattgcataaatgaaaaacccagtaaaagctttgaaggaaatgtttctgaaagtagaaaagagatgaaaataatagagaaaaagtagagaaacctgagggccagtcatggaactccatcatccaaacaggatctccagaaagagataccagacttaaaaaaagagaggggtgttcgggggaggggggagaaaagtcaaagaaataatgtgagaaaatttcccagaactgaaggacatgagtttccaaattgaaagggcccagtagcaagaacaatgaaaaaaaggctcacactcaggcatattatcatgaaacttcagaaaacttgtttcaaagaaaagattcttaaatcatgagggagacatattcattcaatggatcaagaatcagaatgacataggacttctctatagcaatactagaagctacgaagtaagagtatgcctttaaaatttgaatggtaaatggtaaattatttcctatcaatagttttactatcattataaatcaactatgagtagaataaagccattttcatatatgcacattttaaaaatttccctcccattacagtttctcaagtgctccagcaatatgagaaagaaaaaaaatggaatccaagaaataggagatatccataaggaagaagtgaagggaatcctgcacagggtgattctaagacagctataccacataaaaacagtctaggctggtgcaggtctgagaaaataattcagagtggttggttctggagagtaggaaaaagggtg

SEQ ID NO: 131043 - DNA, 1029 bp, Homo sapiens
tatccattacccagattagaatttctcttttctacctgattgaattcagtactcttttaaaattttacattatttcattatccaccattctacatgctatagtaatttaattcagttcctcatggaacttatgttacatatcagcagaaggcaaaaactatataaatgaacatgaatgtagggcatgagtaaattgtagagtaagttaggtaacagatgctatggagtaaagaaaatgccaagccaggtaaaggaagtcagaagtgccaaagaggggatgtgtcacaatctttaatggtagtaagagtaagcctcattgagaagatgacttaagtaagtaaaaaattgaaggaggtaagggagttagtaatgtagatacattgggaaatggcattccaagaagcaggaaagtaaggccttgagatgggagcttgctttgcatatttcagaaatatccaggtacatgttactagagtgaacaacaggagaatatatgggagatgcctttggagagataatgggggctaaattatatgacatcttagaagcttttactcccaattagactttttactctaattctgggctagagtttttactcccagtgaaatgataagtgattagtgattttgagcaatgatttggcaaatctgacttacattttgagagacttgttctaactagaacgtggaaaacaaattgttggaacatcaagattggaagcagaccagttaggaagttatagccatgattcaggtgagaaacatggtagttgagaccaagatggtagtgctagaggtggtgagaagtggtcacattctgtatatactttaaagatagagcggacacattttcctggtgaatacgatggggtgagtgtgaaggagtagaaagaaagaaaaaaaaagagagaagaaaaacaaacaaagcagtcatgtattcctcccccaagttttgacctgagaatataatggatttgacctcacatacagtgggaacagtgaaggtggcacaggtttgcagagaatt

SEQ ID NO: 131044 - DNA, 1993 bp, Homo sapiens
aaccctgtaccctcaataggtacaattattacccccattttacagatgaggaagttaaggacagaaaaattaagaaacttattcaaagtcaaacaagctaagcaagcgtcagagctaagattcaaacccaagaccctggctccaaaatatatgttcagatcactgactgagtagattaattagaagaagagagctacctatagattcctctattccctgagattttcttcaatatgggttccatccagttaaatggaaaaattgtgtcatctgctactgacaacatagtcagatatagtaaagctcctttttctcattcctctttaatttctttttgtaaaaaaaagtatgagaccttttaaaaatagaaaatatatgtatattttttaaaagcaaccctaatcccacccctgtggacattaaaatagtaataataatgttaacttacacaatagtaaaaaaaaaacactagggaaaagtatgaaatgaaaacatgcattgaatgcctattatattctgtaataagtcggcactctgaggacatatttgttacatggagtctaatgagagagacagacacatactcagacaaactctaaattggaattcagaagaaaaaacatcaaacagaagtcttgtgacagctgaaagtggggcctggtagagtaagttgtggggcaggtgaatagtagtggtggaaagggattgaagaactggagactgaagaaacagtttctgaaagaggaggtgggagagtaccaaagagaaatgtgacttacctcactattttgctatagaggatgggacttagtatgagagaaggtttttaaataacattttatatgccgtagaatagaaattacaggaaaatcagttattgaaaggctgtgttgaatttaacttgtaaaagggtatcattacttatccaaatgcatcatgtgagaaaattgtccagttcatttccccagactacctcaatctattccttctgacaaaccagaacaagaaattctgttttccaaattgttatttttgctaacacattaagccagcttcagcttcctacagcacacatacacacacactatcctgtgttatcctgtgtctgtttagtgttttcattcacatgtgtgttttctttcctctccacccttgtttctctggaaagtcaggttttcgaccaattatttccctgatttgacaaggtcactctgaacttactttcattgaaaccattggcagtatggtctagcttagtgacagactgctgggtcactcaggtcctttgataaaagggcatagtgcccttgtatggtggccattccaaataaggaagtaaagaaggagtaagatatttagataacaaatgttaagaagaaaataatagagtaatgagactggagtagggtagggcagtggtgcaattagcctggctaacgatgggggcatctctgagaaggtgtcattagaattgaaacccaaattgtgagaagaaagcagaaaaacaaggatcgggaagaatagctaaccaggtagagagaaaagccaggtggtagaaattaatttgctttgttcaaggaacagaacaaataccagtaagatgggacagagtggtaggggtacaaaaatgaggtctcagagatagctgagggctgggtatacactcaaactgaccttcgtttacatctacaagcactggaattgctgtttttcaggtgtgtcccaattgtaaatctaccattatttattgtagaaaataacttcacattgctctgcactgtaaaaaacctttgacatacattcgcattttatttaacatttcataacatcactttgaagtttgcagacctgatgtttgtttttggttttgtttctgagacaggatctcactctgttgccgggctggagtacagtgatgcaatcatggctcactgcagccttgacctccctgagctcaagtgatcctcccacctcaacacactaaggagctggg

SEQ ID NO: 131045 - DNA, 1001 bp, Homo sapiens
cccagctacccgggaggctgaggcaggagaatcgcttaaacccaggaggcaaggttgcagtgagatcgccctactgcactccagcctgggccacagaacgagactccatctcaaaaataaaacaaaaacaaaaattagccaggcatggtggcacactcctggaatcccagctactcaggagactgaggcaggagaattgcttgaacctgggaggtggaagttgccatgagccaagatcacaccactgcactccagcctgggtgacagagtaagattccatctcaaacaaacaaaccaaaaccaaaaaaaactttggtcaatgtttctgagtttaccctttctataaagaaaccacttactgaactgttaatgtctctccttcctttactcctctccaaggtggctgcttttgctcttaccagcttttagtgcttgctggctccatcattatagccctctcaggaaaaccataattgagacttagacatattaaggacattatcacaccattgatctagttaataacaattacaaaggaaacatcttaaaatacaatgcttgttcctgattaacgggtacattatgctttgattttaaaaaattgttttgaactttaaatatagctcttgtttgggggcataactataactcataatgtataatctttaaaagtactcacttcactagattatattgtaataaatatagataaattttactagtgtagactctcaacttactgtcgtataaacatgaaatcgtttttatcataagcgtcctattatatcaacctcattttcccacttggtgacaggattctttgagcacaactcagcccttttacattttcttttcatttatttttagcaattaaaactatctttcagttatttaagacttggtccatttatttaaaaatttcagtctcatattcaatttatatctccatttacctttctacctcagttcccattccaagttaggttggtagcggagaagag

SEQ ID NO: 131046 - DNA, 1033 bp, Homo sapiens
tggtagccactaggcaaatatggctattgagtatctgaattgcagctaatgcaaatgaggaactggattgagaaaattggattcaggattctgtatttgctctatctaatatggtagcaactagtgttaaaggaaaaattatttgataatacttcctaaagcacaataagacagactttattcaggaccattgcaatagggatagggactgtggcaatgagattttgtagttgaggagagagattgggctcaactccaaatacaaaatgggcaagtgggaatttctagccaaggagtagagtaaggatagatggatggacaattgctaagaggtaacgtcaggaataaggggtattatggtgaaactgacctaccaggattcttgctgaaggcaggccagagtaatcagacttcacctggacagtggaggatgagaaaactgatcagatacggaaggtaatcagatatccaggatcggggtgggggttcctgctacactgaccttaacatgattcttgctgaaactcggttttataaggaagtgaacagattggcataggagaaggttcagcagcctgactaaaatttggctatgcaaataatctttgtgactaggcacatgtagctattttaatgtaaattaatttaattaagtaaaactttaaattcagttttcagtctcactagagacatttcaagtactcacaagacagatggctagtggctaccatattatacaaggcagatataaaacatttttaccattgcagaaagttttattgggcagcattgatagcaatgagtcccaatgcagggtacacattagaattccctgggtagccatgaaaaaattttgatgccaagatctgattataatcaaagatttgatcttgaaatctctgtttaagatctccacttacagtttcttacggaattctaatatgtaactagggttaaaaaccactgacttaggatgtgaaggactctacatcattctgttttccttaatgatatttctctcaatcaaactctt

SEQ ID NO: 131047 - DNA, 1028 bp, Homo sapiens
gttacaatttcttatttggaaaataatgatatatatcttgaaagatgtattttaaaaatatataatgtatcttaaaatgtgttggtattataatcaggttaaatctgttgaaataaattgtaatttagtttttaatgacttcctttctgttgacaattatgttttgcgttgacttgcaattattctattggttcatactagttaagttcctaaagcaagcaagtaggaagttcagttccttttttttgacagttgcttgatttttacagcagagcatcccagggagtaagctgtattactagtaaattagacatctgcccaaagagctctattcagtagtccttgacattactctgaaagaaagatgaatttaataggaattttgcctttttttcccagacactggccaaaagaagaccctagacaagaaagatggaagacgaatgtcttttcagaaacctaaagggactattgagtatactgtaagttatttgctttcgaaaaagctatttttctttgtaagagtcttctttaagacattctctgtttatactataaataagacaagcattgttaattgccttatttttaaaaatctgtatttcactttggataattgttttattttttagttgttgtttttttctttaaagagaaattttactgagatataaaggtagttatcctagaaaatttaatttaatatagatgatagtttactgagagagttcccatgggccaataatttttattaggttaggcttttaggaaaatttttagttctttagaaatgtgatcttcattatattcgcagcagtgctagtgatagttataatggcagatgggatacataaaagaaaagttgatattaatcttccagtataaccttccacattaaatcatttgtatttatttatagctaactccctttagctctaaacattgagcttttttttttttttctgtattcttgaaatgaacttcaaatcttcctgcagtcagctggcttttcacatttctggttactc

SEQ ID NO: 131048 - DNA, 1118 bp, Homo sapiens
tttttttttttttttaatagagacggggtttcaccgtgttagccaggatgttctcgatctcctgacctcgtgatccacctgcctcggcctctcaaagtgctgggattacaggtgtgagccaccgtgcccggccttctttagagcgctcttaatgccttgtgtaatggggactttaagtggttatattatattggccaagtgacattttcttttagggtaattgatgaaatctcattatttatgatttctacacatatgatcatggaaacgtacgaatgattcagaactaaataactcaactttagttcaaatatttttctaatttatatgtgcaatgacagaatatatgcataaagatcattttgagtttaatacaggtgtactttgcaaaaatgaaattagtatgttgctagaagtcacatatattttagaaactattcaaaggaatagtgtattattttaaaacctttgtaaaatgaaaataatcagtttttgacttttaaattatgttttgtattttgaaattacttgaagtagagacctacatgtaaatgtattgtgatgaagcctttactctgtattgtaatagattaagagcatttgctaacaaaacacagtgtttcttgacagttattttcaaagatgacaataccagttgttaatcaaatgtaagctggtccctagatatattaatgctcattaaatattatagtttagtttttctgttttaaacattgaaataatttattttttcttttaaacaggttgaatcaagggattctttgaatagcatagccctgaagtttgatacaacacctaacgaacttgttcaattaaataagttattctcccgagcagttgttactggacaggtagtatcttttttttaatgtgctgatgtttagaaacattaaacagaaaggcagaaagtatttattgtactgtagttaataatatagaaaatttgagaataattttatatgtgcttttaacaaatcatattggccatgtaagagaaaattaactgttttatgtctgtattagtttcttttttaatacatattgaaaataattgtagatttttctttttaaatatagttacaaagagctttttaaaa

SEQ ID NO: 131049 - DNA, 1073 bp, Homo sapiens
tgggttctgctgtatgcttaggtactaaggtaagctttccacctttttactgctcccagcacctgatggatattatattatatggtcttatcagagtcagtggtttaattcaggagcatctgagtgtgtgtgcacgtgtgtgtatgtgttgggtgtgggtacaagagatgtagtgttcactgttctccagattattttattttttaaatttatagatatgtgtatctccctattaaaaatcactataaatgtaagtttaacctgtgtttgtgatctttattgaatatgaaaatagtgccacttttgtcctataatttgtacgtaaaaatatttcgggctgacttccagaatgcggtgaaatgaaacaacacttattggggaaagctattcatttgactttttaatagtgtgctcatttttattttgttttctgcttttttttttctttcctttaaaaaaaaaaaaaagaatcctgatgtccatccaacagaagcaactccctcatctactttcactggtattcgacctgcacgagttgtatcttcaacttctgaggaggaggaagcatttactgagaaatttcttaaaattaattgcaaatatattaccagtggcaaggtaaagaatgacactttagagaagacctttaatcatgctttagttattactaatgtatgatagtttggcatttacattttaagtcatcaatgtcagaaaatgcttgaatattatagaaaggtactagtgatactattattttgggttagtatggatgttgcttataacttagagtctggtgatctgttgtaattgttaaaagtaatggaatataaataaattcactaaggcacagctaagttgctgttggtaggatatttcaaaagtgtgaataaaatgactgctgccaggtactgtgtggagtgtgaacttctgtataactagtatagcacacaaataggaagatatctagtatttattgagtaccttctatatgccagagagtatttgaggtatcttaattattttatcaattcaaaacaatcttgtgaaataggcagtcatatttcttttcc

SEQ ID NO: 131050 - DNA, 1062 bp, Homo sapiens
tccttttataatattatcaacattatttattgagtctgcactgtatacatgacactgtatttggtacttgtagtgagggaataacacaggaagcagtatgcaaattaacataaaaggtggcgcttcttaccttactgaagttacctttctgatatgaggtaactcagtattttactcagtttgcacattttatttccttacttgattgtctttggggaaatatgatattctacctctcctaaagaggagaatttactgggaaaacttgggttttaataaaaatggtttcatgagaatgccacagttcctgagtgtactatttttatatatggcctaacatcagaagaaaattagtaaaaatagctagataatttttgaagtatcaaccttgaggattaaatgttactttcttttttcaccttagggcacagtcagtggtgtgctgctagttacaccaaataatataatgtttgatccacataaaaatgaccctttggttcaagagaatggctgtgaggaatatggcatcatgtgtccaatggaagaggtgatgtcagctgcaatgtacaaagaaattttggatagcaaaataaaggaatctttacccatgtaagagtgatatttatattcctttgcaactttattgtatctagatagttgacccttgtctaataccttaactatttttactagttttcttatagctgccttttattttgtcaataatgaaacgaaaatatatgcattattgagaagattattcttaatttgcacctgggatagttatgaattatcttagatttgtatttgtgtatgtggtcagagaaccagatatttgaaaagtaacctatagtgcccatttaattcagtgtttaccagcctttttattcagacacagcttccagtcttctaaattacccctgtgagcaatcactgttgggataattttcaaatttcccttggaagtgactgaagagctgtgatttgagagaggccacatgagcaaagagctgacattgctgtgggcaagacagcttttttttttttaattgattgatttat

SEQ ID NO: 131051 - DNA, 1025 bp, Homo sapiens
tgcccggttccaacaccctatagatgcagtatgagtgcatcaccagtagatgacactattgtatatttaataacaaactagattcttgtttttttaagatgaatcagatacaaaggcagcagagatattgacttcaactaattaatacttcaaaaatttatccatcctagttatagaaattatgcatacttgttgcagaaaaattggaaaatactgaaaagcggaacaagacaaagagttacccagcttcaccattcagagatagccaattatttttgtgttgacttactttacaatctttccttttcagcatattttacatggttctcaaactatgtatgtataaatgttaatgcttttttcattaagaactcatataattttcatttatcacagacttcttgtaaccatcattttaaattagcaacttacatttcatggtatagaggtttacactccctctttccagaacttaacttttgaacattagtgtttacatatacaaatgtcattaaatctgaaagtctagacccagttatgaaccattcatttgtctagtatctaaacttttcacctgaacaagttctcttagaggtattaaagagtatagttgttagcctgaagattttctctatatacttttgcttgagttttattcagattggttttaagccttacatttgagccatatattttaatttaagctctatttgaatgtaaataagcactgtgtgtgtgtgtatatctatggaaatcagtttatttttactttattgggagatttaaaattttaattaaacatttctctgtgtttattttccatattccatcagtgagtaaattttagtttagaattacagctttacccagggtttatgtcatcaagttcccttcaagtggattacttgcaaggaaatcttactttgatatttcctaaatattaagcaattgatataaaagtttgacttaattacttgatttatagaattacttggtctataaggttaattatttggtcatattga

SEQ ID NO: 131052 - DNA, 1066 bp, Homo sapiens
aggaagtaacactgaggaaatagactcaagaatccgagatgcaggtaatgatagtgccagcactgctcctaggagcactgaggagtctctttctgaagatgtgttcacagaatcagaactttcccctatacgagaggagcttgtatcttcagatgaactgcgacaagataaatcttctggtgcgtcatcagaatctgtgcaaactgtcaatcaggctgaagtagaaagtctgacagtcaaatcagaatctactggtactcctggtcacttaagatctgatactgaacattctacaaatgaagttgggactttatgtcataaaactgatttaaataatcttgaaatggccattaaggaagatcagattgcagataactttcaaggaatatcaggtcctaaagaagacagcacaagtataaaaggtaattcagaccaggattcttttcttcatgagaattcgttacaccaagaagagagtcaaaaagaaaatatgccttgtggggaaacagcagaatttaaacaaaagcaaagtgttaacaaaggaaaacaaggaaaggagcaaaatcaggactcacagacagaggcagaagagctacgcaaactttggaaaacccatactatgcaacaaactaaacagcaaagggaaaatattcaacaagtgtcacaaaaagaagctaagcataaaattacatctgctgatggacacatagaaagtaagtgttatagagtaaatgaagttagttcatccaattgtatggtgtctccgtctttcctcactgactcaaaagccgctgtaccttagggcaacctgaaggataagtgagtgacccttgaccggtgattctctggggacaagtatatacagtctccagtgtctactgtcttttcttatcccacaggtggattgtacacataatgagcatcattgctacccaccatgtttaaacattcttggctcactacatcgtatcattaaacaatttatttcttgagaaattgcacaaaagctgtataatacctttgatcactccattttctcttaaaaagtttttggtgtgttaccatt

SEQ ID NO: 131053 - DNA, 1058 bp, Homo sapiens
caattttgtatacatgtaaaagcattagaaacttcattaaatttttgtctgaaacaaccatgttaagtatacctttaaaacttctacagttatttagatgtcattcaaaaagactgatagagaatatgtagaaaattatatatatattatgtgtgtgtatatatatatgattgctttagtatgggtgttgaaaatgtaacaatgtttctgaaacttttactttttttcttaatgtccttagacataatttttattcattaacttggctcttttgttaagtttagtcatgttgtatctgtgactttacctttgaaggaaaaaaaatataaattaagaaaatgtactttagcaccactaaagtgaggttttattctgtaactatttgtcagaattttgaaggtaaagttaactaaactacctaaacttggtgtgtgagaattgaataaacactgtttgcatctcaattctaggttctgcacttttaaaagaaaagcaaaggcatcgattacataagttcttgtgtctcagagttggaaaaccaatgaggaaaacgtttgtatctcaagcaagtgctacaatgcaacagtatgcacagagagataagaaacatgaatattggtttgctgtgccacaagaaaggtaaaaaacccatacgacaccttgagagcattattgagattctttgaactaaaattattttgtgtgtcaaaataccaatgataaactattgaaacatagtttatgattaaaagcagacaataagtctatttgaaaccattttgcccctactttataatttgccccatttttaattgcattcccttttgtagtttattatttaaaaatgtgaacaaatatccaatttgggtagtaaagagacttaagataccttggagcaagaagattcatcaaaatattatttgatatagctccttcctgaaggcagctaatggtgtataattcctttatattaaaaattcttcaaatattcattaaatatcttctatatacgtgacactaaattagctactaaaaggatgtagtggtcttcacaatat

SEQ ID NO: 131054 - DNA, 4009 bp, Homo sapiens
ttattatgagcaaagagtaacatatggaaattggagatacgcgaattgattcccttagcaccatcttacacgtttgtgtacctcttggaaaatctttatatgttgctttggaagactacagcttttaggcataaaatgataatgctcttttcccttttcccactccaccatatatagagtaagtacaatgtgtgtcttccacaacattggcttaatcttaaaatatgatttgcataattgatgaatacctgaaagggacagagcctgatattcaaacgttccagtgatgttgaaatcactacaatgagaaatgtaactatatttagttaaaatggacataaaaatttagtttttctcattattcttggttttaatgtttacatggaattccctattttaatattcattcttttatcttggttaatattcattacaaattagtattattaggattctgatctttattgtagacataaaacttaggaaaactgctgcatagatagtgagaaattgataaaaaggtaagatgttacattgaaagataaaatgtagcaccttttaaatatgttagctgccacgtaaagaatggcaattttaaaaatcattatattgaaaatataatttctagaaccatggttattaactggtatatgttagctgaaagttatataatcaattttcaaaaacatgttaattaaaaccaataaaacgtagatatttgaaatgtgtgtgtgactctcaaatacatttatcagggaatgtaacaactggctttagtgtagtaaacaaaacattgaaaaggggaacctgagatttctaagattagatcatctgtctctcaacactgtatgttcctagtatcatttaaaatttaaggacattacatttctattaacttggaaaattgtatataatgtctcaaaataggccattaataaattgtttacttgtattttagatcattagattattgtaggaatgaggtcaaagttgtgtatctaatttccttttccatcactagtgtctttaaagaagaaaagctttataatatacaacatctgaactagtcaaacacatgccaaggaaaatcttaatttggttttctaaagaacaacctgacagaatatagccaaataaaatgtttaagttaatgccttcctgatagtagaccttttatattaatataaaacaatatattttgtgtatattttaagtcttcaagatttatcaagatattttacaaatataattttttaattctggcagcacagaatactaggtatattaatagtcacttctcctaacaggacagatcacttgtatgccttcttcattcagtggagtccagaaatatatgcagaagatactggcgaatataccagagaacctggatttatagtagtaaaaaagattgaggagtctgaaacaattgaggattctagtaatcaagcagcagccagagaatgggaggtaaggagaaaaatatgaagattttagtcatctttttagtttgtatgaatttatagctttatggtagtacaaagtataagtgatgtttccacaaaagaggaatttttttaaaggtcaggttcactatccgtgtttatttgtggttattgaatgaatctgaatagtgactttaatactatatttgtcattctgcttttgctttaaaatactagaaaacccactagcaataaaatgacttttattgagtgtcttatagaatatttagtttaggaaagattaacattatggcaaagaaggaaataattttaattttgctgttatattaattttcataaaacatcgatttcacatctgatttgttttaatttcatctcctccatggaggaggtacggcagtcatttaacacatctgtgcatagtatttgcatagcatctatacaaattactactcctttctatgtttcagacctaagcattatcttgacttaaatttttcaataataattttaaggaaataagcaggtgctaattttataaagtagtagaaattttatatgctcagatttactgaacttgtttaaatggtcaaagttatactaacaaactttttgtaactcctcttagatatatcttaagattacatattaccttttacatgctttgtcttataaggttggtagggtggcaatatctgttggtgttgcctagattagtctcttcttgatgcattagaaaatgtagagcagatgctaaaatgttataataaatgtaatcaaatttttttattcattgggtgttaatgtttgtggctgttaatgtgatatgaatgtatcttgcatgcacttaacatgtatagtaattgaaggtatacatggcttgtcttttgtttaaaatgcaaactgatttggaatgtgtctaatgtcattctgtgtagtatatacagcatcagtttctactgtgactccaatataagggagggaaagaagaacatatcgaccatgtattttgggttattttaatacttaaaccaacattatcaatcttcataccagctttattcataatggccccaaattggaaagtctcattagcaggagaatggatgaatacatttttgaatacttacagaattccaaataacaataaaaaagatctactggtacaggcaatgacatggatgaattttacaaataatatgttgagtaaaagaagcctgacacaaatgaacatatactatgtaatttcatttacacgaagttcaaaagggcaaaactagtcagaaatccatcacactacttgatactgggctgtgacagggtggctcagggacaggagggaactttattgcgttctggggatgttctatatgttactctcagtggtggttacttgggtgattacatatgtaaaatatatataatatatataatacgtatataatatatatatgtatcttatatatatatatattatatacatctatgtccctgagctgtgtttttaagattagctttagaaggtacttaaaatagcccaggtgatcaaagatacgtacctaactaaggcagcaacagttgaaggtagagtggaaggtgatgaaataaagctagaagaaaaggtattagctagctaattacacaggattcagtgacaacctggtaaccataaagttatctccagcttgggtggcacggtggatggcagaattgtcagtcatgaacgggaattgagagctttctctccattggggttggagtacttaactttggaaataagagactattgactattttgattcaaaggaactgtctcagtttctgtgcaagactctgcagggtataatttctaaaggaaaaataaatctcctcaccagtcctttgaccggaattggtgcagttcaaaagaaaatggaagagaaaaaaataattttggaaactccttgctacattgtctgaaaatattaccgcagtatccagtatagcagcactagccatatgtggctattgagtacttgaaattcatgtaatgccactaagggactgcatttttagttttaattattaattaaaaaccgatacttggttccattattggacaatttttaaatatattaggaataacttagatatatgatctactttttcaactgtaaatttcatgaaatctaaatatgatctaaatcagtctaaatctaattaaggtcaagtatttcctatgaaaatttagtgcctgaattgagatgtgctgtagtgtaaaatattctacttcctatagccactagccacatgtaaccattgagcatttaaaatgtggccaatctcaattgaaatgagctgtagtataaaatacacactggaggccgggcgcggtggctcacgcctgtaatcccagcactttgggaggccgaggcgggtggatcatgaggtcaggagatcgagaccatcctggctaacaaggtgaaaccccgtctctactaaaaatacaaaaaattagccgggcgcggtggtgggtgcctgtagtcccagctactcgggaggct

SEQ ID NO: 131055 - DNA, 1001 bp, Homo sapiens
ttttaatatctcatttaaacctcattttggaacacacgtcatatttgttattttagaaaatgtagctggaagttatgacaagctttcaaaatgctgcttccaccaccaccaccaccaaattatataatattgctgatggttgttaggagagtctgtgatggaggggtggagtgtgaccacaatgcactgtatgtagaagagaactttcctggtgtgaagataatgatggtgttcctatgagggactgtgggagagattttagggtaaatgtagtggggctgaatgagaggaataggggaaatggttggtatgtgggggaggtagggtgttactgtggggtgtgctgtgccctgtgtgagtgcatgctggaatgtggaggaaggagatgggagtgggggtttggttgggatgcagtattgcgtgttagaaaggtagtgtgtgtgtgaaaaggtggcatcatgtgtgcatacaacaaagtgaagtggaaggagctgctttaccttaaaatggaagaaattttcaaatgtatcatcatgatattgatattctgattaaaactgaattctagatagttttagtttatatgtatttgtagtttatatttaatctttaaaaaattcacttctttgcttatattcaaaatatcactggttagtgaagtatatgtaggcatagtgaatataactaccttttcaagaaattagatgttagaaaatgcaatttaaaaacagactgtgtaacaggcagagggattttcaggtcactttgaatatttgtgtaggatttatttgtagcatattggcttggtttttacacagtcattctgtaaaattttagggtggaagagtccacaaaaggcatcttattgcttaaaaaatgttcacataaaagatacaatcttatagtactgttagctgtaagtaaggaacataattttatgactatatgaacaaataacaaaatgttcattcaaatcattcatgtgctttaagagactctgg

SEQ ID NO: 131056 - DNA, 2105 bp, Homo sapiens
aatttctgaaagtttaagcatagaggatatttatagaatacaaaattttatgattgtacaaagtaccttgaagttgtttctgttaattctgagtatcttcaaaaagggaaattaataagggactgtaattttgtttcatattaagtgttttgtatgttctacaccaacaggaagatatcaaatcttaattgttgccttaatgttttttattttagcttaactttttagaaaaatattcagaattttctcttgcttgaaaataaattgaatagaacagagtaaattaattattattgactggatctcaaaccagattcttttatgatattgtttacttaagggtataattttaagaatctgactaaaaggttttttaagctgttcaaaaagttttcaggcaatgctacctaatacaaatcttcaaacgatatcctagtaaggaaattcagtcaaccatactattgtaagaattttatttatttttctgtacgtgtacattgttataaaatgtattgtccattgctctttctgtggtaatttgggattatattttgcttatgaatgtttattttattttcacttaattgtagatgatttaaaatccaataaggactttggaagatgcccccaaagcagcttgccgcccttaaatgttaagtgtgtcaaaatattaaaattttaataggtgttatttttaattgtaatttcaaaattcatttatatgttacatcagcacagagggatttaggcacctgaaatgattgaatttttaaaatttgtgattagatttaccagataaatcagttaacaccgttgttttttttttaaaccaagaacaatgaagctattcatacattttttttatttgaagtttgaataatcatttattcttagtttgcaaagacttcaatacagtttattacaaatacaagcaaaataaattgtggttattctgaaatttataggtcaatctaattaatgtgcatcaaacacttacatttattacagtcaccacgtccaaggcctgttcattctttatttttatttttatttttgagacagggtctcactttgtcacccaggttggaatgcagtggcgggattttggctcacttcaacctgggctcctgggctcaagtgatcttcctgcctcagcccggcaagtagctgggactgcaagcatgcaccaccacagcccgctaatttttttgtattttttatagagactaggtttcgccttgttgcccaggctggacttgaactcctgagctcagctcaggagatctacctgccttggcctcccatagtgttaggattccaggccactgcgcccagccaagttctgttcattcttatgggaggctatataattttgtcagatactttatttcatgcctgagcaagaatgcttcctactcattggtcattagctctgcccatacatatatgttatttaattgaaccctcacagtaaccctgaaagtttagtagaattatttcccattttgaagactagttgaagcatggagtggtcactgaactaagttgtcatgtagtacagagacagcttgaccctagcacatattgtagttcaccaggatgactttgaagtttttctgaaatagaacaatatgatgtgttttgttgtgtagacaagctgaagtcccagttttctagttgttttctttgttttaaagcagagattctaggagctgtagggcaggcagctcttaagaaaattgggatgaaaaggattagcagttcttttacctgctttgtagattgagagccctgtaagattttgcctgacaaggggctcttatgcttctaaactggaaaaaaaaaaaaaaaaaaaaaaaattctaagagaataaccagtatttcagaacaaatgaaatttgactttttggagtttataatgtgtagctttttagaattcttcgtctttacccaacaaataatatggccatattattactacctctgtaagagagattatcactgaggtatctatagataccttgacagttttccaaatgcctatgtatgtagtatcacatgaccttacagtaaccctgtgtgttaaccagattgttttgttttat

SEQ ID NO: 131057 - DNA, 1016 bp, Homo sapiens
catattgatcaagcatgcttaagttttgttatcttttattttttaaaggccgttttatagtttattctgataacttaaactttaatcattcatttatttgaagctattcatgtatttgatatattcatgtgccatactctaccttgttagtgtctgtcaataagtcgtaatttacttgaaattataagcccattttataataaggatttagtcttaatcaaagtcacaagtcattaaatagcatcagtgtttcattgcctttatcagtagtcactaatttcatcaccattttcttagtttaggccgtcatatatgaacagactttttttaaatttaggctttcatatatgaaaacacaggagaaaagtttgtatgtcgaattgtttacatctgttcaagaattagctgacaggtggatttttaggaagagctaatttaaatgtaaaaatctttccagtgacttcagcctgagataataactataatgataaaaataattacttgtactgacagtgtataccaaatattgttctaaacacttaatatgagttaccttatttaattctcacaaccctgtggaatattactttatcatctccattttacaagtgaaaaaacagggacatagcaatcatactacaactagtgcaagtcagagctgattttttaatctaggcattctggctctagctgatgcccttaaactctttgccatacttgccctcaaaaatcttcagaatataacaagaggaagagaattatttatttcatatatttaatgtatcagaacctattttatatatactttatacatattatttatttctcataaaatgtaaagtatttccatttgaagaatcagaaatggggaaactaaatgaggctccctaagttcacaaaactaataaaaatcagaatcaaaattaaggtagcagtctaaaaccaaagccagtattcttcaatattatgccgcctatctatagtagatagtcataagacatttattaaccagtatt

SEQ ID NO: 131058 - DNA, 1615 bp, Homo sapiens
ccgtctcaaaaaaaaaaaaaaaagaaaagaaaaaaaaaaggatatggggatatggctccctcccctcttccttcccttttttttccttttcccagtattgatgaaagacaggaagtgattttaaatgcagattttttcaaatcaaacttcactaatagaattaattctggatttttttttttttttttttaagacaggattttgctctgttgcccaggatggagtgcagtggcttgatcttggctcactgcagcctcaacctgctgggctcaggtgatccttccacgccaccaggcccggctaattttttgtatttttttgtagagacgagatttctccatgttgccccggctgttctcaaactggaatgttattttgaaagcagtagttttaatttgggcaaaatggggcaaagtttaacataattcaggtcttattttgtaataaagactgttaatatatgatgagatatagtagaacaacggcttatgtgacttcaaggatgctgttgtatgctctttttgtttgatacagaagctcagaattatatttccttctttaacatattttttgagaccaaagtaagtgtaagtggcattgattagatagtatttctttttctcttgcatttccatttactgagaaagtagtaaaaatggcacattgacatataactagcagatttttgttagtgtgcaagacattgaagaaagggagatttggggtttgttttggagtaatcttggggaaacactggaacgtccataaggtattgttctttatatctaagagatgaacgtgttcttaatcatgggattggcagcaactgtgaattttctctagtctctgtttttgttagtccatttgtaatagtgatgggtggatttacccctgcctttccattggtaattctgtagaagtaaaggcttaggaaaatactttctctttgtgagggtcctttgtcaaagactgaaaagactagagagtggcatttaattctgcagagtataggtcatggtacttagttcctatagataggagttagcagtatatccaaatactttattccttaagaaacgattttttagccagtgaatgcacttttaattggaaggtcttggttttctcaactgtttactcctaataattcagagcgtgataagggatattttggagaaatgtattcattttttatttaggtttaatcttttgggtaaagtaataaattgtatacatggagtatggtttaccaagggtttaaaattaatgtaagagtaattccagtttcctcatatatactgggaatatatagctcttttatccctttattttgagagaaggaagtatatttctgtactcaaattcaaatctcttttttctattaactcacagacttttttttttttcttacagttttctgtatcctcacccatcagggcatgagtaaatgtttaaggttaaggaagcagaaagtttttaagtcctagaaaaaaatataattgaaaaaaataaatttgaaagagtagatttgtgacatgaaagaaactatgactttatcaagtgttattaagataagcttagccttatggcgatttattgttctcttattagtaac

SEQ ID NO: 131059 - DNA, 1071 bp, Homo sapiens
atatgcatttcctcagtaattcacataaaaccagatttgatatgcacttttactattttcattgttttataacaaaattgataggcaatggggaacccaggtttatctgacacccccccccatccgcccccagagctagagagaataacagcttctggtttctaagtacagagtcagctaacatattgtatgctttgttgcttcacaaaattcaatataataataatggccagaatggaaatctgtccagcctcttttccttttttctattctcatgtctttcagaactttcaacaagtttacatagcttttcatagttaccttaatgtttactggtagccagttccttttagttggctaaataaaaagcctttaaaacctaggttcaaaatctaaactctttatgagccagttggattaactcattttgtggtcagagcctctgtgcatttttgattgattacaagaggaactagtcatagctcaagagaatcgtcacatatttatcacaccattagcgttcactgtagtatggtaactgtttttagaattatgtcatgatctgaaaaagctgtaactattatgtcaacctgaggaaacttacctgtttttgtgggctttctgtaatagtgtttatctgtcatttatggctttcaaatttaatactgtgcaagagcctggtctaggcaattatagaagatagaaagttttcctttgaaagttaaaatgtaggaaagttgttaaattttagtcacaaataaatgatacagtaaaaaccataaagaaataaaacaggagagaggcaaaaagtggaaaaaaaaagtcatttaaagggctgaagcagacatacttagaaggtacttttgattagacatacttttgaaaatctaattttctactttctagagcttatttttcttattgccataggttttaaaatgtacttctatattgttttcttgctcttctctcctctgttgtttctgttatagatgggtatgtttgtcacctgtgcctagaagaaattcttccagcatggccattaggatataatgtttgagctcacctgat

SEQ ID NO: 131060 - DNA, 1027 bp, Homo sapiens
tttagacacagaactggataaattacttaaaattctgtgaaataatctttgtgattttttttttagaaacaagaaagcaatgtaattgaaaactcatttttaagttgtgtctattatactgtgtttctttcttcttaataagatatgctttcatggctctgctagacctgaattttttcttttaatgcttctaatgctgccttgggtttctttttctttttctttttacctttcacatcatcaaaataagggtgaaacatgatgatatgaaagaatgagtatttagcttcttgtcaaaaaacaatacacttatagaacatgtattggttgcaaatatatgctgctcaggtttgttaagaaacctgttaaaggaacaaaataatttagcaagaatttcattcccatatagaatcacagttgctgagcgttgctgcattttagttatctgctccaatagaattctgcatattttccaatttaaaagtttcataatgtttcatttcttttattttctaatattattatgttttatatattaaaataaaattaatattaaaaagtaagcaccaatagaatatattgtgcagtagtaagctttatttttacttagttaacattcttatcgttttaagaataccagtgaaatcatttccaccaagcaaaaaagcatgtattctttgtaatgcaacacattaatctaatttaaaaaataaatttatgaacaaattaacagtaaaatttattgtttggtccaagtagatgaaaaaaattaaatgtttagaaagttataaaaagaaagcatttaaaaaaatggtaacgtttgtcagtgaaacaaatacatgcacaactcacagaaaatagttatttttttttattctactattctttacattaaaattttggcacccaggaagttttgttcattatttttgacaaattttgtgttagcatgaaagaattctattttaaatagcatacacacacacacacacacacacacacacacacacacacacacacagcgcaa

SEQ ID NO: 131061 - DNA, 1004 bp, Homo sapiens
ttattttcctaatagacaattaatattttattctgagaaatgtgtaatacttttcaatcatcttagtatctttgagaataataatttctactgttaatttatttttatagcctatattatataggcaccattacattccagctggcattagtattctacataatgaacaacaagctatcaagtaaatactaacactttgttttctaaagcttaccaagcatcttccaccaagaacaattggctatccatggactcttgtttatggtactggaaaacatggcacaagcttgaaaactctttatcgaacaatgacaggtttagacaccccagtgctgatggtgattaaagacagtgatggacaggtatgaaacaccaactgcatagattgcttatcctttaagagcagtaacagtaacttttagcatatttatttgataaacattactttattagtgcattttattgtttaactgataattactgggtacttttaatatgcaaggcaatgttgagtattacagaggatagatatgagcatgatgattaagaattactgccttcaaagggattatagagtggtagaaaagaacatttgcacataccaacatctctaatggtggggaaaatggtaggtttcttagaacctagaaaaagtgaggaaataagaatgaggttcatgggaaaggtagaaattgacagaatcttgaataatgggtgaagttttgattaaagataattgtttgaaggtgatagccagaacaaaagcacaaataagagtaatattggtttgttcttcaaacagcaagttcaagtcagttgtaattggaaactaatgagaaggtaaaatagcaatattagaacaaaacactggtattactaacacttttagtgttttatgtgtcaggaacttgactaatcacttatgcattatgttatttaatcatgaaagccctatgagattgatactgttatctttatattaaagaatgagtcaactatgacat

SEQ ID NO: 131062 - DNA, 1104 bp, Homo sapiens
ttcatctatatatttaaagctttttttaaatttatataggtctttaagtggacaggagataatatgttttttatcaaaggagacatggattcactagctttcggtggtggagggtaagtctcttgaacatttcactatgagatttttgaagaactttaaaaatgcatttggattatttataaattcagttgtctttagaaagtgttgacgttagaattcaaatttgtatattatgaaaaagagagtataatgtatttgcaagaagtagctcaagtgtagttattgaaactattgatggagtatttgtttcttcattttaaaatactgttcagtttattcactgtttattaagacccatctttttctttagagcacagtggctctttgataatataaagggaaatatctcagtacctttgaacttctctaatttttaaataactgtgatggaatattttatttctcccaatgcatagaacaagtccaattgttttcatgttattctactctggagaccatttggaatgatattttagacaataatggaaatggggtttttgcttgcttgttttttaacaattatgaatcagacaataatgtgattatcttggcattgcaagtactgtgaggagctttgttttttatttggtatcccagcctcctttaatctttgcattgttgggaggtaggctgctctggtcccacctagcctgggcttagcaagcaacaactccttcctttggtatttctgtctttcagtattagacatgggtatgctaaataattttcagacttgtaaaagtgttacattatttgtatcccacagttgaggatatataatgataatttattcagaccaccaaagaatattcatcatcccaggttattctattattaacaaattttcttacaacttctctgtaagtaggtgtttggaggatataagtagggtgattaaaaagtgatcatggttattgtagccttctctgttagttttagttgttgaactcagcatgtatttacatggtccaattataccttttggggggggtatcattcagccctcccctaaacagtagtcttacatgtgattctgttagctct

SEQ ID NO: 131063 - DNA, 2113 bp, Homo sapiens
cactcttgtcgcgcaggctggagtgcaatggtgcaatcttggctcattgcaacctccgcctcctgggttcaagtgcttctcctgcctctgcctcccgagtagctgggattacaggcatgtgccaccgcgcctggctaattttttttgtattttttagtagagacagggtttctccatgttggtcaggctggtcttgaactcccgacctcaggtgatccgctggcctcggcctcccaaagtgctgggattacaggcatgagccaccacacccggcccataaataattttttaatggaataggagtaaaacaaaattgtgtcagtgtggaaaggagtagggaaggatttgagaaaattaataactttagggttgttaggtattcaaagtctcatttaaattgttttataacttaaggcataaatattaacagattattatttatgtattgcagaggagaatttgcgctttggcttgatggagatctctaccatggaagaagccattcttgtaaaacgtttgggaatcgtacactttctaagaaggaagatttctttatccaagatattgaaatctgggcttttgaataaataaaatgctctctgtcttagcaggagaatggcccaaacctgacatggacaagcattgtttggaaagttcaagaagcaatacagtgtaacatgtcacttgtgctttaaaattagtctgtatcaccatttattacagttataattttggagtttatttttcaaatcatgttcttgtcccagagttctttaggttaacactagggactgcgtccatgtactagtataacagcttgggtttgttagaatttgggcaacattttgattataatgacaacttcattttcacatgttactcagttccctaataggatggtgctcttttgttgaacctgtattgatttttttttttttaactatattgattcgtttactagaacagtctaattggggcattgaggaaatgaagactggatacttctgtatctgtgaagttggcacaggtaacatttggacatgttcatcttattcttaggaaggaaaaaatcacttgccaaaataatacatacttcatagaccactgagttctagtttttattcacactacaacattctctttaacgatgttgcaggtattctcaatttccttttaagaaaaatgaaatgtgaggagaattctggttgtaatagatgacagtacatatgatctgcaggtttgggcatatgctttcatcattaaattatctgataaagttacaagtcacaaaggagaatgagaacttaatgattctattggatttaatatattagcaagaaaacatactatttacatatgtgtagcttagtaaggcattaacataagtacaaaaactatgaaacagatgcatatttcctcaacatactgtgtcaggtatactgttttataatttggttgttttagccttattgcacaccaactcccaaaatataggttactcttgttcaaaaggaaaaaaaaaattgtgattttctttgagtggtatatgttattaattaccattagcatttgctcttataaagggcaatgattatagtagacaatattgtaactcagtagacttgttgaatatgcaaacttactgtcaagtgacctcaaaaaaaaaatgaaaagatagaatacactagtagttcttatcctcttttgtaggaaaccaataatagccattgtggcaataattcatcagttgattttaaagcttcatgttatgcaaaaaagaatcctgctgttatacatgtgacagtgactttgtgctgaaatttcagctattccagataaacattgtatatcttgtaaattaatgtttaaaggtgtagttttgttcttacagaaagtgttgattgccaggttgcttatagcactttaagttattctaaaaatgaaattataagccaaatatttggcttaagtagatttagttgtatagcacttacatatttagttcttttgaaagtttagataattatttaaagaaagcataatgctaatggaaaagaaaatctgatgttctattataatatgctattgctgaatatgaatagaaatacagggc

SEQ ID NO: 131064 - DNA, 1056 bp, Homo sapiens
gctagtatcacaagacacctcttacgatgatatctgtctcacaaggtgcttgggaagatgtgcctatcacacagcaggcgtttttatctaaggaaagtagctttctcactttacagccaggccttattcagaagagtgtcaatgtcttagaagctgtctgagaagaggccttttactccatccttacactcaaacaaattgaactttgaataatctatgtcagtgcctgcataacttaatattattcagaattgaatatgaggagactcttgaaaccttcatctattaatacatattctactgatactataagtaacctaagttgcacactataattttattgtatttcaaacagaagaaagtgtatgtggaatataacttataaatactataaaaacaagaacagaaaatacaagaaaacatcttttattcttatgctatttgtctttaacatttggcgtaggtttcacttgtaatagaagtgtgcatcttacatgaaatcctacttagaaatattggtcattaacttatagctttataaatacggtatggaaacaaaatacgcatactttcttaagataccagaaccttcagtttgaaagagactcatacatgaaaacaaatataattcttatagcagtctaatacctattattttgaggtatcatatttagacattaatttttacatttaacaccaaagtgctatactatcaatgcattttagtaatttcattgaatccagtaagaattgcaatctcacattccattccatttgtttttaagatcacataggcacattaatgtccaatgattttctccttgccatcatcattgtatattttttactttggcagaactaatattgcagttttatgacttaaacatttcataaagttttctttgttacagtatgaggaacattaaactgtctcaaatctgtttttaattcaccaatgattctatgggatttttctaatactgaacattccacttcatagattttctgtatttctccattgttggagaaatacatatcattgcattgatgttaatg

SEQ ID NO: 131065 - DNA, 1005 bp, Homo sapiens
ctggaatgttctaatgactatctacttttgtgatgtcactggttagatcagttagagttgacgtatggatttgcatatcatgctttcaactcccagccaccttgaaattgaaattaatttttttctggttacctgagaatttatgcaacccataattacctgtagcccagaggctagaaaatgtggaaagtttaactaaatatggctaccctcttaaaggaaaacaacagacatttacaggaggcatttaaataggttgaaatgttgtctgagaaaaacttgagaattaagattttttaaaaacaacaaaaaaactatatttacttagaagcattcagaatgtcaaaaaaacagctacaatttcttctgcaattacagagtagtatttactactactctgttaacagattagttaacagaacaatttcatgtaattatttcagtgcatctgagacaaatggggatgagaaaacccccatccctgtatacgattaatcagtgctgtgtaccaagaacctactttaaatttccatgacaatgtacagctcccatactgtaccaggcaaggttagtgtctactgaaaccaccaccaggacagagctatctaaagatacatttggtgatgtgctaattacacaaaataaagacactgtgcagtttgaaaataaaccttagacagcaccacattttaatcttttttctttaaaaggagtgagttgtatacaggaggattaaatgatttatagacaagaaaaacaactgttagaaccaactcattcattatgatcttcatcatcttcatcttccttcttctcatccttttcatcttcctcctcttcttactttatcttgcttttttgcagccttgatgactaccttttatgctgcatcaggctttcctttagctccatgtacagcaatatatttttcatatttttccttcagctttgcagccttcttttcataagagtgcatgtcatctgcagcagtgtcattccacaact

SEQ ID NO: 131066 - DNA, 1042 bp, Homo sapiens
gacaattggaagtcagcaccctcacctttctgcccatctgtatatctttaaacattgtaccgacttgtattttcttgtgaaagagataaacttttttcttttaaggctaccccaagcattcttaggccttagctcttcttttccaagaggatcttatttacctgttatgacctgtttattatcttttcctccttttctctaccagctctttctgcatgtcgttattactccagcgcctaatcttcatatttccacctggttattccacatgtatttcaaattcaaaatatctaaaatgacatctaattctctgctcaaatgggctcttcagcctactatgccctattttagaaggtggtattacctccctactcactttagccacaacctagaagtcacccgaaactcctccgagattatccttatttcccatatacatttggtcaccaattccactggattctaccaccttcacaacttgttggcttcttcctctcttaacccagctctactctttcctctctttgcctaccttgactacttcagtggtctcttaagtgatcttttctctaagaccaactctaggagaataggtatttattatgcaaaattataatctttaacttcttctgggtattaccttgaaacaaccaattacgcacctatatttatcatgttgccaagatcttaagcattaactgtattttggagatagtcttttaaaaaaaacatacattgcatttattctattatggtagtcacttgactgtaaattttcaggtaacttgttaatttcttgttaatgaagtaaacaaaagtggaggtagatgcacatgccaatgtataatatggggttgtcttttgtcattcttaatcccctctccattaaatataccccatacatacacaaggaacagcttacctttgtgtgtacaatatcttaggaatgtcagaactgaacttaagatttaatatctggctatatggaagtttctctgcttgacaatgaaaattagatgaatgcacttttgacaacctagga

SEQ ID NO: 131067 - DNA, 1089 bp, Homo sapiens
caaacaagaaaaatattaaaagtttataaatgttagacttattttttagagcgcttttaggttcacagcgaaattgagtggaaggtacagagatttttagaaaggggtttcttaatggccagtcatactcccctcattgccaagtccagcatcggtacagttctctgggacttgttcctatggtgatatcttatcacctctttcctttggctagtgacactgcactggttttacctcctattttctgtccattctcttctttggttccctcactgagaatgtagactagtgtttcttcacctttattcatttccttggggaattttacccgtccctgtttctcgaactgtcatttctacataaagtcctttaattctaggctcaatttttcttttcttctttttttttctttcagcttcagattatcctacactcagatctcccaattactgccaatatggatagatattccatgcatactcaaacctgacaattcgctttcttttctgtgccccctcccaaatgtgttcctctgcttatattctttttttatccatggagttctgggtgccaaggctgggagcctcgctatagtctttgacttttctgttgcctcgtatcagtttgttcttgcctaaactatatcggattagtgagtttatatccatctcattctttccattcccaaagatatttcctagctcaggctctcatagactcctcatcctccagcatctacttcaatccacttatgatgctccatcccttacagtgctgccacattccatttttctccaccacagatctgatcatattacttctctgctaataaaccctaaacctcccaggcctccatattgactgccgaataaacaccagccttttctatagcagtcagcgttccccaccatctgaccacagcctgctttcaaccttctaccaccttgaaagcacacttggcttaagctatcccagataacttcatttctgggcatgccatgtgttttcaagctcttgcgctgttgagcatgtgtgtggtgcccacctaaaatgccactgcttctgtgaagccttcctggaattttctgc

SEQ ID NO: 131068 - DNA, 1065 bp, Homo sapiens
tttgatagtcactaatggggcctggttgcaataattttaaaaaattaattaggcacaaacacaatacaatactgacaatgaatatcttttagaggggagacacatgccaacattttgaaaagctgattaataactcttatttttctctccatgtagcatattaagatttgtctccctgactcccccttcaaaatagtcatgattggctattgttaacccctactatctgtcttggtcttgaaaccacttatgattgatttatatgttaagtggagttctttgattactttcattttttggaatggttgtaagccacatttcagactggattactgaaaggtggatagacaaatcataactttattgtggtctcctggaatttctggagcatggcatgtaatgacttaatcttatatctccctcattctatttttataccttgtggtattttaaccagggatttatgaaaacttcttgatataattctcaatgcagcaaggtttccaaatgtataattcatgtttctggtggtccgatggcagggggcgtgctatgactagtgtttctttccgtagccttttccgtactgaatcctcagcttctccttcctctaataactccttgtttcacaaaattagatatagtttcttccataaaaaggaagggtttgtcacaaatattgtggcatgtttctggtaactgaggccagagaaagcaaacattttctcttaaaccttatagagataaattaatttgtgtttgtgttcttaaaaatttaatgaaaagattcgaattttttttttacaaatactttctaaatagtttacttctcctgatattctttcaaaatacaaaatgacacatggaacatactaacctacagttaaatgaaaaagtttcaaaacacattttgtacacttgcttactttaagttccaaagtatttcagaaaagctgatgtgatgtttaactttgcaacataaacatgttctgttcttttctcttttttgattggctgctttctcttccaacataacggcataattttttaaggcagggtcttacc

SEQ ID NO: 131069 - DNA, 1049 bp, Homo sapiens
aaaaaaaaaactatcaaagaaagatgaaataataaaactattatataaagggtgacttacattttggaaacaacatattacgtataaattttgaagaattggaataaaattgattcattttatcttgctgtcagttttcttgcatgtgcaagtttgtgtttttttaactttcttttttggaataattatattcagaggaatttgcaaaaatagtacagagaagtccctgtaggctgaaccctgtttccctcaattttttcactttgtcttactatggtacagtatcaaaaccaggatgttgacattggtacaatgtgtgtacaaatagctccctaccattttatcacgtgtagatttgtgtaaccatcactgcagccaagatagagaactatcatcatgatctccctcatgctacctttttgtagccatacctactcccaaccaactctaaccctaggaaccactaatctgttcctcatcgctatattttgtcattatgagaatgttatataaatggaattacataatacacaacctttgagattagcttttttcattcatcacaatgctcttgagagccatccaagttgagagatagatatatatatatatatgatcagtagttaattccttttttattgccaaatagtattccatggtattgatgtgccacgtggtttaactggtattgatgtgccatgtggtttaaccatgtacctattgaaggatattttagttgtttccagtttggtactattacaaataaaactgttgttccttaatttcttaaaagtggctcctcagtcactcactgtatagttacggagactaggcatataagttgaattttataagtgtcaaatgttaaatacagacatactgtttactggatactggaggtatttaagagctacagagccctcactgggtcccttttttacatagaagtggcttgatttttcactttggttgaactgacagccagtcagataacagaaacttgttgctgctctcaaggaggaggttcaaagataaaaaggtacatactg

SEQ ID NO: 131070 - DNA, 2008 bp, Homo sapiens
acttttaatcatctctgggttacttttaaaaatgtaaatgctatgtaaataggtgttatactgtattggtttttcatttgtattatttttgtattcttttttattgtttgtttgctttttcccaaatattttctatctatggtttgttgaatctgaggatgtggaacctgtggatatggagggctgacttatatagagggaacatcataaaacctttttctcccttagatcattacttcttgagcacctggcaaatgtaaagtactgttctagaagctgaaggatttccgtaaatgcagaatatgttaccctaccctcaaggattttacagtccagttggtgaatggaataggtcgtgcatagtacaagtcaataggcacaagcacatgaacaaatcagacagtaggggtcatggtatataagagaagggtgatccagaaataccaaaaagtatctatgcagagtgtgagtcaacactgtgtacataaaactaagtttttaggcccagttaattaacattgctgtttttactttttcattagcatgttggcagataaattgaacatgactccagaagaagctgaaaggtggattgtaaatttgattagaaatgcaagactggatgccaagattgattctaaattagtgagtattatgttagctatgctacatactatcagttcctgattatacttttgggaattcttaactaggacattttattacctcctttaataatttattttgttttaatgtaaaacagttctttgaaggcaacagaagcctcctattttttttcttccttggtaaatattgtcatctctatacagtgcattaaaatatgcgcaaaggtatgtcatgctttttacttacctgagaaactcagtcattaacattataggatcaatttccctgtgtttccttttagggtcatgtggttatgggtaacaatgcagtctcaccctatcagcaagtgattgaaaagaccaaaagcctttcctttagaagccagatgttggccatgaatattgagaagaaacttaatcagaatagcaggtcagaggtaagaaccacacatcttctattctgtctggggtttagcaaccatgtaattgttacatgaagtttcaaagtgtattgatgagttgtagctgattttgtttttctctttaaagatatgaacatttttaagaaattactaaacagaaaattttttcttagatgtattatatgcattaaacatagaaactgaaaaagaaattgtgttcctagtttattataactatttttcttttgctttgactcttcctgtgtgacttcattaactcatttcctcagggttttcaacacatcattttgatactggcagatgataacttacatgtgtagccctctttcaagtgttcgaaatgtgtattctttctaaatctaaagaaataattctgtaaaaatgttgatcttattatatgtattagtgctgatcttatacaaatttcattatctttcatctgatattcatatcaaaaattaatctcccattttgatagagatcctgcatgttagagattgaagaaacttgaatggccttataattttggaatcctaaactgtgttgtttagacattatgattatgtgtaactggagggtaggaagtcattaggaagcagttgtgggatatgcagagaccccatttgattgaaattttaggaacaaatttgtgtccgcagaataatcctttagttcaaatgagaaggatgcattagaattcaagttgcatattttagccaagtttagaataactgagcctagaaagtaactttcatatgatgtttttttctgtatgctttaggattaatttgtatcatttattgttccagtattaatgatactgttattgctatatattttaattggccaaaagctataccagataataattttggtgtttgttttgtcctgagtgggacatctgacatctagtaattgcaggagttaagatcttagaat

SEQ ID NO: 131071 - DNA, 1543 bp, Homo sapiens
agatacagaacatttctatcacaaggatccttcaagctgctcttttatagtggtaccctcttccctgccaccctgtccttaatttctggcaactactcatttgttctccattcctatatttttattactttgagaatatgcaaaacattttctaaaagttagtgttcagcttcctaaacggcaaatatgctatgtatcatgattatggtataattaattactagcaacctaactagtagtacagctctccaaagaaaacattacagatgttaatgagtgcctcttttggccaaacacggggtagaaagtagtgagtacactttcaaagaacttaaaatccagaggaagaagcggatattaaataagtggacaaataaatataaagttacaaattattgaaaatatttgtaattttgggaaatttcaaaatttcatatttgaagttacacattattaaaaataggtccatatcattctctctagtcactctgcattggggaacaatgagaagaaaattaggtagggtcagtgaatcctgataactctccaaatgaaatatctttaagccccaaaatagacttttttccactgaatactaactatggcatattattccattcactagtttatgctggcttatttttgcctttaattagtttaaagctatctgatgttctgtcttttgagggggaagggaaaggatatatctcagcttctttttctcccaccaaaggacacatttcaaatgctgaaaatagtattataaaacccataattgtttattaaataactctatttgtaatttggaacattctctgttaatagatttcctgactaaatgcctgtaagcacatgtgatagtcagctttataaaaatgcatattaagaatgttttatatgtttttatacaaccttattgatatgtaggataagttacaaatctgtttaccataaagtttgcaacatctgtcaaaaaagattactgtgttggggtttaatttagtatagctgaatcattttatcagctatggtatgtgtctgaaatttaaaagctgttctaaaataattcttggacgagttttcaattgtagatgaaaacaaattatggaagtaatattttggatgtgtatgataaacatgttggagcatacattagtataatttcccaatgggggttacttaagttttgaagttattctactttgcttattttattaagttatattttagttcttaatatttttcttaaagttcttattaccacataacaatttacatttagaatgtaaatgtatggagacaaacagtttcaaaggccattatcattgcatttctgcattatcaataaggttcagttatttataagattataaagagataattttcagttttcacataaggatttagcatttctcaattttctcctcttttctttgtcctgtttcctcccaatcatacagttaaacatagtttacacttaacactgattctttaattagttgtcttaaactaattagaaaagacttggagtacttttctttgg

SEQ ID NO: 131072 - DNA, 1939 bp, Homo sapiens
ggtcatttgggtgctttttggtccagaactgacttagctactaccgctgttgtgggccttttgaaagctgacccttttttttgcatctttagcacctaacatactaactttgtagcacctaatatgctttgtacagtatagtgtgagtatacaatataaatatttgttaagtaaatttcttctgttattagtgaacttggcatttttgtccatgataatgcttgtctgctttggtgtttgcttccgaggtactatcaataagatttgttgtagctcttttcctttaactctgcagccatgtattcattattttctttcttgggatttggtttattatcttttaagaggaacatagattaagtatgtgttctccttactgaagggagatgtgcagctcaaagaagttaatagagtgggaatgtttctatatacctttatgtgacactacctaagaatttttcagacttttctccgtgtagatttttattacttccttgatctctgtagttttctgctagacaaaaatctacaaagcattttcagactaaagtcctagtggctttccagagtctaaaaatatttttttttctagtagtagcattttctttcacttcagttcttcaatttttttttcaatgttttactaagatgattaagagtacatagatcaataatgtatgtttttctttttctttctttttttggggggagacacagtcctgcactgttgcctaggcttgggtatagtggtgcgatctctgctcactgcaacctctgcctctcgcgttcaagagattctcgtgcctcagcctcccaagtagctgagattacaggcatgtgccaccacgcccagctaatttttgtgcttttagtagagatggggtttcaccatgttggccaggcttgtcttgaactcctggcctcaagtgatctccctgccttgttctcccaaagtgctgggattacaggcgtgagccacttgcgcccagcgttttttcaagtactatggtagaattttcaatctgaaagaaatcttagggatcttctgatccaacaacacagttacttttcaggtgaaggacttctcagtagaattttctgtagtgatagaaatgttttatatctgaaaatgtgtttctatgtgttcagtacagtatacttcatagatggctcacatttcaagatcttgaagtatggtttccaaatctctgtgtgacagtgggacttattttcaaatgtaatatcatatatatgaatatatgtatttatatatgtgtataagcagatcaaagcagagcccattcaccgtgcctatcttacagttctgttcagcttctctcctgactactaagacacctctttggaacacagttttacaaaacactgactcagaacaactgcattgttttgtagccaggaaatttaaagctcaaggacattaagctaggtcttgatagagcctgtactaaaggtatctgacattcattgtactgtacctcactgtaagttcttttatattgtgaacaatttatatttttagaaatgtcaggtttagattaatttgtcatttagtttatcagttgagccagaggataaagatgaaaaccctaagtcactttaactctgtgtttcagaatctttgtagagtttgttttataaactccctatagccaccctaaaccattgaatcagatttattgagtaggctatgctatgatttgcagcagggctgctgtgctgtatcttgagggtggttattccgaagcacagccagaatccaaaaccactgcattaggtaaccagttttttaggcgtgtaattacagcctgctaaagtaatggagtgaaaaatcagtaatttaatacctttattatataatgaattaagaagataagcttcttcgtgtttctaaggatgctttagtgggttagaaagacaa

SEQ ID NO: 131073 - DNA, 1048 bp, Homo sapiens
tattggcgtatattcattatgctaagtgtctaggttttgatgttaaaagacctagagggtacttggttgctgttcttgaaattaaaatattctctcttaattacaccatctgtggaatagtagccaccttttgcattcttttccttctaatttctaagtctacttaatattgtagaaatactccgagcttgtagtccatttataattattttaaatagttggaagagataacattatctgcagagcatttatgtagaataatggatagtaccaaactttgttgtcagaaggctactttattaaagttatcagaaacattgcagtttttaggtctttatcttgtggtattcgtttactacttatttaaatcattaaagatttgaacacagtgttctagaaagtgctgtggtataaaactcatgattgtagaatggaaaaataaagcagataaagtatttgattcacgtttcaggcaattgcttgtcagcatcattaatttttgttgtatttgtacatataggtgcttgtgaatgacttcttcttggtggcttgtcttgaggatttcattgaaaatgcccgtctcttcatatttgagactttctgtcgcatccaccagtgtatcagcattaagtaagaacaccgtgatttgatttggattttctactttaaaattcctggaaatttccatttattgtgaatttacacttaatagaattccagttaattggatttttatttatttttgctttcagaagaacaatgaaacaatttgataaaattatttaaaaacctaacttttgctacaggctcagatagttttagcttgagtggcataatttttcaaaatactaagttgaaggcaatatatgattatcagttaccttattgaagagtaaatactcttgtacctttacgtaaggagaaaagtgtagtaaacatttctaaaatggttttcaacaacagtacaaaggagatacccattaaattggaaattctgttgaaagaccactacatttggtaatcctttccatttagtttgtatgattta

SEQ ID NO: 131074 - DNA, 1001 bp, Homo sapiens
gctgattttctcattagtatgagtgctttgcacataggttttcacacatttttttctaatgggtgaatgaaagtcatcgcttagtagccttttggaacagactgacagcatgtcaatgaaccttgcaaaatcctgttactcaaaaataataataggataattagcctcttgattgagtcttccatctcaccccatattaaagaaatagtggctagcattctcctcatttggattcctgaaactggattctgtttttaaatttccttggaggagattttcttataatactcattcttaagtgtttgcagtcttaggctagtgaaatagtacaatctaatgacctgctcgagagttttctttatctcaccctgggtaagttattaaataacttttatattttttcttagatatcttaatgcaattcagacaatgtgtccacacattcttcgctatttgactacagcagtcataacaaacaaggatgttcgaaaacgtcggcaggttctaaaagatctagttaaagttattcaacaggtaaaactaaaatatatattgatttttttttttaaatacctaagctttaggtctaacctctttttctaaggtaagacttagttcttaaggtacaaacgtttttaaaaataggtggaaggaatacttgaagtttagaaaagagaagaccctcaaatgggcttttgttttccttaagtccaagatacacaagttggatgtggtaggaatgattattactgtctgctagatgaacacttaatatatacattatgtgtatgtgtttctcttattgcaaagagtgaagaaaatctggaacctggaggtgggggtcattacctgtgtaattctacatgggtgaactttatatacaataccgtttcaatagaccccaagttgggcaaaaggtttcaggcagccatgctgattgatatttagtgagcttgtcagcaaaacccgtagattagaaatataacttaaatatttattta

SEQ ID NO: 131075 - DNA, 1126 bp, Homo sapiens
tttataaattagagcgtcttcagtagacattattgaatctgtctctaagaacagggtaataatttggaatgtcgagggatcatgtagagagaaggcatagggggtcggacattgatcataatgacctccgtgcatgccttagaaggggctcatttttaattacagttttgaagttagtgatgtttgtcctcctgcctctttcttatatattaatattttttatgtatatatttttaaatcctttagtctgtgagttctccacttcagtctcttcagcagagaacatggctcattcactggtctctgtttgttttcttcaatcaccccaaaggtcgcgataatattattgacctcttcctttatcagccacagtaagttatttcactgtgtaattttggctttgtttagataaaattacatggagttgtttaaacttaaaatatacttttttctatcatttgaatttgttgtcacctgtttttttttttcttcatgtagtagatttgcttgttactgaaaagtatgcatgtgactcttaagtaaactatttgacagagtgtaccctaagccttttaaagtgctatttaaagtgtggtccctgggccagcagcatagaaatcatatagaatctcaggactcaccctagaactaaattagaatctgcattttaataagatcccaggtaactcatgtaaacatcaaagctttagaaatgaggctctagggcatactacttgaaaggaatacgtgcatctttttatatcatctttgctctgtcaactagcttttgtttaatattttggtgatgagaaattcactgcttatgaactagaccattcttttgtaagctagaaattatttgtaaaatttactcttccagtggaactcaaatacctctgaaacttctgcccattatttcttgtttgtttggaatgacagaaaacaagactgcttcatggaaactctttagatgttttaagataattttttactcctctctgcttccttcaggctaaatatctctagttttattaagtaacacagtttttcagaccctttagtattttgattgcctttttagataatttctattcatattcttacaatctagatgttcataattgaa

SEQ ID NO: 131076 - DNA, 1050 bp, Homo sapiens
aatttggggcaagttacactctatatgtattagttcccattttgaaatggggataaaaaaatatagggtttttgttaggattacaggagaacactaacttgtattgctcagtacataatcctttgataactattaattgttaatcagtgggcctgcttttttcctgtctccctctctccgtactgacttccatttgtgtcataatttggaaatattttttggttctgtacataatttctcattacattgtaaatgagactcacgtgtcttgattttccacatcttcatcctagtgattttagtgacaaattacatgtaaatctaacttggtttctgaagttttaggtgcctgaaatttgattagttatgtataaattatctgaagtgggttatagtaagatgatgctgctgtttcctagttataaaagttattttttattttcttatctagactgattattgaagacctgagtatttttagcaaaggttttttgaaacaaaccagtgtgatccaataaggacttagataattacagttttttgtagaaagctataggtcttttagtaggctagagggatacatgggtataaaacatacattatgttcatttttcaagagtattcacaatataattaattatgatttcttaaacaggttccagcaacagatagaaatgctttaagttcactctggggaaagctggcctctgaaatcttaatgcagaattgggatgcagccatggaagaccttacacggttaaaagagaccatagataataatgtgagttcgactttttcacagttattctctgaaatatctgtgtatccttcacactttctgatgaggaaaatcactatgcattttgggaattaaaaaaaaaaattcatattagcttttgttgaccttacaaaaatcatagtggattagtggcttgactagtttgaatctccttgaatgaaattgtcagacttcttttggctcttagagaaaaaacgtagccttcatttctgttttacagctactgtgccctttttttctatgccagtcaa

SEQ ID NO: 131077 - DNA, 1472 bp, Homo sapiens
caaatcttgtgctggaactcaaatgatattttgattaagtgattgaatactgtgatacaaacactaagttaatatgttttacatcaagaacagtcaacatagagttactggaaattctaaaaagttacattcaattcgttttaaaatttttgtcctgtctgagccacaaaacatttgtgttaggcgagagtttgttgcttcctgttggcatattggcaggctaacagtgccaagcttaaaagaatagatatctttttcttttgatttagatagccactaccacaagatctgtgtatttgtttgaagttttgttaatagcaaatctaaaaatcttgtttggatttgggatgagaaatgtcagtgttttactttttagttaattaattttattttttgcagtggcctttttttatttctaaatacttttctggtggttgattattcttttaaatctgtggttagggaaacataagctatgaaagagctattgtaactatgatctgagattagaatttgactctccaaatgacctattgtaggtcagtgttgtataaattaaagctgtgtgaccctagaatctgcccttaaaaaaaaaaagaaaagactcgtggattttagaatacattgagaattgttcaggtacactctgtttggtgtgaaacttctttgatttatactccaagaaatgtgttaattgaaataaaatgacgaagctggtttggtgggaatttttgaacacttttgctttaacagttattagcactattgattattttgttaaaattttccctcattgtggcctttgatctggctccataatataccccattcccttattcagcagctctttgaaataaaagtgattttagttcctaggactatttgttatacttttggagctgtctctttccctccctcaggatgtaaaatgtatttcctgtttgtatataccacttcatttaaaaatatttttccttgaggctcaagacagtatgagtaatgataatttttagaggcattaggatcttgattgaaattctggctctgttgtatcctgttgtgatgtcactgtaagaattgtgcatttaatattgatcttcaagcatagttttgcatattttaacatctgaaatcagaaagtgtctttactgggtttttggttttagaaacataaaataataatgtatgttaaaattgatggcatttttgactcgatgatatatttttatattcagatatcctttataagaattaaacattttatcctttgtaattagaacaattattttatggattttgataaaccagtttttaaattttcaatgaattttgaaacatttgtgtacttgtgtggctacattaagtcaagataaagaacatttctgtcacctcagaaagaccctttttgttcttttgtggccatactccacccatggtcctgggcatccattgacctgctttctgtccctgta

SEQ ID NO: 131078 - DNA, 1077 bp, Homo sapiens
gcacgaaccctattgtgaactgctcatgcaagggatctaggttgcacgctccttatgcgaatccagctagtgccttgatgatctgaggtggaacagttcatcctgaaaccacctccccgaccccagcccccattagtttacttctttaaataactccagaggtcagttctataaaagtctcccaaaagctgccaccaaaaataaataccataatcagagatacatttgactcataaaatatacattagaagttggtgacttaaacattcatagttttgacctcaaagacttatgaattacaatggggttttaaaactctaaattaaagagaacttaatcttttttttttctttttagtttaggcaggaatatttagatacactctacagatatgcaaaattccagtacgaatgtgggaattactcaggagcagcagaatatctttatttttttagagtgctggtaagtataagtacatgttttttttttttttttttttgtcttttgtaggattcccttggttcttcaaaacatgtatatagatagatttgggtctgttcattaagttttcaacagtcattggcaaaagagaaaaaagtaaagaaaaccctcccactcaaaaacagaaactagaaaccttgtttcagggcctcaaaatttggagggtgatttaacttgtccttgaaatccaaaagtaggaacaattttatgatttttagcattaacagaatcgtatcatgtaatggatttattattataatattatacagcacagtgagtggcacattgtaggtgcttaattaatattgttgagtaaatccattattcctgatttaatactttatcatatatatatatactccttgaacttggctctaaacaactgtggaatcctaacggtatgtgaaatattttatgccttagtagtaacttttttccagttacctctgccttcagctattggaatataaatatcaatggtttcttcattacgtggggtatagatgagtttaaatggtactattaaccatgaagtatcctattaccgtatatttgacaggcttctagatttagtgc

SEQ ID NO: 131079 - DNA, 1259 bp, Homo sapiens
ttgaactcctgacctcaggagatccacctgcctcggcctcccaaagtgctgggattacaggtatcagtcactgcggccggccaggcatgatttattaatcttgtaaatttgtcaaatcgtccttttgaaaaatattaacagattggaggaggggacatttatatataggattagtttcttctagtttgtacatggtacatttatttcagtctctataattagactatattatctattagaaatttgaccacatagagcaaaaaccattctcagtagattaccactaagtagactactgaccttactagaaatagtcagaatcttctggttttattgtctgacaaactgttaaaggccttaccttagttgtggtgaaacacactaattttcagttagggctaaagaaatctgaaagtcaattttaaagtttgtagctctccttgtatacttcttatattcaaaacatgtaatgtcctgcttattttattctggaagtcttttaacatttaagtatttatttaaggtgactttgcgtaggtaataacttagaagttggatatgcttattttgttttctgtggcctttaaaataatgtaatttttgttttttattatttagggatggtaggatgctctttgactacctggcggacaagcatggtgtaagtgttttaaaaatattttaaagttgtcatgttttaataatgctgactaaagactggtttgtacagatgagcttatggcttggcctaagaatataatttccagattaatttattaattataaaatctggttatatttttaaaacttcagtgtttataaattgttgctgacaggaaaatatgtgcttatagctcacctttagatgacagaaattctcaaagcttgtatttattccagagttgtaatagttggcagtaattgttggcattttatattagtgccaatagcaagctaagtattatatattatagggcataggatgccttttcttatggattaacgagtaaggcaaacagaattaaatttgaattagaaatgctttgagcagtagaattaggtagtactttggctgccttgtggaacacaatagcctttgaaattatcaaggtctttataagtccccagattcacaaataaagaaacatcgtaagctttcctaaccgtcactcaatcttatttcccttgtgttaactcaaagcatgaggctttgcatataattaattatttaaggagtccccaactcccaggtcatggac

SEQ ID NO: 131080 - DNA, 1119 bp, Homo sapiens
ggtcttggaactaatgctctggggataccaagggatgactatatgcgggaaaacacacagagatatatacacacatcatgcgcatagacagagctatatattatactaaactacttttatgcttttagaagaagtaattttagatcttcaggtcacatgtaggtgattacaaagggacagcggaaataatccagatgttagactacaacagaaaatttaggatgctgtagtttagtcactcaaagactgggaagtaatgggatcagagcatgaataagatgaatgtacatgtgttcaccagttagaaaaagaggatccttgtagcttaataggtactgagtttgagataaatgaaaggatcatgtgttaaaaacttgtaatcttatacttacagactacctattttcaatgtaaaaacctttttctgacaattcaccctttttaaatttcattgaatatatagtatcgtacttacactttcccggaaataatcagccagaggacagtgattatatacgtgagtggtatgagtagtgcaatacaaagttattcagtgtgatccactgcaaatgttcagtttttgttgaagttcttctatgttggaatttcatgtacatttcataatcagtattgtaatacacctatattaatttttatggggacatatctctgctccattaaatcttcaagcaaaattgtgttcccaaagacacattatagcatatttcttctcatgagaaggataagaaaatgtttttgttttggaaaatgcagtcaggtgcagtagctcatgcctgtaatcccagcactttgggaggccaaggtgggtggatcacttgaggtcaggagtatgagaccagcccggccagcgtggtgaaacctcatctctactaaaaatacaaaaattagctgggcatggtggtgcacgcttgtaatcccagctacttgggaggctgaggcaggaggattgcatgaacccgggaggcggaggtggcagtgagccgagattacaccagtgaactccatccggagtgacagagtgagactccgtctcaaaaaacagtaacaacaaaaatgctcataaggtgggcaactatacacatatatcccctgtccctt

SEQ ID NO: 131081 - DNA, 1022 bp, Homo sapiens
tccttaacattgtagtgctcttctgcatttttaattagctttgagagagaaaagaaccacagtggttgcacaactgaaacagcttcaggcagaaacagaaccaattgtgaagatgtttgaagatccagaaactacaaggcaaatgcagtcaaccaggtaaactcgtcttaattttgaattctaaaaattctcctttctggattaatacaaatgttaattcaaactttatccagtatcccatagtaaaagttcatggtttaaatgagtgctttattcatttttaatttttgtttatccttattttgtaggggccagtataattaataaatgttaatattaacactaagtttttttcctaaaaaaaacttctttagtacttatctatactgattatactacagaaattccatctcctgtttcccccttcctggggacatttggcaatgtctggaaatactttttggttgtcataactggaggggtgctatagggacctagtgagtagaggccagttatgctgttaaacatcctacagtgcataggacaagcactgctgccgctactccccaacaaagaattatccgactgaaaatgtccattaagaaaccctgttccactgtgtggtggctcacacctgtaatctcagcacttggggaggtggaggcaagtgaatccgttgagcctaggagtttgagaccagcctgggcaacatggcgaaaccctctatcttaccaaaaaattaaaaccaataaaaagttagccaggtgtggtggtgtgcgcttgtagtctcagcttacttgctacttgggaggctgaggtcagaggatggcttgagcccgggaggcggaggttgcaatgagtcagtgtcataataccactgcattccaaagtaggtgacataatgagacaccatctcaggaaaaaataaaaaagaaaccctgtgcttgggcaatacctagaaccttagaacacatgggtatctcgttataagagaaacctgagctcactttatccctggctac

SEQ ID NO: 131082 - DNA, 1023 bp, Homo sapiens
ttaccaccatgtactgctttgtatgacatctttcactcagcattgtttgtgagtcatcatgtttttaggatagcagtagtagttcattgatttttcagtgccgaatgttaatctattatgagtatgctgtggtttgttttctcattttaacattgatagacttggctattacaaatagtgctcctgtgtacatttttggaagtgcactttgactatatgcacccatttgttttggatgcctcgaaacaattgctggatcaaaaagtatgtttggctttgggagataaaaatcttacaaagtagttgtattcctgccagaagagaataggttccagttagtctacatccacaccaacactggtattgtcaggattttttaggtttttattgtaatttttagtatgcatttccttatgattaatgacgttgagaaccttttcatgtgtctgttggccatttggttgtcttcttttgcgaagtgcctatcttttagccatttcaattgcaaggtctgtcttgtcttactcatttataggagttctgcatgtaatttggaaggttcgattttgctctcatggctaaataccctttgaccaccttcatctttattttttgtgggcagtgaaatattgtggcattttcttggatttttctttccttgcaaaattaagttcagtacagaaatcttttcttttgctgaagcatttctgtccgtgaatattttgtagaatctttacatattactcagtacacttcatgttgttgtgagtttgtgtatatgtatctatttgctccctgtactataggttaaattatgcttttttggatcctttgcaaagcaaaagcctgatctgacatggttgacttaaaaacttggtgcaggttgtttcagcaatgtggatggagaagcatataggagtttattactgattacctggatgtggagaagtgacagctatatgtgctttacaggaaagatggcgtgggttttatttatacacagccttgcctagaaagggtaag

SEQ ID NO: 131083 - DNA, 2077 bp, Homo sapiens
aaatgtgtaattctggaacttcattttaaagcatatgtcagtcctaaaagttttattggacttgaaagttttggctaaaagaaaattgacattagttataccgtgagtttattgggaaattgatgcattttaataatgcaaagtaatttgcagtgatgaaggaattcgaattttttcagaaaaataagtgagttctgtttctggaagcagactacaatataagtctacttagggaactctagatttggggagtggattttgtgtagcaaaagacaaaaagcaataaaacaaaaacgtcccaaaaaccagcgtccaggtgttgtggctcgttagacaggtataatcctcatattcatatgcaccttttctaaacatagacaactctaaagttgttgacgttaggtaacggctaagatcattttcagtaaatgtccaagaatgtcttgtcatgtaaaactttctcttgatatatttttgctttgattcttctttttacacctgtattttagaccttgagtaaaacattcgcatctgcattgttttcttttctggaaaagtgaggacaaaagatctagtaaaaatgctatattttgaaagcctttaccagctgcttgtagaagtacttctgaactagctgaactttatatatttttgtgttctttataatttcattttttttatggcacacagaaggaaaggaggaatatgtaaatgtgaattagattttcatagggctagacgaaaactatgaactgcaggcagttgagaatcagtgggaaaaactgcccaatacccacctctttggagaaaatgttggtaagatagctgtaatacaccaagaggaagacagatgctggagtatttaattagcaatttctaagtacatttgactcttggacagtacaggggttaggaacgctgagctctcgcagtcaaaaatccgttataagttttgactcccccaaaacttaatatatcctaatgctgacaggaaggcttactgagaacatggacagtcctgtgttgtatgtgttctatactgtattattacaataaagtaagctagagaaaataaaatggtcttaaattataaggaagagaaaatacatttactttttagtaagtggaagtacatcatcatgaaggtcttcattgtcttcatattgagtaggctgaggaggaggagtaaaaggaggggttggtcttgctgtttcaggggtagcagaggtggaagaagtagaggaagtggatgggaagtcaggaaaggcaggcacacttggtgtaacttttattgaaaaaaagttgtgtatacgtggacctgtgtggttcaaacccttgtcgtccaagggttaattgtatagggccatataactgagaaatccaagataaaacccagacatctcaccactaaacaacttacctatcctttagagttgaatgtttttgatataaggtaaaaataaatgtcgaagaggtaggtactggtagagtgctatcaaaattgagattttgttatcttcagtgagcaaagaggactttgaggaggtgaggctttgagtcttgaaggcaaaatggttagaatagagtcagtgatcctgctatgtgaggatacagcagccccccccccccacacccccttagcagtttcaatttctgcagttccagttactcatggtccaaaaatattaaatggaaaattccagaaattagcaattcgtaagttttaaattgttcgcccttctgggtagtaggatgaaatctgtctcgctctcttgcttaaaactgggacatgaatcatccttttgtccaatgtatccacactgtatatgctaacttaattgttctattttgttattgttcatctcttgttcccagtttataaattaaactttatcataggtatgcatgtataggaaaaaaacagtaaatataggattggggctatctgcagtttcaggcagcagccgctggggggtcttggaacatttagctcatggataaggggagactattacattgcaccaagagaaaaacagtttcatatatttgtagtacattggagaatataagcttcatg

SEQ ID NO: 131084 - DNA, 1029 bp, Homo sapiens
attgttgaaacattagaaaagaattattggacaggacaaaagaatgactaagcattaaaaaaaaaatgataaactgaacttcatcagaactaaaaacttcacaaggcaccatttagaaaataaaatattcaagcaagagaatagggagaaatattcacagcacatatatctgacaaagcttttatccagaatatataaagacctcctacaaatcagcagtaaaaaaggtaaaataacgcaattttttaaatgggtaaagactaaagaagatacttcaaaaagaagttatttgaatatctaagcaaacatgacaaggttttcaacctcattagtcatcaaaaaatgtaaattaaagccatattgagacagtattccacacactctagaatgtctgaattaaaaaaaaaaaaattaacaccaccatgattaacaggctccatgcctgccagctgataagatttggttacctttccatggcttcaaatctcatgcctgttaatcgcttgactctgtgactgccagggaactgtcttctcagctcttgaagacaaaactgaaaaaataagggttgagtagtaattacattatttatactaaatgggctacaatggatggcctatatagtcttcaatgtgtcttcttgaataatttcattagtgtcatctaataacatgaagtgaaattaatcagtaacaaataatggattgaaagaagcactatgacattacagtgaaggcaacaatcagttctcagaaactgatcatgctcttaaccaggaaaatgaacagattatgagaaccactaataactctttaagtactaatatcatattattcctccttaaaaactacttctataatgtgtcaggcccctacttaaatgacaacagcgcctggcgttttcttcctaattacagcataagcattctcctggtaagaactaagttttttagtagtcatctcaagttcctagcaaataacataaacactgattaattttgccctgttgaaattttatattaatcagcca

SEQ ID NO: 131085 - DNA, 1038 bp, Homo sapiens
aagagtagagatactgtttctgttcctatatccttaggaagcactgtgctagacattgaaggagaaaacatagccataaaagacctagaactaataaagtctataagtagacttcactaatatgcaacagctaaagttactccacagaagacatcgccgtttctttttccaaagcaacttagtatctcaaaggcgggaaagtctagttttattctcatttactgttgctccctgcattgttgaaaagtgatcacgtgaccttttatttgtcttatgcctctgtgtttctggatatccagtatagaaatgaagttgttcattgaagctttaagcagctgtacttcctattcacatgcattcattattctttcagagaacatttgttatgcttgcagtgtgcatggtagtgagaacaaacacaaggatgaattagccttttctgtgcttctagtgaggtagcatgatgtgatgaacatgctgtagactttgaaactgatttattaaattctctttctttgatgacttgctgcatgggttttgagtctggaaggccttaaaggatgagtgtgacttaaatgatacaaagacattgtatcccaagtgaatgcatgaataagcctttattaaagtacaagcattattaaagtacaaggcctgcttaggaaagaaggaataaggtaattagaatggaagtttcaaaattttttatttgaaagaatggtggaatggcataccttcttcccatcttttttaaagttctgaaatactctattgagaaagtcatacacatgttaaaaattgtggacaatataaaatgatatggtaaaaaaaaaataagtctgttcctctatccctgagctcaggtcctccttctcttagggaagcactttttttttattttgagatggagtcttgctctgtcgccaggctgtggctcactgcaacctccgcctcccgggttcaagtgattctcctgcctcagcctcccgggtagctgggactacaggcacgtgccaccatgcccagctaatttttgta

SEQ ID NO: 131086 - DNA, 1028 bp, Homo sapiens
ttgaataatggagtaaattgtttgtggttcgtggtattcttttagtagcgtgtttttcactatcatacatgggttcttcagaactattgttgcatttcttaatgcctccagattgtttattcagaacatcgattaaggctgcagacaaattatatgaattgatattggctaaaaatcttctaaactttgtgaggtcaaaaaatgtaattattagcatttattaagggatgatataatttgtttattgagctgtgattttgttaatttttaaaaaacatttaagtgaagcatgttcagttaaaagaacaacttatatggtcatccagatttctactttacaactgagaaaaagctgcagctttctacagaacagagtataaatatgaggaaaatggtgaaagggagtgatagaattgaagaaaatgatgatgatgtgataatgaagaaaggaaatgtttatcagatatttactatggaccatcactgagctaaacactttacatatattatcccattaattgtcatcataatcctttcagatattgtctttattctataggcatacaaggtcatagagaagttaagtgacttgcccaagatcttacagttagtaagaaattctggataggtactttgatttcagaaattaaggctctttatcatgaggaaagaagcaatggtagtaaatgggattgagagtaggtagttaatacacgtgacaaccagctgttacccctacagaaattttattatttaaatttagtcagttaacgagactgtacttgctgctgttgaagagtatgtgaagactaataacttgtttttatttttaaaaatctaagtataatttttattttatagaatattatgctaaggaagctatgatagaattttttttttttttttttttttttttttgagacaggatctcgctctgttgcccaggctggattgcagtgaggcaattatagctcactgtaacctctgactcctgggctcaagcgatctcccacctcagcttcctgatt

SEQ ID NO: 131087 - DNA, 1672 bp, Homo sapiens
taataagtttagcttggcctcagttatagtatggtttattgtttatccttctgtatttgaagcaaacataaatagagaggacgtaaatttaataatttatacagtatgctccagtccctgactgtttacttcagccagtactgctttctcctaggcctttgctcatgtgttcttcccactatgcagtttccataaataacttcctgttttgttttttaatgtctacttactctttgtttcagtacacgtatcatatgtgggaccgtctttgctttctgtctttccagttcgtccactctgacacagcatgtgtcagaatctcttccttattttcataacaccctagatatccctgtcattgctcttactgcattaacttttttatttgatacgtttttgtcatgagaatgagcttctgcaaggaattatcatttcttttttatctttatattttcattgtgtagcacaatattggcaaacagtagaagtctggtacatatttgatgaatgcacaataaatggcattgatttttatgtttatcattttaaaaactttagaatacagcttctaattgttttgcttatcatacaatatttatttcaggactgtattattcttgtgaaagactcataggtagattttctcttaaaattgtgaaaaagttgtcagaagacatatttatataatgatattcaaaggccatgccatggtgagattttttttcccctaatctccactgttcctccccctcttaggatacagatcttatgaatgagacagagtaaagggctttaagttggataaagattaagattccctgctggttaataattatcagaatctggatgattatttatttggatgaaacgatgcatacattgtgtgcatcaaaagtaaagcatatgtgattgttagaggaatgtttgaattccccagtgggatgtcatggggtatgtttataaactcccactaagcagtagttctacaatggaatttctctggcattgagataataatttgcacagtcaaattaccttctttacaaaaccccaaggaatcataagggcctaatcctttattaatgtcaacccacaggctgcaagaaagcgtaagattgccattcgaaaagcccaggggaaaaatgtggaggccattcgggagctgaatgagtatctggaacagtgagtattttacaagaggattgtgttttgttattctgataaatcttttttaattaaaatggaatttgcatttgattttcctgtttgttttcatgctgttcatttacagaatatctacacacttacttttttttcttttcctctcaccagatttgttggagaccaagaagcctggcatgaacttgcagaactttacatcaatgaacatgagtaagttattaaacacacaacattttgttgagtgcagttttcatcactgtaagttcagaaagcactgtggtttccaaaggattggtgagagggtgtgaatcatgtcatttgaaatgagaaacagaacaaatcaacaattaaatgaaaaagaacaaatcagtaattcactggtcataataagtgaatagctttaactaggtcatttgtgttttgccaaattgtttatgtttaggaaataagtttttctttcaaatatagatggcattctttggaaataaaa

SEQ ID NO: 131088 - DNA, 1030 bp, Homo sapiens
tattttgaataaactatactgaatattgctgtacaggtcttttggtggaatatatgtgcagttctgtatacctttgagtgaaaatatgggtcatagaatgtatgtatatttaactttagtagttaaaggcaattttccaaattagtttactcccaccagcggtaagagttctaatagccccacatcttcaccaacacatggttctgtcagtctttgtaattacagccattctggtacatgtgtagagtggtacttcatggttttattttgcatgtccctgatgatcagttgccatttggatgtcctctttcgtgaaatgtttttctcattggtttgcatgacttatttctttagttttttgcttatgagcccttttttagttatatgtataagcaaatatgtataacttcttacttttttgctcatatgatcttgatgaatagaagttctgaaatgaaatgtgttcgaatgcctcagtcatttgtttgtgttttttgtgttctgtttaagaaatcttttgctactcacggtcataaagaattctgtgtgtcttcagaatttctattcttttacttttcgtatttaatccacaacccatttggaattgatttatttttaatttttaatttttatttttttaagacagaatctggttggttctgttgcccaggctggagtgcagtggcatgatcatggctcactacaccctcaaccacccaggttgagttatcctcctgcctcagcctcccaactagctggtactgtagacgcatgtcaccgtgctcggctaacttttaaattttttgtagagatgaggtccagctgtattgcacaggctggtctcaaactcctggcctcaagtaatcctcctgtctcagcctcccaatggagtgctaggattataggtgtgagccaccgcatctggcctggaattgatttttatgtatgatgtgaaatagggggtccattgctccccatatggatatccagtgtttctgtccatctttgtgttccatcatgagtcccgtcc

SEQ ID NO: 131089 - DNA, 2413 bp, Homo sapiens
acttgaaaacactagatgttgctaataccaagtattttaatcatatttaaccagggagaaaatgggtaacatatatatatataaaatatatacataatatataattaatatatatacatatatataatatatataggtaacatatatatataaaatatatacataatatataattaatatatatacatatatataatatatatatgtatatatatatacacacacacacacatacacacacaataaactttctcccatctccatcaaggaacacttacttatctagtaaatcttttgttttaaatcagactgataaatgatgggaattgtcagtccagttaacaaactcattttgaaatcagcatgtggtattcaacagtgtttccctccagcggttatgtgtatgatattgaatttaatatgccatgaatttgcttttaaatacacaaatatagggtatattttgtgtatatattgatgtatttattttgttttcatagtaaaatccaatcccaattagttttataatgtaaataaattacaattaataaagtagaaatgcatattttaaaacatgtttacattgttttaatgtgtagcataggtttttacttgacagctctttgcagaaccatatcatttagttaactaataaatctggaaacttaaaaaaaattatgagctactttaaataattttagagagtacttgcaactttaaaatgtttagtgaaataacttgtatttgtattgtacctttgtttgaaattgtaaaaatctgtttagacatcagacaagtggaagtggttcacactgctacactacataaatataagctaaattgcattttaaaattatactttttatttcattattttggtctgaataagatagtttcaaatacatgattttatgggttattatattatgtaaacacttaaactggccaagtgtgcagtgaactctctgtacacttcagctgaaggtaagaccttaaaggaaaatgtccttaatactcaaattttattcttattgaaaaagcaaagaatatatttgatttcctactagtgataaaatagtcaatgttaagtttcattaacagtgtgaagattgtcatttttaacctgccactgaaattgagcctaattgagctttttttttttttttttaattagtttgcaggtcgaagtaagaaggaaaccaaatattctcttaaggctgtcgaagacatgttggaaacattgcagatcacccagtcttaaggtttcaaaaactctttgacattagatttcacaactgcacaattgaacttattggcctgtaacttatttactaaatgctcagtgctatttatatactacagtaattttctgttaagaaggcagttgtaaagaatgtgtttatataaacctaaaaatgccttttactgctaagtggggagatgggggaaatccatggaagagagatttaagacttattgattgtacatcagtctcttcatatcacatatacatgtatatatataaaactctaatgtagtataaccttgttaaataaaccatgatgatttattaaacttgcatatgaagattctaacttcattttgttatactcacagtggatatattgtttaagaactcagtttctagttaactccttactggtgatagcaaagtcacagcatatgtagctgaccgaagcagattattttgactttgtttatattgtcgaattggattttgctgtacattccagtgggctatttgaattgttttatctgctgtaatatccttctgatgaatcttgcttaaaatatgtcattctccaaagttcagcaatatttctttgtaaaatttttgttttgatataggacataattgagatttttacatataaaatgccttaagataaatatgtgttacgacactttaacttttatgcaagttatatttattgaatcctttaatagtaaattacatgaaagaatattaaagaatcataaagagtagggattaaaggggttgtagttatttttaattttgaaaaaaataagaaaattaaaactatccttagaaacaaaaatgttaaaattttcctattctatcattaccttagttagaattttttatttttctcttttcataataaacaaccattatgctaccttcaacagtatttgacatgtttcaacaaaatagaagagacttgaaagttaaatttcatttagacacaaatcagtttttaaaatagcaactgttcaccgcaaatatttatggtatttgtttataataaatatatttaaatttatttttactaaaaatatacagaggcatctacagacttgtcattgctgctttggacaagtggggattgtggaggaattgacaatctagaagtgtttagaaagaaaagta

SEQ ID NO: 131090 - DNA, 1038 bp, Homo sapiens
agtagcttcttgttacttgcatcattatattccaagaacaccaaatgcaactgcagttgtgtgccatacttactctagatataactgactacatttgtagtataataaaattttataataatattaaaacccaaaagttaaaaagagtattatgctttgtcagtttacatggcattttttcaagtggaattttaatatgggaaattaaactatgtagaatgatgttttttgttttctttttagttaaagaaaaactatcatcacctataccattgtgtaagttttattagaacaagtgaaaatctaaatgaactagtttaaaaattgtttcccttcaaattttatgagagaaatagaataaaaagtgaactcataagtatctggtatttcttcttaaaaattttttcagtatacgttttagatttcgttttactacacacttagctcaagcttgtcttctaaattaatctgcatctactacattgacctataatgcttgatgatgttcataaagattatcttcagtcatcctaagagtgcctttttaatattaaggacatagaagcaccctcttagtattggttctaaatatgaggaatgaactctcaaatgctcatatattaaattatattctccataatttgtagatttgcagattatgttcattgtaatttgtgtatttctttttatctgttgaataatggcagtctcagaggcaaagtttagttaaatatctactaacttaatgtaaagcattgtatatactctaactatggtacacaattatattccctggtttctggaagcttataaaatgaatataccagtggtcctggtatgtacaaaacagaaggctgcatggagacaaaaatctgatgcttagatcttgccttcaaggagcttgtaatttagtttgtagataatgcataagaatgaaaattatttccatataatcagactatggctttccagtaggtcagtataaaagtgattttttttttttttttgagatggggtcttaccttttttttttttttt

SEQ ID NO: 131091 - DNA, 1026 bp, Homo sapiens
attgtaatacagtagaaaatttggaaattggaaaggaccagtgaatgtttccttttgagtcaagaatacattttaaaatgactagtagttctagataaatcaggttttccaacttattcataatgtggaagaatagagtatattttcatagatcctgcaacagcagctttggtaagggaagtatgcaactaaaaccaatttcaaattttgtttctgatttccagaatggttttctgtcataactctggaaaaccagcgccatgaatttttaaaattatcattaggcagctctggcataatttatgttaagaggttttggcctgtttatgtaccctggaatttgccaaaattagtaatgtgatattccatatttcacaaacctatagagcaatataaataaggacacatgcctattggggagcactgtttgtttaaattcttgttttgtggcattcatgaaatgcaggggacttccaattcaaattctacaatattaggcagcaagttgtactgtgaaccaaaccagatggtgatcagctctattcctattatcaattcagtgcagcgatggttaccagatcttacttgtgacgttaacatttggaacagattagcagcagttagcctgaaataagaaacctccattttgctaaaaggttcagaacatatcatgttgtaaaatcagaaagactggtaagaaaacttatggaggaaagagttcactgtctaccttggttttcccctgcaggacgtgttatttcccttttatgagtgtctattcaatggaaatttaatgtggggtattgagaggattagggcctattagtctatcaccctcctgaggtgctctgtccctcagcttgtcgaatttatttcactgtagccacgatcagtctaggccttgggacaagagggattgtctgcattttcggaggtttcctttgcaagaagtttatgcacacacatacatacacacagcccttacaagttcagagtttcatccaggctctgaaattcatgaaacat

SEQ ID NO: 131092 - DNA, 1026 bp, Homo sapiens
tctactttgtgaaaaagaactaagcactaatcaataataaggcttacatctaattctcaaaggtgcttatccattttcttgctaaattatccttcttgtaatttggctaaacactaaaacatggaatttttagtttgaatattttgaagtttgaggatgttgggctttccttattgtaaaaaatgttatgtttgaaattattcctgttttcaaaaatggtaattaagtcattaggataaactttctaataaaaaaaaattatgtaaatcattgtaagaccaatgtgaatttaaaccacagtgttggtgccagatattagccagggtcacaggctcttttttaaaatgaagtcaaattagttactgatataagttttatattttgtgattttgccatcatactggttatctgtgctcttgaagtctgctggttctcacaccagcagcaagaggcaaggcatgagacattttaaatatatttccagacatctaaacatctagacaggcctgagtcatgattggctctggtgtgcttccaggtaacatcttgttattgctgtttggggaaaaccaccaatagaattgcagctagacttttggggactgtgcctcgcaggctgtatcacttgctgtaggccaagcaacgagcacttccctcatggtagcaacagtccttaagcccaaagccaaaaaaaaataaaatggaaagagagattcaatacactgatttaatggggactgtagtcatcgtcagaactcacctcccactcacagtggtctagatgtcattcagcaactgtgaactcttgcctcatgcagcacaaactcttctctaagagcagcatgatgagcaaggtgctcactttgcaagacacacactgggtgttcacagtgacagaccgcctcattatggtgacggttcagaaaagggatgggaaatgcagcctcagaaataccttacattttgcaactctgcctggaggtttttccaacctgtgctctaagagttgttgtaacttccatgatt

SEQ ID NO: 131093 - DNA, 1521 bp, Homo sapiens
gttgctaagcagcaagtagcaagcctagaaaccaatgatcctattttaggatttcaggcaacaaatgagagattatttgttcttactaccaaaaacctctttttaataaaagtaaatacagagaattaattattctaacatattggcctctttgtactggaaaagtattcagtggtacctggaggtctggacagttatactgtaacctcttaagttttaatgtgctaaatatatcttgtatgattttttattttttaataacattggaaatatattcaagagattatgattctgtaaagctgtggaatgaagctgcagatttagagaacattggcttctgaaaaaaaaaaagagtgaagatagtactagcaagtatacttattttttaaaacaggctagaatctcatgttttatatgaaagatgtacaattcagtgtttaaaaataaaaatatttattgtgtactctgttcgttgattagttgctacaggctgtacctataagatgtacaggataatagttaaatgttgagtattgtacatatgtatttaagtggattgaataactgagtctacatggaggaggaaatgctagagaacagcaggtctaatattttttaagtttactgagagacctttattattattttcaaattaagtatagctttatgtaacttttagccagttgctctgccacagacatagacaaagagagataagatttcacattatccatcactgcataacaaaccacaccaaaactcagtggtttaaaacaaggacttttattatttttcacgattcagtgagttggctgtctctgctgtacagggcctctcagcctccagtagactagacgaatcttctttccatagtagagaaaacatcttaagagagcaagctccaatatgcaagagcttatcgatcctgtacatctatcatatttactaatgttccattggacaaagcaaatcacatggccaagtctagagtcagaatgaggggactacacaagctgacagcggatggtatgactcattgggggccattgatggaacaatcttaccacacaaggacaaattataatttatccttgtggctctctttatttttctaacaacttcaacaaaataatcctgtttatatgttatagtttcttgccacaaattttgttttttcaaacttacctttccaggtttgttttagtatgtatgtacctggaaatttttattactttttataccatttcaagatatgtatcttatataaacctcaagttggattttatattttaataaggaagttaagaccttcatttaagaggcagaagattaagataagaaatataagatagaaaagctttgttcctaacatatcttttgcctgtctgggcaagtatttgactcaactaaattttaatgaacgaatgaatgacagagaggaggaaaaaagatgaggattgcatacatgttctaaaccctttgtcagattgcagtttcctagagagtattgaggtgctaggt

SEQ ID NO: 131094 - DNA, 1038 bp, Homo sapiens
tttataagtactgtgcatattttatattttctacatttgatgtgatttttgttggtattctgtttcgtattttcaactctgataataacatttctcataaagaagactatccttacaacatgtcttcatttagaaaaagtattgctgtagatgaaattcagtgagtttcaatttgatgattttgtattaaaatgcatttctttaggcatcaatattgcagtaacaattattgatgtgttacaataacaaatgttgacattattgacatattgacattgatactttaattaagcagtacgtttaagtaaatagttttaaacatctgagtgtgaattccagcattgtgatatttctctttagcctagaacaagttactcaaactctccaagcctgttctttcatcccttaaatgaagataataatagccttgcgagttgttaagattagtatttataacatgcctggttataaatgttatgagagtgtgctcataaattctggtagtgtcattgttcttggtaattattacaagttagcattagtaaacttcatgtgtgtattctatggcctaaaaatagtctgcttataaaattggtgctttatatcagcagtccccaacctttttggcaccagggaccagttttgtggaagacagtttttccatgggcctgtgggggcttggtggatggtttcaggatgaaactgttccacctcagatcatcaggtattagttagattctcataaggcagacagcctagatcccttgcatgtgcatttcacaatagtgttcaccctcctgtgagaatctaattccactgctgatctgacaggaggtggagctcaggcagtaatgctcccttgcctgctgctcatctcttgctgtgcggcccagttcctaaaaggccactgactggtaccagtctgcggctcagtgactggggacccctgctttatatcgtgttttaaactatttactaacaattaagaggtggtatatcacgtggtgattaagaacatagactctgggtccaaatttc

SEQ ID NO: 131095 - DNA, 1030 bp, Homo sapiens
aggataatctctccatcccaggaccttaaacttaaccacatctacaaagtcccttttgctatataaggtaacttattcacaggttccaagggatttagatgtggacatctttgggggacgttattcatcctgccacaggtggtatgtaaaaatattaataatctaatataatatgataaataatttgataggaataacatacatgatgctggagttctcagaattcaagcagctcatataaccacgagagtgggggaattctgagagcaactgatggttgaattgagtcttagaggataagtgggaatctatcaggtaaaaaaaatacaaggagtccaaacagaatgctatgtcaaaggtatggcaaagacaagctgtatgaaattgctagtttcacaattaacaacacttgacacagtcgccataatggaaatatgcgtaaggtaagtggctgctgaagtgaagaaacatctaagtcagagtgaggggctcataataaggcacctaccttcattcttatcctcttattttcatgattgatctcccttggtggtcacctttcacttcgtggttcaaggtcctctattcttttctcactgctgtctcttcaagtatggatggaccagagatcattcaattatattaatcctcataatattcaatacattctttaggcacttggctcatgaaagtagatgtattgttgtgaaaatattgtttcaacttgtattttattttagctgttgtttatttttcttctgtgaaagcccttggttaaaaaaaatagagtatcagagttggagtacagggaagagagctgaagcagtgttaggtctgtcaaacataataataaaaggccagttaggtagtggtgactttgaaaataaacctcatctagccactgatcatcgggagtaaggagagaaaagaaatagtctgtggtctctgtgtgctggccttctccccttattttgtagagagcaagcactggctctacgaaaaagccctatttccctggcattgctgggga

SEQ ID NO: 131096 - DNA, 1035 bp, Homo sapiens
ggtaacatattttatgttcttttgaactagggattcactctgtgtgtgtgtgtgtttgtttaaaggaaagaaggagtgaaagagggaggaagggagggagagagggaagaaatgaggataaaggattgctatcattagtattttatgagtgctttatctcctcaagcatcaggtaagtctggaagaggaaaatttcatgttaattgctgcaaatctttgagtgaaaattcctcaaagagatctgtgcatgtttgtttataattacgttttgtgagatgatcactagtaaatatactaaaattcttttagataggttttgtgtgtgtgtatgctttctctaattttttattacatgatgcatttttcttttcccaatagaacctctgtattactggcaacagactgaagatgatttgacagtaaccatacggcttccagaagacagtactaaggaggacattcaaatacagtttttgcctgatcacatcaacattgtactgaaggatcaccagtttttagaaggaaaactctattcatctattgatcatgaaagcagtacatggataattaaagagagtaataggtatttttttttaattttactttaatattctattatctttttttcttttctttttactctttccacagtggttacatcagagattaatacaatagttctgtctgtattgctggttacttttcttaagatatattaaaaatagaattactgtgtcaaagagcatatttctagttgaaattaaagatagtagcatagctatcacttggagaatatggtagtgctttgttttaccagctctggatacaataataatcataggtgaaaatggctattttaaattgcactttttcaaactttttaatagaaataatttttttaactttagtttgctggcttgataatatatttccattctttaaaattttaaatatacaaaaggatgtagagtgagaagtctgcctccaacacaagcctatgggtcacccatcctcccactcctcacaatcagtgtt

SEQ ID NO: 131097 - DNA, 1046 bp, Homo sapiens
aaaacttagtgacttgaaacaataaccacttaccatatcacacagtttctgtggtcagaaatcagggagtagttcaggtgggtggtctggctcatgattttttcatgagtttatagccaaaacgatagccagggctgcagtcatctgaagccttgactaggactaaaggatacattttcgaaatgattaactcatggaatgctgattgttggcaagagccatcatttcctccccatgtgggtctgtccatggggctaccttaagcatattcatagcatggtagctagccaccctcagaatgtgtgatccaagagagagagtgaagtagaagatgtaaagtcttttatgacctagttctagaagtcatatgccatctgtcacatctactgtatatttttgttaaaactgaatcagtaggacagctcacatcaaaggaagaggaattagactccaactcttaaaaaggagagaaaccaccacaccgcagatatttattttgtgtgtgtggatcagtgaagaggaagagattaatgtataatgtttggtctttttaggacactgccttaggaaaaccacgagaggtgtttcgacttcctacagatttgacagcatgtgacaaccgtctttgtgcatctatccatttctcatcttctacctgggttaccttgtcagatggaactggaagattgtatgtcattggaacaggtgaacgtggaaatagcgcttctgaaaaatgggaggtgagggtttgtttaagacttatgcgaagtccagaaagtatatgtaaattacaccctacttattttaaaatgacacttttcaaggatggtttacatgtgatctgttgtttgtttgatatataatgttttggatctctttttaactaaattataacatatatatttttcacaaactgttacattaaccactcctgttttgatctggagtcagtgcagttgtcaagaattgcattcatttttcagcagacatcttatatgcgtagagtacttcattaagcattggcgttgcctcctccttcttgaaga

SEQ ID NO: 131098 - DNA, 1030 bp, Homo sapiens
gtagaggcctgaagaaaaactgaatatagtagttacattcaaggttgatttggggggttggggatgggtatactagaaattgtattgagatctgaagtattaatttatttagaaaatcttcagaagtggtttcttctcaagcaaatgtggagtaggggaaagaaaaccaacttttggagtagggttttatcaggatttgagtcttggccctgtcattttctagcagtggagctccaggcaaattatttaatctttttgaacctctcttctaagtgtagttaataattttaacttcatagagtttggtgataaatacatgacatggcaaaaagtcaaagcacttatttaataaaattcttatacattatactgattcagtaagtattccgttcatcaatgaaattttaatccttctgcagtcagctgtgtaatgttgccttagaatgattttcagtgttagcccttgaacgtagttacattaactctttttgtgaggaaaaagaaaatgattatgtgagagctggacattatagatgtcagttagcatataaagtgttgttatgagggcatgtagtgaaattgtcaatagaggttattcagatataagtaaatgctatattttgggatttagagaaaaagatattttattgcttatagtccatttaaaattaaactgtactttgaaaattagatctaaacaatcagaaacatttagtttgctttcactttaactgtcattaatgcaagtaagagagccactatgtgtttccttttgtgttttaatttaattttgttttcacatttagatactcaagtatcttaatcattctattggatattgtacccatttatctgattgataattagacttctagcaacctccgtcatgtataaccaggtattttaaagaaaatggcttaaaatgctcataattgtgtataaaatgaagaatagtaatttaacaagtttatctctacgttcttcccagtaatggtttattagattaaatgcagtgtggggccatgtagta

SEQ ID NO: 131099 - DNA, 1063 bp, Homo sapiens
gagggcttacatttatacttaatttaatctagttcccaatattcttgggctaatattaccatcttgctcttctcattatgccctgtttgttctttgttccttggtgtctttgttcctacttttttgcaggaggaattaatcacagtttttctttttaaaaaaaatgtccttagaactcgatttaatttcctcttttggctttttatttaaacctgtttgtattattattttttaaatggttgatacagaggttatagtgttttccttgacttaccacagtctgcctctaattaatattattttactttaaaaacaatgtgaaaactttacaacaatataattcctttcacttaccctctcattgtttgagctaattttatcatatgtttttcaccttcatatgctggaaactccacaatacattgttaatatatttgcttcaaacagccaataatctgttaatagcttcctaagtactctattccttctagccctcctgcgcattgcatctacagagtagtctgtctgatttgcgtgtttaatattatcacttgctaaaattcttttaatatttccttcatggcaaaatccatgtttttaatatgtaatttaaaaataggcaatgtgttcatgtaatttaaaaaccaaaaaagttataaaaggtatttagtgaagcctccttgatcccatcttttatctatcctatctccagtatccattatttcccctgcaatgtctttattggttttgtgtgtctttccagatgtggtaggttatttgttgttgttttttgcaagtataaacacaaaatgatgttgcgggaagtcagggaccccaaatggagggaccagctgaagccatggcagaagaacgtagattgtgaagatttcatggacatatattagctccccaaattaatacttttgtaatttcttatgcctgtctttactgcaatctcttaaacataaattgtaaagatttcatggacacttatcacttccccaatcagtacccttgtgatttcctatgcttgtcttttctttaatctcttaatcctgtcagc

SEQ ID NO: 131100 - DNA, 1049 bp, Homo sapiens
ccgtttcttagaagagaaactacattccagtcatagcatttttaattactcagttcctggcacattaagaactctggtagagaacatctctagaagatagtgaggaaaagtggatttactcccacactgctactccttgctttatctgtagctggtagaatatccttactcttgtttttacaacttaacggcattttcgttatgatagagcccagagatctgcattttaaaattcacacccctgctgattctgatgcatgttttcagagatcacactttgagaaatagtgatctacagttaattataataacagacattaaagtataaaataagtttatgctaattgatttattaaattcagaaatatttaccgagtacctgttttgtgttacgtcctgataatatcaaaatgaacaagacaccttccgtaacaaaagaggactattagctagttaggaagaaaattgtaaacagataattgtaaaacaatatgggaaggcagtgatagggatatgtacaaaatacaatggtagtacttgaatatctttcctaaactagtctggggatctgggaaggcgtcttggaggagttaatatctaagttgagctttgaagggtaggttaagagttgactaggatgagagaggataagcttgatttttctttttatttttttccttttcctctttgccaccgtgtttcttccagtcaccccatgtcagtagatggtatcaccatgtttagttagtgcattagaaagtgaagccaaaattcagtgtctcaaaacaagaagcagttattattgctcacaagtctacgggtcagctgagtggttcttctagtcctagttgggctcattgatgcatccttgttcagtaatggatctgctgggaagctctgctcatttggctggacttcctcatatgtttggagggtgggggtagggtctcagactataagcttgtttaagattctttcacatggtctcctcttgacttttctccgtgtggtctcttatcctttagccgactagactagcccaggttggt

SEQ ID NO: 131101 - DNA, 1098 bp, Homo sapiens
gaaaggaacggagtacgaagggcgccgccgcttcccacctgcgtcaagctccagctggtaacaaggcagcggctcaagagagagcttgtaaccctcgaagcggggatccaacagaggtctcttcacccgtagggagcaattagccgccacctccatcgctttccagggccgcagcgtgagaattaataaagcccttgttgaaaggtccgcgcttcacgcctcgcacagagactgggaagcggcgtggttcccatcccagaaaacactgcggtgcgaactgccttctgggaaatgtagtgtccgtgaaaaagttgagactgttgcatgctgggctatgtagttctcctggtacttaacgcgcgcgcgacggcaaggtctgaactctgttacccagaggccctagcaaccaggaggcggcccgcgctggttaaattctcacattataggcagggtggcgagaccccgccccggaaatgcgtgttctagctttctgtgtgcttaggtgcccgagctactgagggtctaagtccgggcagccgaagagtgtggtaggtaacggtcctcagcgcaagggtcatttcgtcgctgggaagggacggccctcgcccgcggtgatggtggtgagctatgcccgtggtcctcagggccgggacccgggcccagcccaggctcctttcgatgtactgtctttcgttagcgtccccgacccgcgctcgcgggcctgtagggctctccgacagggcgtgctaccggagttggcctgaaaccagtcctcgctttgttttctggctcctcctctcccgcctctcccgctgtctccgccctgttctattttccctaagaatgtctgaactgggagggataccctagcgcccttgttttaccagtgagaaaactgaggcctttaagaattaagtgacttgtccaaggtcactatccgtattttaggagccaagacgagatcaagttcaatattccaggagtggtactgactagaccttgtagttattttgaaaatgttagcctccaattacaaaagcaagcatttcctagttctcactcaacttctccttttccctgttcctctcaaaaaagaaa

SEQ ID NO: 131102 - DNA, 1764 bp, Homo sapiens
ttttatttttttactaatagtatttaatctttttttgatgtttagtatgtatgacttctcccaatttttggatgcagtctctgcagaagtgatcggcagttatgttcagttttggagctcctagggtcaaagtacttgagttcaaattttgcctttccactttctatctctgtgcctcagtttcctcatcagtaaaatacagattattttattaatataaatatgtaacaatacgttctgggaattaaatgtgatgtttaaaaaaaagcaaacccacactgcattagcccagtgccaagcacataagtgtttaataaagagtaatgatattattaacacacttgaaatgtatcaccccttcagttaatagaatggtaaacatgttaggatgcctgcctagaggatttagcagaaaatgctttgtaaatgttctatatctgaaagtacatgttgatgtccaggttagcaagatgaacaaagatgcgcagatgagagcagcgattaaccaaaagttgatagaaactggagaaagagaacggtaagtaatagattgtgttaataaattacatttcaccgcctttaatagttagcttgtaagaatctaaacaagaaatgaaacatgtcactggaaagaattacaattgagattataaaagtttctattccgaacatctggaaaaaataatttaggtttgttaagtattgcaggacttggagggaagtggtgatgtagaaagatgagcaagatatggctcttaaagagtaatttgatggagaagaaaaagtacatacctgaattacaactggagacataatgttacctgggttttaacagggagacaatgttgtggaaccagcttcatttaccaagctctcaaccttggagcagcaagtgctgtttccactctctaaaacattcttccttctcttcctttttagctaattctagctcaactatcaggtctaatttatatattgtctcttcaaggaatgtttttaagtcccaaataccttgttccatcatagcatttaatcaacattgtgttctaacaatctacttggctagtttgtatcctccagtataatctaagttctttaacaccaaaaacaacattgtatacccagcatctaatgctttgtttggttcataattggccacgtaaatatttgcagaatcaacaggtttagaagtacaaagaaggggctgaggaatcaagaaaggctcccagaggcagggttataaagtgagtaagacaaatatgtataaggaagaggcaaatatgtataaggaagagggggaatctttcaactcaacccgggcattcaggtgatcatgtaagatctcacacaataagaaaaagaggtgcatctgttgctgactttatttttggatgatgggagtcatttaaagttttaagaaaggaaatgactagatcacatttacactttaggaatcttactctgttggtgtggagcttggacttgaaggggacaagatagatggcagaaaaatgaggtagaagattatatagggttgaaaatggaaaactccaaaaattggaaggagaccttagaattttaataaaatgtagaaacagcaaccctcaaaatgaggaaggaggcatcgataactgccttgggtagctttagaggatagtactgctggtaaggagtacggattgtatgttgttttttttttttgttgtttgtttttgattcatgcagcttcaagttactgagtttctatcatatgccatgccctgt

SEQ ID NO: 131103 - DNA, 1533 bp, Homo sapiens
cttgtaatggtttcctcttggtggcatatgtagacctaattcccaaatttttagaaattttctgtttctgttaagcgtgagcacttaagattttctctggcatcagaatatggaatctcatgtctttcagcaactttattgtttcttatgttttaacttaaatggaacactttagggttggcagacttatagaaattatctctttcctgtctttaacagtgaatatttgaaaaattcatctatgaaagctcttagaatgcacttaaaaaaaaagtagaagggaagcttattaaattgctgggtattgttgatgataccatttgatggattatacatgtcactaaggggagcctcctttctgtctcagcttttgatataatggaactctggatatttttaatgaatccccattgtaatggtttctacaaataaaaataaactatatgttaactgtaagaaggcaatgtgacaaattagtaaaagcatagactttaaggtcatatagattttcatcactgaaagaatagagctggatttcaactcagggctggatgacttatttaagcctcagttgcttcacctgtgaagtgggaaaatgcctagcccattagatcatcgtgaatattaaatgttgtaaagcacctaatagagatctagtaaatgttaattaaaacagttagttataagtttttggcattttacagatgttagatttgaatattacagtctaaatttattgtaagtgtcacaattatttagttgctggttatttagctgagacttacgaacaacttttatcttttagatctaaagaatacttgatgtgtttgtaaggttgaactaaattttcagtgtcctttttttaaaaaaaccagtctacactctaaaaacatgatcttaacccttcctctatgaaaatctttcttacagataatgattttaaatgatatgatttgttttttgcttttgcataagaggtaattaaagaaaaaggactagaacacgttactgttgatgacttggtggctgaaatcactccaaaaggcagaggtaaggaatacagagtttgttaaaggaaacatgctgcagacatgatttttttaaaatctcttgctggttcagattttctttctgtttttaaggaaaagcactacctgtgttgcctcttgtaaagagttaaaattgcctacctgcctcctagcatagtctgggagtaacaaatgagatactaggtttcagtgttcttgtactctagaacagtgcaccaatgcaagttgatacagttgttcaagcaaataatttttaaaatacgggattctgcagtgtcaaatactacatgaagctaggatttataaactttatcagatatggcatgactccacttaaatatttaataattcaaagtcttattccaacccctgagtcattgcccctttatctcattaaaaattaatgaaggtctgtcttaaatgtctacttaagaatttggtagctccatgacttcatgttcagagtaattcatatttaagactc

SEQ ID NO: 131104 - DNA, 1067 bp, Homo sapiens
aaacaactgtatagtagaaagatcagcccttttctggaagaacatttcctcagtttttatcttttggccttgcttatggtgatttttcattcagcataaattgttactatgttttaatcaaatttatccatctgttatagcctctgtatttaaaaatggtcttctttactcctaaagaattttctcacgttttcttctcatcaacatgcagtgcatttaggcattggatagttcatttaaaatgatgaattgcaagaagacacttttctttgtcagataactttaccttttttttaattgaacatgagggttatttatgaaattcttatgttgtttaccctgagcaaaatgtcagatcttaaattctcatgtattaattggtaccttcttactcttatttttttatttttgtttttcagccctggtacctgacagtgtaaagaaggagctcctacaaagaataagaacattccttgctcagcatgccagcctttaagattgaattagattgtgttgttgtggttttatttctgaaagtaaaacttgccataaattagaaaacaatttcccaaaataaaatccttttttgtatgatggtatacagttttcagtaatgatgtatacattgtattgatttttttccctaaatgtgttattttaataaatatctcatgaatgagtttgaagtttgcttggattttgaaatgaatgggactttgtctttattactaattcaccaaatttgttgagcgcaaaagcaattaatgtagtttaagtatttagtatgtacagttctctgtgttaacagctgagaagtaagcaaccttttctgactgcatatggtgtattcctcttttgagtccccataatattttataaattgtaatgccccatcttgtactacagttgtcttattcgtattgtttataaactttgagggttaggactgggtcttactcatctttatgtgccttccttatgcttcaaagaatttaccatctaatggaagagaacatttgcaagttggctccataccaagctccttccacatactctactcatctgaa

SEQ ID NO: 131105 - DNA, 1033 bp, Homo sapiens
tctttttttttttttttttttttttttttttttaacagtcactgttcttttcatcctgtcaattagtaggccacttccaggttaggcattcagtaaatctttcagcttatatggagagacagcctccatatgtacaaaactacttgagtattgctaaggtaacattttagagccctgtctttgtaccttaatagcctacaagccccttctgaccctagaaatagaaaagactagtgtgcgttttgcctttccttagaagaaattggcaatgatgcctttacagagcaatcaagatcagatactatgagagttaagtatgtttttctggctttctgattttgttttgttcttattttttatgtgtttgtttggaactttcgtattgaggtatagcatacaaacagtacatacagtcaagtatgtggtgttactactcagattgagatattagatcttagctctctaatgcttcagtataccctatcagagatgaccatttttttttactatataatttttaacctattcaatgtaatattttattaggtaaaaagctgcttttttcaagactttaggagtcttgaatccccatgaaatgcatttttaaaaagcatgggctgggcatggtagctcacacctgtaatcccagcactttgggaggctgaggcaggcagatcacttgaggccaggagttcgagaccagcctagccaacatggcgaaaccccgtctctagtaaaaatacaaaaattagcgggtgtggtggcatgtgccagtagtctcagatttgggggtggctgaggcacgagaataacttgaacccaggagacagaggttgcagtgagccaagattgtactgctacactccagcctgggtgacacagcaagactctatctcaattaaaaaaaaaaaaaaaaaaaagtatgttatagtacagggatggtgtatttatccaggatgattttactccttatgtttctaaatgttattgcttatcttatgctcatgtaaggtaattaaaaaactaattaaca

SEQ ID NO: 131106 - DNA, 1050 bp, Homo sapiens
ctgggttgtttcatgaacattttgaatactatgttttgagacttcatcttatttaaatcctgtggagaagcttggtattttttatcagatgatcaatctggataggcttgggtgaaaatgtccagcccttctgtgagttgtagttttaatgtcagttcagttttcagagcatttgctttcgttttactttgttttttgttttttgatggacataatagaataaaatagaacagaatatatcagaatgtcttgtattttttgaacttttgatcaagttttgatctgtgatatgaaatgtatgttttcccgtgggttaaaaaagtttgaaaaccagtgttttagaaagcccatttttctaataaatcatcaatgatgtgttcattaagttgcccctttgtggctgataatgttgatcaattaaatttagacagatgttgaagagtggacttcctgggatgaagatgcacccaccagtgtaaagatcgaaggagggaatgggaatgtggcaacacaacaaaattctttggaacaactggaacctgactattttaaggacatgacaccaactattaggaaaactcagaaagtatgttaagatttatgcttttggagattaaactactttttagattcctatagttaaaattaggtgatacaattcacatttattagaaagcctatttctttttttttttttaatactttaagttttagggtacatgtgcacaacatgcaggttagttacatatgtatacatgtgccatgttggtgtgctgcacccatcaactcgtcatttaacattaggtatgtccctaatgctatccctcccctctcccccaaccccacaacaggccccagtgtatgatgttccccttcctatgtccatgtgttctcattgttcagttcccacctatgagtgacaacatgcagtgtttggttttttgtccttgcgatagtttgctgagaatgatggtttccatcttcatccatgtccctatggaggacatgaactcatccttttttatggctgcatagtattctatggtgtat

SEQ ID NO: 131107 - DNA, 1078 bp, Homo sapiens
gatacaatgttatttaaaaatataaacatcagagagattaccattaaaatgagagattaaccctaatggtagattattttaaagtgagttatgaattgttttcttcatagagtgtattttcattcaaagtatgacttaattttaaacggtttgacttaaatgaaactttttaaaggaaaaatttatgaaacaagtagacagctgaggttctcaaccttgggagcatatcagaatcagctttggaggttttttaaaagcacaaatgtccagacccctccctacctaagctttaagcatgctttgattgattgattatattatctgttgttgtgtaacaactccaaattcagtgacttaaaataattacaaatattaatgtaacacagtttctgtggattgggaatccaggtgactaaactgggtggttctaactcagaatttctcatgagtttgcagacaagtcattgggttggggctacaatcatctgaaggcttgattgtggtcgaaggattcatttcaaagacagctcacttctacacctgacaaattaatgctatttgtttgcacaaagcctcagttccttgctgtgcacctctccaaggagctgcttgaatttctttatgatgtaactcctgattttcccagtaagttataagacggtgagagcacttgctcatgggtgagggtgacaccacaatgcctttttgtgatgtggttttataagtgatacactgtcacttccatgttatttcattagaagccactaaatccagcccacatgcaagcctccacctcttgaaggaaggaatgtcaaagaatttgtggacatatttttaaattacatctgtctgtcaatctatgtattttatttgtttgtttaaactgcacagttgcttctgaggtccctcttcccaggggacccatgtatatgtatgtttttaattcattgagtaaaaacactgtttttactaaagccaggccctgtggcattaaagggtctttgcctcagaaaaatgcattctagtaggggagacatgatattaaatgaatgatcacacacgtcaatataattacaaa

SEQ ID NO: 131108 - DNA, 1237 bp, Homo sapiens
ggagcgtgtgttctgttcagctgtgttcatcatgcactttaaaaactggctgtttgtaactactataataacaggagattatcaagctcaatatcaagcttttctgaatggtatccccagaaaaagatgtggttcaatggaagtattgttttacaaaatggagataatctaaataagaagtgtcagaagatgtgagttcttatccctgtacttaatcctatgacttcgggcaagtcacttagcctttatgcctcattttacttatttgtaaaatagagataatatttcttctatttcacaagtcacgttctaaggactaagagaaatcctgtttttgaaaatatttggaattttcaaattagtgagaaaattttaagactttcaacattttatttggtgataataaaaaggcactgctatttctttctagaatttatttgccattttacctgtttggtattttctaaaagtaaaagtatgtttcttttcagacagcagaaactagcagacagagaaaagagagcagccgaacaacaaaggaagaaaatggaaaaggaagcacaacggctaatgaagaaggaacaaaacaaaattggtgtgaaactttcataacacatgttcaaattttatcatgccagtaggagaaatctcagctccacaacccaagcaacatttgtatggatttaagagtattttaagaagacatactgcttgattttaatacattgatcaggccatccaggacaccacgattctcccaaagtaccttgaactcttagtgattgagactcaaaaaaacaaaaaagacttgagacaatgttttcttcaacatgctccaaatataagacatttgtttgctgtacagaaagtatcacaaatggaatatatcagtacctctcaagctagtgtttctagctaaataaatgggtgtatataattttatggtggaaaagaactgtactgtctgttatgatttccttcaatgtgcataatgataaaataaataattttaatattcttttgtttccatggttacctgacctaaattagataaattgtagggctttagctttcttatttttgtcaaaagttggtgttgacatacattccctctaatttgaactggtattgtttacgtttgatacaacattaaggaatttgatgattttcatttcatgaaaatgacattaaatgcaataattttacttatcataaacattttgtacatcattatttt

SEQ ID NO: 131109 - DNA, 1034 bp, Homo sapiens
ttttttaagtacaaatgtacattactgtgcactttccttgttttgttgtttctcagtattctgaaagagttagggcagcttctgaaagtgctgtaagttataggagaatctggttctttgtgtctgattcattttctatgtgggtggtgtactgccttaaccttgtcactgacagaaaagttcagatttcattctcatactgtaaagagaaaagaagtttgtccttgaagttctctctgactgaagtatttgcctttagacaatgattgtctacactcttccatcaacactctggtacttgttcgtgtcagttctcctttgaattgaaattgtaatttcctttgttcatctgggctatttttaaactatggcagatcttatctgaaaggcaaaagttatgctccagattaatcctgtccagatttgatagtgatcattatactgttcagtgcaactgaagcaatcaaatgaagaaagaacacttcttttctaacttatttggccaaaatgaatgttcagataacataattttagtttttatatagacccatagtattttggaaagcagcatctgaaaatagttaatgaatcatcatgggagcttgagaattgttgatttaaaaaaggatgtgagcagtccttaagtcaatctcctaccccaaagcaaaacttatctatagtgtgctaatggtctatcagttttgatcagagccctttcatggctggaagatccccaccttgttagacagcccattatttttggacagctgaaattaaaagttctctatttttttaaaattaatgcctgtccttttaaaatctacttaaagatacactggcttccttttgaagtgatacagaaaaaagtatatttctcctcatcatagtccttcgaatacttgaagacgtctatttggtcttcttttagtgttttctctcctctttgagataaacatctttaggccatccaggaattttttttttctgtttccttttttcttttgtttttaaaaaaacattatgatgcttatacc

SEQ ID NO: 131110 - DNA, 1033 bp, Homo sapiens
taatattaagaaagaaattattatgttaaagggaagttgctgggtttttttgttttgttttattgtgacagagtctcgctctgtcacccaggctggagtgcagtggcgcgatctcggctcactgcaagctctggctctcgggttcacggcattctcctgcctcagcctcctaagtagctgggactacaggcgtctgccaccacacccggcttttttttttttttttttttttttttttgtatttttagtagagatggagtttcaccgcgttagccagggtgatggtctcgatctcctgacctcatgatctgcctaccttggcctcctaaagtgggattacaggcatgagccaccgtgcccggcctgtttttttgtttgtttgtttttttggtttttttttaaataagttggtgccactattgttcacactgttggaaagagaaaaagataacttatataccattcaattttgttcttttaaagtgcaaaattttgtgggttttagtacattcacagaattctacaaccatcacataatcagtttttgaacattttcatcactccctaaaagaaattgtgtaaccattaccaatttctccccagagtcactcctttttgccttagaaattctcaatttacagttaaattcccaagcaaatgtaatgtttttctctctgttattctttattttctcaatttggtagataatgcaagtgacagcagcaattttaatcccctattctttggcacagtatagctagtttttagctacaactaaaatagtttataattaatctattttttgatagcattaaaaatgacatgaaaaatcttataacttcccttcaaaaagacctctaagtatctctgaagtggtgatatgtatatctaattgtaagggtgattttatttaattaacattaaaaattaggacttataataaatgtaatttactgttacacacttacatatatcactatataatactaatttttactgcaagaacactgatggacaactgaaatgtacctat

SEQ ID NO: 131111 - DNA, 1065 bp, Homo sapiens
taacgaaaggttaaatattaaatccaggaacaaaagacccctagacttccccactgcatgtggactgaacaaaacctctggtactcagtgtcgaagaaactcccttctttaaactggtaacctttatttcctttagttgctgggaagtggagtccgggtcaccaatggaggtcattgggggtgaagaatcaagcagccagtgactgagtggtcaatcaaaggaaggcctccacaggtgcaaaatatgaggtagatgatgacaaaagtcatccagtgaactagcactcacctctgctgcaggcttgggtgatccagaatttccaaagagcagtgtcctaaggaagcagtggagttgaaagtacatggtgcagaaagggaacggtgccagagaacttgtcttggaaattgcttttgagtaaccggactcagtttcctattaacagatcctgaagagggctatagtagacattatgagggagctttagctcttccactcccactccctggcactcctctatgccactactggtcagaagagctggaaaagaatgaggagctgaccttttgttctcctgcctaaaggaggattttttcttttcaccagtctattttcatatactggggttctgttcttcttttgagggtcccttgtcttaaagcctttatatcctcactgtctttggaaaattctggaatattaaaactatgaccactcccctgccataaatatctgaaaaaaaaaaaaaaaaaaaatagtgagataagaaaaaaggtagtcttggaggataacttgttgcctttcctctctgttgtatagtacagggtggaagtatactgggaaaatcttttcagagaccttaacacttggatttgagtcctagcccttgctatttatgcgctatgtaatcgtggggctgatcatatcatcacattaattcttttttcttttttttttttgagacagagtcttactctgtcacctaggctggagtgcagtggcactatctcggctcactgcaacctccatcttccaggttcaagctattctcctgcctcagcctcctg

SEQ ID NO: 131112 - DNA, 3057 bp, Homo sapiens
cttgagacctgtgaactgctgccctgtttagtaaataaaattaatgcatttctagagggggaatatctgccatccagtggtggaaatgtggagtaaagaagctggtggtctgcttctgtgctgtatgccagccttttgccttaagttgagaggaggtcaactttagctactgtctttggtttgagagccatggcaaaaaaaaaaaaagaaaaaaagatcaagtcgtctttggtgagccagtaaggtgaaagcttgctgactgtccaaggcacaagagaaaattgaggaattgaaatgcaacctgagtatcaaactaaatattctaatcaaaggtaggtactgttaggtggaattctatcagcaggcaactgcaaatgagaagaagatagaaggacgcccgtcgggactttggagggcattgttattttcccaaagaaagacggccaagggcagaggcatggattctttgcagagcacttccttttggtttttcagtactgtttcatagacagtgggctcacatgttcctgatagtgctgcagttgcttagaaagcatcccagttaattgcagtaattagaacttctggaatatgctagggcagaagtatgtcaagtatgtcacatgaagaaaatgtgaaattcaagagtaatccacacgtgagaaactagacaatgtacattcatgtgttctcttgaaaggaaagggagagctgtaagcttcactctgtcctacaccggagaaaagcaggaataactttaccgtggaaataatgtttagcttttatcagagaaaattgtccttctagagcatagagtcccaaaactcaattctggttttcccctgttttttttttttttttttttcccaacatataaactgcagcatatcactttttctttttgtgcctcaggttcctcacctgtaaaattgaaaaatatatgtattaataatattattaataataataatggtaatgtagtacttgtttgtaaagcactttgagatccttggttgaaaggcaccataggagtgccaagtattattatgtggccaagggggttatttaaactgtcagttcccaaaggccaggaaaggttggggtcatttttcttaaagacgagctgtaaatatcaactaggcagccaatagtgttgactatgaagatgcaaaactattactaggctgataaaatcatagtttcttaatggctaccaataaggcaaatatcacaataataaacgccaaattccttagggcggactatttgacaaccacatggaaaactttgggggaggcatgaggggggaacatctcaaaatgccaatgtaaaatttaacttacagcaatattcaccagcagaaaatgtctttcatatggaatgatttcatgttgctaagaaaaagaattcaatttgtagtcctgatttgaatactagaatgttggctataatagttctgttcttacaacacatgaaattttttcgttttattttattttgttttcatagtgcatgttcatttctactcacaaacatgttcttggtgtatttcttatgcaaacaatcttcaggcagcaaagatgtctgttacatctaaacttgaataataaagttttaccaccagttacacataacggcgttggtatggtttatatggattcactttcatccttctagcaataggaaatacagatcattgtaatatatatatatatatatatatatatatatatatatatatatatatatatatatacaggctctgctgaattgaaatggtgaaatcaaatcaccattctaaaaaattattacttatattgataaagcctggactctctcaacttgttgtgctttgattttttttcttaaacaaacactctctcactgatatattttgtgtaaaaagatatatactactttctccagagagataacataaaaatgtgtttatttcaaaaacattcagttgagtatcaaatattgagtgtcgagtattgggtaatgattatgttacgatgtgtaaaaactcctgcttatgaagtttaactttgaattcggtatactcatgtgaacatgatgcaattcctaatcaatcatctcaaaaagtttaaattaatatatcaaatatcttatttgtttggttaaaatcaaattaatcagggcaagttccctgaaagatgactttgaaagagaaatgaggcagaacagatccagataggaaaggacgttggcaagactcacctgcatgtttttaaccagaaggaaaaatacaaaaagacagaacataaagtatataaataattgattgcttcagaagatttgcttggagagtttaaaataattagtatctcccctcattatacaatcttcatttctcatttttgggagcccaaattaaggaacaaatccttctaattattatttttttttcttttttccctttttctttccatgttttgaaaatagcagagagtctttgaggggctttcataatggcaatgcccttgctttgcagctggaggcaatgttctctagataagagtgtaataataacatttaatgtgatatacttccttaagtagaacttgattcttgtgtcaaggaccacccttcagataaagaatacacatgatctcacccaggactgtcagaaccccattagaggaggaatatgtagccatcagctatttacccttgtttgcggggagagaagtgagtgagtcatcattgtcactctgctctcacctctgggtcttccatctctgtgtggacggagcaggggtccagaaaaggaacatacaaggacacaaaggaataggcaagtagcctccatggatacagccagctgggtagagactttgggaactggagagctcattccacacgtataaaggtagtctttcttcagccctaagcatttgtgaagggagaatgcttaacttccgtttgccagattttcagtttttaataaaaactggacaaagggaattttattgtatgaaatctccctaagttttaaatgttagttacttacttttttgttttaatactgcaagc

SEQ ID NO: 131113 - DNA, 1009 bp, Homo sapiens
aatgaaagttcttgctataatggtatggaaaacaagaaggaaatgaaaatatttttatgcctacttaggaaaaaaagggtagcacttattcattccaagtacttttttttttttaatttttaagctcttaactcacattgttatgcttaagatgataaacatatatcctctttttattgctttgtctatgtttcatatgaaacatttcagaaattattttgataagtgttgctggaatctgcaacgctgatttttttttgcattctgtagtcgcatttgcactccatttttacattaattcgcagttgctttgtatcattgttttgtttgggttttgtttctttttcacagtgccgggtcttcgtttcttaaagttggatggcaggtagagttcaaccagttcgtgactgttgtagcgaatgaagttaaaaaaatgtctttctgatgttgtgttgtcattttcatttttgcatttttttgtttgcatattaaaaaaagagaaaagagaaagcaagagacagaaatcaggactaagtcctctgcttcagtttcattgttaacgggccttattctgatctcacctgtcgcgtagctctaatattcacataaactgaaataaagaagtggaatgaggagctttgacattcaaattatgtgatgtaatttatcttccttaggaattttgatggatgcatctcaaaatgtatagccagacttgagaggtgacaattaaagatctaaaaaagagaggagattcccccaaacaacaatatttaattttcttagtaaaaagaataacagaatgcatcgtggcaatccttaagcaacattatctatgtggactgcttaaatcagcaaaacaccagaagtttggttaacttgggcaatatgacaagtattactttttgggcaaaactactcattaagcaatttctctagtgtgtcggacacaaataggttctttatttttggcatgtatgcctttttattttcattcaatttttttttt

SEQ ID NO: 131114 - DNA, 2453 bp, Homo sapiens
tggagagagatctctttctcttcctcttctcataaggccacagccccattggattagggccccacccttaacaacctcatttaactttaatttcctactaaggaccctgtctccagacacagtcacactgtggtttagggcttcaacatataaacttattctgtctgtagcaatgtgtaatttttccactgttaacaatatgtatctcctgtgttactcttatatgctggcattttagtgcacaactcaaaaattgaaaaaaaatttcagaaaaatcacatctcttcaagtgactttctacaccgtttcatcactaaatgatgcaatctcaaaatctgttgcatctggaaaggttattttcaagtagattaaagttttcagtcccccctgcaaagatggacatgatttaattaggctaaaatagtgcactttggttacttcctctgatcctgcttagggcaaaaggaggagatttagtaaatctacagcagaaagcctatccctgctttgaacttaagcatggtttatatttgtgaggaatttttaatgcattttaatgtattttttaatgttttccttttatgtattgtatgtgttctctgcagactcccaggcctttaaacatcattaaacaaaacaacggtgagcagattattaggaggagaacaagaaagcgccttaacccagaggcacttcaggctgagcagctcaacaaacagcagaggggcagcaatgaggagcaagtcaatggaagcccgttagagaggaggtcagaagatcatctaactgaaagtcaccagagagaaattccactccccagcctaagtaaatacgaagcccagggttcattgactaaaagccattctgctcagcagccagtcctggtcagccaaactctggatattcacaaaaggatgcaacctttgcacattcagataaaaagtcctcaggaaagtactggagatccaggaaatagttcatccgtatctgaagggaaaggaagttctgagagaggcagtcctatagaaaagtacatgagacctgcgaaacacccaaattattcaccaccaggcagccctattgaaaagtaccagtacccactttttggacttccctttgtacataatgacttccagagtgaagctgattggctgcggttctggagtaaatataagctctccgttcctgggaatccgcactacttgagtcacgtgcctggcctaccaaatccttgccaaaactatgtgccttatcccaccttcaatctgcctcctcatttttcagctgttggatcagacaatgacattcctctagatttggcgatcaagcattccagacctgggccaactgcaaacggtgcctccaaggagaaaacgaaggcaccaccaaatgtaaaaaatgaaggtcccttgaatgtagtaaaaacagagaaagttgatagaagtactcaagatgaactttcaacaaaatgtgtgcactgtggcattgtctttctggatgaagtgatgtatgctttgcatatgagttgccatggtgacagtggacctttccagtgcagcatatgccagcatctttgcacggacaaatatgacttcacaacacatatccagaggggcctgcataggaacaatgcacaagtggaaaaaaatggaaaacctaaagagtaaaaccttagcacttagcacaattaaatagaaataggttttcttgatgggaattcaatagcttgtaatgtcttatgaagacctattaaaaaaatacttcatagagcctgccttatccaacatgaaattcccttcttttgttattctttcttttgatgagtaggttaccaagattaaaaagtgagataaatggtcaatgagaaagaatggaagatggtaaacaatcactttttaaaacctgttaagtcaaaaccatcttggctaatatgtactggggaaataatccataagagatatcaccagactagaattaatatatttataaagaaagagaccaaaactgtctagaatttgaaagggtttacatattattatactaaagcagtactggactggccattggaccatttgttccaaaacccataaattgttgcctaaatttataatgatcatgaaaccctaggcagaggaggagaaattgaaggtccagggcaatgaaagaaaaatggcgccctctcaatttagtcttctctcattggccatgtttcagattttgacctagaaatgcgagctgtggttaggcttggttagagtgcagcaagcaacatgacagatggtggcacgctgtttttacccagccctgcctgtacatacacatgcacaccctctctgatatttttgtcctttagatgttcaaatactcagtagtccttttgtttgcggtttagattcattttgtccacacatgtacccattttaaaaaacaatgtcctcgatgcttctgtagtg

SEQ ID NO: 131115 - DNA, 1035 bp, Homo sapiens
acatggtagtgctgaaaatgattccattcatttacgtgagtgtatgtatgtatatatgtttgtatgtacatgtatatacataaccaacgtatgccatttctacacattttgcaaattgctcattagctcagacaagcagggactgttcctttcctctcctctcctgggcctaaacatggcccagaatttattaattttcttttgcatttcacaaaagtgaaactgttttcaatctaagttctagtttctgtaacaatggctgtccttcatatttcatgaataaaggtatgcttaaagcataatgcttgtatgtgtacacacacacacacacacacactccaaagtggcagtagcatctcttctgctagaggtcaattcaattaagctatcactaattaaatgcccactatatgcaaagcactgataatataaagattaaaggaaaaagtaggtccttcttcaagagcctcctttcccctgtgtgacttgcacatgaaaataattggaatccagcagtctgtctcctatacctatacagagaaagtaggactattttgtgatttaagacaattcaagatatgaaaagccgaggcaaaactaacattcgaatgctccaacagttaagtttgtaccttgtcacaaagttcctcttatgatgaagagtagttttgatacatttggggtaaatttgtaaatgtgaaatagcaaagggtaagtcacaactaagcatttttgtttgcttttcattttttgtatgtgttttaaatttcagctacactatgaatcctttttcaaaatatctttaagagcttggtaatttttttcttttcctttaaaaaatctatattacttcacaatagggagaaatgacatttctttaacacagatcactttaaaaaataattgtgggtaatttcttgctataatttatttacgtcttttgccgagattgtgtgaccaattcagtgtgttcatctagaggaaaaataatgccaacagaaaaagaatataaacataaggcaggggaaaataaag

SEQ ID NO: 131116 - DNA, 1049 bp, Homo sapiens
aattcttcgtttaatcctactgctgggtccttgaagtgtcattgatttactgattctgccattatatttttatatttattttatttacagaaaaaattatctaagtcagatataactccttatcttgggagagaagtatgacttccatttttttcaagttgacattttaaaagataagagcattagcctctgaattttttaaatatattaaactagaggaccttgaagctactttttttgaaaagctaaggaatatatgtgtatatgcctatacatattataaatgtatgtttgtgtgtgtattaactataaatgcatgcatatatatttataaagtagccaatgttagtcaaattccaaatggaataaaatttatggatataaatgtgcagctaccacccaaaatttgctcaaaattagcaaagtttctatgtctgggtctgtataaacccaagtgagtcaactttatttataatctaggaatcaaatatctatttttatattttgtgcgtgtaatctatgtggctacactatatgaaagaagaaagctacctgcagctagaaataagtaataaaacatgcatgagggaatgtgatctacaatgtgttcctttatgttctagaaaggaccctgatttccttcctcaaatttcaacttagtttgtgtgtgagaaatatgtatctttaaaatggaggaagtcaccaccagagttatgtaatgtaatccttaaagatcttttagaatgcagtcaaaaggagagaataggaaagaaagagaggagagatgtattcatatatttttaaatgtgtcattgatgtaataaactctttaaaagacagtttcttatataagggagttttagggtcaccattaatacattttctcatgttgtaaaaataaatatgaggcgctttgtataagttttgtgcatatgcacattaacatagatattgagttatacacttgtatataagtgccaaaagtgtattcagttttcaatatctttaaaatctaatgtctattgaattattcaatctcttctgaaatt

SEQ ID NO: 131117 - DNA, 1061 bp, Homo sapiens
ctatttagctacttcatataaaagatggcaaaaacttccttcttgttcgtgtagacattcagcctttctagaagacaaggatgacacttttgtcaattatttattttttgacgtatgtgccaatgggaacaattattagcctattaaatactttttgatatttgacccaggatagtaaatacatgcattcagaaaagaatccaatgctacctttgtcatcattgtgacaactgaagagctctagtggcctttcaagtacagataaactttcaggaggattctcctatgagctggccacaagggcttttattgtgaaccttccagcatatcctgtatgctcattgtgaactaaggaaatggcagtgatggcatctcaaatagtggaccatggcacccgtcatgggggtatccctgctttttgtgcccattaaaggtttgccaagttcttctaaacagactcttcagcagtatagtgaccattatactacttcctcatagtgtggcttttgtaaaaaactaaaagaaaatgtcctggattgattttgtcaaaacagttacatgagaagtgtagataatgatggactctttcaaggattattcaaaccaaagtaaatactagatggcacggatggactactcaaatgtggtcagcagtactatccaatgctctacttataaaagactcctcttttggacagataacttgtagaagactgaaaagaaatatgtatacgtctgtatctatgaaatgtattgactttttttttattttttactgctttacttctggtaccattcctttattttgtcttaagaatctacactccttcatttttagttcatctagttcaggtgaagctgattttgccctagattcaaagccaaattgtgtgccttacattcttgttactcaaactgggagcttactagacatgccagatctgagatcctatcccagatcaataaataaaaatctgcattttgacaagatcccagggtaatttgtaacacagatgagagtttgagaaacttagccaagtgcagtggtacacgcccatagt

SEQ ID NO: 131118 - DNA, 1055 bp, Homo sapiens
gtcccagggatagaacaggtgagtagactccacactggtttatagaaaaatgcatgactgaagccagcaaggtcctcgtcatctatgatcctcaggtgctttattttcgcagcctagcaaaaggaataaatctaatgcttgctttactgtgaatttacaattttccttagaatttcagtgtatagtgactggaacttaggcagtctgtaaatgataaatggaaaaagaatgaaacaaagcagaaaaggggaatggaacaagggagggagagggagaaggaaggcaggaggggcagggagagggagggaggcagaaaatgtaaatctcaaagccgatgaggttactatagaccatctggagaaagatgaattattctttaaatcctagatctagaagagatattagagatcatttgttgtttatgctctctgatttccccctccctgtatctaaatatataaagaaagaaggaggaaactaggttactgaacaccaaccatgtgactggcagaggtagaggcattctatgtgcttcatattcatgacccttcatcatgattgaccagttgctcttcttttattttcctctgaagcagaacctagaaaatgactttattagagcacctatcaggtctttgcttatgtggcttccctgataattgctgagcaacttgagaccttgggtcatgtcttttaccattgtgtgcctagttatgccttttacaggtagagcatccaacatggtgctgggcccagggcagatactcaatgaatggcatttaaaatgaatgaaagaatacatgaattacaggtaaatatcacagggttgtctcatttagtgtgccatggccttgatgcttatgcagtcctgtgcctataaaactatatggtactaggtttacatgctttagggagtaagtgaaccttgcagtttcctatttttttaaatttgactcttgtgtatgtgttgatggtattgacttgctttcatttaaatgtagaaaaaaaatgccatgttttggtattttagccttaataacctcataaaacacata

SEQ ID NO: 131119 - DNA, 1033 bp, Homo sapiens
aaccacttcatggagatagaagtttgatggttggatatatcaaaaattgttaccagatgttgttcagaggccttaacagtttaaagatcatgaggtttttttttagcaaagcaaaaatattctaattgaagttgtcagcaggagtgagactaatatgcctgtatttgattaaataatagtttatttaacattcagtgtggcccaaaattggccaaaagtcggaaaacattttagccagcagacttcaaaagaaaaacgcaacaaaatgacagtactatctaggtaactttcaggcattgtggtttgataatgtcagttttcatcctgcttcccattcttcatgtcttactgtatatactctgcaaatgcctttgaatctttattctgtaatgtattttgtattttataaaaagaaaggagagcaacacaaacttattataagacttattgctgaaaccttggcaaggaaacaccaggacattttccattatagaaatgtaaacatctatatttttaggagttagatattttacagaggctgctgtcctttcactgggacatgaggatattagctgtatcaaaaagaagaatgtaagacccacatggtcctgttacaacttacaggcaccttttcctgatgacatgagaggagcacataactacttccttcccattcagtgtacagctgtgtgctgctctcagatgaaatgcaagaattccctttgaagaacagggaggcttgtctcagccagtcggtcttcctattggcgtgagcctctctctccttacattttctacttctcaggcatgcacctagccattaactcccgaatgatgtggcaataccttggttcttccagaataagtttttcagacttttcttggacttggtgtacgtaaaaatttaagaaatcgcccacatagatgactaggaaataaatgcattttaaaaaatgaattttcatcattgtgaccaattcccaagctagcgtttgctttccgtagtacacagaggtctggatttttaaactaa

SEQ ID NO: 131120 - DNA, 1020 bp, Homo sapiens
cttgctacccagatatggacctctgttcgccagcaagaagaaagtatgtatgtacattatatatgtattagtgcagccccctatttattgccatagacagaattagagaattttccaaagtagtatcaacctcactgcagtttccaattttaggtgacaattcatgcttacctttcttccatattcctgcaagcaaaaatagaaaattaaatgtattttttccttcagaaaatcagtgggtaaaagtgtttgttgtggcccacactgtgtcatgtacttagagaagttggctgtttctataataccagcgaatctatatatgacattcaaagtccattctccaaggactcctaaatatctacatgcactacatcatgtagactaaataatgaactttacaacaataatttttactcagttttacccagaaaagctaaagtatcagggatccaacattcttaagctttgtgaaccatggtgagaaacccctgtatttgtgaagaagttttgtaataataaaaaactataaagttatgctggtgcttcaaagggaataacatcaaaaacttgtggagaaaagccagaggctaccatcccacctccaacctgcacacacacacacacacacacacacactctctctctctctctctctctctctctctctcactctcaattgggagacctatcatggtagaataaagtctggttcaccaaaaaagagggataatgaggccatttttcattattttcccagtggattctaaaatagttacctcataaaataaatagtttaagtttccacattactttttgcctttaatctgtgcctgcgatgcaaataaatgagtggagatttttatactcccaaaggtttatgtagaggcaaatatattacaaaatgaacacctaaactaagcatgatttcttactaaaacagcatcttacagaatgctgtggttgacggaagggagacactttaggaaaaggaatctacaaaaagatttaattttatactca

SEQ ID NO: 131121 - DNA, 2008 bp, Homo sapiens
agtgatcaggaaaaagaaagatatctgtgattgcatatacaaatggacctagaatagagaagttcttaatagttaagttgtaacttaaaattatttcagctaaagtaactgaaatattttcctttctttataacagaggaaattagtcatattgtaataattgtgactaatataatcaaataatgaccttttcaaatattataataggttagatccttcttttaaatcaacaaatattatttttaaaaaggaaattcattagaaagtagaatatatgtggttccaagtgtttttcctacagcaaaggggtctgtattgacagttacgttgaatcaggattgcttgacattattaacaattaatatttaaaactcactttcaaaagatgatcgacgaagttttatatttggcctctaagaaggagtttcaggagacattatgattttgtcaagggcaaactaataacatcaaatatccaggagtcagagttttgttatagttgtttaatggtgatggtccgaaaaataaagttgtctagtagaattagtatgcttatactttttaagttattttagaaaatggtcagttcctatagaacatacttgaaatgagtgaccagcctctcaaagttgtgataaagtgagagatgaatgcatttcaagtgcattgtctatctcggaattagagacacctatttgaggatggagtttgggaacccttctgtggcctgcgtttttgaccaaaggcctaaagcatgaaagaatagccggaaagagagctcttttccatatgttgtccatttggctgtcagcactcgttctgacagaaaagaacagagtcttgagtgactgctagtctctcttaaagtatggtaatgaggctaattaggagagatgagagctgaactacatttgtgaaggcaattatccatatagcttttgtgccatgctgtatctttgtaagattcctcttctcgaattttgtcatttctcaaacatcacaagaataatgaaaatgtctaaaacaatacgagcaatgtggtcagtagaaaagaataaattactaatgaaattctgtgaacctgatgtctgtttgcagtcttcctgaacaaagatttggaggatggctaagataatactcacaagtgttgttgttgttgtttagtttacaaaaatgaaaattatttgcactttattatattgaatctatatatcttctttggtatgtgaacaggattttgcatggtccttttatgttagtcatcatggcaagtcagtaatttagtataattgaaaggaaaagacatcagaggcttactaagcaagcataaaatgtattctcttttatgtgatttagaaagttgagacattttcatttctattttcaaaggtttaatgcactttaactttcacaacagttatgaaagtaaaagaatggacctagatctctgtacagtgatttcatagtaggtgacactgaacataagttttgggtttttttaagtatttaatcacaaaagttaacagttaaaatacttgtattttttaatctgctgaattatttttgaatggtattgctgacatttcatattatatatatataaaaatatgacattctaaaagcatcaaactctttctaaagtgtaactgaagttttttcctccaaaaagaaactaggctgatttaattcaataggaataccaactggatttggttggtaattgtttgtactcacatttacatctggacataatgttttattgtttttaagtctattataacttttatatcttatatcttttgctcaaaagctcattagcctataagcttctaaaacacataaaggagataatttttatttttgttttgtaggattaaagaaaaaatcaaattaagtgacacataggtggaaaatctgtctgaattgcttaacagtgttcttacatatgaaattttattacttttaaatacattcagtagcaaatttgagcaactccgctttgtctctt

SEQ ID NO: 131122 - DNA, 1046 bp, Homo sapiens
atacatcataacaaaatggtgaggtgaaaacaaacgaacgataccccaccaggctgatttttctgcaaagggtatcttgtgccagggttgaacagaacgtcattgaagcaccagcataaagacatgttaacccaatttttcctgtaatgtatacatgattgattggcaatttttggaccacaggctgtggttaggattacatcaatcaggaagcagtaactcttgagggacttcccttaaatgatctagtgtttattggcgaaaggggttgcattttttgcagtctgtttctttcatgtgttcatcagttccattcctgtttgaaatttggtatcagtgcatgagataagtcacttttcttccttttatatccccttctgtcatttaaaatgcaagatgatgaacctagcacaatgtctggtacgtagaaaatactcattgaaaaaaaaaagagagaatgaatgttgaatgaatgaggaatgagtagtgaataagaatacatttgtgtgtatatagccacatttggattttccgatattcagaagtggtaggaacacagcatgccacacatttagctatagggcgccattcttttaagtagagcactgcacatctaatatagcaatcaacatgaatatacaggttttaccttctttgcattattatattatgtcacgtcatctttgtaaataacattaaaagtaaagatgtgaagaagaataggcaaggggaagaatttgccgaatgctaggagtccttgttcactctaaccacccttttgtacacttttggggtaacaggaaaaattttatctgtaatatgtgtaatatgtcatcagaattctgatggctctctttgttgttctgtgggttttcgtaatggtctcaaacatatataacttgttatgttcccaaaaggatgcattatggatctatgaaatttttgtaaggtgtgaacactaaaacgctgtcccaaggctctgctgttaatttgtttttattgaggaagaggcaagaatgaggcacatgtgtgtggaaccacttttc

SEQ ID NO: 131123 - DNA, 1430 bp, Homo sapiens
gaccaaatgtatacaccacaacaaaattttatctgtgtcaacagcaatttgtacattttatatactctaattcatccaaatcaattgcctgattacagtttgggtactttagaagtggatagtcttataactggtgctgcagtagatgcatgactctttgaaggtgtttcggaaaccatgttcattttcatgagtttctctagtagttattgctgatagatttaagtggctttcccaggatgtcaagacaacaatgtgtttcacattttgagcttgttttcatctttatctgagacatgtgatgaactgtctgaaggcaggtggagaacaggtacactgagatatctacacatacatatgcaaacacacacatactcacatgtacacactcgtgcaaatgcatacacttctgttagcacattgagacatggattcactattgtggacagaattttgtttgcatgattgtgtacatatgtttgtcagtaaacgctcagctgactctatccaactttaggtttaaaaatattggagatgggctgggcgcggtggctcacacctgtaatcccagcactttgggaggccgaggagggcagatcacaaggtcagaagttcaagaccagcccggccaagatggtgaaaccccgtctctactaaaaatacaaaaggtagctggatgtggtggtgggcatctgtaatcccagctactctggaggctgaggcagagaattgcttgaacccaggaggcggaggttgcagtgagccgagatcgcgccactgtactccatcctgggcaacagagtgagaacccatctcaaaaaaaaaaaaattgaaagtggaggacaagcaaaattattttattactatactgtttcacaaatgctcactgagcttttttgattttgctctgtttgatattagcctaggttagttaaaaatctgtttccacattgatatatctagagcgttattaatggtgatgcgacattttatatgtcaggctcttgaaatgatttaggtaaaagagacattcgttttctcagtttcaactaaaatgataaattcttatgttacatctgtgctcgaggaaacaccactaatgtcatctcatttatataaatacttgtcaggtgactgcctaattttacaggcatctgagtcttatccaagcatcccaaggctgcggtacttggaagttcctttgtatttcagttaatggcatcaaacaagcctttgccccgctctacaacaaagcagtttgaacgttatcacatcaaagagaaagatgccattgtctgcaaactgtcttatatctgtcagaataaatcaattatgggacagaattaatttgacataccatttctttcaaacaagagacccccccatttccttctcagaaatgtaaatatataatacataatatatttttt

SEQ ID NO: 131124 - DNA, 1515 bp, Homo sapiens
tcaaatatctacctacttgtgtgggtatgtatgtatgtatgtatgtatgtatgtatgtatgtatctgtctatctatctatctatctatctatctatctatctatctatctatctatccttgtctatttatctttccatctgtcatctatctacccttaaaacatacaaagcagttagcacagtgcctggtacacagagagttcttaataaataacatttgtatgatgactattattacctacaattcccagatttttcattatattgtatgacatgcagaggtgattctgccagactacttgttaaccttatcactgtcatgtttgtgagactgtgaaaccttgcgtgaagctctcaggcaaaactgttagtgactatgctattgtggggccttgtaaatacttctgtagctatagttacttggccatattttaattatttgtaacatagttgagcttgaactgtgagataaattcattctaatatgaggcattgtttcttattcatgagtatgcccaaagattagaatatagtatgtgatcaatacatggttggctgttgcttgaatgaatgcatgctacaaaggttttggcaaggaggaaagtttggttagtcgtccaaactacttcttagacgtttgattaaagaaaagcagttctgagtcttaattgaatcgcatggtcttggttataaggcttcactctaagaaaaaaacagttaagtttctagatcatgtcagtgactgcttttatgatttcacttcagatctgatgccactgtaatctagttgcaaaattttgccctaaaattattttattatttttgtaagtataattttcaatacatttattatctgaaaataaaaataaaatatttatctattattcaggggttttataaatcccaagattatataggaaaaaaaccctgattttttgttttaactccagagaaacttgatgttaggattcaaatatcaatcttaatctgatatatgggcttttcattaaactttaaataagctatcagatttttaatgtggggtgtgtgtgtgtgtgtgacttgatgtactgggtaaactaaaatactaacatttcagaaaaagaaaactttttcagtctgcaatctgggtaataaattttactgagcaggtgattgtgttacaggatggattatttgaaactcatttattaatatactgaacatttattgaacactatgtgtaagtcactattttggcacttgagatatatcagtaacaaaaaagagagagattcctccctaagcaatgtctttctggtaacttaatagtaagcctgaaaacaattaatctttaatgagcagttaatattgtccttgacaagaattcactagtgtgttatcgaagtatattattatatatgtattacatacataatttcatattacatatgtatcattttaaacaatgttattatgtgttgggccaaccttttggacaattttcctttactccactggtctacaaaaaagact

SEQ ID NO: 131125 - DNA, 1064 bp, Homo sapiens
tctttttccaggtgcatgcctttgatttcttgagatgatgaaaaaaaaaaaaaaaagagagagagagagagagaaaagaaaaacaacaaaaacctctttattttgtaaagttttgtttgtggacctagaattgaataaaagccaacatttgtcctgcactcatgtgtcggatgtcctctaagcatcttacattcatgaatttgcttaatttgcaccattcaatgaggtagataccattgtcatctccattttatacattagaaagctaatatatgggggaggttaactggattgcccagggtcacaaaacagcaagagtggatccaagtaactactgcattagactgcccttcgctacactataaattctcagtctgttggtttaagctatcgtatgaagatgactagtcacaatgatttttctgccccagtaactgatagattgtctgcaaagatctcttcaccatctttcctgggcactggagttgcttgggagctatcttgttccttgagagccagttgttatcacccagggtattgttgagactttgagagtaagatcatatttcctcagaataccttcattatgaatttcattcatttctggccataagccttgctctgttgacacaagaatgatatacgttaaattttggttagtagctacctgttggaaagtagaaagatgaaaggtgttgaagataggtaaacaggaagcttccactcattggttctgggtttggtttgtttgtacttgtgttgtttgttctttttttaaggttggaatttgttagattttactttcgttatattatttttatttgtcttcaaaataattcccaattttaaaaatttaaggaaagtaaaatagaactggatgtataggcaatcaaagacagcctttaatcttagcttgaaacaaaaatagtctgatttttactcctagatgaggtttttagaaattagtttctcaatgtagaactcagaaagaaaacttcataatatgtttcaacttaaaaggcctttagaaaccaactaaattgaagaaatctgaggcacagaaa

SEQ ID NO: 131126 - DNA, 2126 bp, Homo sapiens
gcttcctttaaagagcatcctccattcacacctcagtaccactgatttctttccaacacagtgttcctggagcatttttaaatcattgagtgggttttgccataaagcttacatttgccacttgccttccacaggccagagctgcttttttaagcaggaaaggaaaaggacactgccacttcatatgacagaatcaagtaacttgtaaattggaatgcattttttttttggttcgcaatttccccaaattttaaataaatcagtgtgctccttccctttacataaatgatttttgtgagaaacaagaagctgttctaagaataacattcaaaatttctttaagaaaattcaaaccttgcttccaaaacaggcctatggtgagatcgtaccaaccattacaggataagattacaaagagaaaattatttttattccattctgaggggatgtctattaaagtagcgcataatttccagagcagttctcttgagattaactttttttttttaatggcaaaatgaagcaatgtaacataatgcaaatcacactaccattacaaaaaggaaattaaagttgggagaatctgtcaaaatattatgaaagttgaggagttaaagtttattgctttatttttagaatttgcaaaggtgttccactgcagaaatgcctctgggcatttgtaaaatgggagggacatgaaaagagcagtccctactcaaatggctgtgtgttaattgagctctttgccccgccccccttctcttttatcctgctccctccttaccctgaaatccctagtatttctagatccacagccagtttgtgtcttaatgggctttgtgatttcagaagtttccttcgacataagctcttcggcatactaattgtttctcatggagaaactatactgtgtttcattccaagcccttcttcactttactgtagagtttgcattaaagtttcagaaatacaatcaagctctctctacatttagggaaaggaaataaagcacttgcctcaattacatttgtcaacaatttccttttctgaatatgctatgacagagtttatgatattatagaattatgtttcccctttaacctttcagtcaaactgttgataccagtttctttaaaaaatatataattagtgctatcatccagttttttgtttgcttcgcctatggcatcagagaggaatgagttaatccatttgaaaaaattgttttaagttaagctgaagtttttttagccaccactttccttctctcccatgttgattactgaagccggattataattgatacattaaatgtaaaatattgaggcgataatatatagaacgtttatggttttagcagttggaggtttctggattgaatttgaatgcacaagcagagtttgagctaccgtgaccttgttactacctgcatttgtacaggaatccttcatgatctagattgacaagcagtgaatctctactttcaagttcaataagcctctcttttattgttttttaaaatacatatttaattttaaattttcctatagataacagagactccaattaattttacaagttattgctgctttctgagattataatagatgtgagctgttataagctaaaatgagccctcatatttaagtggattttgtaaatgagagcccagcatttctgtcatattcagttcttatggataaaatgaaagatcatacttttgcacagaaattaggtctgctctaggataatagtgcagtgattcagttccttctcaagtgttcagacttaataatattacctaggacagtatatgtatcttttcaatggatagaccaatgggtgtatttaagagaattttataggtcaatgaacgtacataagagaatacaacagacttacttattttttatataaatttaaggcctgggaacttcaagtacttaaaattcaaagctctgtccctagtgttttggaatttctctttactacctaaaatgttgcctttgatgtttcctgttggccaaggcagagagtgaaatgtaatataaagctttatatgaaaaattgtaataatatgtttaaggacacatttttgatgctagaactatgtggaattgatttct

SEQ ID NO: 131127 - DNA, 1634 bp, Homo sapiens
gacatggaaatattcatgctgatttcagtaatagccttttatgaaattaattgagagatttacttttccagacactttcaaacaagctggactgtagtcaatgggtagcattgatatggcatagtggttggttttaaaaaaacaaaccaggctgggcacggtggctcacccttgtaatcccagcactttgggaggctaaagtgggcagatcacctgagttcaggagttcaagaccagcctggccaacatggtgaaaccccgtctctactaaaaatacaaaaattagccaggtttggtggcggaagcctgatttagggtatctggtggaagctacttgggagcttccagctacttgggaggctgaggcaggagaatcacttgaacccgggaggtggaagttgcagtgagctgggatcacgccactgcactcgagcctgggtgacagagccagactccatctcaaaaaaaacaaaaacaaaaaaacctgactgtagcccattgaatattctttgagaagaagcaattatatgattgtggctcattcattgtggcattatggcaaagccatagctcaaaaaaaaattccttatttacccatttactaaagataacaccaggttctgtcttcttagcaccagttaatgatgttctagttaatttgtaacttgcacagtatctgttcatgctattgctgccaaacatattgcagatcaaggagcctgttatgcaactgtgaataagaatcttaggccacttcacactgtttcatcttgtcaattgggagttttgtttggttcagcatgtgtgtgtgtatgtttttgtttttgtttttgttttgagacagggtcttactctgtcacccagactggaatgcagtgacaagataatggcttactgcagcctcaacctcccaggctcaagcaatcctctggttgagcctacgaagtagctggtaccacaggtgtgtaccaccatgcctggatatttttaaattagttttgtagagacaggggtttatctatgttgcccagactggtctcaaactcctggcctcatatgatctcttgtcctcagttccccaaagtgtggggattacaggagtgagccaccatgcctggccttaaattctgatggcttttaggcaaacaagtaatgtactatgtatatccctttttcaaaatgtattatgagttctgtagcttataattgcttcctgtgtgcatatatgctttgtggaggattggagaaaacatcagtataacaagcagttcacttgtttctcgaaatgctgtgctggtgaattagtcactctgttctactcttcaggttttttgtgtgtgtgtctgccattgaggagtataaaacttttttcaaagtcgtttacatttggctttggcaagggttttaattgttcattggagagtatctgtaacctgaaaattcttgagacacggtaaccacagagttaatatgtgactcacaaaaggctggaaactgcctactttttccatcctgtccctctcatcagttttgcttccactttattctgggagttaatttttatcaaccttcacacagaagtactatttgtttgttcatatatgcaagggaaattatttttattcctaaagcat

SEQ ID NO: 131128 - DNA, 1050 bp, Homo sapiens
cttaaacaaatagaaagtatattttctgggccgggcgcggtggctcacgcctgtaatcccagcactttgggaggccgaggcgggcggatcacgaggtcaggagatcgagaccatcccggctaaaacggtgaaaccccgtctctactaaaaatacaaaaaaattagccgggcgtagtggcgggcgcctgtagtcccagctacttgggaggctgaggcaggagaatggcgtgaacccgggaggcggagcttgcagtgagccgagatcccgccactgcactccagcctgggcgacagagcgagactccgtctcaaaaaaaaaaaaaaaaaaaaaaaaaaaaaaagaaagtatattttctgaacacctctttttggtaaagcatgttgtatatttgataatttacaatttagtttgctgttttcttttgttctttgttgcttactttctgtgcttcaagtttattgaacttcaagtttattgagctagaacttatcacagatggtaaatgtggaaaatgtgatggatgtagaactcctcccacataggagtgaaatgggagactacttttgttttgtaattgatagtatgaagccttacatggactatcttcaatatgcattcattacatgatacattcctggtattaaattgtaatcgtcgagatagcactgctaaacgagatagcactgctaaagtttatgtctgtggtttactatttagtataattattcttagcttaataagctttctgtactattaaatgaaataatggaatctcagattaacatttctttaaaaaaattgtattcagcatattaccatacatttactgagactgaactgctttcttttcaattttcgtgaaacttaaatggcttccgtttttctgtgcagtaaattaaaggtgcttacacagttatgatagtttccaagaagaatttcaaattggcatcaactaattgcagtagcaagtgatccaggttttacaaggaaggaaaatgtgaaagaagcatgtctgagtataattttgttcctgataacaaatatatata

SEQ ID NO: 131129 - DNA, 1059 bp, Homo sapiens
tgttggagtttctaatcagctgtgaagaaatcatgggataatagtttagaaattcctacaagatgctgtggtagaaggtaaagatacaggagcacttctagacacttgagagcctctaccagttgtgaaggaaccctgctagtccagagctaatggtgcatgtatccttaaatattacaataggacattggtactactggcacacctataattgttttatgctgaaaaaatacatttcttatgctcttgtcactttctgtctatgacatatttgtttattataaatgtattattcttccaagtgtcatgttctctcatattatattactttttttctaattccatatctagaagtgataacacacaggtatttctgtgtcacatttctcacttaattcattcaaatgtttcaaatttttttattcccacttttttaaatgataggatgtggatgaagaggatactgtgccaaccaacctcgtgttattaactgtgtttctgtaatgaaggctataaaattgaagtgtaatttatgatatgatttttagataatggctataattattgttgtttttgagaaatgcagacatacgaaggagatagagaataagtaattatatatgagtgttaagtgcattttcagaattggagggcgatattctttattccttgttaagcctttggaaatcaaaagcatggttgtatcagttgtggctctgaatatttttatggttctgtcttttgcttgatcatgttggtccttttgagattcaaacatttataaaaattcataattttgtgcaaatattgaggacctaaaattgcaaagtctatataaaccaagagctgcttgctggttaggcagaaaccaaatttcctcctagctctgccttgcattttcaatcagaattacttgtttgttacaatatgattttcttcaaaaatagatgctctgaggcaaaaggcgagccacaggctatatgttgaatagaaggttgattagttggccgaacttcaggagtgggagcctgaagccatgcttcctagggaaataactcc

SEQ ID NO: 131130 - DNA, 1367 bp, Homo sapiens
tgtaaaaaaaaattaatttacttacttataactgtaagactttgtacagccaaaattgacctatatgtttagttaggattcagtgaaatccatttgcatatgtaggttaaatttcaccttatacatcaccaaactgcagcaagctaggactttaaacaactaaacatacacatattaattcttatttgaaatgatttgtttttgccctcattgaatgaatggttagttgctattaaaagatattattcaaagagcaaagctaatgacctgattttaaagaatggttcaccaaaatagatcaacttgcagtcctgactgagtccccagtttatactcaatctgggatcacttcccccaacatccacgttatctcaaggattcttttcctcctctgtacttccttagcattttgcaagggacaggtggaagccatgtcctattctgccctgtattctgttcatttgtaccattatactgtcttcctaaacttaccgaaattttccaagaactgttttccttcactacattcttcactgtgcctttgcattaccttatctcacagggtactcagtagaaatcttcataatcgaaggctgaagccaaaagtttggtatttgagttataccaagatattttagaaaaactcagaggggggaaaaacagatgactgtctcagcagatatacttatccaggtttccactgtgttcctgaaagcagttctaaacatagtcaatctctgtttctcaaatagttatcctctttatttgagatgagcagacaggagcttcttcaaacactgaaagtagttgctcagatttcagaatgaatagaattctcataatagtttttatgccctagttttttgatgatctggtacagttagatgaggctctctagtgtttgaatcatgaaacaatatcacttcacttccatcatattctaagcccttgtgatagttaaggacaagtaaaaaatataattactctgtatgggttttgttgcagaagagtgggggggggttgatttttatagtaaagtgagggatctataagccaagttataacctctgtttgttagcactacaaaagttttgagacagtttgaaatttaaactcaatgcatttgatgaatagtacttggctagtttgcgtttgcttcttaatttcattaatttttggtggcaaccagcctttacaacagctatttataaacctgaaatatctgatctgtaaacgggcaaacaagtcaaatctgtgtatatcttatttgccaaaccgttacatttttctgcatatttcatcacttttacttgaaaatgggcttgtagaaagataaacagcatatttacaggaaagaaaaggcaaat

SEQ ID NO: 131131 - DNA, 1047 bp, Homo sapiens
ggagaattcatttccttgcatccatagaactgaggtccccattttccttgtagctgttggccggagaccactgtcaagcccctatgggcagttcccatgtggccctcatagatgtgtgctttctttcaggccaggtgatgcacgtctctctgacttcctcttctgagaccagccaaacaaaactcagggcttgtgtgtgtatatcaagcccaattggataacctcctgttgtaaggtcaactatttgggacctaaatttcatctgtcaaagcccttcagaacaggtcctagatcagtgttattgaataactgagagaaagtgtatgtacaggaggacccaggaatcttggaggtcatcttacagttctgcctactacaaggagctgcagtatccataactgcaaaaagaaatgtagttttagagctaatgcctcaggacaactgattctccaagactggtggtggaagaacattgtgttcttcattcaagaactacttctggaaaatttcctgaagtgcatcaagcactattgtagcagtttttaaatgttcagtcaatgagataaaattggaaaattagtatggcatcttacccctactgtcagattttgaaaatagcattgtaggacatcacattaattggtgtgatttccaggaaaaaagtcatttttgaagctcttttagatgaagctgaccttctcagaaagaatacttttataataacattgctaaacagataacaaaccctaaatatcaaagcaagaaactaaagaagtgaaaggaagcaggacaaaggacaactgactttgtgtccttatttgcctcttgaaggatgtgttagagaagtcttcagcatctaagtactatagctattacttctatcatggggacatgatatttgacttgcctctctcagataaaatttggaaatatgaaatattaaagatttaaacttttttgaatctttaatattagattctgaaattgaatatatattagtcatattatgatattgtgtttacctgtattttgtctaacagatttttt

SEQ ID NO: 131132 - DNA, 1073 bp, Homo sapiens
ctgccaaaagccactctttgctttgaaattcaaacataatgtggcctcagagcattataattcatgatcttttgatacaaataaatgaaaacaaaatgtacactctttaattaatgtttaaaaatccaactctttattagtaaaccaagaaatatgtgattgctgaaccaaattctgccagacaatggtatgctataaaatttttaactgggaaagatttcatactgcacgaaaaattctgtggtttttttctgcaaagcagagtaaaaaaagaaaacagtaacaacactatttttccttaaaagcttgttgttttttaagattgggattcagtcccagtctttgttttggtttggtataatgggagtaactggacaatgtggctacacaaaaatgaaataagacaatatgttcccatatgcagtgataaagcaagctgacattttattggtgtctcatatagtgtatgtttctaagtgaaagtgtatataccatgtaattcacttgagatcaggtatgtattccattttgcataagaatgggggcaggatgtggaggatgagaaggccaaattaagtcatatagattatttttcagtagacaaaaaggtgttattataatggagtgggagtttaaaagtcataagagctatactacttattagacaaaatttttttaaaatagaagtaactgcagcctgctaaaatgttacatactttttatgagaacgttttgaaagtattgaactatattaatacataacctcatttataatgtcactgtttatatgagctgattattttaactctaaattatccaagtgtctattttatccttatatatctgttttctgccttttagtatgaattctccaatattatcttgagtgagaagggaaaatgtggtctctaaaagattctagagaagctctttgaaaaatgtctggtttgttttttttgttttttggtttttgtttttgacggaatctcactctgttgcgaggctggagtgcagtggtgcgatctcagctcactgcaacctccacctcctggattcaagtaattctcctgcct

SEQ ID NO: 131133 - DNA, 1594 bp, Homo sapiens
tcataaaaatttatattaactcgtttgtatttggattcattcaaatacagattgaatgaatctgaacctgtcattggtttggttaacttattatctagatacttatcattgtgtaatgattccagtggccttgttgctaacaggttctcagcaacaggcggttgagggtgggcagcagtatcaggcttgcttgcttgcttgctttctctctctctctttctttctttcattcttcctttctttctttcttctttctttcttcctttctttctttcctttctttcctttcttttctaccaggtctcgctcatggctcactgcatcctggaaatcctgggcttaagtaatctcaaacaatcctccctcttctcttcgacctcctgagtagtggggactacaggcatacgccagcacactccactaagtttaccatgattccttctggtagcactgatgggaagactctcaggtttaagccaaagctaaaaagacaaaaaagcaagccaattacacttcaggatggaatgggtaatgatctaatgcgctaacaccctgtacatattgccacttctctttccattggaatatcttggaatttaaatcccatgtaaataaatgcaaaaactcccttatttggagttttatctggcaacatcagctacctgtgatattctgaaagaggaaaagacaaagacaaaggtctcctcaaacgtaatagtgaataacaaagctacaaaagagggaaattggaatcgtctttaacaaagtctaattattacaaggtaaagggtttagatgtctcctttgtttgtctcccagttagcacctcagaaggggagtagagaattgttaccataaactgacatcctgagtacaaaattgaagaattttctgaaaaatcacaattcagaatatatgtccctcccagtattttgttgttgatgttgtttggtccttcatcccgtgtgtttcgataattgtagaaatagaatattataaatgcagagaatcttttgagttgtgtattcaaagagctgtcatctctcctggatttaatctgaataaaggagtgatcgctttcaaatttataaaataataaaccagcctccaaaattctgggaaaacatttttctagtccttgatattaacttaaaggtaagattcttaagaagataatcactgtttcaaatttcaagagatgaattctgtggtctaagacaatcgaattctttgggctgatacacctgtgaatgttagcaataacaataacagacaaaaggaatgacagcagaaaggtagacgattactgagacacaatataaaagatcgaaatgtattggttattgtactaagtttatagctgcttctagtgtaattatgaatttataatatagaattccaaattattagaacattattcattagccctattaagaaaaagttatttttgcaagcatgcaaaattacatgtattacatgcatatgtgtgtatatagtagattgtgtatggattttaaggtgtggattataattttcaaagaactttaatacatataatggcataattaactatatatctttatccccttataat

SEQ ID NO: 131134 - DNA, 1870 bp, Homo sapiens
accctttttgaagatgtctaataattcaagcatcaccctgctcaattgaactaaaaatttggattgtgtagaatttcatttgaacagtagaattttgtttgaacagtatgataagctcattaaaatctatcacttgtgtgtaacctgatcctctggttaattccatgtgttttcctatggccttttagttctgcaaaagactgggcttgtaaagactttgatttcatttttttttttaacagatgatagcaaaagatatttagtacctagaaaggtaaactaatcctattttcatgtgcagtcaccctctagtgtaaataagtagttttcagtcttcaaatggaaaacattccaatgtcaaattctttaggaataggaataggaaaaaggattctgatgcagtgagtggctaatttatatatgatataaatttatatataatttaaatatatatatatatatttttttcctcctttctgccataatttggcttctccttttctgacataagatctatcagactatagtacaggtttcagcacagaagtaaataacagcatgtttccttgggagcaattgaacaacagaatgaaacagtgcttactgttttttgaaagttgtgtcagattgtcatggtaatacagagttgcatcatgttgtcatagtaaccagaattataaaacgaatttaaagaggatgaagagataccttgtgattcctttagctttaaagattttgttctaccgctacttctgtttattttgcttcctttttgcaaaatgtgtcacactgctatttttttaaaagtagccatggtacatcctctgcatggctagagggaatgatggaaatctttacttcttcccaaatgaagagttgaagcatcaaagtttaagtcatcccattctctttgagccaggtaaaattcagggtcaggagcacatcagatacactgctgtgtcaaaacatgccaactctgagcagggaggaagttccactccgagtgggatgaaaaggtatttcacctttcttaatgatgattcatagcttttctttcaagcgaaaaacatcctaatcttactttgaaggaaaagcagtattaagctttgggagccgattcatcgaactgtatcagaattggggtaatattgttttttctctttaattagaatgatttaggtcattataattcatcaagaggttaaaatgtgacccttgaggtgaaaaactaatttcaaggctaaaccatttctattattccatgagagagaaagagagaaaaaaataggcttacaagtaagttgagactttcgttgctggagcgcatccaataactaattctacaaataataatgactgaagaaaaataaatttgtcaactttgaagtcttgctaaaatcaattgttttaaatattctttctcttagctcctaccctcttggcgtaagcaatttgctttcgttctttttgttgctacattgcctcctctcgacttgctttttaacaaacgctttaagagccatgcaagttgcagcaagtttcaggcattaatagtggccaggtagtataatactatttttaatgaatgcctgttttctattctttactgtgctttctttggaaagaggcccacgaaacaaagtattaagaaaacacaccgctgccctggaatgtgtgtattagctgcagattatttcctattagcagattagctgcaaggctattggctcagaaaggtctttgagagtattttgttttgtaactgattcaagccatgggagaaaattgccaccatgattggaaagaagaattagctactgttgccatggacactggagttcacagtcccattgttaaatctagggcttca

SEQ ID NO: 131135 - DNA, 1050 bp, Homo sapiens
ttttgtagagatgggggttttgtcatgtttgcccagctggtctcaaactcctgggctcaagtgatccaccagcttggcctcccaaagtgctgggatgacaggcgtgagccaccacacccagcctataatttcttttgtaactttattggtatggtaaggcagtagtgcccattgttctgcctatattacacctgtccattgtttttcgagttcttttgttggcctcttacagttttctaatcttcctcgtcatttgactaatatttctccattcctgatgttgttaaatgaccttacctactcctctcctttttggatgcctctaatctgctgaggacttcaaaaccagaaattttaatatcacaagaatgcacctgattggtatatgcccacaatcaaaacccaggcatatgaacaatgccctttacaaaggcttattgatgtaacataattttaatctctgctatttttgtgtcatatataatgtcaaaaattgggcaagtagagggtctgccctttgaaactgagcagcatgaatcagaaaagctactcagatcacaaggatgttccctaaacaaaactggtagaattatccctttccactttcaatcatgtctctatttttcttttgtgtaatttcctgtttttcagaagaattagaacttgagcacctggagcccatttctggacttgatataagccccaaatatgataagggagtggaggaaatagatgtttcccaaggctggggtcccaaacccccaagccatggacccgtaccagtctgtggcctgttaggaactgggccacacagcaggtgagaggctgttgagggagcatgatggcccgagctccgcctcctatcagatcagcaactgccttagattcgcataggagagtaaaccctattgtgaacttcgcatgaaaaggatctaggttgcacgctccttattagaatctaactaatgcctgatgatctgaggaggaacagtttcatccccaaaccatacccctcatctgtggaaaaattgtcttccacaaaacctgtcc

SEQ ID NO: 131136 - DNA, 1024 bp, Homo sapiens
tcaagaatagatgccatcgctggactatattgtcattaaaaccaagttcaggtcgggcgcggtggctcctgcctataatcctagcactttgggaggccgaggcgggcagattacaaggtcaggagatcgagaccatctggctaacacggtgaaaccctgtctctactaaaaacacacacaaaaaaattagccaggcatggtggcaggcgcctgtagtcccagctactcgggaggctgaggcaagagaatggcgtgaacccgggaggcggagcttgcagtgagctgagatcacagcacagtactccagcctgggtgactgaaaacctattccatgttcttcacacatcaagtgataaactggcaacaatgtttaaaaatattgtttctatgtctttagaaattttctgaaggtacagttgttcagggtgaagatttttacagaattcagtaaggatggattataatatgctgaacatttggttgcttttgtaataatagaggtggacagctgagacaaatctagacaaaatcttacactgactgttttgtaacgacatacgaatgaccctgaactttttaagtaacttaagaaataggccgggcacggtgcctcacacctgtaatcccagcactttgggaggccaaggcgggtagatcacaaggtcaggagttcgagaccagcctggccaacgtggtgaaaccccatctctactaaaattacaaaaattggccgggcgtggtgctgcgtgcctataatcccagctacttgggaggctgaggcaggaggattgcttaaacctgggaggcaaaggttccagtgagttgagatcatgccactgcacaacagcctaggtgatagagcgagatcgcgtcttggaaaaaaggaaagaaaagaaaagttagctgaccactcttcagaaataatactagaaaagaaaagaaaagaaaagaaaagaaaagaaagaaagaaagaaagaaagaaagaaagaaagaaagaaagaaagaaatttagcacttttccaga

SEQ ID NO: 131137 - DNA, 2367 bp, Homo sapiens
gaaataatctgaactttattttgtagggagtaagaatcacagctcctggtctttgttccacccatgtatcattctataattgatttgcaaatatagaatttgcaaccatttgtggacaatggttgtttttatagtagtcccccaaacactctagagtttctggactcattgtgcctagttctcattccccttggccttggacatctacaagacaggctaaaaacacactaaatatatttttaaatagtctaagtaagatgtaatacatttctgaagttggagtgttgtagtggaattgaagccaaagcacttggtaaccaattggatgccagtaggaaatgagaaggtttagggaataaaacaagaatacaaggaagttaacctgccttcccaagactgtaagcaagttgtatgggaagtatgtagaattcagttgagcaatctaatgaaacacacatttggggatttcacgtgtgcccttggaaaaatatgtaagttattgtctataataataagagtgcataattttcgttcacagtcacaatgataccaaataaggggataacatggttttcaatgaagtaacaatttgatggtttgaattataccattaccatattaagaaaggactgttcattcttttctatcagctcataaataactccaggatcaatcaagatgatgacaaaatgtgtattgcatactggtttgcatctttgttaatacatgaatacatgttgctgtctttcaaagttatttttaaactcttagttttgtaaacattcattataatttttccaaagtcaagggaacttcatgaaatctggcctagccttctaattttttagataaaacagaattttattgtatattcaatttggagattaggctctaacctaccctatatttggctctgtttcaggatatttaaatttctttcattgtaatttttgttcctgtatttttaataattctggtatttttcttaaaatgtagaaaacaaatcaagatagccttacccaatttatgcctagtcttaaactttttctttttactattggtaaaaagtgtttttgtttttattttttgacagctagccctggacagtggttcaattttatggtaattcgcgtacattggtgtggcatctttaagtagtatcattcttttttttttttttgagacagagtcttgctctgtctcccgggctggggctggaatgcagtggtgcgatctcggctcactgcaagctctgcctcctgggttcatgccattctcctgcctcagcctcccaagtagctgggaatacaagcgcccgccaccacgcccaggtaattttttgtagaagtggggtttcatcgtgttagccaggatggtctcgatctcctgacctggagatttgcctgcctcagcctcccaaagtgctgggattacaggcgtgagccaccacacgcagcctaagtgtgattcttaaaagtattttacctacagagagagaaacaccatcaagtagggcttatcagtaggttgtgtaccaagaaagtttgactctttctgggtctttgtattgaaaatttattataaaaataatttgtcaaaaaattcccactgtgcctggtaatgaatattccctttattaaatattaaatacatgagatgccatttcaaaataatgtgtatgcatgtatgtgtgtatgtgtataaatagtctaagcatgatgaattggctggctatttttaacagtttcaccgccaccacttcctgattgtccctagctggctctttggcactcacacaattcacatactgcttgttaagtacctactgtgggccaaataccgtgtatcatttctagataatcttatttcagctttggattttggtgtttgcatggatactttgtaagctgtcatagccgatagcctttaggtgttttgaaacctacagtcttacaaatgtccacatttctgtactggtagcttctcttttcataaccctatgtttgcctggatcctgcatcaaagaaataaggggagggaattgataattggaggtaataagcctttcagtattctagtgtttgaagttaaggcttattagggctcaagtattcaaggttttctcatctgttttaagcaattggattctattatttgttggccttctctatctttgatgcctgtacttaagaaaaccaaaactgtaactcagagaagagtgtcatgacttaattgatcttgccctgatcttgagactgtattttgttctgttaagaaaaaaaggcgattcaaatctgcagcatatcaaggttgtgcctgtaatcttcctgatgattcatttttagctcacttttaaaccatatagga

SEQ ID NO: 131138 - DNA, 1835 bp, Homo sapiens
ctgattttttattttatgttctgcttttttattttagacaggcaagttgttagcatttttttcaaggaacaaagaacaaaaattatcttgataagaacttgtttctgaaaagctagattagctcttctctgcacaccaatcatgcaatgacagtacaatttagtgacttaagcagtacattaggattctcagcctaggcagaagcttcaccctcgggccagacctatataatagttgtaagaaaatgatttatgtgttgtaataaatgttacttctcaatctgtttgcttgttcaatggttgaggtcccaaaagaaaaggtctatctcaaattaggactggcatgtattatctgtcaactttatatagtactgtaaaagtcattcagctgacagtaatattagcggaatgttttatagatttttgtactgtgtgaagctttgtatgggtgacgagagactttgggtctgtggtgctctgtggtccgggataaagttgcgtgtagatgagtcgtttctgtgcttctctgtaaatgaacatctggctcacatattgattccatgtgtgaaaatgagatcagcccatataatgaccagaatcaatcaggcttcagccgaggagtaacatacactggtcttgatttgttagacaaccagaattggcagcaccttgcataatttggcaccaattgacaaagattaggctgtttggggaccctgaatggttattaatttgaaaaccccttatatattttgcagagtaaaatcagctgtaacttatttgttccagcccccttcttctcgtacgagccctaattgttttagacaaacgaacgagcttgcagcctgttcactttacacaggaagacatgaattctttgatccatacagtattctttagctcaaccttggagctatttactgaggagatttatttgcagacagacagtagaacagttctttgtgaatagaaatgagtacagcttctatgtgttttcagctcaagtttctgctacttactgtaagggagataaaactaagccatctttatttttaacccaaatcattcttttttaaaatatagttttaaaaactgaaaatgaattagactcttgacctttttactttttcctcacaagttatatttactagagcacagattgaactcagagaatgaccaaataccatttcttattttgtgaattgtgttaatcatgaagaaaaacttgtgagattttaaaatgggacaggcgttgattgtgaacattttacaaatgtgtctcactccttaattccaggcacaaataaaactacctgtgttgtatgaacactagttagttcaagaaaagcaataaaaatctacttttaaaaattattactgccaagtagttttaaagatacagactcatttactttgaatttaactagtaatatttaggtaagtatctaaaccaatatttaattttttcaccaattaaatgagagttattggaacagtctctctaaatgctttatatatatgagccaggcaatgtaatagtaacaataacaagatagtttcataactaagcctttctataatgccataagatatgaactccattaggactgtttgatttctacttgacacagaagagaaaaaaaaatgatgagtttgattaacaaaatcagttctagaagtgaatttcaattctcaattatatttgacaataaattactcaaccgtagtcatctcagagcttaatttgctgagcctcttgataaccagtatatgaaaagtcacccccatgtttttttttcctgcatgtttttttaccccattttttcccctacaaat

SEQ ID NO: 131139 - DNA, 1050 bp, Homo sapiens
tggatcaacttctttcaaacttccctagtgcaaattctggtttggttacttttcttttctgtaaaatgataagaacattaattagtcttgaaggaaccatttactgcattgcagatgattagaaaattgacaataccaacaaaaattgaattggattctttaggtttaatatttggcctaaactaacatatttcacctgccatgtgccacactcactgattattcctgagatattcaccaaacccttccccacacttggcagtgagttcattaatgacaggtatttattttttatctgtctccatagcctcaacacttaataacattcctagcacttaacagatgttccataaatgatgattaaatgaataaatagaagcctagtgtgattcccagctttgcctggaataggtcctgctccaataggaactcttatacctctttaaagagataaggagttcggcttcagggaaaacaccttgtagactccatttatcattacttttctaggttgttgtcatacaggaaaaaagaaatgatctgacacatttctttccagccttacacactaatacagtataaggagccacagagaggaattttaagattttttttaagggagagtatttgattggccaagatgtttgtttaattcaagagaaggaaagccccaaatgctgcctaaacataaactcacaattcaaaacattttagaaattatctggcaactttacatagagtccaaatgtttccagggtatgcagaaagatgccccaaagtcttaagtacccccagggaaagtagatcaaagtttagagaccatttagactcacttccaaaaggatctggcctcagagttttgcagtagtgagcaaaaattctagaaaggtctaggttcagaaaccatagcaaagttacaagagaaaggttttctagcttctgtttcttatgccattcaacaagatttagaaggaaatgcagccaaatttaatggtcgttacctgatgaaaaacagacatcctttggattatcctcaagcagaactgaaca

SEQ ID NO: 131140 - DNA, 1536 bp, Homo sapiens
aatgacatacacacccaataacagggagcgttggtcatttttgcatggaccaaaacaaaattgaagaagtactgctgatcaaaggccaatacaatgcacacatatcattctggttaggttgtctcctgagaaaaatatttctcagcagcagtatgatttattttgaacaatatctgattgaacagcattctagtaatgtagaaaatttatagacatctactaaattttattctagcagataatccacattaaaagagacaaaagtccatgttttacctagaacctctctgtggctccttttctccaccagaaagacaataatttcatatctggcagaagttaatgctttttaagttcttgacgtgtatactctgtggaagaagtgacctaaaaggaaaaccaaatagtttgataaaggataactgtaaagaacaaaaaaagtaaaacaaactactataagactaatagtccttgagacaagcgcatgaattagtgatgaagtattgctttactacatcctgaaaattctttacatttatttcttcagttgaatgaagctttctaatatctgtgtctggaactaattctgataaccttggcattcaaaatggagataaaggatagatagccttccacaaaacgcttcagtatggcaagaagaatcatctaatattgacaaataaagcaacgtgacatctgtgttgaattccaaattgacttgttgagctgtgcaaaaaagtaaaagaaggtgcttattttcaggatgtgaaatacattgggaaaagccaaggtcaaagatgaaacatgactcaatgccaaagattttcaatcttaatgaaaatctctttcaataagaaattgacgattgagaaacagtgtcattgttagaagttcgatgttcttttgggggtctaacagacgaagccccagagaactgacttttattaatagatagcttaagatttatagcttaggaagaacagattaatagtttttggagtaaagcctgaattatagaaggatgacctgagccctggcatgagtgatcaatcagttcagtgtctgcaactgcacaattttaagaactcttaaaaggctctttggccactgaaaatgcattataaaggataagtccataaccagccaagtctggaatatatgtttatatggctatacagatccagtgtttctttaaaaataaagcaaagggtatgacacaggttggtttgctgttacttaggatatgtacgattgaattgagcctaagataagtgggatgtactgggtaaaatgtggatgctggaggaggatgcacagaggctaatttgaatccaggagatttttccatttaggaaatagaattggagtcagggaagtaaaaatcttgaatacaaagctaagaaattgaattttccttgttaatcagggttcaaccattgatgtttacaaatgagaaaaatgtttcatgcaggttaatcctactgcaatattggcaggaaaggtggaggtcagcgggaagagacctctggaaacctg

SEQ ID NO: 131141 - DNA, 1063 bp, Homo sapiens
catgaagcataattttctatttttcacattcattttagagggaagaatgatacagttatttctagaaatagttgtctaagaacaatgaatttcttctctttatgatagggtccattttaaattatgttcatttatgtccaattcttgaagaaataaggccaagctttgaatttatagtccgcaaattttcttttttaaaaacaaactagttcctaaggaatgcagatttttttaaaaggcaaccaaaacctaaaaaacttctctccttttttgtcctcttattgcttaaaaaagtacatgaacatactgtttttaaatttaggcttttaaaaaattgtcctcatgctgagttcttgtttgccaagtttcagcttggagagaatttttatagcttttataaaaccctgaaaatagaaaattttaaatggaaatgcttacacacccttagtgacagccacaaatcttgccactttttgagaatgaaggtaattttttagtatttagggatggtagcaacacgttgatgcgatagtttctaaaggacagagcttttgtttagtcgtatgttagatatgttacattggtttatcatattaagattcatattaagatttagctgtatgttcatacatttcgtatgtgatataaaagttttaaattttagagtgcatttgtcctctaccacatatagtttatatgtagaaatatgtcttatccatctttttgatatgtcacctattatttaacttgactagcaatttaacttgcaagcgattcaccctagaagttagatttattgtagttgaataaactgttgtcctctcacttttatcatataaaccaaagggtcagttgccctttggggaaacccagaatatgtcagatctttgtcaggtcgctgtgggtctttgtcaggtcccaactctgtcacagggattttaggcaactagaaccacaggtgtcacttccaaaattgatagcttgttatactgcaaccagagtcaattttagattggagaagagaaagaaaaagatcggaaatgattgaagctgtgggcaccaa

SEQ ID NO: 131142 - DNA, 1050 bp, Homo sapiens
ttggcatttgatttatatttcatggcaaaatgcacaggtttgggtaatctcaggttcttaaattctttccacattaaatagtgagctaattctaacttttttactgtacttcttcgtgttactgcattaggtttttgaatctgcttggatgactcccgaagagcagtttagtctttgagaaaaccagatctccattgcttccatgaagatcttattaatatttagataatggagagtaacgaaaagaatttggacattgaatatgtctttgtcttctagctatcattctccccaacttaatctgtgaccctgagaaagttacttcatttctcttgagtcctcaacaaatttttcttacacagtatatgccatcttaattatcttaagtatgtacttgatcatctctagaggttcctttctagtcttaggttgtaatagtctttgtcatactggaaaaacatttttaaaaaccatcaaaatgtattctttttttctacactggaattgacatatggcactataaagatcttgtgatggtagaagtcatacatttgaacatgagaatattaatgacagcttgtaaccacagtatttcttatcctattctaagaaataattttagttattaagctggttttttttggtatgtcttgagtttatttgaacgattgaagtatttggaattgcgtcatgtaatagttcactgcaaaattaaagtaatttgtatgaatgagaaatggaatcagtatggtaaactcatttcattgtgcaaaatatcttttgcatggaaggcttagttctattaataattcaaggaaatttttaaaataattcattatacattaaaaaaactactaagtgtgctaacatcttgggatagactacggggtaagaaagaaaagagaatatggactctccatttaattatatgttattatctaataaaacgaatatatgcctttatctaataaaagaggtatagtgatattactcccattttccaggtatcaaaatggagacatagagtgattatgaaacattacacagctg

SEQ ID NO: 131143 - DNA, 3350 bp, Homo sapiens
aatttctgatggtttagtttgacgctggcaaaaggcaatgcagagaaaatatcacctttactcttctaacctctattttaaagtgatcggagctatgccatacagagtttctttaactttaataagtatatccactgtccctaataattttctccatttacactaacatctacaggggttgatgcaattttgtgcaactgaaagcttgtcaaatttggaagctccactttaggaaaaataattcataattttggatatacctttaggacaaaaattaatatttgtgtagaatgagaaaataagtcacagcaaattacggaatttaaattttaacaaataacatagttatcatgaaaacccaggaaaatagcataatatttgtgttcattatctttctgataatctctataatctttttctctcacatttttgtatttttgctttttgatcacctaatcatatgatgagacttttctaatattttctagagtgagaatagtttttgctttagcctggaataataaaagtgtattttttatttttgatgttataggatagtttcctttagctttacaactcattattggtgtgtgatttaaatttatagtattgtcattccatttggaaacacttcccatcaaatttcttacatacatactgtaaggtttggatttgttttcattagctaactaatggctctgtgcattgagcctgttgctctttactaccagaattgtgtagtgctgggcatgtggaagttcttctgggatatgacctctggcccttcatttcctgtcctacactggtggatgtttggaagcctttcctacaccagagcggcttgctgaacatctactggatccagttttagtatgggttcttaaaagttttactacatagttaggtaatagtcaaaattaacacaaatgcaattatcaaacaaacccagtcaaccaggattgaaagtgtcaaacagtgcaacaatcaaggccattctttgtcatgatcaagagcacagagcctggagtcagactgacaaaggtttgagattgatgaaagattgtcaggtgactttttggtctctcctacatagtctggaaatcagaatttggagctttaaactttaacatgggtaggatgccaactatgctttaaagttattttctttgatgcagaaagacataatttttagtatatcataacattaattcacaccattaatctttttttctctgcatattgaatcataggacttcttttcacaacaatttttgttgttataatgttattttaatgttactaattagccctgcagaacccctatgacatcctttggcatcgtctcccatcgtctctctctctctttctctctctctctcattttaataataactgttgtataaaaattgcatgaggaataagttcccaactcccgtgatctgcttataatagctgtactttcttcatatagtcttaagaggcatgtctagtttaagtaccttccagagaaggtgtgtatttatgcaaaacttttcaggggcttgttaaaagtgaagcttttgcatgatttgtataagaaagtaattaggatatctatctaaatgataataagaattcaatgagtacagattggcaattccactttgaagattatggaaagatagagattttatattttaaaacaatttgttaggaatatcaaagcagaaaatattctagatttggatgaacaaccatatattttgtttaaaaagcaagaaattgccccagattacttcttgcattagcaatgtatatatcaaagactccggaaaaggaatttttttttttttaaccactaaccactccttgcaaaaataaggagcattaggactttcctccctaccctttacttttttaattctactaattgttcacacaattataaaatatgtagaagattgttttattatgtttttatctgtttgttcagtgatagtgttatatagtaaaagaacactggtttgggattaagcttaacggtgttttagtctgagcctcaagagactttattcatactctttaacctctataaacctctgcttcctgcactccaaaatgggactaactatactaccttgcctacttctaagtttgctgtgagtatcaaatgacaaaatgtgtatgaaaatgacaagccaatgtgtcatccttgcaattaccatagttggttagaaagatattaagcaacggttaaacttttaaatcctgttttacttgtttttattatgatagagttctttcttctattatttatagagttatatatatgtatcatccgtatccaaactaatattaatgttatggcaacttgtgctttttgagtctttccaaagatttcaacatgattttcataaagcatatcaatttttttcactcacattgtgtgacatcaggttaaaaagttactaacttaaatttcttagaaatattgactagaagaatatataacaatataaaatgtagagacgagtatgaaatatatttaaaactcattacgatactttagttcatttgctatttgtacaaaggaagctcaagtaatttcagtacctatggcaagatttatacattctgtaattagatatcttttaaaacctacggtgataattttcttaaaaattggtcttaaagtaacattgttaacacattggtaataagagtattcattgcctttgttttcttttcccctcattttatatacaattttgttaatgactgtagatttagtggtatatgtggtagctcatgtaatgctctagtatgctcagtttaattatagatttttttaaaaggataattgccaagcttatttgtcctgcacaacatcattgggaatactttaaaaagttttcagggaatcagagaaaaccaaactaaagataatggcctcagaacccaaattatttttactctgtcatgaattttgctaacaaaatcaaaataatgagtactaactgacaaggaccatttaataatctacccagctaaggttagcagtcaatattttacatgatatttcactgataacttatttatcatattttacatgataacttaagattctgtgggtcttaagttatgcatattctcttttattactttaataaatattaaaccacaacatgatgtaattttagcttattactaagtattataagagcacttagaatataactttttacaattaccaaaaattttttaatgtcttatcaacatgaaatacttagtcatttatttagaaagtataagtttattagtggatttactgtgtcctgatttaggtcagttaccttaaaaatacgttcatt

SEQ ID NO: 131144 - DNA, 1319 bp, Homo sapiens
gtacttcacagaagtctaagaactttaattaatagtaaatagcaaagtcaaacacaaatacattcccttaggtaattaaataatccttttgtgagcctgtcaaacagtccctagtgtatattaaaagaacatgccacctacatttttattttttgcctaatttccaagttttgcataatttttcatagcagtgctaacagataaaaataatagatgtcatctttaaaatattcatgttaaaattagttttccaaagcctacataaacaataagtttgactactgagtagattatacttgtcatctagttcatctcccaacaggttaaatggctttaccaagaatctacagcaagttatagggagaagagctgaaagataaatgaggtgagatgagcctggaaaatacccagttttatgttatttcttttttctgtactttaattgctctttagcctgtttctcctgatctcctagggcacaaaatgtatgggtatgtatgcatacagagcattcctggaacttaaacctaaggataactgtgttgaaactgctgacaggataaaaacctcatgtaattaaaactgccaatcacaatcaggacatatattaatgctgttttttttaaagtggttccatgtcatctgttgatgaatttgcaaaacaattatgattacattgacagtgaagaggtatgtatatgaatcagtgtttagaatctagatgcttatttccgtctttgctgaattgaatattttagatggaattaaaagggagctataaattttgcaaagttactgccaaaatatagttacaaattttacaaaaagcatttcttgaaaagcatattctagattattttgtttagcaatttatattttagagttttggaaaaacattatattcaatataattaattcttcttttcttttgaactgtcatagaacttcactctgtaatcttatgtttttagtaaatacagacttaagactttttaatttatttttcttagtttttatttctttccatattgttattaatgttgtttacacaatatgggacaaaaccttttgaatttaaagttataatacagaaaatatttttatgtatcctgtattttctgaccaaataatttagtagtttttttgttggcaccacatctattgtgtactaaatacactggaaaaaaacaaaatatatataatttaaaattccgctcttaatttttttaatccaatgatcatctatcgaaatggactttgagtcactaaataaattattttgaaagagaatctttttatgagattttagtttattccaa

SEQ ID NO: 131145 - DNA, 1983 bp, Homo sapiens
tgttattataactcatttcctatgataaataggtacacaataatcttatagttatgtacaaaggggagtgtaacaacttttttcacgtaaattgctcagcttgcaaattattatagagtttagtaaataatcagccttcagttttactttcccagaaaggttgtatcagtcttttatggtgactatttaagttacttacttttttctgcagtgattgcttcttaatgctgaaatcagaaagaatgtcagcaagaaggagagcaggccaatttataattctccatttgggatatatgaacaagcaattgattatgctttgatctttccggttttacctgtccattgaaatctaagatggctggaaacaaaatcgtcctcatttcctggtaatgtgttagaaaggttctaatttggggtaccttactcagattctgacactttgagaatagataaccatgaccgttcgatttttatttagaaggaacagtttatctcaaccctattagctgaagtgtaataccagaatggcttctttttattaatgctcaattatcctgagcatttggggaggtaaatgtctcttcatttattaactgtacttttttaaagttgacttttcttctcaggaccattttcaagtgagggtataattggctagtgaaagagacctttacctcacagtttcagttttattataaattgcccattagtgcattagaaacaaagtgaaaaagtgagaattgtaactattcttttattctatttgttctaatcctgccactgaatttttttcaacttttttttaatatatgaactcagtatgaaagatgttggggaaattgaatacattattggttaagttgtcaggaatagtatgatcttcaaatattcatttttctgacttcaaaactgaacaaagcctcacacgcatttggagttaagctatttcaccttgtatattaaatataattttgcacatctgaaaaatagcaggtaatgtactcacctaaacgatatcattcttttgtgaggcacatattttcttgggagattagagcttagagaataaagattaagtgactactaaaaattaataagaaggcggagtcagaatgaaaaaaaaaggctgagggctgaagtctttgtttatatcagcttatataatcaacaccttctctttatcaaattcttgaagccatgagtaataacaattttattttatgaggaaacgtgatatcccctggaaaacttgtatataaattgcacagtcttatgttcccaaaggatgctgggcccttgaaagaaacacagggttatacatatattagagggtaggtaagtagctggaaaaatctatgaaaggaagcctcacatcagtgtatctctcctagaaattaaaccatttggattctccttcctaaaaattccttggtaggagaccaagtttgagttattgttcaaaattgggctactggcagtgtttcaagggtcaattctgtaattaatccttgtgtgactatctaatttattgctagtagaaacaaatagtctggttctttgacacataatttaaggcaggacagtctggggatcccttttctaatgtactagaactaatgttttgtctttagcacatagcttattgccatttctatataaggcatgaatttgtgatttttaactgtgattttgttattttaaaatttacagtacttaggcattctctcttctctcttgctttcagaattgagtccctttctaacatttttgtttttgtccaaattgtaaatgtattatattgttggaaaatagaagaaagaagcaacagatttagaatgttgaaagataataataatactgttttttaaaatatattacctactaattcaaacatcttcaggttttagaaaactagacccatgttgagtccattctagtattaccagcattaccagtttgagtagatgacccagaacattcttt

SEQ ID NO: 131146 - DNA, 1048 bp, Homo sapiens
aaataatccctcagccagtatttgtagattttaatttactgcaatatgcctgaaaagtctttgggttatagattcttcatctattctctgacttacagttttcatcagtcaaatatttgctgtactatttaccatgccatttaccatgtatggtaaaaaaaaaaaaatgcgctctgatttcattccatttcttgcttagattaggtagacttatttcagaagtattggaccaattatagatattttgaaatcctggtgcaaatatgtattttccaaggtctgattatctaatctgtatatcgttttgtatgtttggtgactctcccaatatctctctttatgaatatctcaacatcgtgagtgtcagtagcccttcgactcctttttcttcagatattcacaagcatgcagtccctcagatttcgtcattcctcatggcaacagccccatacaaccagcaactcagaaaccccgatctgtgaccacatcctcccattctttcttgtaccttctccatttcttcagcctttatgaaataagcacccgcctccatcagacgtcttcatgctctggattccctgttatgcctccacttgtgctcagcgatccttttactggtctttatttgactgcccatgttattcctcccaaacaaggctcttcactttgttttttttaacccttctcagctatgtattctaaactcttactctttgtaagtaatattttattttaccacaaaggcatccccagcttcctcccattcctaacagggaaagggtactccaccttctttcctaacctgtcttctttaatccctttcatccgtccttctgacttccacactagcctttgatttcagtcttcctttctaccaatctatttatttctgcacaaaagtatgttaaattatcccctattttctttacattttcctctgaagctttttcccttccttcagctcatggcctagagctgaaagattcctgccaggttagggccgtagttaatggattcaacagtaatcaacaagtatcttgaatttgct

SEQ ID NO: 131147 - DNA, 1120 bp, Homo sapiens
taactatgaacgttttccagaagcatttcttagataaattattttataaaaagaaaaacaacacaacatctaagatttagagtggaagaatatacttgtagttaacttccttgttgatttaaaaaatatatttggatttattttggcagggtgggggaatcatctaataaaaaatttaaagcaaacttcattttttctaaccagagtgaagagacagggagagaatcaaatatgtgtgagctccctctgttgctctgtaacagcattttattcatgatttgtgatgtgataaggaaatttttgctaatgtgtcaaaacaaattcaattttcctttaaggcaatttataactttatttaaatggaatataaaggaagaaccccctatatgtaaaattctgaccttcaaatttatgttaatatttttaaattattaaaacattaaaaatgcatctatttctcaccactaagagggaaaaaaaaaacaaaaaaaaaacttcagctatatttagtaagtactcactgaagtcctaaacattaggataaaatgcagggcctaattgagtaaagtatcaactgggatgatgatagtgaacaggttggcaaatttgccaactggatttatggtaccttttatattaattacataagagtaaaatgtgaactcacaaaatagtaatggcaaaaatgaggagttgttttaaaagtatgtaaatggcattttacaatgctgtgaaatacatttttttttttttttttttgagacggagtctccctctgtcgcccaggctgcagtgcagtggcgcaatctccgctcactgcaagctccgcctcccgggttcacgccattctcctgcctcaggctcctgagtagctgggactacaggcgcccgccaccacgcctggctaatttttttttgtatttttagtagcgatggggtttcaccatgttagccaggatgatctcaatctcctgacctcctgatccgcccgcctcggcctcccaaagtgctgggattacaggggtgagccaccgcacccagcctgtgaaatactatttttatggtaagctagaattttaaaactatttcttgcaagtttaggattaaatgaattacatta

SEQ ID NO: 131148 - DNA, 1684 bp, Homo sapiens
atattatccagcaaaatcaggataattcctgagtcggaggctgcattccagcctctatgtcccaggctggagcagtggcaggatctcagctcattgcaacctctgcctcccgggctcaagcaatcctactatctcggcctcccgagtagctgagactacaggtgtgtgccaccatgcctggctaattttgggggattatttatttttattttaatttttgtagagatgggattttgccatgttgtccaggctggtctcaaagccatgggctcaagcagtcttcccttctcagcctcccagtgttggaattacaggcatgagccaccatgcctggccaaatttctttatctcaattgacccatcttcaggtttgctgattcttgcatctaccaactcaaattcgattgctttacttttcaactacataattttcatttcgttctttttgaataataaataataaaatcaggaactgggtagaggatgggactagacataaaatatttagaaatggtgcaaaaattagatagctgaagctaaatagattgagttagagcccagaaattttttaaaataacattggaaattaaaatgaaatttatctggaaccgctaacctttctttgaaacccttgttgctacctataccagtgaacctatcatgctgtgttacagtcatgtctttactgataggtctcctgcactagcctagggaagggttctttgcttcttattccttatatttctaggatctgagccattataggccctcaatacattagctgaatgcagtaacaaatcaggaagtagagttgtttttacagccttactgttaggttgactcaggtttaacatgatgtgacatttttaagcatcttggacttactgcgtgcacatctgtagtttcttttccttatggttttctttgatgtagatatgcaaggtaagagaatactttacttttttgatattatgttggagaggttgttttaaaaagtacgactttagatttagaagaactgagttcaaactatagatctataacctcttactggctcagtagtcattaacaagttatttacattttctgaatctcagattaattgtcagtgaaataggagttgtcttcttgtctctcagtattttttaatattacaatagaaaatactaaattagaatattagaaaacatatggtatctagcacagagtatgttctcagtaattttttattctaaatattggtcacagaaaaatgaatgcatctcagaagatacatttggaagctcattttttttttttattttctgaaattgagaatttgaccctcactctccactctcagaaattactcatagtcatttgggtagttggattgtctttccattggctttcatatataaggcaaaaaatgtccaaaaatactgagaagcaccaaatggtgctagtaatgcaattcatgaacattttccaaatttgctagcaagatagtcggtaaaatgtgccattttcacatcttgttcatagagcaaacaaaataatacttaactatgcaataatatacagtattaaatccccctgggaaaagagttggttttaaatactttgaaaagaaactttcaagttagtgatttacacagttaattataaacaacaagacttgtaattaagtgttgccattttgggt

SEQ ID NO: 131149 - DNA, 1027 bp, Homo sapiens
atgaaaaggaagttcttcagtgacacaaaaatgaatgcttcagaaagaaagatttaataaaaatgtatcacttgaggtgtcagattaagtgtgggtgagataattgtagcagattggggaaaagatcataagcatttgaaaattttattttctttttaattttcatgggtatatattagatatatatttatggggtgcgtaagttgttttgatacaggcatgcaatgaagaaattttagaggatctattatgtgcacaagtttatgtaaaaaagacaactggtatgtaattcaaagtttagccaaagtatgtattttttgtgttttgacatataattcctgattaaataaaataattaatttaaataatataattagtaatttaaatggtgattacatttttttttatgattccccactttaactgactttttcagttaactgactactactgatcagtcaactgataagatgaattctgcagtaatggaagatcaagaaatgctattctcaagatctttttattcacctcttcaagaatcctttttatttttctgagaatggaaagttctaactaaattctttgttgctggactcatttcgttttattgtggtttatttataggaggcacacagaaccaaccaccagtcatccatcgcttgttttgagtttttctgttacaatattgctgatctttaatatattccttaatatttaccaatgtcttactacattttcttattaattatactttcccactagctttctgatttcactataacatttgtgaattctcaaatatcgctgttaaatgtgtccattgtgctgtttttctattttgtactaaagcatgttaagctttcttccatgatggaatttataactcaagagaaataaaatcagattatgaattctaaattctaaggaatgagaaaagaatgtgggatagaagagacattgcggtcaagaggtggtgtgtgaagtttgaaagttctgttgccaaacatatgcaactctcattcaagag

SEQ ID NO: 131150 - DNA, 1096 bp, Homo sapiens
taagttaagagtcttgccatgggccataggaggaagtcagagtctaaaagcagggtgcaaacttgggagtggccggcgcctaaatccttttccacagccctaaattagaccttctccctttttctccccatctccccgtctttatttctttttttttctaagttctggaaaggactctggcgtttttcctttcagtcttccttttagagagtagtttttttaacactgcccccagaaataaataaatcatcttagtataatagctttaaagatctaatgtgtctaatcaggatataaatatttcggaaagtcaggaaatgaattaggtttgggtgcaagaaaggattccaaattacattttgcctaataaatatcgcatccgtaaacagtaaaagtaatgatagtgattagttaacagtaccaaataaaacgtgcatttaaaatgaacctgaccgggcatttttgtgtcatgctgactgatgtgtacacagtccattctttgaaaaatcaaggcgctcatttgaattgtaaattgccaacactgcaaatagtaaattgcagtagtcttattgtgctgtgatgtgacaaattacaaatggaatattggctaggcttccatatcttgcatttctcttccacttgctgctactatcaccattaatctcttttgcagaagttctatggcaaattgttctggacatggaaaggacattaagttgcattgttgactattgcagggctctgtgtggcttctctgacctctgacttctcttattggtgtaatccagtatagtgatactcattttgggtcctgctgtgtgtggatataagggttctggcacagtttatgtctgacatttcacttaaatattgtattacggtcaagaattttggctgaaatgtgtcaagtatatcttaaagtggaatgtggtcctttaaaatacatccatatcagaaacataaactatattaaggatgagtagcttcttagtttggcctttcgttttacaaatgaggaacctgagattgaatgctgttaataaagattagtttttggatataaggcaggctatgtaactgtcagagctgaaaaaca

SEQ ID NO: 131151 - DNA, 2497 bp, Homo sapiens
tctagataggaattagagagaatatttaagaaaacacagagttaactattaaacttgacgtcttccaccatccagtgaaaaatgctactgaatagaggaaggaaaagtataattcgtgcagtttaattagataggttaccacactgacaccagtggaagaaactccagtgtgaattcagacagcagcaccttatgtttctttatttcagcatactcggtcatcagtgtattctttcttcctgtgcttgactgcatttgatagtagtttctgagtgtgaaagctttgtcaagaaggatcctttccaaccataagcgtgcatccactttggaaactacctagaaaagctgcaaatgataattttgataaagagaattttgtttggaagatactaaaaatacagttaacaatgagcaaatagcattctctgacttactcgaaggaccagtttatatgtaattttagatacctgcatttttaaatgattgtatttattagtatgaattttagaaaaaatattaaaagaggggaaccaaaaaaagttatatcttgctttttttcttgtcctttccctccaccttcttctcctccttctcctgtagttaagttcaattacttgtaaaatctgaggttcatcaactacagaatttcacaaaagcaaaaactgggaattctacagaagttacactggagaatgatttaataaattaatgaaagggtgttaacgaatgcaaatgttacagcattggtggacgtaagtgcctccatatcaggcaaaaatggttgtgtttgaatccttgttgatagaaataacattaagttattataaatattgtacatgaaatgggttttcttaggctgctggatgtctaataattttagtgagtgaatcaataaaatacagctttttaattagtatttttaggtgtagttggaagaattgcttagcacactgtggtgttaggtatagctctagcaacatcctcagcagatgccagggaggtacaggacttagatttcagtggcttcctggcccttccacctgcctccaatccagcattttataggtcacattcatgacattcctcagggtcaggaagtaaaatatttttatacattaacttactaaatcctcatagtaatgctatgagatagatactataactcccatttccctgataaggcaaatgaggcctgaagaaggcaagtggctggctgggagttaaattaggctacttagtgatgggctgcaatttgagatttcatactagatccttcctcttagccgcttgtttcttctgcttcctttccattgttgtgttcacaaaaatgccacttcacaggtttgaaattattctctttttagcctgaaatgttctttacatttcttgataggaggattttattttatgtctaaatacattttcttgttcacttttgtcttgatgaattacaagtaacagtttttaaattccatgtcttaatgtttaggatatttgcatttttatgttttattattaagggaactgtcaatattatgttaaacagacatgagcatcgaacgtgttgtagagcaaatttcagagaaatcacttcttaaattatttttgtcaggacaaatcaaagaattgtataagataggtaattgatctataaactggtgaaggggtcattttaaaatccaggctaatttaagttagattcttacttgacttacagtattgtgttggctttggttcatttttttcaccttctcctggtacataaaaagaagaaagattcttggcttaaacaaatcgctaaagttaatcttgtatgaagaagaaaaaatgaggacatcatttttcaatttgctaaagagttagcctcaatttttaaaactttttatcttggtatatagatatatattttttaaatgctcacttgcatatcttagaaccaaaggcctaataacaaaaaataaacacttggttctttcagaagaaaaatcacagatggcaaaaaaaatttaaaaaaaattattggatcttttgaaagctaattggcaatttttatgtcattgctaatcttgaaagagacaatagataaaactccatattagaggtggatgtgtaatacataacccaatagcaatagcaacagagctgacatagccacaatttagtttaatccttgtcacctctatgtggtacactgaggtcctggaagctgtgtcttttccataagaccatgcctgcttccctataacagtgatagtgaggataacaacagcgagcccacttacttattttccctttgtgtttcaagtggtggtgaaaatattctcagtcttttttttttacccgtctgtcctttgggcctccacatcccttaggacaccaacctgcttcaaaactgccataatgacttgctgaaatcgtttatgtcaaggttaaggagagtatagattctctgctttttgcaagtataaaagagaaaatgtgagtcttctccctgtat

SEQ ID NO: 131152 - DNA, 1627 bp, Homo sapiens
tctctctagagggaggcaggttgggagaaaacagagaagcctaagaaagaagttctgattgccctgaagctaattacggtgactgccttctatttgaaacactaacctgtgtgtgatgcgtttaatgaccagagaatcaaataacttgcttaaaatcctagctctaggggcaggtattcacactcaggtcactaccatacagccacaagcttaaaccccatgcttcactggcccagctaaagctaaagactcatcagattatttcagcttagcacagagttaaaaagacggagaggcagagggagagagggctatagaagggaagagagagagggagaaagggaaggggagggcgagaggtagagacagagagagagaattgagtcattctttgttccctttcctgatttaaaaaagcaagtgatgcttagaaagtcagtttaacaaagtatgggtaataaaagcatcttttaatcatttgctatttgatatggcatttttatgattttatcaggcatgaattataccatttgatatatttcttaatataattaaaaagtaaaattaagtaaacatcccgtaatttggatgctagattaaaaacttaatttctaggaaattacaaagtctgtgatgaacttcaaatgtagttgacaactacactggcagttttattatttaaacatttgaactggactttgtgggaacagttaacgtaggattgggacgtttttctttgaattatttaataattgcctcttgtccgtacttgtgacatctgtgcttctgttttaccaacctggatctcgaaggaacctctgctctgtgttaaaaagtaagcaaattttaactaaagttgcttattcagctcacagtaatgaagagttatgtaaactgttttgcccaagtttacagatgtctgcttatattaggtacttataatagtagatattttgaaaagatttttaaaaagtaatttatggaaataatttatggaaatgttacattagttaaacactaaaacctccgtggctctgtgtgtgtgtgtgtgtgtgtgtgtgtgtgtcacattttacatgccagagagttacatttatattttttcctactttatccattggatgtatattatttcttgaaacactaaggataagaacatgccaaattcagagttacttacaaaagcaaatattattatgctatcactgttatatctttgaaattaaaaacaaatagtatcccaggtatcacttaagtgtattagaatatagatttgattgttagagaaagtcacctattagtacgatgtttttatattttttgtttatttagcattttttagctagcattgggaatcttgttaaaactattgcaaatgctttttaaatatatatgtatatagtgtatacatatgtgtgtatttaattaaatgcaagaatttaatttttacatattatataaatatatatattcatttcaatttgttgcatgttatttattttgaaagttgcttgctgcccaccattgacattttctaaatatgttcttacatataaataatgctagcttaagttcacaatgtggacaatttgaaaagatattctttttctttaggtgagggatgata

SEQ ID NO: 131153 - DNA, 1406 bp, Homo sapiens
ctgttttgtttagcgtttttttttttttttttaatagagtattatagtagagaagctacttgaccaaggttcctaagtctgtctgagtagctgcaaacatttgggcgaactacacaactcaaggaatatagatagccttttcagctgtcaaaaggggacaggggaatcccttttctactaatcgtccatctttgatattggagtacaatggactatatatgagaacattcttaccaattgatgtattaaaacttataacttttgcttagaagaatttatggtattgatgttatcatcttatacaatatgatgttttcctaggacctgtcatattggaaacataattgatattgactcttgttacaattatataatgctgaatacatattcatttgcatgaaagagattgacagtgattgaatttagcaggatctgtcataagccttgagcattcttttcttaaaggttcctgatagcagggggttagggagagatgtttagacatttcaattttttaatgaatttattgatatacagtaggaacagttcggctttcacattaattcatacatttcaaagatttttctttgtgatagaatgatgtaaagctattatatattctgcccagaatgtctctcatctgtttctttaaaaaacgttaaagcaccattgaaccaatttttacggtactattaatcagtgtaatcagtattaatacactactttaccagctcagtgccacttgtcagtaatatgacagggtgaattttacatcttcttcacaaaggctttcatctattagggagagaaaaaggagatcaggattttaattgttagcaatcagaagcctatgtgattaagacaggcattctgaataagacacagcacagattatactgagaatatttttcatcctttactaattcttttatgaatttgaatgtagtcttatttacctgaaactttaattatagactcaaaggagagtaatatgcctattagaaatataagaatttaatgttaaaggttttaatgtggttctggctggcttctttctctctttatatcttggcttgcagtgttcccaaatcctcaggtttcctccaaatgaatgttgttggccaggcacagtggctcatgcctgtaattccagcactttgggaggctgaggtgggcagaatcaggagttcgcgatcagcagggcgtggtggcgggcggggcacctgtaatcccagctactcaggaggctgaggcaggagaatcgcttgaacctgggaggcagaggttgcggtgagctgggattgcaccactacactccagcctgggcgacagagtgagactctgtctcaaaaacaaacaaacaaaacccaaaaaacaaaaacaaaaaaatgaatgttgttgatttg

SEQ ID NO: 131154 - DNA, 2863 bp, Homo sapiens
tacatagagtgagttaaacattcagaatgtggataattcatttgttgattcagtcattatttatttttacagacactctaaatgatcaagattctgatctgggcattgcaattacaaagttgaaatatgcaagattcctgcccaagtaaaggttacatctcaataatcttggtaaaaagcaacaaaaaatactacttactcaacataataaaaaattttaatatattatgatttatataatgttatgtataaaaatatgtaattttggtactgtttaaaaatcaaggttttatgtaaacttaaaattggcccactatcattaggacacacgctttgagtttctttagtagcagatgtaatacttttgtgaatattcgtcttattctcttggacaccttatctccctattaggtagtgatgcatttttacatttcagcattctagaagtgtgtagtctgtgaccattgtactaggtcaaatttaattagttatttcttggatgaacctttcactgtggatattgccaggattaaagtttgaaggtaagagggctttagggggtggggggaattgctgacaaataaagtaccttcaatgagttgtataaattggagattcagtttttataagagctaatgggaacacttattataacaaccaaatggttacaaaaattataagaagagtgttattgatatagctcaaatatggtacagtttgcagtttgctggttgtgtttagttaagttaccaaggaagttactatgctacagtttttaattaaaaatactaatttatttatttctgtactgtaacaaagggatatattgcataaatgatggtcatttgctgtataatatatttctgttgaaaagttatgcataaaattcttagtttaatatgcatttgattttccactcatgattactaatctttgcattaaagtaacaggattattgctttttcatgatgtgaagggataaagtggtaggagtaaacaacagatcagaatatcttttcattttttttaaagaggtgaaatgactcccttaacaaattccagcatttttagattgtaaagtacattatgtaacttcattcatcatgtagacctcagacagatactttaatttttttttgaaaaggtcttgtagcacacttaatctgcagatcttttctggcaggaggaaaaaaaagcatatactgttagatttggtgacataaaggtcaaaagataaactgtaagtgatacctatgtttatttttttgacagtgttaaattagcaacccctcagacctctcttggagcagtacaacctgagtaattgaacatgtcgctggggagtatgcttggttaagctgattcctattatgttgacttgtcagggaccaataattaaagctgaagagcgatgctcattagtgtctgcaagatgattcgaagaatgagaagaagtccttgaggcacacctgcaaaaggcaggcattgcatggaggtgagagcagacggactggcctgcttttctgctatgttagcaagccagcgataaaggggatacactaaattaagtgttgcaaatgtattctccccaatttagattataaaatgcattttacttccgcctttgaacataattttattccaattttattccatgtaatcatattttgctcaattatgcttttaatgctatataagatgttttagaaactagatataagtctattcaaaagcactttgaaaaactttatactatgaatcatttcattcattttcctggaagcatcataataatcaaaatctgctttgcttctttgaactctcaatactctgcacgtaaaacatgtgagttatccagctttgatgataaagactttagtggcatacatttgtcacatttacttcacaaaaatggaatttttaaatgtgtatttaacacgtactaaaccacatacagtatacaagcattggctcccgagaaggccagaggaaaacactacatcataagtatagaatttatatttatcacaacttgagcaaagctgttgacttttggaaacaattcaaactttttagcactggaatgatacagaaactcaatcctaaagctctgagaagcatttttcttcttttgaaatttgccttaggtaggctcactttttacaaatctatcataaaatcatgggatatacaaatatcctaatattttggaatattaagaaaaataatttattggatcttttttctgtaatctggttttgaaaaaagtgctttatagtggtgaagtggcctttttacttccagtgttgtgcctgttaaatttatcctgtgcactttggctggagggatgcatgtgccttttattcagagtgaaggctggagtctttacacagaagtcctccgtgtttgtatcttcaggagtcactgtgagattatctctttgaagaggcccttcctgaaactaaactttgtagaacttgtattactgatattccatgttagcatgaaattgtccgtgtttcggtttcctccaactgaaggaagtccctcaatggaagggactgattctcgctaatgtttacatgaacagtggttggagctcaataaaagttggttaaacttaacatagtcaaggtgcagaagagacttgcagggtagttatagatttccaagaataccaagggctttagaagtcaaatagaacaacctccaactcaatgtcaagaatttcttacaggatgttctttaacagataggtcctctcctggcttggtagaagatttccagtaccagagaggtcactactttgcaaagtagctgtttctagattgatcaactccaatttatagtaatgacaaatggt

SEQ ID NO: 131155 - DNA, 1135 bp, Homo sapiens
tgatgttggaagtgagaaacagatgttgaaataatcagtttcatttaccttacatactcctacatttaggacatgtaatcttaagagtccgattgaaattctacctgatatgaaagaaattctacctgatatcttactgaatgttctaagagcgaagttagcagtacagaaaaaaaaccaagtatattttttaattggattatcatttaggaactatccattcagaagactgtgaaaactgtgattgttaagtgtctgttaaactgtgtttgcctttgacagttagtagcttctagggtttgggtgtttggggaatgtagctcccacagatactttgggaagagataggaaggtatcagtaactaggaagtagaaagagagtccctcagtgtttgaggtagaaccacttattttcgccctcttgccctgttccattcatgctcattgtcaaactggtctcagtcaccctgttcttccctttgtccttctcctcacctacccccgggcctctcatctccctcttcacactggcacgcctttcaaagggccttctcctctgaacctgtgccatctagagcagctgcccttatctcaggactccattgacttgcccccttttctaatctgtttggaagccttatctcttcgttttggcctctacactgtaatttatttctgcttctattattacattgataaatctcacatttaaccagactttgagggatatgctgttgaactgatgtaaatcttgaatcgaaaactgcggtgcaatcctcattggtcataatgtgtgggctgttttgcgcataataactgatggaggcatctcagttttaaagtttgagaatgaagcattgttcagttttgtcaccctgaatcaatcattttattttgtgcattgttttatcgtgatgtttttggaataaagattggttctaggaaaggggtgggtcatttcatttggtgataacggaaatgcccttctactttttaagtgtctttggtatgaggtggggccctaggtagggcctggatgtctgactgtcctgtcattttgaaaagctcccttttaagacaagtgggactctactcttaggttatctctgaggacttgaaagaaagggagaaaaaa

SEQ ID NO: 131156 - DNA, 1762 bp, Homo sapiens
tcatgacttaccatcttttgagtttgagacatatgaggatgagaaacagggtcttaaataaccagtgatatagtttggctgtgtccccacccaaatctagtcttgaattcccatgtattgtgggagggacctggtgggagttaattgaatcatgggggcaggtctttcccatggtgttctcatgatagtgagtaagtctcacgagatcaggtggttttaaaaagaggggtttccctgcacaagctctctctctttgcctaatgccatccatgtaagatgtgacttgcttctccttgccttccaccttgattgtgaggcctcttcagccatgtggaattgtaagtccattaaacctctttcttttgtaaattgctcagtcttggatatgtctttatcagcagcatgaaagcatactaatacaaccagtaaactccagcactgaatctgttctttgcatgggctgacgtttaaattgctagggctaaaaatgctagggatgaggtaataggaagcttggaaatgtggcatacatgcatacttagcatcataaaaaataggaaatgccactagacatgatgaatttctggagatcttagacagaagtgttcccaacttcattaagttgccagatttgctgaatagatatttgtgtgtaaaggactcaaaaatactaggaatatatagcagtaggatacactacttggcctaagaaacatgcagtctgttttgtaaagcagaacacaggcacatgaattggcacaggaatggcatttgccatccttttagacagatatggtagcagtataccatatgaatatcaaaagagcacagaataaataaaggaccatggttttgaataaaaggacgttgattttcaagacctgtacagttgactccgagagatttaaagctagggtcagtctttggatggaggatatgcaggcattgcaggtgtgttaataggcaatttaaatatgctgcttatcagtcagtaaaaaaaagttcagaatttagaatatcacagtatttcaaagcagccattcaggcatattatctttgccatcagtttctctgttaaaaaaaatagttttgtcattctgtagtttttaaaagacaatttcaaaactttcagggggaagcaataattgccaacaggaaccttgacacctagaggttgccaatgtgatcagccttttgaatggtaatcttttaccatccctgtttgagatccacatgtagagtagttgggatatattgaaatcacacttagtgtcttagtcttgaaagttctttttactttattttattttattttttttcagacaaagtctctgtcgtccaggctggaatacagtggtgcaatcatggttcactgcagcctccctcctcccaggctcaggtgatcctcccacctcagcctcctgagtagctgggactacatagcaagccaccatgcctggcttttttttttgtttgtttgtttgtttgtttgtattttttgtagagacgagattttaccatgttgctcaggctggtctcgaactcctagactcaagcaatctgcccacttagccccgaagagctgagattacaggcgtgagccactgtgccctgctagtctttaaaattctgcaataggtttagcagtgtcttagcagaaagtgctatttgagtgctggcgactggcttgcatagtggaaatatactggcctgagctctgcccacctgaccacatactgatgtcattatcctcccttcatca

SEQ ID NO: 131157 - DNA, 2870 bp, Homo sapiens
tttgtaagttcaggagcaggggcagtttacaccaatgtacaaattttactcacaatttcttaagttaaaagtttcttttaacttttctcacagtgtggctaattttgcatttgggactccctaaaatggattcagcagcatttccctggaatgttcaaaatagttcaaggcacaaagtaacctagatatttaaatggcccctttacaccttagcaacgtggttgttatgattttatgaaaacagtctttgtttcttttctctgctaacttctggctttagtcagcaaagatttctctgcctcattaatgttgtaaggactctaaataaaatttttcttcgtggattcctttttgggcaggcctgatattgatcactgatttaatgcttctagtttcctgacctgttttataaattgtgggaatagcctttttagattttgaatgcccacagtagtcctctttctagctttgggaaatgatttgagaaatgaaggaatgttgattttatttttactctactttgaaaacaaacaaacaaacagattaatcagattaataaacagcaacatgaaggtggatggagctgagaagagagtcatctttaaattctcttaaagtataagcaactcattcttgtgctttgggaacctagtgcctcccaagaaagtcaagatgaagatttgaaatgtatacatttatgactcagtatttctataagtatataatgttagtaaaggaattgtataaaaagacttaaaaggccagttcatccatccattgtctgttattgaagtcaacaacttgatgatttggtttcatataaaagatgtacacctgggggaaagtgcatttcaagggcactttcaagggtaagattttacaggaatttgacattttttaaaaaataaaatctttggaaatttgattccaaattttaattcatttataaactctgtattgccctaaaatgattttctcatatggcatcgaatgtgatgaagctagattcattcacacattcaataaacatatatcagtgtctgctgagagcagggctttatgctgggtactgggtattcagtagtgaaccatacagaaatatctctcatggcagttacttcttctgtgtatatctgaacattcaagggtaataaacataaaccatttgtggtgcgtgagacctaggaataaatcagaatgagctcacacctacttacttcttattataaccctaagattgacactttatgaatttagtgttatccaaataatgatgcagtatcaaagatgaatacctagatttaaaatgctaaaagcttgttttagaaagccagtgaataatgtactctcacttttgtatcaatatttcaagtgctgctgggtaacatattgaaatgctcacaccagccatggatgataataaatatggcatttttattaatgttaataaactgggtagcataaatggagaagacatcttcataggatttcataatgtattttgttattcagaaatattaatgtactttgtaatgctgatgcagtaacattaaagaataaaagacagaggttttatcttgaaattgtatggtgtttagtagattttgaaatgtggatacatttaaaataaagttcaagagcccctaaggcagctgataaccacgggtattctgatagcaatgttaccccttaacatatgaatttttttaggtatagcatctttgtaaaagtggttttaaatttcatctccttatcctttaaaaaaataccacattagcattccaaagattctttatcatttctagttatagcagttgttttatcattaacacggtgctttcttatatctagcaggtttgattctagataatttgataactccaaaagcgtatgcaatttgtcataaaactatgttacagaaatataattgtaattatggatttgaaaaatcttaattgtacagaaccccactgagtagatgatgaaaaaaagcagtgattaagtacaggccaataatgggaagatataaatccacaaagtgaattttatgcttccaggagtaagtgtttttcatacttaattgctaaaatgctttgcagcactgagaagaaatattgagaagcaagattagttgtgccaaactataaccttgaattctatggaaaaccagtgcctggatgccttagtggctcagcctctttatctaggggaggtagaacagctaggcttaagcctcgactggccattccttccccactggcttgttttctgattttcatttataatcatctggaaattgaagagctttgattgaacgccagtgggagattttagctttatttcatcaacctttcccaatattaacagtaaattacaactatctttattactgctagattaagttaaattatagtaagatggtttatcatcatgtgtcctttatccctggtcttagactagagtttacagaatatctcacaaatttgaagaataatatacaatgttttatctgtgttagcaagaaatgcaaagccttttttttttttttcctgtctgttttgtgaattgagcttagaactgtcctcgtaattagaaatctggttacttggattctaagcttagagtttcttagttttaagaacacatcacctcataattgtaccataattatgaacgttacaagtagtagtgtttttgtgtctcttactgtcagtgacaagcaaaaaattcgctagaatatattactcttccctaactctgagatggaagacagataatagccatggtgcttgaaacatgtggtgctattgggatgggaaattgtaacagcatttgacatgcaagggtcatgtttgcacctcttcttggat

SEQ ID NO: 131158 - DNA, 2039 bp, Homo sapiens
tatggccacgaatttgctaaaatctatgccatggtatgaggataacttacatgaaaatatggtacaagattaggtaaacagtgttgttcatatgagaacttaaaaattcccttaccttgaagtttcaagtaaatgtctttcgtccttttaatttggtgtgataagaaatattgcctttggtgtaatcagaattatgtagcatgatgcttcttcttggtgctgttatttttactgcagtaaatatttattttagttggcattgttgagttacctcatttgtgagcacagctagtaaagctatggttaaattttattgcttttactcttagaatcactttctcagctagtttaccttggagagacaactttacgttttccaccaaattaaagaagctgagaaaattgggtggaatttttttctttttttttctgtttaaaatgtggttactttgtagtactttggcgaactcactaatgtatgtatgaaagcacacgcttatcaaatggaaaataaaatcaaaacaatgaactccagtatgtttagtaataaagaaaacaaaaaaaaaaacctgtcattttttccaatgcaattaaatacaaagagaccactaatattacatttatctaattcatgtcttctcggcaatatgaaccattcagatgttcctccacctcttttgagagggatgtatgctgtcagactttaccaatgggatacacagttggggttttggaaataattttgaatctccttgcagggtagcctgctaaaagacagggttgtagaaccacttccgagggccttctaaacttaaaaaagaaaaacacctgtagctgtcagcactactttcagcaaacagtccacatcgttatgtgtcatttaactgctttctgcttgtcagcaggagtctttgtttcacacctaagagttgtcacatcagaaatcagaataaaggcctaaggtctctattcccacggggcagtaacatgttatgtattattttcctctaagtattctccatctactcaactctctcctggaaacctacatgtttattcgaagcccctatatatatagtgtagggtatgaagaaaaacgtgtttggctttttaatgacagtcttttcaagtgtatgtaccattatttataaacctatgaatgtaacattcagtggagttaatgtgttcacaagtataccatgagtgtggatggtggccagaaaagtattattcctgaaaagaacacaactatgtaagcaactcctgtattttgactacttgctgtagataaacatgctcccctcatccaagtctgctacaggagtggacagaaatcttggggtaccaatattgtgagggggttggttgaattcagcattttggcaacagaaactggaaagaaataattggcggcccatacggtatgtgtaatgggcactatgagctgtttaaacgtacaccaattattttgaagctttccaaacccatctgtcaccatattgtctagtcacatgacatagaattgtcatttctccctgcataaactgatacagttacaattgatttttgcttcaatcgtttgtataaatagacctgtgtcatcaggatctattgtttttgttttgttttgcttttgcttttgtttcccctaccagtgatctatggtacaatttacttgaaaaacaaaaacaggtatagctagagggccacagcataaaaaataaaattaagtattaaaggcacttaatatagggttaaaaaataccctgtgaaagctacggcacatcttttccaatgtgtacaattgagtcaagaaagcatagttgtatctttattgcaaatctaataatgtaccccatagtattgtatttaatcgctgctatttttctctcctattcatcattgtgtaacgtgtaatttgacataaattcctggccactgactctttctgcggtgttggcaggctcagttcataactggaggtaattggagtgagatttgagcactgttcactgcaagaactgaacaatgtttaggat

SEQ ID NO: 131159 - DNA, 2668 bp, Homo sapiens
aaacctggatacgagaacttgaaagcttttgtgaactcaggaatgcatatgatgtttgtactacaaactcaacctcatcatcttaatctctttgcctagaagagatgaataaaagtacaggttatatttatgaaactgaaatctataaaggcatggagctcttttcctcaagtgggaattcttgtgtgtttatttgaccctttagcaaattagtggaagtaaaggagggagagagggtatagctgtatggaaataaagctggtgaagtattctgctcttctgttcttcttagtcttgatggtgaaccatgcctacactatactatcactctggtaccagatttattgcctgccaggattggaattcatgcagagaggaaggattcatgaaaaaaataatcaaagtcaggaaagtctttttctgtaatcttgtctcatacagtgagttatttttgtctgggtagtttacggggatgtaactccttcagtcatctaaccgtgatgtagtaaaagtcatttgcaggaaatgaaactccactttgttacttttttcacttaaaggctaatctgattagctttaaaacatttgttcatcttttaattcagtatttgtatgatgcctatggaagacatatggatttaaatagaacttggctaaccatctgccaataagagaaagtgagatgctaaatcagagaggcaggaaagtctatttcagtaaaagctattttgatctgaaatactgtaggcagtcttacagagtattttaattgggaggatattgatgcatgctagtaaaagaagtgtatttgctgatatggttgaagttatgtaatcattaaatttctatataagtttagagatgtggaactatgtgaaattttgatcctgttaattataattttttttcctaaaaaagccatttgtggaaaaaaattttctgatatattttttagagcagtggcacgttttatatctcatgccagaaactagagcataaaatatcaacttttcaaataaattaactagaaataaagaacaatttattcagtgctaatttgttgataattttttatagtaaactatgttttaaaaatttaactttggggaaattagaaagaagaaaaagaatatcttttctcatgatggtaaaatgctgatgtataaagctgaaaaatttacaattatgtcatatttatgttttaatttaaaattgtgagagtttagagtcatgtaagcattaagaaagataaaatatctgaattatatatatttgcatatatgtgcatgtatatactattcaacttaacctttataaataagccttatttttattattcagattaattgttcattcttatataaaatgtgtctggcatttggtttttgctgggggagtacaataatacatggtatctgccttctgggaagaagtacagtaatgggtcaggaattaggacagtcactgtcagtcacagtcatcatctcagttaatcctccaaataacattatgatgctgggcattgtcaactcaattttattgatggcactaaggtatagaaaagttaagtaagttgccccaaaataacacaactggtttaaaactctcagtatgagaggtgttgaaaccatagcctcttacaactagaagatcactgtattcaatactctaatccctgatatatcatgaatgctgaaagaggatttagactctactacacagacgccctgaaagagctgcaggaggcacagggaattatattaacatagtggattgcacgttagggacagaaatggaccaaggagcacatgagaagtccacattgatagaggtgcctggcatgggctccccttctctgcccagatggtgttggtgtgacctgatgggtggcaccttcttgacaaggatccttgctttagatatttggaatattttatgttatcaagctatttagaaattttaagtcactgcaaaagtgctcattccaaattctgtttcttgcctttgtcttgaatccatatctgaatatttaggaagatttggtattggtatagagaggtatcaatttggcaaagatccttctttgccaaattcctggaagtggaattgctgtgtcaaggacagtgcacctgaaaatgtggacaggtaatgccagatttccccacccccctttctaataacagtgaatgacctgagaagtaattgtgtccatttagaatttcattagattacgatggaaatgaaggtagaaatgaagaatcaacatgtggaaaaaatatgtctgtaactaggaattgatgtactgagtttttctgtccatgttgatttattattcccttgatggcatttttgagaccaattatttcaacatgtggtgaatctttttattcatctgtctctctgtatctggaacaagtatatcttggatatacctgaggcctaaaacttggtgttaaccagactttcctctctatggtgtaaactgccatagttggcaagaaatattccagggaaagcaatgtaaattttctcaaatgagaaagatgcgtgggtttatttaggataaaaagcagagacataaatgctacaaacatatatggtattagaatgattattacatttatcctatcaggttttgaagcagtattattgccttagtttcttgcat

SEQ ID NO: 131160 - DNA, 1036 bp, Homo sapiens
tgtgtgtgtgagtgtgtgtgtgttttttttgaggtttttccactaaaagcaaggagcttttagacaagtatgggacacagtagaacaaagatatgagagatactgcaaatactagttcttttaatttatccatttgcaaattttcctcctttagcagactgagagctcctgagggctgtgcatttttatatttttgtttcttgttggccctgttatactgctaatcttttaggaggtctaaaatcaatatatctttaatggaatagaattatatgaggaaatatgcattttttaaaatttggaaaaccatattttatttgctgtatgagactgccgtaccgcctgtgtaaattttctaccattaagattataattataaattgattattatttgtatactcttttaggactgatgaattagtaaattattactttgtgcattatttccaataacctttagggtataagattatctagtgagttacttactctggaaaaaatcaattacagcaatttagggttcgtataacaataaaaaggatttgagctttaatggaacattttaacacttggcatgtatctatatctacatatatatctatatatatcccttttttctgagttatctggtgaaacagagatttctttatagaattttgtgacacaggaatctagagacacaatctgccagtgcatttctaggttttaaaagtttcagttcaaacctaaaaagtctatttgttaaatcatgactccaaaatttattttttatataccttctttttttaataaaattgactctaggttcaattttggttgaacttaatcagtcttctttctacacagctatattattagtttatatagaacacagtgctggcaagtgttgaaacaaaaatgtgaagaatgatttaccataccaatatactgcttccttctaaagaagggagatattttagaatattagatactgggctcaagataaccagaaatgtgtaatgggaccatttatctatatcattttatggccaagtca

SEQ ID NO: 131161 - DNA, 2063 bp, Homo sapiens
cttcaaagttcacacgctttactatatttattcttttttttttttcttttgagatggagtttcgctcttgttgcccaggctggagcacaatggcatgatctcagcttaccacaacctccacctcctgggttcaagcgactctcctgcctcagcctcccgagtagctgggatgcgccaccacgcctggctaattttgtatttttagtagagacggggtttctccattgttggttaggctggtctcgaactcctgacctcaggtgatccacccacctcggcctcccaaagtgctgggattacaggcgtgagccacggagtctggcgtatatttattttcagtgtatcattagcagaattctagagtcagctgttctgtgagggtaaaataatgaagctggttttgtacttaccaagtttgtaaggcattcagatgaaaatatctaatggatagctggaaacgtaggctgtcatagggaatagaggagttggaatgacttccaaattaactaacattcatttaataattgaatataaactgaaagcctagtttgttcagaatattataggagcagcattaccatgactaagctatagacactgattctttaagacttttgcaaaccagtagcaaaaataatgttcaataaaccgattacagcacaagaaaaaaagagtgtcaggtaccacagagtgagaaaaaacaacaacaataacaaaaaaaaaatagcaaaatgttgtagaaatttaaaaaaggaaatgaccccttctcaattaatctatcaagacagtgttccagaagaggttgcttatcagttggttcttgaaaagtggtatttggaaagcttaagaaacatagtacactagcctacagagaatctaagcagaagttgaacttttcactccaactaaaaatctatgttaaaaaaaatgagtgaggccccctctgcagtgaaagttactattttgacatttgtgagatcaaattttaagatcctctgggtatgtcaaagtcttttcgtaattgataggattcagaaacaccacaaagacatgcatgctttaagtatcttattgtaaccagctaaactaaaagaagagtacgttttagaacagaaggtgggtatttaaatcaaagtctaaaataaaaatttaattgtttaattatgtaaataacttcaaaacgtttatcttcttttaaatatataaatatatatgtagggtgtgtatatatgtaaatagcgtttattcagatataaataaaaaatagccctactacttagggtcgtatatacatattatcaaagaaaaaaatatacatgaaaagattcttgaatacccatttaaaaatgaatgccgtatttactatgcctgttggatagattcattatatataagaactatcaaattttagttttatgtattggtgttctgatttattcgctaatcatttctcttagatttaacccagtggcttattttcaagtcttgtttaatgtcttattttataattgaggaaaaaagagaaatgcttgcctgtgatatatcacctgttgtttaatcgctaacactgttacatatcttaatactgtatcacattaagtcattttaaaagcattctgctttcccttttgtttaaaattcctacgatccctgggatattggtagggggttaatggaagtcttgattaaaatcttccaagctttaaggctttcagttcttgtaaacaatttggatctgagagataggcctatttatgactttttactagcctatttacccatttaatgttaagaaaaaaatatgcttattaaaagttttgttataataagtacaaattaaaatgtcttttaaaaaatcagccacacttcgttgtgtgatgatcacagaatttatggtagttcttttgaaaattgtctgaagatgtattataatcattttaaaagtaaaggaactaccctgagtataccaattttccattattttaaacaaaccttttaagttttatatctagattgcttttaagtagttatttccaaacttgaaggactatgaactctaatca

SEQ ID NO: 131162 - DNA, 1047 bp, Homo sapiens
gggattggaatgcgtgttggtgagtgtccgaatttaaatatattggtattcatatggattcaggatttattttcaaagaacagatattcactagaccaaactaacctgtactcaaacttgaaagaaatagaaatagaaaaagcagaggataactttgtggagttaattcctgatatactggtctctaaagtttcttgttgtccgataaatattaatttagcacctgctgggtttcaggcaggaactgtggaagaacttataaagggtatgaaaatgagtatatcaagatttctgtactcaagttatatacagttagctgtaggtgataagacaggtatggtgacagctaaaatacaatcagacttccataaaagaggtgaagggagacgagaatgattatgattgtttaaagaggaacagatcacattgtgttgagaaaaccgacttagttgtcccaaaaggttttctgagcttgtttcggaaaggaagactggacttttagcaggtgaatatgacagcatgaagggtaagccaatatagaagaaacaatgtaagattacaaggggcattttcaggatataggaaagagaaaagcttgatgaaaagttaggtatagtatagtatggggagctaagacttgacataaaggttaggataattttctaaaatgtttatttgaaaaactttatctcagaaggaaatagggaaccattccaggatttgggcaaaggataatttgatgaaacctttaatagggttaatatgaccatcttacataggttgacatggaaaggaggtggacggggttgaggtgacgaagactcattagtaggctgatctcttactctatgagtaataacagggagcctacactaggataatgatgttgggaagtgatttctgtagctatgctgagcagacagtcttcaagagttagcaaagtttatatgtgcgggtgacaaaaaagaggctttgagttttgatgactgaaaggagacaaataatagctaatctttgataaagactaactatgggcaaggctttact

SEQ ID NO: 131163 - DNA, 3437 bp, Homo sapiens
tactttatattgcatatgcagtatagtttattctttagagaaattgatttgtaagaagaactcattttcttaagcagagttgagtcaagggttttaattaaaagcagtctactcaggctttgcctttctcgggcgaataatttctctcttttctctgcttttgctttgcctccatggatgatgctcctgctacccttcacgctttgtcaaaccagttttgaagttttcgccttcccccgatgtatgtcgcatgtgtgggtaatggcatgggctttgagggagtacaagagaaaagaattgatttctcttttctttaaaagatggcatttaattatctttgtttttatttttttgctgaaatatattaaatgcacattgattccgttaagtatttttctttgataaagttgtcagaatgtcagaatatgctttttttctgttattgatgcataatatttcatacattggtgaggtatacgtgggaattttctgcaaacatagaataaataatggtcaagtcagggtttttggggtatccattaccttgagtatttatcagaatttcaatgtgctggtaacattttaagtcctctgttctagccattttgaaatatgcaatatattattgctaactatagaatatttttattattttttatgaaaatttgaagaagcaggggcaagaatactttctgaattaacattgcatttgtgctacctatatgctaaaaaaacagattctcaggccactcttaaccatacatttataaaaagatgtatgatgttatttatgaatgtttaagacaaacaagttaagccactcttctatatggaatctaaaaatgtacaaacactgcatttgaaagagacattcactttacttaaaaataattatttgctatttttttaaaaaaagactcagagtgggacttttgagacatcctcttttgtacattgaacagtggaaaaaaactttacttgttaacattttagaagtatatttgtttgcaaaatcatggtataattgaaggcaatactggctatattttaggagatgcacatatttggcttatctaaatcttagtgtcagaaattgcctacctgaaagttccctggtaatatagaaaaatctgtcctctttgcctgacttacaaactaattctaagaaggttggatgtttttaaagtgtaaattgtctggatggacagtttgtggtctacaaatttattatccagctaatactgtcataactttatgctgtgtgactactgagtgtttttgagtttttaaaatcagagctttcctcaaattcacatgtgattaaaatatttttgaagagtctaaaatatatactaacctttgaggttccagctgggtttggaggtaggtatgctccacatttaactctggctgtggttcaggcctgcctgtattttattttctggtaaaattagatgttattttttctttttgctcttcccttgtgatgtagtggaaagtgctctggattggaggaaaggagactttgtgttctagattcactttgtgactaactagccgtgtgaccctgggtgagtcactcaagcctcatatactgtttcctgctttggaagattatagtttgaagtatgcagtttctcaaatctctttacaattgcagagtcaagcaaatctagagtcaagtaaatttcctttaaaaccttaaacattcagatctatgaattgatacccgaggcaactttaagacaaaatcttatattttggacgtaatgatgctgatgtccaaagatctagatctatatctatatctatatctatatctatatatatatatgaactacaaattcttaaatatgatttccaaccagtggctgagaatccataagttataagcaactgtcacacatacagtctgaaagcttcaaaaattgtattatttgaacttatcttgtacaagaaagcccattctttggaaacaactttgctgcaaaagaatcatgtcaaggggctgctgatgaatgaagttaaaggaaagtaagcacaatgagaaaataattctatgagaaagtgacatgcttaaagtctccttcctcagtttcttggcattgagcgatgatgcctgttttgttcacagtcagatgttcaaatcagaattttggatgcagaaactaattttagtaggtggggtgcaaatttcttatgagtccatgaatagactctaatcccagctgtttcattacaattataaaaataaaattggctgtgaatcattcaaactctgtttaatggatgtgaataattcagtttcatcccactgaaatcttaaaactataaacctatctttgttctttatgttccttcagagatcatatgtcattactcatatatgaattatttgaagtatgggtgatcatgatgaaagtgaccaaatttctacttagctcctgtgggtttcaggagaggaggtggcctctagggtgaggctagggattaagtggagaaacaaattgggaaaagtccaggaaaagagaaaagggtgttaaattaggatttcttggcattatctttcctatcaagatatatgttcattatagacattttagaaaatataaacaagcaaaaagaagaaaataagttttcaacgtttttaatgtatttacttctggacacagacacacaggcacatgcacactcagacatgctcactcacacacatagacatgcacctgcaaacatagatttgtatgtttattattaaataacttttaatttcactttctaataaattacacgctgttttatagcagcgtatattctgctacatcatatttattgacttcatagtatttcactatatgttgtactagttgtcctagaaaaactgtctatcgatttcttattgttggacatttatttctattttttgctattatcaatagtgccacttttagtatgtttatagctgaataattgcaacttgcttgcgattttaaattttgagaattggcgtcccaacagtcaggctcctctatgggaccacacagtagtagagtttattggcaagcataggtcactttaccagatcatgtatatagactcctgagaaacaggaaaacagtattatttcttggcttccattattttgaattgccttgcagtgatagctaagaaatagaaaccctgaagttttttaaacattattatagtggaaaaagtgaatatgattatttgaataaggtgcatttcttgagcagcagcaaagaatcagccaggtattgattttactttcataattgaaagatttctcagtcacttggacattcagagaatatttcataggacaatgcacttataaagttatatatatatatgggatttaactgccttcaaaacatttcttaatatgtcaaatttcttaatgtgttttggtgagcaca

SEQ ID NO: 131164 - DNA, 1589 bp, Homo sapiens
tcctatcctctaatatcttctcttccgtttttggtttctacaagataaattttttttttttttagcttccacatataagtgagaacatgcagtgtttaactttctattccaggcttatttcacttaaaataacgttcgcctgttctattcacgttgctgcaagtgacagaattttattctttttttatgactgaatatattccattgtgtgtatttacctcattttgtttattcatttatctgtcgttggacacctaggctgattccgtatcttgattattgtcaatagtgctgcagtgaacatgggggtacaggtgtctctttaatatactaatttcctttcctttggaaaaatactcaggagagggattgctagatcatgtatgtagctctgtttgcggtttttttgaggagcctccatactgttctccatagtggctgccctagtttacactcccacccacattaatagcacttgaaaaacgacaacaacaatgtttttgtaacctaggctgtttgtgaggtctggcatagttctgctggcccaggtttctaaagcaggtgaagcagatgtatcttagtgaattggactgtaggtttgcagctactgtgaaatgttatcctttagtgcagtatctgttcattatttcctatataactatcttttgcttggcttctcttttccatggactgcatgagtcaggacataacagggcccccaaaagaacccattgttgagcattcttagatgttggaagtgaagagtatacagaaggtggcccaagtttcaggagcacagggccagaatgattcaaaaatgaggtatgtagtgttgatgtgaatctggtaattttccggcagagcccagtctgatgggtccattttacaggcacattaatacctaaaatgccacaacgaggttttattttggatttttggggattttgttattttcaccaaaaaggtaaatattatctccattgtctctcatatatatatatatatatattttttttttttcttctctcccttccattagatactgttcaaaactttccttaagtgtttgtaagcaaaggcattgattagtagactgctctgcttgttaactcaaggaagcttggcaagctaggtactgctgtatctagttgtgttatcagtttaaggaaaggcaaattgtttcattgatgtttgaagaccctttttccttttggagaagcaatactacttatagacttttattatgaactataatttacaaatacaaggaagtctggaacacagctttatatcagtggttaggagtgaagcaaaggaatcttagttttgtttttttctgatgacagcacacttgtgataaattgagcgtttggcatcattgttcatctcagaatgattaaatgcctccctctcacttgtaattttatatgttaacttgcctcttttaaacaaggcagtttcttaattttgaagaattactttggacatattaattaggaaaaggataaaccattttctaccatggaaatttatatatgtgtaacatcatgaataaccagaaaatgctaagtatatacactatagatatc

SEQ ID NO: 131165 - DNA, 1587 bp, Homo sapiens
ttacaaagcacataattaaaatgttgctttcagcatattagtctttctgataacttttttttttaaactggttttagcaatgaaagtttgctgtacttctcaaagtgaggaaggaaatataagaatcacaagaagagctaaaatttcgaaatgttctcttcattaacattagtggttttctcctttttttggcttatgtcagggtcagtgtttggcttttagttttgtgttcaatatgatatcatttatgtatatttttatttagtaaatgtctatatttttcccttgttattagtatggaattgatcttgatataaaaattttcagttgcatatgcctctgtgttgacttctgtgctttgagtatgacaaaagccacattgccataaacttgatcttataaattgctctaggaaaactaggcttttttttgcatattaatcacacaatatttctacaaaatttttgagtattttcttgtgttagtaggaagaagtattaagggctttagaatctttgctagaaatagtctaagcttatatgacaactttattatcttaacatttctagaatagatcttatagaacatgaatcacctcctgaaaatggttaccaacatttactaataatattttgaaaacccagtgtttttatttaaagtttaggtctgtgaagaggttaacatgtttaaaattacctgtaccaacagtataagtaaattattttatatattccaatagatgtttcttaatcattttaaactaagtagtatagtatagtcagcattcatgtaaagttgtatacttttctgacaagttttttttttatgatgtacatctacacaaaggtatttattttttagataaatttatgcagatgcaactgtattaattttattgtttcctgaataagaaattctggattttatttttgtaatggaatttttagattggatattccattgcagaaaacttggctttttatctgataactacatgaataaggatccaaaaatcgatcattaaatttcacaaaaaaattaaccaacattgtgtagtttttcatttgttaataaaatacggaagtacagttaagcttattgggtgagtctttagggggagctcatggaaaatcaacattcaggtaaactcctccatgttatttgtcaaaacggaatgttatagataacttgtagctcaggttcttccataggttcaaatgctgtagttattagagcacttttttcttgcagctagaggaaagataaatctccttgagattgatcttggtttccagtttaaatttctttagaaaagtctgtcagttgtaacatctacattttgtgctacttggcttcagcggagatgctcaaccatgggcctggggagttgagttccaagttctggaagttgagttccaagttgagccactgactttcaaaggaagggcctcccaggatctccgttcatctgtcgcttggagaggatcatgctgcctgccaccctcacaggagtgttgtgcagcttagttaattaacgtttgtcaggccatttgagatcctcagatgcagagtgctagataagtggaa

SEQ ID NO: 131166 - DNA, 1037 bp, Homo sapiens
ctgagcgtagtggttgcattttttgagcaagatggagatgttaatacttttctaaaaagttgtttttctcaattcctccacttccttaaatccctgatttcaagtttctattgcatcattttaacagccttttcagttcctccacattagctgctgaagtaggaaaccttaaacaagagattccttagctgtgttctacaataatagccaaattccaaccctatgatttattatcttcaaaggctgtaatctactaaatttcagagatctgataaaattacattaatatatacaaatacatgcatatgcatatataaaaggaagaatattgaatcattctgtggttgcaataaaatttaaatcttttaagattcacattttatatttgaatagtgcttttggaaatcaccaattttactggatatttggaataggaagggtagccaatttaatttattgggcaacatttaggttattagctgtatatgaaattttcaatgtgtacatatcttagatgatgagctttttaagacacctaacagaattaagaaacagcccattctcattgtgaatttgacaccaattctactttggtggtattagttggtattctgaaattatcataccgaattacctacctctaattcattaccctaccagtggtagaaaaaaaaaaaaaagcagaattttgaggtcatgtttactaaaggccaaaaaaaaagtactataagtttatagtttcagaggcatagttattagtgaagatgtcctgtaataatttaaaatacaccatagaaatatacagatataatttacatgttttgaacccaaattacagtagtgtataaatatatgcctacagaatgcatgtttatatttgaaacaataaaatagaacttgaaagtaactacaattattcagaaattgtaagcaatttaagaaatgtaaactatcagattttaaaagtacctttttaattaaatagttttttcaatatagcattaatagagcaagtatattaatacatttatatatac

SEQ ID NO: 131167 - DNA, 2748 bp, Homo sapiens
aataatttgataatgatttattattttatatttaaatttagttccttttaatatatggaaaagctgtacaaagcatttcagcattagaaattgaagtgtatctacagggggaaaaatcctcaatttagtttaaataacagaaagtgaaaagggcattttaaatcaggtgtgaaaacttaagaatagtgacttaaatgatataattcatgattatccatcagggtaaactgcatctatcaaggcaaaatgaacagagtggggcatttaacagtaattcaaactaaccagttttaatgctaatcacctggaatgtatgcgcacaagcacgagcagcgtgcgtgcgtgcgtgcacgatgcgtgtgtgtgtgtgtgtgtgtgtctgtgttatacctattactgctaatataacaagggcactttgaactctttatatagaactgaaaatgcctgttaattacattccagttttggggtgttaagaatattgcatttctttctacctactatattgcatgagtaggtagaaaattcaggtgcttaaaggctattaaaaataaaacaacccttcagaacgctgtctttgcagtaactgttttcttcttctccaggagagcacacagctgctacaaatgccgtcagtgcagttttacagctgccgatactcagtcactactggagcacttcaacactgttcactgccaggaacaggacatcactacagccaacggcgaagaggacggtcatgccatatccaccatcaaagaggagcccaaaattgacttcagggtctacaatctgctaactccagactctaaaatgggagagccagtttctgagagtgtggtgaagagagagaagctggaagagaaggacgggctcaaagagaaagtttggaccgagagttccagtgatgaccttcgcaatgtgacttggagaggggcagacatcctgcgggggagtccgtcatacacccaagcaagcctggggctgctgacgcctgtgtctggcacccaagagcagacaaagactctaagggatagtcccaatgtggaggccgcccatctggcgcgacctatttatggcttggctgtggaaaccaagggattcctgcagggggcgccagctggcggagagaagtctggggccctcccccagcagtatcctgcatcgggagaaaacaagtccaaggatgaatcccagtccctgttacgggtaggatggtttcatttttaaataattcatttgttttgaagggcaaaaggaggaacacacattctttctctacaggattgtgttgtgtgtgaagtgaaacttaatgatctgtctcaatctggggatttatactcctaaggccaaagtggcagcaagtaactcatgtgtgtttgtgtgtgctgtgcacttacttgatacagtgttaggcagtcacttgtttgtctttgctcttagctcagattgaatgttggttaatcattcctggtgactatacaaaacaacaaggccatatttggagaagggaggtttagaatcccagaaggatgtacatctgctacactgaaataactaaatgacttttaaattttaggctgctatgacaatatatggttaataaggaagtcagaagagatttaaatcactaagaatgtaatgtccttgatgagatgttcataccaaaatacggagttttttaaaacccacgatataattatgtataaatgacaatgcttgttgttgtcgagttgccaacaagagggggaaaaatgagaaaaggctaagtgtgaatagtgtgaaaagcggccaaagaagagtgccatgcatttgatatgaacaggatcttttagggggaaagacctagttccatgtggaaaaagaaaacaaaacctctgagtaaggtaagatcctcgattgctctcttcatactatgtagactcagcattgttaaaaagtattttagattttgaaaattcatgagctcccaataagtgatagttgctcgatgcctaagacaccacctcttggacattttaccttaagtctgtgaaagttttgagcttctctggatgattttgaagctttgtttgtgcatagaaggtaggatcagaaaccagctaacctttacaaaagatccagttgggaaatagagttccattagccaggtgctttgacctgcgggtcatagaccagtgagttctctctggatgtattctggggagaaaaattgctcttcccaatgtctgcttggctgctctgctctcatttcctgcagattctctgaagcctatctgtgcttctcagtattctctagcggagttgaaaaacgccccttagaggtgcacagttaattatagaagctgttagctttcccatctgtagtcatgccctggagctaagagaaggacttgaatacagaagaggagatgccccctgtacagagagaaacaaagaatccttcctgcagggaagaagcaagtttattaggagtaacttcgggaaaaaaagagaaacagtttctgtgcccttcaagagggggttcaatttagggaactcccctccagtgaatatacatggagctgcatttttatcattgtcaatatttgttgttttctcagcatgtcattactcttctggcctcaagtgactcatggcttctggttataaggcgggaatgaaatgtcctatgttttattaaattcatactgcattttgagagtatggtatatttgggggccttatatctatatcaccggaacc

SEQ ID NO: 131168 - DNA, 1037 bp, Homo sapiens
atttccgctgtaaattctgcaatttcacttatatgggcaactcatccaccgaattagaacaacattttcttcagactcacccaaacaaaataaaagcttctctcccctcctctgaggttgcaaaaccttcagagaaaaactctaacaagtccatccctgcacttcaatccagtgattctggagacttgggaaaatggcaggacaagataacagtcaaagcaggagatgacactcctgttgggtactcagtgcccataaagcccctcgattcctctagacaaaatggtacagaggccaccagttactactggtgtaaattttgtagtttcagctgtgagtcatctagctcacttaaactgctagaacattatggcaagcagcacggagcagtgcagtcaggcggccttaatccagagttaaatgataagctttccaggggctctgtcattaatcagaatgatctagccaaaagttcagaaggagagacaatgaccaagacagacaagagctcgagtggggctaaaaagaaggacttctccagcaagggagccgaggataatatggtaacgagctataattgtcagttctgtgacttccgatattccaaaagccatggccctgatgtaattgtagtggggccacttctccgtcattatcaacagctccataacattcacaagtgtaccattaaacactgtccattctgtcccagaggactttgcagcccagaaaagcaccttggagaaattacttatccgtttgcttgtagaaaaagtaattgttcccactgtgcactcttgcttctgcacttgtctcctggggcggctggaagctcgcgagtcaaacatcagtgccatcagtgttcattcaccacccctgacgtagatgtactcctctttcactatgaaagtgtgcatgagtcccaagcatcggatgtcaaacaagaagcaaatcacctgcaaggatcggatgggcagcagtctgtcaaggaaagcaaagaacactcatgtaccaaatgtgattttattacccaagtg

SEQ ID NO: 131169 - DNA, 1087 bp, Homo sapiens
accaacccttttatattcttcacttctacggtaaaacatttttgtgtgtgtgtaaaaagacatatgtaaataaattataaatgaaagccatggaaaacacttcatggaaggaatagtttttaaaactagggctaaaatcaagtataaaaagccatgctagtccttagtcagtgaaaaagactttaaaatactcttttttgtgccttaattgttttaggtgtttttatataactttaattcacaatcaaaggactccatagtcagtcatttgcttgtggacaaaagatgcattttgtagtttcttgaagaaggccatgtatgccaggtcaagtcagtggtgagggtgccatgaagtactgtggccagcgaatctcaggtaactcaggggccttggtgagacattttcatctgcttacatctcccttcgttcattcattcagtcaaaatgcattgaactcctgctttcttctagatgtgaataagactattcttgtagctcaagaaggaatataaacagaagtattatcttagtaacagcagattgaacctttgcatttacagctaagaatattgatagtgacaagtgtgtgagtttgtcactgaatgaatttaccacttcccttctatgtaatctctttatcccatttgcaggaaaaatttacttgaatgattcattttattaaataataatcctacctatgcacatgttactgttgagtgtgctatctaatatggtattccctaacaaaatgtggctatttaaattttaggctgggcatggtggtgcatgccgtaatcccagcattttgtgaggccaaggcaagtggctagcttgagcccaggagttcaagaccagtctgggcaacatggcaaaaccctgtttccacaaaaaatacaaaaattagctgggtgtggtggcatgtgtctgttgtctcagctactctggaggctaaggtgggaagattcacttgagcccaggaggcagaggtgacagtgagcggagatcgtgacattgcactccagcctgggtgacagactgagaccctgcctctaaaaaagaaatttttaaaataaatacatttcagtt

SEQ ID NO: 131170 - DNA, 1116 bp, Homo sapiens
aacatggaactgagtctaaataaatgtatacatttaattttagtaattttagcatagtcaaaattcatggtcagcttgagaaagtgtattagtttttgttacagtttgtagatttttattgtattataaggccagggggatttcaaaacatattagctttactagtaactttttttaggaatgattagaagtacccagagaactaatgaaataaatcccttaaaatatcagtcatttttatccacttgatagctacagctcatttgtctcagacctctctattgacctaataccaattaagaaaagcaggcaaagaggttgtaaataacaggtagtgaacatattttgcaatacttgtaagaagaatcagaagagaaatttcctggtcctttaaatgtcagaatggcaatcttatcactttaagggagatataaagaactcttaaaacaccagtttcatcttggtaaagttctctaaaaattccatcttagtttgtgattttccacagatagaattatttctgtggagcagcaaattaacccaacatagttattatgcatgaaagctacatgctttgaactgctgtctattaaagatcatttcactgtcttatgtcagatacactctgctgtcaaactatgattgggaagcaaatacttgttttagataaaagggttggaagtgaataatgtcagtatgtgaaacagtgttttataattagcaagtaatatgaagttaatacctggatttccggcaggcgtttcagtctgttcactctagggacaacttctgagggaagctgatctaggctgtcagggaaaactctaaaaacgaaaattactaaggcctatagtttggaagaattcagatttttaaacacacttccatttcccccaaacagttatttgttaggttcttagttatttatagtaaagtttatgtttgggtagaaggagctggacacttttcctgggcagtgattttagaagtaaaacagatgtgtgagctatctgagtttgaactaatagaactagaaataaaacagctgatcctagactatgctgtctgctaaatccttgcagcacacaccgaggaagacaaaaagtggtaggaaag

SEQ ID NO: 131171 - DNA, 1052 bp, Homo sapiens
tagtacataaaaatattaaactacctttactattcaatgatagttttcaccaaatgctggcaacatagtcaaagacattcctacaaagcacagcactcgttatttttgttatgagtgaaaatctaatttacatataataaaatgtcaattcacatcataaccatcaagataaatagaaacatttatactcttcgatgagctactctttttgaatttaagtgctgtgcttggctctttgcccagagaccagttgaaatagcctaagtttaacagagaagtagggatgaagttgaaactgacttgtgtgcaaatgtaaagtcagattggcctatgtgaatcaacagttgtcattgcagatattttaattgtgtgtgtgtgtgttttgagaggaaaacaaaaggaaaaactacttttctgcagggaaacaaatggtaacatttctcaatttgcacagtgaaattatgatcttattccaatcagggattttaatacatttgcctctcactggttatgaaaggaaaaataatcaattccccttgccttttgaggctccatgaggtattcttgctctattttagtttccctagttagtgaaataggtgcattctttttatatatatacatgtgtcctacagtgtcattgtgactatagcctaaagtctttgaaaaaagaaagttttgtaattttcttataaaagtacagtggttaatgcattttttctttaacatgtatttggatatatgaagattcatttaggcaaataggacatttattacttacttaccacactatctccttttacctagacaagtgcatttgaaatgagatatttaaaatctagagaacatagcaagatgaaataaaagcctaataaaatgtgtttgggctagcatcaaaacctttgaaataggatatctaaataatgtgcattttatctcagagggcttttggttagttctagtgtccagatgactattaatgggcttttgtgctctgaagcatatgttaatagaaatgatcattttggattagtttgatgtgaattaataag

SEQ ID NO: 131172 - DNA, 1024 bp, Homo sapiens
ttctttatgcagtgatatctgtataatctatttagctcaaagataacattgagtttatatccacgtatgtttatgaatgtgtaatttggacacctgggattttattgtatgtagatgttttatccgttccctttttaaaatccaatgttctatctgtaatgctctgccactacacattctttcaaaaaaattctgattctaaatctttaatgatgatatgcctcaatcttcttttaacatagatagctcttctggaaaaaaaacaaaaaaacaaaaacaaatccttcaaaacagccctcttcataacaaaacatcttagtctttttgccaagttagtgaaggaatactggttttttttgttttttgttttttgtttttttccttaactacgcgtgctttaaaatctcagttaaatttcttccttgagcattactttcttagagtggcctttcccactgtgttcatcagaacattagttttgttggctaaatggcactatgtgacataaagccaaatgagattgggaaatttcagtctagattggacacacgtcaccctctccaatccctaggacttcttagagctgtaaacgctaatgtacattgtggatctctgggagggatatgtattatacagtttccattaaacttaatctgaccaaggaatctcctttcattttctttttttgaagctaatattatgggaagagtctagagacaagtcttgggtttcttgtcatctatgcttaaacagttaccgtattaaaatcccaggcagagcttagctaaacttgcagtgagcatggcagaatgttctgaaataccataatattttttcagaaaaggttcttatagttgaagctttctaagcctgttacttatccaactccaaattatgaacggattatatgtttactttttttgcccatatataaagcttttcatatcctagaagtcaggaaaaagttatttaattttattatgagaagttgctttcaagtatatatatattttaagatcagttt

SEQ ID NO: 131173 - DNA, 1036 bp, Homo sapiens
atgtgttaggcattatgaggcagattcgaaagttaggataatctggtactctgtgagaatattgggaagattgtatattcattcacttgacgtaactatagaggcagacaaatatgtttgatagcagcctttgtaacatggcgtcttgtagattgtgttctcttgtaagtttcttaaaatgttatcactttttgcattggttaactgttgttaaagtgattatgagaaatgcattgggaaaccaagtggtctttagattccttcagacccaacttgttcatgtgctaggtctgcacctagacaagcgatttaacttctccatgtcttagctgcattatctgtaaagtgtgaatgataatagtacttaaaggattgttcatccaaattaaaatcaaatgagataatgcactcttggcacagttcctggctcatataataagaacatgaaatattttttattagctagaaattcaggttagaatatgtatcaacactgaagatcataggccttaaaaaaacctacctctgacttttggtttctttcaacattcaattaaattctgaaagaactatttgtaaaacacctgaacctggaattatatatgtgtatttcccttactctgttatgataggggtccacaacaagattgatggagaaactaataattggggtgcagatggtgaaaatcttttctaaaggtgtgtgtgtgtgtatggctccgtgtatgtttagatagattcttaagtttatactgaatttgaaagtgaagattgacgagattgcctatacaaaatacttaacaagtgagctaatttctgcccgaattctgtagtcttactcctgtatgtcacatcactattcttcctctcatatgtgaatgtgtaaaatagaggctgtgtgggatgggtccagaaggaacttgtggtcatcctctcaggcttgaatctcaccactctatctggctttgtgtttacaattaatttaagtttaattacctgtttcagttttactttgacatctacctaacctattttt

SEQ ID NO: 131174 - DNA, 1050 bp, Homo sapiens
tttggtgaaaaccaactggggaaattacgtgagccagtaagcaaatggctggtcataataagtactcaagaaatattagttctcttccacctttatgtagcttgtctttgtcatataatcaaggtagtgcatcctcatggaacatttaatatctacagatgtgtgtctgtgcttgtccttccaccaccaccaccaccagcagaatcacatacagagttcttatcctctcttctgtttgcctgtctctgattatcttcacccctgtgagggtgtctgttgctttcttctcttgtttttgcccttcatctctcttttcaaacccctcaccctttgaaatcccttttgttcagaacgctttcttttcaatttctcttctcttccttcttttaccacctgtttgcctgctggggcacatcctggccctttctcccgtacaattcagcctgaggcgtcaatgacccattccactccattggattgcttgatttgctcatcaaaatatcgcagctcaaaggtttctcttcattatattactccatgctctctgcagagcaactgctgtttcactgaaaaatcgcacacacactcttaaactttagctgaaaagtgcacagatcttaagtctgtagctcaatgaattattacaaaacaaatacacctgtgtaactatcactcatgtcaggaaatacaatattgccagtactctagaagccctttgtgctcctcctggtctctttcttcgtcctccaggaatcagtcactctcctgactgctaaacactttagatagttctacttgtttttgaactttacacgtgtccatatacattgaaagcatgcattcgtttgtgtctgccatgacacactcagcatcatgtttgtaaaattcattcatgttgtatgtagtttgttcatttgtattgtaccatagtattctgttgtatgaacaggtattgtattttataatcatatgccacaactttaaaaaatctattctactgctgatacagatttagcttgtttccagtttgagaaattcaggaagtaatac

SEQ ID NO: 131175 - DNA, 1117 bp, Homo sapiens
atgttacaacaggattaaaagtactgtttggtactctcatgatatgttaactcttttacgaagtcatttaaataacagtattgtattttctgaatagcaccctggtttgcaggctcaataaacaagttatctttagcaggtatgaagatggtgataataccaccagataccagtactgtttaggtgaaatctgtagtaatttgcttttgaaataatcaggtaaaactgttactatgaaatgctgttttgcaaaaagttcaaaagactaatggatgtgattaactttaagttatcctatagagtgctactttttcttgggtattatgttgcttctttaacaaacatccttttctttccatgtgtaggcttatttcctgtagagagcagtaaaacatgtaaagcattattcatgctttgacttctagaacatgtaaagcattcatagattggggatcagtcaactaattcttactttgcttaaacccaaagttctcaagcttgtttaggtgactgtagtcttggactttgtgattctgtctgagaaactccgtggaatagtgttaaattatcatatcatacaaagatggggcaaattatgtgcaataaaatgtgattgtatcatatctgtgtgtacctacaaaacaaagactaaatgccacatgaaatagttttaaggaataagattttcaagttttcttagcacatttgtgggctgcctttttttttgttgttgttgtttgttttggttagttgctagtacacattagaagccatttgatactagaagccaaagtcttaagaaaatattaaccaggcataaagttgaaaactgatggcattgtacctattaacttatgttttttatgcaaaataagaaaccactcatcattattctgtttgtgagatgggatacctcggtctactgatattacatagatttacagcaaccaccttagatgaaggtagaatctagcacacacttcatgtaaacacagcatttattcagccttataaaaatattcagaattttagatacatgaatcctctgaaaaaaccacagtattgttttatttgctcatctgttccctccggtcttcttgggtaagcaggttacctt

SEQ ID NO: 131176 - DNA, 1016 bp, Homo sapiens
aaattatatgtatgtacatatacattaatatgtaatatatagaatataatgattatatttacagggttatatttaattcctgatgataaaaaaaggacgattggcattatcttatcagaaaatgaaaaaatgcatcaaaatcagacaatattttaaagaaaaaatttatgtcatttcagtaatgcttttttacttgacataattatgtaggaaaactatccataatccagtagtaaacattatgtatgaaaacttgatgtgaacttttgtcaatacatatgatacattattatctaatgttttcaggaaaacaaattttctacaacatttatgtgttaatcttttatttcctggaattgaaaaatttaaccaaacaccacagaaattgctaataccactgaacttgtctcagttcccttaagaagccacattctctcttcatctgggcctttcccaggtctcctgccatttcttctgttggaatcactcaatcctctcttttcacctggccagtttttgctatccttgtttgtgttcttcctttttacccccagaaccccttgttgttataccaaactgggattagtcactgctcttccttgtttatttatttcttttctctaggtagactataagctcactcagggtaagtttcttctctgccttgttcacagttgtatcctcagcaccttactcaacactttactcaatgcctgacacatagttggccctcagaaactatgttgaatgaataaatgttacgtgagttttgacttaggagcatcagttatcatatcacttggtcagtttgcaatatttgcccaaaaataggatttagtgcaaaatgagtgctgatgccagcagatatctttgaccttggtttctggggaaaaaaaaattctcatatcagcttgtttggataattgcttgcagagtttccatgaaagggaagtggtagatgcacaaatggataaagtgtaggactttttgacaggactaactgcattctaacttat

SEQ ID NO: 131177 - DNA, 1060 bp, Homo sapiens
taatatcaatatgaatgacaacaaaagaacactgtccaggcaagaatacaaataatgtaacagataaataaaatattgatagtcataactccaatatagctatataaagatgatcatagcacataaattctggaaaaatccagtatcattaatgtctccattaatgtataccagtcaccccatctttttatctgaacctgtgcgatatttctggggttttaaaaattccacttccttttacgatcagagttgaagatttgttttgaaacccatcacttttcttcattttctacctttcccttcttccgtctacatgtcacaccacatctagtttagttttcctaatctcttctttttagaaacttcaagtggcttcctgctttctccaagtggtccagcctcatcaactgggattcaagattctgtcttattaaccttggcaaccacgtcttccatgtgagccatttggtttaaacctagcttcttctctgtttcttgacatatgttaatattgttagcaaccgtttgtttctcttactcctgtttgctggaatccccttttctgtcccctgtagctgtgcaattcttacttctctctcaggataatcttcactctcatctctgttaactgtttcctctgccattgaccacgttggttattttattatgaacgaaagaaataatagaaatattaataaaagatagcaaacatttagtacttactgattacttttttgtgtgtgttttttttttgctttttttgttttgttttgttttttagatagagtctcactctgttgcccaggctggagtgtggtggtgctgtctcggctcactgtaacccccacctcccaggttcaagcgattctcctgcctcaggctcccaagtagctgagattacaggcacccgccaccacacccagctaatttttgtatttttggtagagagggtttcaccatgttggccaggctggtcttgaactcctggcctcaggctatcctcctgcctcaggctcccaaagtgttggggttaaaggcgtgagccaccacgcccagccaa

SEQ ID NO: 131178 - DNA, 1025 bp, Homo sapiens
tgaatataacaaaattgcccattttttatggagataactaaaattgtgataaagtactagattttattaatgaaaatattattagtctttaagttagtcatgtactttgtcatatagcgttttcaaggagctgcttaaagtgtttctgatattttgaagtatatttacttacacaaacattcttgagtagatggaagtgtgtgtctcatgcattctcaatcagaaactataaataaagtcacttaatcaaaatttaccttatgtaatagtttcaaaagcacatgaagccttttggagtgactaaggctatatatgtatataaggctactgtatttttagcattctgggaactgaggcctttatgtttttcttaaattatgaactttaagacagtagctatacgtggatccctatcaagtttttgccttctttacatcatcaagcttatttttaaattaattcttgttacggacatgctttttataccctctgtattaatttccttttctagaagtccatattagtaaggccatatcatgaaaattagtatttttagtagggctgttctgaaatttttccacaagagatattttgcaatgactgagctatattgattcatataatttgtatccaactgcttcattttgccttgagatttccagtgtacctaatattaggtaaagaaaatagttgatatatgactggatgtgaggtggccattttaacttgtaggtgacaggatttatctcttgatttcttcgttaattttaaaataaataaacaaaaaacaacataaggaagtttagatccttctttttaatttgtaacacttcaacttctagtattgctttctgtaggggagaatttttcagttgataacatgagttgatttcataagttatagtatttaaaactagagatgttttgtcacaaaaaagttgtccctttaatatatgatttagcacggcaactctttttaaagtaatatgtttaagagaaaaccatgaccttatgataaaaataat

SEQ ID NO: 131179 - DNA, 1129 bp, Homo sapiens
gtatgtaggagtggatgctgttgaagatgcctctattgccagctgtacagcatgtgtgctgggctagtttcctggctgctaaagctgcgtggtgccctttaatgatgggaaggaggacattaaatgtgttgggcttagtgttttcacttgtgaacatcagggagcagagggcatgcaaactttgcccaaaggctggacacggtttgcatagaaatgagctgcgtgtagtaataactgacttggtagatgcgcagctaagcactgattactaagtaaaagtgagtgcaacctcaggccataggtgagctaggttgaccagggaaaggctgcgttccaagaggtttgtcttccattggggccgccttaaaatgctgatcctgattcacactggttgagcagtgtgctgtatgttgtcttcacttgagatagaaactgctgtcatttttattttatagaatggagagaactgggtctcaggaaagtataataaattgcctaggctacaacaggtagcaagtagcagagtcaggatttcagtccaggcagcctggccctaagagctgaggctccctctactttgtttcttatctggtgggtgaacaagatttgagttgctgtatcttccaaggtagtattataatggtatttcaaagactagctgactttttaatgttaacagtgttccaatttgctttctccttaggccctaattcattgtcagagataaggccatcacctttatatatgagacatttaaacaaatgtttttagtaataattcaggaaacatacaaccggtattctttctgtagcgatatctgcagtctcttgttataaaaagaactctattagtttaagtaactgtctcttcttggccccattacagtaaaaagtctgtgatcagcaccctcttggaaggggaagttgttgaatgacagggatgtggtactgtcctgataatcctatggctttgtatttcttagtttatttatactcctgggtaactacccctgctccacatggagtattgacagctttgaatctgaggtagcttatgtgtgctacaaagacaaaaaagaaaaaaaaaaagaaagcgtggtttgggttagacttaaaaaagtactttcatc

SEQ ID NO: 131180 - DNA, 1051 bp, Homo sapiens
aattagttattaaaatctggctggaaaaaccataagtggtgttttacataaactcctcagcatttataaaaaactaatgaaagaaaaataaaagaacctcatttattttaaatactttccttatgaatcctgtcttttgaatgataaatttcaacttcaaatgtagtgaaaataatttaaaatatacatttaatgcctctatttttcttttaaatttctcaactttccatttctagccatgacttcacagtacaatatggatgccatttatgtttattgattatagttaagctaattttaatcatactttgttggagtggaaatacaggaatatttctctgtcttcttagacttctgaggtattttacttaaatcccttgtttcttatctttcaaacctaatagttatattgtatagtccaaagggtgaatgcccacataagtgaaattcacacattacaaccccaatgctattgtcattttcacctctggattttaaagaattgtggtaaataccatgcagaaagatgttgaacctaagacagcccccaagctctttcagagcatagctccagaagtgtctttgaaatgctggaggaggtggaggaggaggtgtgtcaggccctggaaaccgctgggctggtccagggtctgtatttgaaccccgttcagttcatcttgagtcgcagggtgaagaagacattgtacttccatttgcatggattttccgctctgtcttttagccagaaggcagccttgtcttttttgttttgttttgttttcttttttggttgttttgtttctttaatgtttctttcaggtgaaaagccttttataaatatcttgtaaatagttattcctttaaatgaaacagtttgctggtggaaaataatcttactcattccgtcagatataatcaattaaatcagaaaactatagaatgatctttgacattaaaaagcaattttaagatgggttaaggaactattttgactagtatgctgatcatcccacgtaaaatctctttcttggtgtggtgagcatactatatg

SEQ ID NO: 131181 - DNA, 1003 bp, Homo sapiens
ggtgggggtttattttcataaacaccattgtaaaaataattgatgaaatgttttttgacaaaagatcatgtacatatatattaactttctgagctaacagaatgtacattttatttcattaggttacattaataaaaccatgtacaaaaacatacaaatggaagaatagatgaaatcacctccctggaatcagatgtagggtaaatggtgtagtctctgagatgactctcttagttctgtgatttcaccataagagctggcccccatctattctgctttggacacattgtgccaaagtgtacaatgttcagcttcccacaaaaggagaaaatacgggtttaggcttaagattcttctaacattctgttatggagaaatagaccttggccaaggaaacacttcttttctcaatgatggaactttcttcagctggtcagtctaaaatctgccattcaagtttggttttacttctttgtttttctttacttcaggtatatcaaagtgaacattgggtcatgttttattctgagtgacagaacggacttgagctactatccattctagcatgatcttattttacaaacaagaaaactgaagataaaagtgacttccccccacttggttaaaggactgaactagaacttgggtccgttcaccatcctcattcatatgtgaaacactaggtgattttgatgtttgctgaggaaatttgcccactgtttaagattcattagtctttatttttccttttgcacatggatatgagaatagaattaaaatgtcatttattaggatgcagtgagaaattgatgatcataatgaatcagttgatatattcacattatttctttatcagtactttagatatgggcatcaaatgtttagaagctatcacagaaagttaaagaattactgtgaaaaatctaggcttaatgcttttttcagacaccttagcaatagtaatgttggattcatttagataaaatctaattggtactgaaaa

SEQ ID NO: 131182 - DNA, 1066 bp, Homo sapiens
ggcagaagaatacttgaaagattctcaccatcagtatgttttagattcccaagaggtacaatgccaagtgtcatgttatcaactctttgaggtctacagtaaggagtttacttgtttctggtagcttataaattcaataacatcagtcacaggcttcttaacgtatttatgagttgagctagtgtagttcaataaatgattgtacttccatcaagtcgagggagtaacgcaaactagaatagtagccatctattaaggatagttctgaggtttggaatttgtaactgatttttaggagctacgacatgaatatcatatcaggtagaaatactcagagtgatcaccttttatgaaagttagttctatctttcatgtctaggaaaatataacagtgaatgtttgctttttgtatgttttgtctccaagcagaggaaactgacagttttatgttttaagtgccgaaagttgtttttggctaggcagttccagagttaatcactgggatgttaacttgaatttttgtctttaaaatgttttagatttttaaaacgaaatatgcttccattatttccaaactgacaccttgtgttctggattagtttttagagaaatgttttccaaattctcttggattacttgaagtccattgattttgaaatatttagtttagtttttttcttttaaagcttatcagaaagtagaggaagtactttatcttttcggggttttcttattccagaaaccttgttattgcctgtaaaatgcaaatgaattttgcacttattttgttttattttctcttgtgttttcagaaatgttttgatgcatcagaaattgagagatcagtgatttcagttctcctgtcacacctttttatgataaaatattttggtcatttctaaggagtagttagagggaaatcctttcataaatcattttcacttcaaaaaaacagtgatgttggaaaatcatatagtattctttgtgattagttgaaaattatgaatggtgtaaaataatatgacatttaattgtttctcatttagacatgatgcattttatatct

SEQ ID NO: 131183 - DNA, 1027 bp, Homo sapiens
tggtaaattactgtaagaaactcactgtcatctaaacctcaattataataaactattttactctatcccatcactgtttattctatttttaaagtcccgtttttaagaaaacttgtgcttttgaaggaatgccctcattatttataacatattttgctttttctttttactttgataagctttaagaaagctgccagtaagatgattttaggtcattggtaaaaataataatgtacacattttatgtgtaaatatgtgtacacaatcttgcaccttcactgtgtctaacattcagctttttagtgttatacatatttttattcaacattacacatatttgtgtacatttagtgttacacatatttgtatttagtgttacatgtatttgtgtacatttatgtacatcatgtactttttactcccagaataattcagtatatcactgttagcacataattatggacatacatattcttctcacttcctgaacgattcagtgtgtccttggcaatactaacactttaaaaatgagagtaataatgattagagctggagaactgggggtagatagtagtattagcaggtttccctccttttaatttttcccattttcagttccttctttaaaagagagatgtatatatatctgaacagaagggggactaggatactgtataatccatgataacataaggaacggttgctgcatatggctttatttatatatctctgacatagaaaactttgacccctttgcctgttgtacttgggaattttagataaaccccactggggtcacactcatcagttccggctttgcgtgactcaaggcattctctagcttctggtgcgctactgtgctgttttccttcaggagtggaaggtcctgtaagttcatttggcatttggaagcacaactagatttcttcctttttgaaaatcctctgactgggttacagaagagtaagcagagatcatgggcagcatgatgtcgttgattttaggatgctaaagaaaattatgctga

SEQ ID NO: 131184 - DNA, 1408 bp, Homo sapiens
attttttaagtctcatttctgttaagaggagcagttaagggacaggactgtttgtgagtatatcactttatgggctaccactttatagtttacaattctatcatctcaaaacgttatgtagaaataatatggaacatgtaaagactctgtactatgacccaatgcatttttccctagggtgatggattctgtgcgtcacccaaatgtgatgctatttgccaggcttgtaatactggttttgagggttgatctatgtcctatttcatcaagcaacacaatacaacaactttggtatctagggtaattgacacagtcaaaatagtctctggaaaacattccatatacttttaagttaagtcagaagttaatgtacatattaaatttatttaacatgaataaacaaatgatttattgttagctatttgtctaatatactagatagtgttagaaggaaatatacaagtatttacagtttatgttccatttctttttttcttttttgaggggagcatggttctcttgtttgcgttcataatagctttatctgttaattactttgtattcatgatagtgagtagtatagtatcataaatcatagtaaacatgtttatattatctgctatatatgtcccaagcttggaaaaagcattaatattactagttgttaaattgagtattatagtaaccaggaatgaatccagtaccgtataagacaatagataagacatcaactgctatttaaacactaaaaataccttagctgtagaaaaagaaagatcaaaaggatttcagagctgtttttacttgtagaatttggacagaatgtataaagcttacaaatcaataaacattaataatataacatgtgcttcctgattagattctacaatacaatgtgaattgctatttcaatttctctacatatcatatggaagatcagatatgtttataaatagtgtaaaaatatatggcagaaattagtttgtggaatctaatttctctattacatgatacacttcatgtacaaagggatcaagcattactaatctagtgttagcttttgctctctgagctatgcagaagtggaatatatgaatttgtggcttcatattaaataagtgcgtacatgtacatgcaggatagctatagtctcacttgcttagaatgtttttacattacaggcactacatggaattttagcatattgcatattttttgaaatgactttagtctttgtaatgcccattttaattacttaatgcatcccaacacctatttgagggttaatttaattgtaattttggttctgaaatgagagcatgatagacaaaacaaattaaaaaccaaattctacttgtgcctactttgtgatgtcattatctgcacatcatctttagctttgcaagat

SEQ ID NO: 131185 - DNA, 2069 bp, Homo sapiens
agaacttagcatttcgatgactaatattttaaatgattttataaaattttctgcatacgtgtttgaaaaccagtttaggatcggaatcagtgtgctaatccgaaataagttacacatactactaccatattttcagtattatttaagtcacctaccactcctgagtttattctgatttacatcatatagatctcttcctataaggaaatattcattcataaggaagacctttaaaacagggaaatgcatgcatctgtagaaaagcagcttttacgattctagtatttcagtgacggttctattatcactactattattagatgtatatgtgtatgtgtgtacagacatacaacccacaatatgtgattaatgatgtgtacatttttattaagaaagcaaccaaagactgtagatttttataaacgcttgtcttaccttctttgttgtaaataaacattactgaaagtttccagaggacttgcagcaaattgtttttgaactagaactttattccaaatttgaaattggaataaatgctgataactgacctttaaacatttttcataacatgaatattttagaataattatattttaacttcagttcttcttttgatagcaacaataatgtaacaacactatgctattacgtgtacaacaacacagactttaagaaagttatgggcaggtgtctataattgatttaaaggaaagattatttttgtaataagtgatgaacttaaaatgactggcttacattaaaacatattcttattaagatttctctggtgtgtaaaatgaagccattcattcaacaggctgacaactttccacttggtatttgcctttccttaatttagtttccgcaggacagctagtgtggtagtctgcatctgtttttagcaggcatagaaaactataaactcagacagttctgtcccaaatattgcagctcacaagttacaatcaatttgataaaaacccgcaagttttatgggctcgtattttgttgttcatccttgctaggtcaagctttcaggtaataggtttctttttctccctcttttgctgatgataactgctaataccattgataactaattctgagtcttgtttactcatttatcatccttatttaccatttgttgaagttttgggaaattaatgacagcatacgtagacttgcgtttactttgatggcttatctgtgaaaatgacatttatcttttgttattatacagaaataagtaaattctttgttaccataatagttatgatttatggaatttttgagtcccccttagatatagcataaagatggtcttctagcctttgccaagtagacatttaatctaattgtttaagagtgcttgtcatgtatagaaaagactaacatactttgcaattatttacattaaaaattatgtagaggtttgttttagtgtaattttaaaaataatttgtctcccaaaagctgtaaccagtggattaaagtaaataagctaaaataccaaatcttgttttataccattgttctatagcaaacagtgctgcagaggatgtaactactttttaaaatttatcctccgatgtaagtagggccaaagtcatttgtttgtataaaatattctattaattatatatgacctttataaataatatcttcgattttattattatgatcactttttgagctatcacagtgctcagttgttctcctattcctgagaactgaatttggcctttagtttggttttctgatggacacaataatgtagaacttgactttggttagaaagagatctttgagcttcaggaatctctgaaggtgcagtaggatctacaggtgaaaaccatttgaattgttaagcattagttaggtgaagaaactctactggtccctgcagcatatagcagctattatcgtagcggtctactttttgctatcccagttttttttttttttttttttttccttttccaagagcacaaatccaaatagcaaaaatgaaggtgaaattatctatgtacttcaaatttggagcatcatttgaaatcattttctgattc

SEQ ID NO: 131186 - DNA, 1059 bp, Homo sapiens
agtatacacattttccattctgataactattgccaaaatcatctccagaacaaaagtactcattatctctttaccagcatggcacgaaagtgcccatgggaactagacaactttgaagagacttggaggcaatgggcagggctgtatcatttcctaccatctgcggaagctaccctagatcttccagggttgctagggatctataatcaagttgacatttactattcctctctatgtgccacagtcagtggggtaatgcagcagtgcagggaaagcagtcaaccagtagctctagacttccttgtgtttctggggttctaaaccaaagttccagagtttctcttgagtctacttggtcatctacatatattccatgtgacaaagtctcataaaatttagttatgtgaaagagcatcgagtctaatctcttcatttcacagctaggaaaatggaaatccagagatatttagtaactttatcaagggcacaaaactagttggtgaaaaaaaatagtaataaaaccaagttatagctcctatactatttttctcatccatttctatgttagattatgtcatatcaattcaagcgattcttagatatgttaggcatttcgagaagtaagttatctctttcaggatttgatttttaagtcatatatcatgtagcatacctcttcccccaacatttgacaattatctttaaatggttggcaaattaaaactagaatataaattaacacaagtagcattcttgaaaattccccctaaaagaaattcttacaaatgaaataaatttaaacatatcatggaaacatgtgactaagcttttgataactatttctagacaaaataacattatatgatgggtaaatttggccatttgtactctggaggttcttacttgagacaaatactgaatgtagggcacactcaatgattaattctgaggaaggaggattcgtgtcactgttctgcttggtggatttttttttgaccaattcctcattgatacagtcttccccaatgacatattttggtgcctaacttagcttaagtg

SEQ ID NO: 131187 - DNA, 1036 bp, Homo sapiens
caaaaattatttagatgaaaattttaagaaaggttttgtgatgcgaccatcctaagtaggtaagtgaacagtagcaaaacagaatgacttctagagaattcagagaccacctttcctaacttctcccataacaaatcaaaaatgagtagcaaaattaaaaatatgaatggaggatataagaaagaaagaaaaatagaaagcaaagaattgtgtggggaaagaacaaaggagaaaaataaggttgatgaaagaaaataaacatccctatgcctgatgatgttaccacattatctcatttgattttccctggcttttccatactgaataaactggctcctagttaaatatgttgtccagtgttatagaaatagttaatctagccaagctggaatgcaacgttgggtatgttctcctaaaagccttctatttttctagaccaacataatatactctgccatacttcactttcatatgaaaaatgacctctgggaaaatatttcgacagttttccttatgaaagaatttagagtaaatgaacattacttatgacccagaatatggataagcaaatccataatctttgcaaagcaaccacatgaacgttgttgagaaagataaacatgcttgttgattatggagcactttctgaacacaatggatgaagaacaactttaactccttggtgtagccttctgtatttagactttataaaactattcctcatagtattcaggatccttgttatgtggagtaaccaatttttcattcgtataagaagtaaggattgtgaaaacattttctcttctctagcataatgattaagagcacaaaacataggagtgaggcggaggtggatccattcctgccttctgactcactggctatgtaacttggataagttcttaacctttgtaactcggattcttcttatctctaaaatgtggataatagggtattgtgatgaataaatgagagccagggtcaagcactagctcaacacctggaaaacaataacagctgctgactactataactg

SEQ ID NO: 131188 - DNA, 1048 bp, Homo sapiens
ttggccatactcctgggacaatattcttctgaggacactgtttaatgtcctgcatgttaggagttcctctattccggctggtgaagacaacaactcttcatcatcctgttttccctggagatttttctgctagctcttttccagtggttctttctttggccttggcagttttctcacatgcatgtgataatcaatagttagcaaaaagcttcaggggacctgtctgcaaatatccagaactttatcacattgaagctttctcctctgccccagagttttttccaccttgggctttctcaactcggggacatgggtgagttttgcttgggttcctcctcccagtggtgtggcctgaaaatgctctccaagtattaagctcagtcactcatagggcttaagttatttcccttctctcaagattactattctacattgcccattgtccaatttttgaaaactgtagttccatagtatgttgtccagctttttagttgttgaaggtgagaagttaaatctgtcccctgttattcctttttgcatgggagcagaacttctcagcttcctggctctgtgctctgcttctgatgctgcctctggcacttccaagatctaccagtcttcccaatctttctctgggtatttgaatttaaattttctgcctagattctgacttcattcacttttctgaccctttatctctgatcagctcagctgaggggtccaagcacatgctttgccttctggattttcactcagcctcaggaagcactggttcctttgctgggggtggaagtcagacaattacctatttaaaaatctgtaataatttgataggtgaaaataaaaacttgttttgatttttatttttatggttatttgtgaggctgtttatatttcttctttcatgtgtagacactatccactttcaattttctatttgctttgtcccagaggtgccacactggaaactttagttcctactgtagtttggatagatttatgggacaattgattatgccaaaatcccagtgctctcttcatcaaatgg

SEQ ID NO: 131189 - DNA, 1175 bp, Homo sapiens
tgaaagatttcagtaatttttgatttgggaattaatcatagtgggaaaaactgtttaggaaaacatgtcagtggaaattaactcgccacagtatgtagtgttagggaatagcttctgttcggcatttgatttgagtgctgtattctgacatttttcaggaacaaatacatgtgattcatcttctataaatatttgcagtttcttcaagttgaaatgagaaaagctcgtaaattgagcaccaggtctaataaatcattcacttacccaagaacagaaagacaggaaaagctagcatgttaatctaatgaaaaaatcgaatgttaaaaaaccaagaaagtagaagatatttgacattaactttctaatcattgataataatctaataatcataacattattcttaaaacctgaaagaatggattcctgctcccaatgtgtttttaatatcaacttaaactaaaataatttttttacctatttttggaagcttggaaattgagatgtagttgtctaatgttaacctaattaagagagcttggtgtgatttctcatatacagcatctaaatatttaagttttaatgtcttctaaaatattattacattcttcatactatagttttttaacatcctttagaaaacttgtatcagcttcactttcaaaccatgctggcatcgaactcaggtgtagtggtatcagaatgttatgaaataattttttattttcattataaactccatttttacaataaacacttctcaaccaaattaagtatgtaatacactgtcattttaaaaaaaaatctcactgggcatctttttctatgctagctctgtatttttaaaaattctctcttttttttttctaatttaagaagtatttatcagatacctactatgtcaagcactcttgatgttccaaagcagacaggacacagattctgcctctgagcttattaatcagcatatgacccaagaagggaacatgaagtcctacaagctgatagagtatgaagtcataagtgccttggagagtgctttgggccatgttaacagaggatccttctgcaattgggttgtacagaaggggtgacagtggttaatagtcattgtggtaaaaggataaagatctgagtctattattgaaaagtggtgactcccaagttggagtcagaac

SEQ ID NO: 131190 - DNA, 3789 bp, Homo sapiens
aaaaaaaagaaaagaaaagaaaaaaagccgtaacagtagtgaacatagcagtaataacatcatctgtattgttattttaggtcaataggagtaaaggtgaaagaatttccagtgtggtagttcattacttagtcattaaaattaggatgaatcatttattacctcattgtcatgaatggtaaaggaactccctttaccttactagtcatgagcttctttccctttaagccccctgttacttacataactagttttgttttctgaatcattagttatagactcttagagctagagtgacactagagttttcaacaaaggaattttcttctgctattggcgtatttagcttcttagacgcaagttaccaaatgttgccaatgataaaaactgaggttggaattcagagcagtggggttctgctggttgtgtaggggaaggacatctttttttcctcctcagatggagaaaaataaccaaaccattttccctttgaattttagtatcagcagcgtcgccagcaggagaatatgcagcgccagagccgaggagaacccccgctccctgaggaggacctgtccaaactcttcaaaccaccacagccgcctgccaggatggactcgctgctcattgcaggtattgttgcccagtgcaaaacctggctggttttgttcgtttcttaggaagcagaagacagtgagaaatttacaaacagaaaagcatgccgtaaaagctagtatgtttgaaatagttgcaggatgaatttgaatctagcacctgtaatatctgaaatctaagaacttgtaagagtttgttcttttgtccaggtcctttcagtgcttcactctgtgtttctaaacatttttgagatggcataaactttctaaaatgagtcctttttcatggaaacccagaaaaattgtttacagtcttaatgcagaagaccacttagctcaggcctcttactcttccttttccagcacagcactgtacagtgggtacttgacttgaatttaggaaattatttcccttacttggacttaaattgtggcagcacaaatgtatttccggataaactttttctggttatacttaatgtttaataccacctttaagcaggagaggtcctgtgtcctgtactaggacttgattttgaatatatgacattcatgcccttatttggctataatcttatagaaatgttaaatgccatctgattcagtcagatccttacctgtgagaagattttatcaaagtgaaaatcctactcaaaagctgattggcaatttctcaaattatattgatacatttgtaatgtgggaggaaattccaaattccttaacattttctagtgtacatacaaattaaatttggaaatgagacacaattccttcccaaaggtccaattcaaacagaattgagatccttatattttgaagaagtatgtaactgatgtaactgttgcatgggattagatcattaaagacataaaaagcaatgatggagccctttcttcaagtgaactctttactcttactctgtctggctcgtaggagaaaactccttaacgttcccaaagcacaaactgaaaacctaccgtacttgttcacatctgggtccagtgggtctggctggtttgcagctctgtgatttattgttagtatctcctttctacctgtgaaggctagtcagcgctgttttctcagttgtacagcattggtttgatctatttagtcagtccttttgactgacagctattatgtccttagggctgataagcttttgaggagtagtttttctttattctccatgtaattgagagtggacagtagcttattttcaaaagaacttgtatttcttatcccttatggaaaaataaactctggattcaaaacaataaacaggtgattctgttttatgctgatttttctgtttgactagctttctggatcattttacaatttgtggaacattatggctctatctctttctcaaatgcacaggccagataaacacttactgccagaacatcaaggagttcactgcccaaaacttaggcaagctcttcatggcccaggctcttcaagaatacaacaactaagaaaaggaagtttccagaaaagaagttaacatgaactcttgaagtcacaccagggcaactcttggaagaaatatatttgcatattgaaaagcacagaggatttctttagtgtcattgccgattttggctataacagtgtctttctagccataataaaataaaacaaaatcttgactgcttgctcatttgattttagatgtattttctctggcttacttttgtttgcttatacttgtttatttctaaaagctaaaacaagccctgaccggaagtttcaccaggcagaaacctataggctccaccacttttgctgcctctcaggtgccacctttcaacccacttctcccaactacttatcccagctcctgaccccgaggccctggcatctactgtgaatattttttttttgaatttttatacttcgctgctcccaaatgagcaccccgagagaagtccaggcttcatgtacttgcccaggaattccttgtccccggacccggaatcacttggcctaattccggtcagtctgccttttcatttctgcaggtgatggtcaaccagtccccgtactcataggccatgggacacaagattattattatcatcattatttttaaagacagagtctcactttgttgcccaggctggagtgtagtggcacaatctcagctcgctgcaacctccaccttctgagttcaagcgattctcccacctcagcctcccaagtagctgggactacaggcgtgtgccatcacgcctggctaatttttgtatttttagtagagatggggtttcaccatgttggccaggctggtctgcatctcctgacctcaagtgattcacctgcttctgtctcccaaagtgctgggaatacaggcatgagccaccactcctggacaggccacagaaattttaaagaaaagaatcatgccaccacaagtaaacttcattttgtttatattatttaggacttcacatttgtcttccgaaaccatgaagtataattctgctaacagcaagtgttgtgaatgaggaattaggaattaggagaatggtagtacattgggaaaaacatattttagtaatttttatattttaaagataatcacagattttgctgtttgtgcatcaccaaaatcagtgagatctgccagctggtgggggtgtgcctatgagaatttttgattatgatcccctaggagggttatcaaaaaaggagatgggtgaaagatcaggagagtcgagaaattcattttttggacaacattgttttgaaggcactactggggctctgggatcaggcagccagattgaaacctggctcctccttttcctaagttatttaacctccctgtgcctcactttttgtcaaccagataagataagaaatgagagcaggtctgttacctcacaaggtggctgtgagtgttgaagacgtttgttgggggtttgggtgaagcatgcaaactctggttggtatgtggcagccactcagcctgtatttatgatgagggaggcattctaggcaccccttccaggatgttgggttgttggctgggttttactttaaaaagctcagggcctagaacattctagaatccaagtacttgctcacatatataattatttctttaggataatctttgatatagacttacgagtcaaagggtatgtaaaatgtcagccctttt

SEQ ID NO: 131191 - DNA, 1833 bp, Homo sapiens
ataaacatgcacaactccaggatatcattcacattgcagttgtgaggtctcattcacaacaaactacattgctggggagttgtatggtgctagtgagcttcctacatgtgcttgtctggtctgcctgacctaatccctgtgctctagccatgccaggcctcttgtgtcatcaaatctgcctaattcttgcccatctcaggcattcagtacttgtattttcttttgcctacaatatttttggcatagctgactcatctttcactttcagtctgtcatctcctcaaagagatactctgatcatgctatctaaagtaagtgtctcttcacctcccccttctctttctcctccatccctaatcagttataagatcaatgaagatatagaacatgtatgtcttattcactgttgtctccctgttttctagtactaaggctggcacataataggagtttagtaaatacctgtttgcagttaatgaatgggtactactctttagaagcttgctattttaaaaatatatatatgtatagtagctgtccaggcgttaccatggtaggagataagttgcaggcagaaatcagtgaatatggtggtcattgtgccagtcattacatcactttataaagcgatgttggtaactgagctgcaatagaaatttcgggagagaataagaaatatgaaagactgtactacagattctaggaaaggtaagaggaaaggagcctcttcatcatgttttgtagaataaatgttaccattgttcatttaaaacctagatagagaaatcatgtgccagatgtcataatctgtgtggttctttcctgtgattactgataaaaatgttatggaatgcatttgggcaggagtaagttaatgaaaagaatttgggaatactgaacttggtataaaaaatatgtattatagatgtctcactaggtatgtttaacagttcctaccctaacatacctgtgctctcacaataagaaactcagctatttcaggtatccctgagattatagttggaagttcggtatggaaagtttagtaacaagttgactcagattttttcctctgctcttgcttttatgcatatgtgtgctctcattcttttagcaaaagccagttcaagttcatatcttaaaactgtttagagcagtagcaaagctataatttaaagtaagacttgtcagtatatttactttacatttcagcaatcatttggggaagaatctacagttgctgatggacagagtggatgaaatgagccaagatatagttaaatacaacacatacatgaggaatactagtaaacaacagcagcagaaacatcaggttggtattgtggaaaaattcaacaaacagctatttctaagtttcatgtatttcaagagtcatgttcaaaatgacctaaattatctttggtaaattattgaccgttagctactctatattatatttttaaaagattattatttttatggcatgtttgtaacatattatttacaggttatacttaaaaatacctgtgttaaagagagctgttaagctcagattgtaatgccaaggttatgcaaataagagatacatttattgagaaaatcagaagcaaagagattccagaatgtcacagctcatttctttactaactataattggtttggcagtggctcattgtggcatagttagcaatcttcagttcatttaaaaaacggagcaattgtgattaagagcaagcaatgttgataggaaataatagaccaactgctgtgaagtagatagtataatacagacaaaaaccctagaattatccgaatattctcatatgcacacat

SEQ ID NO: 131192 - DNA, 1024 bp, Homo sapiens
aaagaaaaggcaatgttactgaaactcctaacaataagtccctgtttcagcatcctagttaaactggtactgaaaagattcccacaaaattggtcttggtagtggtctgattttctgtcattgttaatttctgatgcccttttaaggcctgtagtacacagattgtgtgtgtgtgtgtgtgtgtgtttctgattgttttttttctgaagagcattatcataatataaaagttatgaaatgcttaaagtccacatatttgtgcttgtagcagtgttctttcacaataacttcatatacttgcagcagataatattagtactttatattaaagacttttctggtagaaacagtgggtctgttttagtagtgcctttctcattactgtaaacaacctccaagatttaaggtctaggtgtattttctctgcatatggcagtacctctcctgtgctgttattttttccctactgtcactgctttccccttaacctcccagccacagcattggtgatgatcttttctttctctgatttccttttgcaattaatgacataaatgacttaacaactaatcatgtagctaacgacatttcctatacttagtatagccctttgggcttcaggttgctcactggtaaaaatgaaaggatcagaaacctgaagctagtgcctcctgtcttcttgccttctcaggacctcattaggttgatctactccttccttcttcatagattttcagtttctttctatactagtttttttttttcaatctttataggctcatttttccaattaaaaatttatgtttaaattttcaactctttagacaatttgaaagaaaaatacagtgaacatccatccataaacctttcatttagattcaccaattgtatatcatgccacatttgcactctatctacgtacgtaaacactttttctttctgaaccatctgaaagtaaattgtagacatgacttttaacccctaaatacttctaaaatgcgtgcatctcctaaaaacaaagaca

SEQ ID NO: 131193 - DNA, 1052 bp, Homo sapiens
aaagtcttaacggggcagggagatggacgatgaatgtaaatggagtgctcagtaacacagccaggttgcaaggctaatttggcaccaaaaagcatactgtttgactgcaaacatatattcataatagtcctttaatttgtctgttttagaaggtcatatttttctttattgcttttacaaacacattgggcacacctgtatttaaagcatttagctaagaacctttttcagcatacaaggttacaatttgatgtattaagtatatagttatataatacttttaaatttactgcatgaaagcttttgcttacataattcatgtcttcaccttttcccaggctgcctttattgagcatacaaaagaaatacatccctgatggtgctttaacattaccaatgagctggtctataatgtccatttgtccaaagcagcatttataatagccaagaaaatgttctcagtttgccctagcaactgagacctagacaaatattttattatagtttttgtcttctgtatttttacgtaaatgaggaaaaagaggtcccatttctttgctttccatatgaagttatttaaagtgtaaattggtgttcctgttaggaggaaaaaaaatgaagcaactttgaagcagtgcttttttgctagtagacacttacattgaaccaaatcgaccatactattttaaaagacagaaagataagttttgtacatctcaatttttaatttctgacagtaattgtgtgatgatggctcaggccagttgccataaaagtttgtataagaaaccccatcagaaataattcttatgcaggtgcttaaacttggtctttcctttcacagcctatagacatgggcaccagtttctttgatgtgcctgataagtttgttctctgcgacgactaaaacatactgtatttgcttttgttgaaaaattcaaatttttttattttaattttattagatggaagttctagtaatagttattccataacagcctttattagtttttaaaaatgtgtatcacaggcgttcagcttttcacacatgt

SEQ ID NO: 131194 - DNA, 2402 bp, Homo sapiens
taaagaaaaggatttttcccctgaagcgtaagtgtttgggggcatctggtaaagggttgggtatttttctgttaagatttttctttgccacatctcttgaatccttggttgtggtgtggtaatgcttttgccatgtggactgtagaagttttctgcatgccgagtgctgcttgctctctccctttccatgtttaaattattctttagggaatatctcatctgttgttctcaccaagggtgaattcagttagaatgggaattaattagctactggattcgaagaaataaatgattgaataaagggaggtggaaagagtgatcagtggctgtcagattgtaagctctgtgtcagactggttgtgagctgtgtgtcttattttccgaacccttgtttaatgagggggtgggaaagatataaacattttaagaatttggtaaagaatgtggcttattggaaattttatgggtgacagttatgcagagaattaactgatggagctgttttgggatcctatttaatggcattgtaatatttactttaaataaattaaatacttagaattcttccattttctgttaattatagaaatttttagttcttattgaatcaaaattaatggttttgacttcatgtaggacggttcttctctagtttcccatttggctcctaaaaagttaaggtgcagagaattttaaaagaaaagctaactcatgaacaattcctggatgtggtggttataactaatctatgagaaactgtgttcttggcatgttctaactattgtatctggagtctccttgtgttctgctacttgttaaactctaattcaagaggctttttaaatgaacttttcaagaaatagagtatttctcatttctagctattttaaattaagttgtaggtgtaggttgtgtagcataacttactgtgacatttacattttagtatcagtgaaattttaaagatacctgataacaaagaatgagtagtttcttctgccaagaatctcattttctgggctttagctcaaattcgcatcattttcaaagttactcaaatcactcaacttatgcttgactctgtaaaactccagtttctctactttttttttttttaagagtgctaatgaaacaaagatcttggatagggcctgtaattaggtaaattttatgaagtagtcagtttagcacttacttttgaccatcagactaaagtatttttaacatgcttcacagattgaaaaaagcaaatatcacctttgagtacatgtttgaagaagtgccgattgtaattaaaaattcacatctgatcaatgtcctaatgtgggaacttgaaaagaagtcagctgttgcagataaacatgaattgctcagccttgccagcaggtaagtggccctgcctaatgaaaagcccatgttttagaactttttgcaaaagattctttcacataaactttacctgtgaaacaagaaaacagttacttaagaacgtttataggttcttaaaacatgtataacatggagtaatagtctggccctgttaggatgtcagggaaaaacgccaaactgataacatgaaacaacacattatttgaatactaattgctcatattagaagaaccctctgctgccttctttgctgtatcatttgtgctttgataaggtcagtgcccaagagggagggcttttttatatggctcagctttatttcttgtacacgatcctaagaggcttagggtattaggtctggatatttaataatgctcaggaaaagaacagaaatgcttttttcttttactggttgtacttacccttgttcagatgcagactcttgcagttgtaaaattacagttgtttgagttttcaactaaaatttgaattttctgaacctgacattggcttcacctattttagttggtgataacgatttcctccaccgtgactgccttagctatctagttgctgagataatgtttattatatttgtaaaatgcagattgaggtttccaaaaggaagtattgttccctttgttaaattaatgtttatttccccctcatctattactcttaacagaaatgtgaatagagccacatgtatagctcctcttaaatgccctttgagcgttatgttagtgattattttgtctgtggtggaaggaggctagcagcagacttgtggaatgaaattaaatggtcagagtaggtaaagaatcaatatatgcttgttggctgaaagaaacaaggtgtgttttcttaagcaaccagtttggagcagactaaattatttatcagatttctagttatcttagatagagacttgttaaaaaaaaaaaagtgtacagactttgtacttcctcgatataaggcaagtgggatgaacccagaagggccagagacatcaa

SEQ ID NO: 131195 - DNA, 1316 bp, Homo sapiens
ttcttacaaccaaccaatttagtaattacacaaatttttcttaaacatttactattttgagagtttcaaaaaggggagttagacgccacatttaataattctttggttagaacaaggtattaatattgtgtgtaatacattttctacaaaatattttttcattaaagaataaaaggaaacccctgatgatttaaaagcctaattttgttttgctttatatgtgaactgaatgaattttaaatctggaatcctgttccctattgctaataaattgttatgtagacatttgtttccaaaacggcttgtttttgatgttggtaacatcattaaaaagttttttcttttaatttcctcttccccatcatccagtccaatatcagatggaaatgatgcggagccttcgccatgtaaacattgatcatcttcacgtgggctggtatcagtccacatactatggctcattcgttacccgggcactcctggactctcagtttagttaccagcatgccattgaagaatctgtcgttctcatttatggttagtaggaggtttattattcttttttcccttaatattattactactatttttgctttctgtcctttttgcctctaagagcagtctggcaggccttctcaagtaaataccaaccctgtttctgcagcagcctcagcagcagctcagtctagacagggtttccttctttctgtttatttttcttgctatcagagccctgatgtgtacattttggaatgctggagtagctgcttcatttctattcctccatctcccctccctcattgaaggggctggtggaactagaccagatgtctaacaaaccccgattgctagagtgtctggctctgtacgtgactgaccaatcataatacggtgtgccaagttttttttatacctctgacaacagcgtacaaaacctggactgtttcttagcacaaagatttttttcttttcggcctatttaatggtgtttcctcaagctctccagaccagatgttctgtgctgtatcagaactgtaggcaatttaacagctttatagccttccccctccccaaacactcacagtttgccatatctggcagacttgcatatagtttccagctgagaagtaaatgtaacgtcctgagtatctgtcagaaaaaatactaatgaatacgatcaatcttatgagctgccccaaaattgtttcagtatgttaacaattggattacagtaaagaacaagttgttaaagtatacttatattggctggaaacattgcatcatcagaccttgatgaattttccacttgtttcaat

SEQ ID NO: 131196 - DNA, 1476 bp, Homo sapiens
tttgaggatggggttaataaactcagtctatacctttatggtgtgtggtacctatgggacttttgaaaatgctcattaaacaaaagagcccttgggcttgtaggaaggttttttaaattgccatcatcatgtgtttggaagttgaaactattattttctaggtgaggaaattaaggcctagagagacaaatgtgttgactaccaccagttcattgggcaaccttattgaagagagtatcttttagaagatgaggtcactatagcattatcaggctcctagtgcaagcagtgcccagtaaatggtttaggagcaaagaaagttaagtgattctgtgggtcatttattatcaccacacttttgtgtgtacactacaaacagtacctccaaaaagtgatcatttgttctcctttgaatgtttagtgctcacttctgatagatctctttctgttttgtaaacaagtggagtttgaaatgtacagattgtttctgtaaatttgattacagattgtttctgtaaatagaaggaaactattaattcattttgttagccccttaatcttttttttttttttgtgaagttgtacaaacagttttctgtgtttagaaaagtactcaggtcgttctctccttgatttacattagaaactgagatttataggaaaggcaaatcaagcatgatttttctataacagaaatgtcttcttaaaatagttttcattgaagccccacatgaaaatttcattttagggttagggtaatttcattcagggttaagtactaggaagtgtttcacctactttaagatctgatatttgtctccctttggatatgaatgaccatgttttcctttttgctttgatttggcttggagccaaattgtatgttttaatcagaatatccatggcctgattcactttgttcaagtctctgcctctccttcagtttctagtttctatattctaattaagatgttttgtagttctgatattacttatcaccttgtatggtttaatgcaagctacctcaagtcctttgtgaatggggcagagcgtgtacacatgcacacaggtgtatgcacacacacttatactttcccagtagttgtgacttttttcaagtatgttaacaacaatcacgttttttaaatattccattctttggaaatattttcagcacctctctgctaacattaatctaatacctggaaatatgacaagaggtgttacttgtcctcatgaaagagcctattacatagtgtaatttttttttttttttttttttttgcctaacactaaagattctcatttggtcttctaacataccatgctcttaattgtagcaagaggtagcattggtcagtaagctattctttatatgagagttcttcatggtgagcccttccaggtaaattcagtttgtttgtataaacacatctcaaatgacatagaattaacttcctgatggctctctatctt

SEQ ID NO: 131197 - DNA, 1564 bp, Homo sapiens
attcacacattccttgaaatcccaggataaggattcctgggttagatattgtcataacaggaaatgtaacatggccccatttaaaaataaaccataggttcctaacctcagatttgtcgtttatcatgggctgccatgaaggtttctgcttgatcatttttcttagcttggaatgctgtatttcctatcctacgaaaagtgtttggtagaagcagagtgtgtagggaaagaggtgaggaagtgaggacaagaaaggatgggtggagtgtgtggttataaaaacttctatttttctggtttaactaaaccataggaaattgtttgctcttcctaaccttttctataactgctgtcactttccattcttgccatcttccacttctttaggttacagttaaggatagtcttcaaaaattatattcctcaggctttcttttataatatctttgatactattttttaaaatccaaatcatcctgatgtttgaaggtaaaggaagcttatctttgggcagctgaggttgctggagtgggcccttctcctaagcaatacatggtgtatgataaagctgtttgctatatttaacctactttagctattcacttgggtgggcagttttttcagatagccttgtcccagtcccctgagtaagctggcattactgctcactcctctttcccatccccactgctcttctcagtgttttccttttttaaaaaagtcacctgttggggataggggcaggaagcttatttcctctctttggaagagttattaatggaatcaggagatagaaacttatatggtacaatgcaattatattgttatatgcacagtaataatggaacacccaagattaccttttcttgaaatctaatttctgtagcttgtctctttctttattgaatctgttctttattgtactgaatataattagcttagtgtttttagtatcttagaagtatttttttctcatggtagattgttttttgatcatattcctatttgtacatatgaattctgtttcatgacatgaatgttagaaatgcatagactttgatttttgtagtgacacatacaatctccagtccccctccccattttcctgatttcccccgtcgccaatatggagatgagaaaaggggagcttgcgtaacactccatggaggccaagttaatccaatccaattctacacaaacatttccttctgacccagatgagtatcatagtacctgggttctaaggaacacttctgaataataggtgatggtggtaagggtttgagctcttcctgaggtttccagtgcaccaagcttttgatgcaaatgattttgttcaatcttaactgccttatgaagtagatagtattgtgcccaccccccgctgcccagcccctacgacccccacattccccatgttttcttttttggcaacagaggaggccagtctagttaatttgtcgccggtcacacaattaatgtgtggtaaagatgttattcagaccaggttaggtgcttcagattcagagtagtctggtaccctatcctgctgctcccacagttt

SEQ ID NO: 131198 - DNA, 1035 bp, Homo sapiens
tttaaaacattttataattgaacaaattgtggatattcctaatgataacatctgcaggatgttgatttataaacactgtaaaatgctgtgttgttttgatgctatgcatatttcctgtagtgtatgtgtacagttcaaaagaattattttcttatctatttccttcaatctttgaattttagccctggtcataattctgagtctggaaaagatttcatgatattccagatttctgtgtttttccttcccatcaataattgtctagcagttttatgtaacattaaggactgttgctttaaaaaaaaaatagcagtagtagttaaggagaaatgcatcatcttgtttctttggaataataggaatagaatagctgcaaggtaattttaaagtttatattaattgaagaaagggaagaatcaccgtgtcttttggaaactgctttaaaactgtgttcattctagatcttcactttaggggggatccataaagaacagttttacagtggatatattttagaaaattcactctctgttttttctactttcaatcaaatactttggaaaaagccctcacatctgcaggacttccatctgggaagaacttgatcctttctgcccagtttcatcttggccctctccagtggttgtataagagcatctctttgagattaaaacatagaacaaagacaggctccttttattaatagtccaatgaaaggctacagatttttgactagttctttttgcagaaatggaattattagtgacatatcttatttttctcttttctaaactctgtattttaaagttgtactactgcaggggacagtgcttagacttcctcacctgtcaaatgggggcagaaacagtagtcttattgttgaactgttgggaagattaacatgaatacatgctaagtggctactgtgtagtaaactgtgaataaatatgggctactattaatcatgcccgtggcttcagaaaaaaataaggatagctagaattagaaagaattcaacatatgtaacctgcctgg

SEQ ID NO: 131199 - DNA, 1009 bp, Homo sapiens
gctgacagtagtcagaactgattcattctagatgggtatcttggacatttcaggttgcttatttaaatgaatgattgctttcatgatgctgtttctaagtatctttaaaaggaatcatggagtacacaaataacttagcaaccctcattgttagagattttttttctttaaatttagatggtttaccatagatttgaaaattatttcagaaatgaaagcagcattggaaatgatgcagttttaaaatcctataaaaatgccccaaattaaacaaatgtttcctgacccttcataaagcacaaacagacaaatcaattttttgtgaattcctacttttgtctttatgtgatacagtaatgaaacaatgtaatcataaattgtagcagttatttaaaaatttggagattacactgttgatttgtgaatttagtgccatcaatttgtgatttgcttttcttttgctgaagctccaaaagtttcagcaagtaagatggagatttttagtcatttttgtgaatgtgtaaactttgttgattcttaataattgaatttgttttgcaatattcctttagtactgtatctggcctaaaattcttcctggaattttgatgttttcttgttgatgcacttttccatgagccccttttaaaggtaacacatacagttcttgcttatattccagttttcatgctaactgcctattcacatttcctaactccaggctttcattatcatcttgtgcatgaattactgcagtggcctcttactgggtttcctcatccaagtcttttcctttttagtccatcctctgttcctaggtaatgtcttacagcagaagtttgagtgtcactcttcaactaaacccttgtctgacaccttcttgccagttcagtaaagtctaagtttccctggcctgtggccctttgagataatggctcaggcctgccttcccagctttattttttattctttctcctatatatagtataagattgtttgaagattaccc

SEQ ID NO: 131200 - DNA, 1150 bp, Homo sapiens
gtgcctggcctaaaagggcatttcttttataggcttttttttttttcctattaaaatagagcttcctgttggtggtattttgaggcaaaatttagatgactgaagaacatggtatgtcaggcagaaaatgcatggggattatgtagtacatattaactgaccaaaggaaacaacacttgagagtccatatatttgggatgtcttggggctttttagacagagtaatacccagcacctccccccactcctcttcccccaggtttgtaggagcttggggagtgagtcaaaaccaaaaggtggcatttggtcttgaactgcagtcagctgttagtactgctggcaacatttctttcaaagtgtggtatatgtgtgtttcttgtggatgcagtctgcaaatggattgttatttatgaatggtaaattaaagttgtttttacatttcctaactaagtagtttaaccaatgtttgctctcattgggagttgccatcaaacttagtaacgtagtaaactgtgtttgagctagggttataaaatgcccctttgatctaagaatactgaggggcaacagagttgactgaacagtaagcattagggttgaatgtattcccagagacagagcagtatcactgattttggtgaaaattagtatggacttagccatgatacattttcattttgcttatcagagcctttaatgtgttgagaataatgggtttctgattcatttgcttaatttaacagaggaaaagtattttctacctgtttttactttttatttaaaatgagtgcagagagcagagataatctttgaatatttgctgtgtgtgattatagtaagcattttttcttctacatactgagaattataagaaaaatacattataattagatcctaatgtcaatcacacctggaagtggcagttaggatcaaagtaatgttatagcagtctacaaggattagtacattctgtgccccttttcctaggcttaaatgtctgctattacagccttttcagtaagtgccttagctcagttagaacttcttttcaaattgttttgttttgtttatttagagatgaggtctcactgtgttgccccagctggtcatgatctcctgggctcaagcagtcctccttcctcagcctgcc

SEQ ID NO: 131201 - DNA, 1061 bp, Homo sapiens
aggtttcttcactgaaaagttactttttattccttcccctactctattacttagaattgagtcactaagtccagcccataattaagaggaggggaattaaattctgtcgcttggtgggaaggaacatcaaagaatttttggaggtatatgaaaaacaccctactaattaatattatggggactatcacactatatcttatcaattattattcacttctgctagactggatactcactgagctcaggggctgagatttatttatccccaatatttattgttagaatagtggaatataatacatgcccaataaaatatttgttgaatggattaaatggagattgtgaattgcatacgaagctaaagtagctaaatttaatcctgtaggtatagaacaatattaactgaatgatgtgaaccctccagccccccaaaaattactgtgtcagtttcctttgttttaaatttgtttgaaattgaggaatatattctttcctaaatttaacacaatatttagaaagtaatttttctttctggctttggagaactgattagaataaagtaatttaacaatataaatttagaccagaagtcttactttatgattaaagatagctagttcaatgttttgagtataccctatatttagaagggtggactgacttgggaaagcatataatttgtaagtaaattagcagtgatagaaaaattctttcccatttctcaaaaaaggtgtttaaaagcatcaatttattatgtttaccctaacttttgcattacaaatggactccctgaaccccaaccatgctaaatttaactttcatagtagttgccagttttacttatggatgtcttccggcctccctgatcaaactatataaatctttttcttttctttatgttgcttgactcactagaaacaggaacagtaagccatacttgcatttgatctttgtctttttttgctaaatagttggtaaaaagtagagaggattttcccttaataacttgaagactttaggacagagacgttccatcttttggctcccctaggccacactgg

SEQ ID NO: 131202 - DNA, 1865 bp, Homo sapiens
ttacaaagagaatcacaggaggaacttttgtaattattttagcagatgggaaactaagtcccagagatgcccaagtttaaaattaatggcaaatgcagaaccagaaaacccagtatgcccatctaatatataatccatcacaatttagggaggtggcagtaattccagtatgttttcagaagcacagtgagtgatgcagttgcctgcagttgtgacttgtagacatattgtatttacttaaaaggctgcttcttggcattactatttactatcagcacaactgaaatcaaatgatattaaatttaacaccagatttttagaaagttaagtttgtgggtgtacactaggtattatattaaataaaaatgaaggtcaacagaaaattagcggtggttgaatgtatacagacactaaacccatttcactgctgaaagtcagcacagcctctactattttgctacatggaatggagaaactaactgaaaatacagatcaagctgggtagggtaggggaagaaaaatgtgttcttattaaatatcactgaatgccattacaaataatagtttgaatagatggtttaatttgacttaggaaatcagtgcctgactgatgacacaggaagactttctagaatacattgctttgcagatgacttaaacagacaatactgataaagcctgtcatgtgaatttccttctttactgagtacacagtatggttaagtagtatgttgtgcagtgcttccaatctgccgtgactgccatctgggcaagcagaatgagaaaagagcatggaaaggaaatggatcagttagctgtaaggaatctgtgtgaacgctgggtgccactcatgaaacactgagcagttagtgactcctttgtaaccagtccaactagctctttgtaaaaaatgaaggtgtgcaccgtgaacaactctcacaattcatcttttcaatgtcctggtacctatggctgagacagaccagtaaatccagtgacagtaatcatgatcacgctacccttttcttatttatctcttcgtattttttgatttaattttttgctgcttcagtgtttggcacaatgttgaggtagatttaataatcctagcatttttactttgcctaaatggagtctttttggaaacaaattatgtgtaaaagcaagttcctaagaaacatttaactacttaaagacaagagctatagcttcaaaatcttacaagttgtaacccaacaaggatatacatgagtgatgaagttgtgtatggataagaggactggctagcagaatctaacctgtatacctttgtcagtggatacatctcttacttgaatttcaaaaatttgtacaatagttctttttgcatacgtgcatatggttacctttttgataaaacatgtgatcccttacaaaattgtgttaaccatgagtcatctgttatctccatagaaattaacatacccttatatagatggctaataatacaaagccacgatggtttctgtggttttactaactgtggttccatttctaaaacatttaaaataagacctgctcctttttaaaaaattttttgggcaaagggttgtcttatcagaaagtgcaataatttaagcagatccataactgggaggaattaataacagaaagtttttgttgacaccaggaagtagattaaatagtgcaattgtggtaatgagtaccatatatgataagcctgagccagctgggttatattaggctgcttgatactttgatcacagtattatttcaaggcttgtctatttaaattgctaaggtttcttgtcatctttgcgatttagaccataatttcttttattgcaaaaaaaaatttttttttt

SEQ ID NO: 131203 - DNA, 1888 bp, Homo sapiens
tttgaaaattacaggtggatacagtgcttaaatagtatttaaaattcctaagtttccccaagtctaaaaatgtaatccttaaattactgttcccagtggtttaaattttaattaaataaaaactgtcttacttttgacccacaacaactttacgtaaagatatttgaatttcttactaaactttaaggtaatagccattaaaatgaactgttttagtactaattaaaatgtcaaaaagtcacaattacagtatgtaaccaaagatccttgctatttctttttttcaagttcagacttgcttcctatcttgcccaggagaaatggtactcagtttcgttcccccaattagatatattacctaaagtatgttttacagatcgataattaattataattacatttgatgttttggtgctaatactgagttttccaaactgctcttcatcctaaaagagtgctatcttagttatgccagtaaagtgttctgtttgctttatattcatctctcttcaggtgaaattttgatagtttgggactttatctgttttgagattgttcttatatctgtttgagattattcttcgtggcttacctattagcagtttcagaattgtgttttcataccgttaacacttctccaccatgagtattatttaatgcttttttctaccagtaatttttactcagtacattttagatgctttctgatatagttgaaaacaaaggcagtatttattttgactttaagtaataatgtaatggtgtaggtttataatgaaaccccacgtctccctctttccttacccttatatacatatttactgttttttttgccctctaacatctaacctacagacattgtcttttgatagacagcccttctttcctgtgaccgatgagagggccatacaattattctagtggtctttgcagaattgtactcatcttttttctggtgtatagaattggatgggtgactcccttatggagacatattttggtggtaggctactaacctcacaaccagcatctgtggtagaaggagtttggcagcagagccctcgatggggctccctagacttgtggcatgctgttatcctcagcagacagcaatgacagcagcagcagcggcggcggcggcagcagcagtcctacaaattccagttgttctcaagtcactatagattccaagctcatctgctctcactttagtgtctcctttttgcttttctttctttcttcttttgttgtttattcatcaaaccaatatttgagtggaaactgtgtgctgggcactttggcctttgcttacctacatttctgctacacatattttttgaaatgtttgttatttatagaacttagtggttttaagcagtgtatttgacttgaacatgagaagcatgaggaggacttgttttagtgcattatgttagtgaatcagattattgaaaggtgaatgttacattaatatgcaggtaaatgtgtctggaatatatttttgtttacctggagaatgtattggggttataaacacatatttacgtaactgtgtatctccaagtttgtaattcaaagtcattctgaatgtatttgtttcataagatacttttgttcttgaaaatttgtaagttgaccatctttttttctttgtcatattagaagtattttattttcatttttgattcattgtcatttggtagcaactcccaatactttaaatgtactcagtttttaaaaaagtctattaccaggattattggtaatgtggattgtttcttcttaatattttaatttctcttcttcctccaactaccagcatcaccaaccccatgaaaaaagataaaataaaacattaaaaagattcagtactagaagaggatgagga

SEQ ID NO: 131204 - DNA, 2461 bp, Homo sapiens
tggattcagtcttcataaacttttatattacagaatttaccttctagttgaaagtgaaataatttgatcatattagagaatatatgctttttcaaacaaaaaagagtagaaaaactcatactaaaattcccattagggggcactgttatcaagcttagcagaactggagactaatttgttttctcaaacgtgcaacccaaggcttgctaaaagggagaaatattttcatcttataagattcagatactgttttatacaactgaattccttaaatatgttataaagtgcactgaattaaacacagattcaataactcactgccttgcttttcagcaggctaaattgatttactatttcaggtgatataggaagcttactttattttgcgtcagagccaaatccataattttcatatttggagtggccaatttttaattttgcttactacaacacaaaggatgatccttagccttcaaaataggttgatttcaaaacgaagcatgaagactgccttgtactcctaaaattcagttaggggaattaaaataatatctttttactcagacagtattcatgtgtgcaccatgtataattattaaagtgatagttcacaatgtagtgataaataaaacacatagcttttatctgtttttttttcattttcagtaggagaaaattgttacttgaaaattatttgtttttgtattaatcaaatttggtgttggagtaagagatactagtgtcgactgttaacatattttgtttaagttttgaaaagaaaagcagagttgtagaatcaatcctttcagaggctaaaatatgaattgacaaaactgtaattaaaatattgatgtatttagagtagtttttcccagcatagggttatttttgtgtgactgaggttggagagaataagtttgtatggtgatgttatttgcagtgctctctgtgcaagttagtcatgttttacattggagaaaatctctgcttagttacttgcttcctcaaatctcaccttccttctcagctttcctgcagcccacacctagggtaaaactgctggaaacctagtctgtggttactattttgcctttgtattgctttagagctcagagaagagttgaatttggacagagaaagcttttaatattttttagacagatggggacattttgtgaatagacatgtgtttacttattattttgtcttaccccctatctgtatgactagtcagtgatcgttgtggtctgtttgacagattttttcaaaactctctttcttttgttgcatttttaaaaatgatatatttttggtagaactgttagaaataatatgtagacagtttgggggcatgttttgaaatttactgcagaaaaatagcatgtttacctagtgacctcatatcgttgtggtcaagtgtggaggtataataaaatgtttcaaatatccagaaaaaaaaattagtccactgtaattcacttcagcatttagccagcaaattacttgagtgggaagtaaaaaagatacaaagacaccaaatcctgcttactgcctcagaagattttaagtgggagagacaagtgtgtacataaaaaaattgtaaaacagaattgatataagtccagactacggaaggaaaaaatgatgcgaacactcagctatcagccactaattcctttcggggatgacttcacaggagaggtgaagtttgattctatagatagatgtcagttgcaattttaagaaactgttaaacaagaaagttgtgtcttttgaatgtgttctgattatttgtatgtttgggtcctcataagtggcacacacacctctagaaatcaagaacaaactaatatgtatatattttttatttgacatctttattgttcagattccttgaaaatacttttcagatattgctgttgctttagtatccaggtagagaagttgtttttgacgtttgtttttatacatgaaagttctcctgataatgatgttagtgtcatgtttatagaacctcggggcccatattgcagttggttctatttaaaatatttagtaaaatacttaatagatacttggttttagaagcattatgtatgcaggtaactagagagaatctgtacactgaattatgatataattccccttgatactcatctttttgttacgtagtattttgaaaatgttaaaactgttcacatttagtgatttactgctaaataatcagggcaatgaactttagattattgctcacttacatttttttggataactcagaaaagcctggtttgtgatgtaaaactttaacttaaaaacctaaatttactttatgtgtttggtttttggtttattaaggtgattagaatatacgagaagcaaaatctgaataggaagcatcagttctcgtattttcatggctttttggttctttcagtttgagtgtctcaagattttaaataca

SEQ ID NO: 131205 - DNA, 1058 bp, Homo sapiens
agtgttttgtagttttcctcgtagaggtttttcacctccttgctaacccatatactctatattaatgggcattaaaatgtagtcaccagtagatttttattaaacttagataaaaactataattttctgttatatggatatatattagaatagtcctgtatgttgatttttaaaaatcatggtaaagacccattgcatttcttactgcttttctattgttttgtgctctctaaaactagcagttattcagaggaagatctttttttgtgccatccacctcggggaggtaatataccaaatatttcataattttaatgagtatatatttcaggtgttttgtttgtttgttttggtgcctcatgtaaagaggagatttttaatctgttgtccaaaagtgaaatgttaataaatggtttaaatcagagatggacaaacaatgatctgatttgtaaataaagttttgtagggacacggtgatgcccattcacatattttttaatggcttcattcccgctacagtggcacagttgagtagttgtggctgagaccatatgggtcctaagcctgaaatatttactgtctgacccttaaagaaattttgaccacctgtgatttatgtaacttcatgtcttattgttctccctctcctgtaaagttaaagaataaggcagtaaatcctctctttcatcataaattgataattttttgtgcgatatttgttcttgatgttacctttaatcttgacggagctcagaatatattttgagcactgaaacgaaaatacactataggatgtttgtttcactggcacacctaggaagtatcagaataggtagtttttgctttagttttagtgcctttttcatttaaaaagaaaacacatattaagttgtaattcatggttgctgacctgtgactaggcattgtggaaagataatggtatgaggccaaaaaacctgggtggaaatctcagctttatactttggagctgtgcaacatagaataacttctgaaccaattttttctgactctagtatctttttaattgctcacttgag

SEQ ID NO: 131206 - DNA, 1004 bp, Homo sapiens
ttctttgtgatgctattgtaaattggatttttcttaatttcctttttgtcatttttgatatgacttttaactgatcacattaactttgatagaatgttacttgcttcatttgacttacacaccttcatagtaccttgagcatataataaacacaaagtatatgcttgctaaagtgaaataccttgcagtttgtctgcaaagcaggttttcattaaagtaattcctctagaaactaaccagggctacttttgttctaggcacctgaacactagcatacttggatttttttaaacccttatgcagtgtgcatcttttttttttaacctggctatgctctccctatttcatttgaattacctcccacagaattaaggttgagatttctctgtagttctttctggcagtattagaatacctctgtttctctatacatgcacatatgtgggggtacttaattatatttaaataatcactagtttaggtctggaaaagaagagattgttaatgcagtttctttggtttacaagtgaggagcttgagaggtttaagttttttgtttggttactgggttggtggcacagttggaagtagaatctattccagaacagttaacactgtcacacagttttctcaggtaattaattttttaaatcatattcttggtttagaatatgaagaaataatattcattgcaattatggtaggcgaacgaaacaaaatatattactaattctagatcattggaagctaacttcttttacgagcttgaagtacttgaattgaccaatgttttatttcacgaacatgtactttattttttaaatttctacaagctctttattttcaaagttttaaaagaatgtttatttcaaaagtttcacatggaataagaagcacagattattatcctaattttacagattggaaaactgagaacagaagaataactgtgtgtttggatttacataggtagacttcgcgagagtagattttttaaaaaaaat

SEQ ID NO: 131207 - DNA, 1136 bp, Homo sapiens
gagatgatctgttgagaaaggcaaaatgagaatttatcagaaggctctgctttcaggtgtcccgataattgagacctttatctctgtgtcttattgatagttttgtcatttatgtgtctattaacaggatcactttctcaataatagcctcaggttgagggggtattctttgatttggctgaaggaactcctggatgccagaccatggggaagctttgatttaagagcataactgctgtagatggacgtttttgacatgtaatcaaactcctggagtttcagatctgcgtttagattatgtgagctttattatttatgtaagggtaaaggaaaggatttgtaagacatttatttattcctcttatttaatttgtggttttgcaaacctagtacagtttcttttgttttttcttagaaataaaggaaataataaactaggatggttgttaagctcccttctgtgtgtgtatgttttaggtggtattaaagataatcaaacattatcaagaagaaggacaaggaactgaagttgttcaaggagtgcttttgggtctggttgtagaagatcggcttgaaattaccaactgctttcctttccctcagcacacagaggatgatgctgactttgatgaaggtaagggtgttcatcacaagtgtgtctttgcagtgcatacaaatggatattgacacaggtctcaccataacttttgataatgtgtgaattgggaatctgtcaggctagcctacttcacttgatgtctgatactttgggaaaattatataaattctgggaaatgagggtttatactatagacatcattagtttggcctttacttatttggaatttgtgattctgatttgtcatagattggataggaactgtgctgatgttgactttgtcaacatgaaatcagcttgctaaataaagttttgagggacaaagatcatccttatgtgtctgttatccattcccttctatcctcttttgaataagtcagtgtttagaaagagatggagttcaattttctgcttcagaaagaagatactcctcaagcatttcagaaattttatttttgtactataggtgtagttcctttgttagcaaaggctgagagtagttaaaagctcacatcaa

SEQ ID NO: 131208 - DNA, 1368 bp, Homo sapiens
gtgtacattcataagaattcatgtttaagcttttactaaaatttttttcttttactcaaacattacatttttgcaaagaaataaagatttctagaataactgtgtactagacaacaagtagaagacagcagtgagaggtttgaatgttggggtttcatctgggcttactcactgaataaataaatcactgtcttacagaagttgtgattcaaagtgggccctgctgctgaaaaaagtttgtttttaccattcttaaaaatacgatgttcagaatagaattagagctaagggagtcgtgatctgacctcagtggaggagtatgcctgtcatctcctgtagaagcagcaaggagtggcagagaaaactattcatttcttgctcttctcaactactgccacagtcttatgccactgggcttacagttacataagtgcttggtagctacacagtttggagctcatgtctattgtggtcacgtattttgagagacttcgtgacataaattaagaagtgtttgcttctgtagtctaaatgctcagttttgggagttgggaaataactgtttacgtgcttaatgttactgattctgtaaaccagtgctattcaaagtatgaggtatggtttgggaacactggtctgcacagtataaacacagggttaagatagagtgtttagaaacttttattatagtagtttgacactgctgtgatatccaagtgatatccctgggctttgtgtgtgtgtgtgttttattttcatctttctagtgagtaatttttattgtattttactaaagtgttggtctgtgatagattgggggaaaatgggttctttaccactgataacctgagaagcattgctgtaaactattttcatgtctattttggctaatggcatcttcctgtaaccagagttgccgagaccagctcagtcggggagaccctaacccagcggcgctagaggaattaaagacacacacagagaaacatggagtgtggagtgggaaatcaggggtctcacagccttcagagctgagagtctccaacagagatttacccacatatttattgattgatttatttatttttctgagacggagtctcgctctgttgcccaggctggagtgcagtggcaccatctcggctcactgcaagctccgcctcccaggttcacaccattctcctgcctcagcctcccgagtagctgggactgcaggcgcccatcaccacgcccggctaattttttgtatgtttagtagagatggggtttcaccgttttagccaggatggtctcgatctcctgacctcgtgatctgcccgccgcggcctccaaaagtgctgggattacaggcgtgagccatggcgcccg

SEQ ID NO: 131209 - DNA, 3236 bp, Homo sapiens
gaataatgtcggacaaatcacttatcagttttctaatatgcataatgcgagttagtacagcacttcattgcaagatcagaaatgaaagcatttttacataagagacactacagaaataatgcgaactgtaatgctattatgacggtttgcctagtggtgaatgattaaacatttaaaaagtttactttcatcttagatcattccatcggaaagaggtcgaaaatgtacagtaggcatgcacaaaggataccgcctggaaagaaggtaaaactggaaaacaggagggaggcggggcccaattttggcttctccttccgtctccgcccctcgaacgccggcctgcgagtgacgtcacgcgagacttgtacttccgcttccggtaactcacgtttctctttcttcctgtctgcttggaaagatggcgtcccgcaaggaaggtaccggctctactgccacctcttccagctccaccgccggcgcagcagggaaaggcaaaggcaaaggcggctcgggagattcagccgtgaagcaagtgcagatagatggccttgtgagtgctgttctttttcctctggcccacgtggggagcgcagttcccagccccgtcccaccagacgtactttctagcattctcccccttgggcttggtgtggctgggccaaagtttttccctagtacgtttctctttcatcttcactttttgttcaggagcttcgacagccttctcttgtcttctaacgggacagttggggcttcaggaaggggactgagaataggggtgtgagtgacaggttcctggggtcttgttttgagatgaccggtggggggatttgaagaaagactcctggagaccagcagctaacgaaggtgtcgagaaggatttagggacctagtagggctctgggaaggagagagtaaggaaactccactgattccctgctgggatctgacatctataacgttccaagtggagatgtactttgtagccactcttttgagcctgtacttcggcgctttatctgaaaccgtataatttagaatactcttttgtagtgttcattctgaaaaacataaaagaatatcaaagagaagggccttaaatgtatttagtagttaaggttcatgaactaggacatccaaggaaattcttgataaggaaatggacttagctgggaagaggaaaatctagaatgagaaattttatttctgttgtttcgaagcaaaatgcatttatatgacgttctagttttaaaagtatccttcctgccctctttttaaaaagcatcctctcttcctttgatttttttaaaggttatttcctattaatgcagatcttagatatttgtaataagaaagtacttttaaattcatgtgaaaattgtaattgcaagcaggtatttttaagtggaaactgttgataatttaaacgcagcatataattgaatctgttgaactgacttagttaaactggatacaagagtgtagcctggtggttaagagctcattcagtcttctaggctcttccacttaaccagctctgtgactttaaggcaagttagcctttccaggctttgctttcctcatctgtcaagtgggaatgagaagtatctgtatcatagagttgtttggattaaatgaaaaagtttatgtggtgacctgtagtacagtgtaatcacttaatgttaattatgattattattatgagtttaatgtctgtggttagcagagtttgaaagatgcaggcaagagattaactttggaatgttttgttctaaatgtcacttgtgtaatactttgaaaatgcaggccgggcgtggtggctcacggctgtaatcccagcactttgggaggccgaggcgggcggatcaggaggtcaggagttcgagaccagcctgaccaacatggtgaaaccccgtctctactaaaaacacaaaattagccgggcatgttggcacgcgcctgtaatctcagctactcaggaggctgaggcgggagaatcgcttgaacctgggaggcggaggttgcagtgagccgagattgtgccactgcactccagcctgggcaatagagcgagcctccgtccaaaaaaaaaaaagaaaatggagtactatctggcctgtgtactggcactgtggctttccctggctcatgggaggcagatgtgtgttcaggaataaatgacgtatctttagagattgcaaatctctaaagttagtgggtggacttagattacacttgttaaaataagtaccacttatgcacttgggaaatgtttatttcttagaaacatatttcttattaaatttgctatgtcacaacagcactctttgaatcacttagtttccagagttgaaaaaggcaacaggtcggtggcataaatctatttggagatcatttatttagcaaatattttaggacattctgttaagtgccaaatactatctaacacagggcagtggtaaaagcacttcagtaacaatgtcctggcagctttaagagggattgttgaattaaacagagacctgcaggtggagatggactggatcacttcaggtttcacaagggtgcttagtcaagagactggttctcaattttttggactcagaaattattattttttatcagctctctcagaattgattaatgctaaggaaccaattagtccttctcacaggagattggtttatatacatgtaaatgttgatttactcatttactgtggaagacataccttttcagtggtgaaaacgctcatatctaccaccaaaaagacccttttgattaccaaagcaccttggaaatcgaataaaaaaaatcagaagcttaccagtgactccaaaatcaatcataataagagcaggtaaaggattattttacttgagagttatttatatccagattcttgacgaacttagtgaattatctcttattcacggtggtgggtacctctgtgcttttgttctccatcggttgggtagatattaacaaaataagttcctaacaactttccccctttttggacatctgcctttctgtcatttatatggttttaggcagctagattatattgcagttgcaaggttcttttatcttggttgctcattttttaatggtgaatgttttccagttaccataaatcatgtagggaacatttaaatggtatgttctttatgcgttttacattgttaatacagggaatactggttactctaaattttattaatggattattgcag

SEQ ID NO: 131210 - DNA, 1337 bp, Homo sapiens
ttggatacaggaaagtggtttgatcttagacatggtgaatttgaagagttgatagcaggacatccacaggctggcagtactcaaaatagaggtcaagtctaatgactaaagcaagcaaaatcttcttgaaacagaaagatgataaaggagatgaagcaagaaagaatctggcaaatgctggctagggttgaggaactcttatgactaaatgtttttttaaaaacaacttgatgatgtgagaagttttactgttctgaattgaaaatgttttgaaagtataccaatttgtacttgaagcagaagcttattacgctatggttgggacaagggagctgttgtcaaactgcaagtctcggtaccacttgctagttacttgaactttggcatgttacttgaaatctcagaatggggtgctctaaaataaggataatttcaaggtaagcgacctaacttcatagggttactttgagattaatcaagaatttatgtaaagagcaatttgcatactacatggaacataataagtgctcagttaattttaactgttgttcttcctacttggtaaatgcatttttcaagtgatcttttaaagtaaatggttaccagatgacaaatttagattgtaacagcatagttttattttaagaaaaaatcgactattgttttttacaccttatgtaaacaagtgaaatgtatctgctataatttttcttttcagatgtgtgttaaaagagctagaaacattgggaaaggacttatatggggcaaaactgattgcacaaaaatgccaagttcgaaattgtcctcatttcaagaatgcagtgagtggatcagaatgtctgctttccatggttgaagagggaaatcctcatcattattttgtggcaacacaggtgatactacttttaaaaccacaggcaattttcaccatttctatttatacttcatatggagctatttataatcagaaaaaagttagaatgattagacttttaaaaatacaggcttctaagttaatttgcagtcagtaaaagcaattgtcatttgagaatttgaggaaaactttaagcatgttgatattctttttagtagtggaaggttgggttttgttttttttaatgattcctttgttttgctttttttgtttgtttcttgagacttgagggtctcactatattgcctaggctggtctcgaacccctaggctaaagtgatccttccacctcagctcctgagtacctgggattacaggtgtttgccatcatgctggacactggcagaagtttctttttttaaaacaagaaattgttgacatgagatgtgatgatttgttgtagg

SEQ ID NO: 131211 - DNA, 1176 bp, Homo sapiens
ttcacacagctgctactaacactgtgctcagtttttatgtttttcttcctttatcatgaaatatacccccattactcaaatgaataagtgaggcttactcatttgaaaaataaaatctgtgatctcttttatttttaatacagttcttgaaaacctatttaaggtaccttaattgacatttgaactaaataattctgttttcttttaaataggatcagaatttgtctgtgaaagtaaaaaagaagcctggagttcctctcatgtttattattcagaacactatggttttggacaaaccttctcccaaaacaattgcctttgtaaaagcagtggagtcaggtcagcttgtctcagtgcatgagaaagaaagtatcaaacatctcaaagaggaacagggtttagtgaaaaacactgaacagagtagaagaaaaaagcgcaagaaaataagtggtcccaatcctcttagttgtttgaagaaaaagaaaaaggcaccggacacacaatcatctgcttctgaaaagaaaagaaaaagaaaaagaattcggaacagatctaacccaaaagtactttctgagaagcagaatgcagaaggagaatgaatcctttggatactttcaaggacattcaaatgtgaaaatgaattttttacaactagaagtatttataataaaagaccaaacttatttttgtaaatgaacccatatgctttagctaaaattaattataaaataaaaacagtgaccagtctagccagcatggcaaaaccccatctctactaaaatacaaaaattagctgggcatgatggtgcacagttgtaattccagctactcaggaggctgaggcatgagaatcgcttgaacctgggaggcagagattgcagtgagcccagttcgtgtcacttcactccagcctgggcaacagagtgagaacatgtctcaaaaaaaaaataaaaacagtgaatgggtgtaggtgtgatggaattcactttacttactaaatggtttcgggaggttgtttctccaggtaaaattgtcgcctctctggtcccattcccaccttcaaacattatatgcaaacagttttaaaaaatcttacagttctaaaaggcttgtgacaaaaaaagaggcagtccctctttcacattgacagaagaaacttcctctttcaattctagt

SEQ ID NO: 131212 - DNA, 4234 bp, Homo sapiens
tagtttcagagccacttctacctatgtgtgaggatgtgccattatctcagacttagttgtgaatgagtattaaaatagttgtggtttctgttatggctggtatatagtttcaccatagcctgggaacatcacaactgctgccttgcacccaccttggactttaaaaagtcatttaggcagcatgtggctgagaactaggttgctcaagtgaaatatataataaggagtatagcccattcattttaaaacaccatataaatcaacttaggtagtctgcaggctctttggtactgctccacaatgagattaagagtctgccagaacattagtcatctagaaaatcatgttgcaatatttatgtatgtatatttagttgaaataaacagtatatttagtggtacagttgatttatatcctgaagttctttaagaggggccagtaaccaaaacctccatgatcagcagcagtccacagaccacatagtgtgtgtagatagcatccttatagcgcaatatagaagcatactttcagccaaatgtttgcttgcacatagaggactttgccttgtaatttaagaaaaacagactcttcagtttgtactctaaatgctaagtgattgctcagcagcattaagtacagttttctattagttcaaaatacacaatctcaaggtaatttaggagcttttaggagatgtagaaatacttcatttttcattggacttgttttgtcagctttttgggggtcatttttattcaggatgaagatgcatcagggggcgatcaagatcaggaagaaagaagatggaacaaaaggactcagcagatgcttcatggtcttcaggtattgccgctgttgtctcagaggaaaatgcttcatcaaaggcttttgccattgttccctgaaaaaaaaaaagttagatgctggaaacagaaagcatacctttgtcaaactttttccaaaactacatttttatttatttatttattttttctggagggagagttttcttttcttttttttttttattatagtttaagttttaattaaatacataaactgttaggccaagagtaagccggaaaagcatggaggagaatgcttgtggttttcctgaaaagcagaaccatggtgacataccacacaactcctttgtatgcctgcaccttcttgttttttgttgagtaaatttaatgtgctgaatcattaaatttattgggtcattgtgtagcatcagacgttacttttccttgtgctttaatgtcctagacatagacaggatatcttgaatgtctgcaaaatgccaagcaagttgctcaaggtttcttaaaataggacagttgacatgtgtttattaattttttactttaaaaactataagtgctagattttactactatattacattagctgtctaaagaaattggttattttaataatacatgtcagaacaattttgctggtttcttggactttcttatttggattttagatgtaccataacatactttggccttttaccctcttgattaacatgagaatcacatactatttaaaaaagtgcaatctttgtcctaagcagaatatatagtttgttttttccagtaaccaaaattagcatctgtgttagtctgttttgtgttgctctaaaggaatacctgagtctgggtaatttataaagaagtttatttggctcacagttctgcagactatacaagaagcaaagcaccagcatctgcttctggtgaggcctcagaaagcttatagtcatggtggaaggcaaagggggagcaggtgtgtcacatggcaagagagggcatgagagagatggctaggcgcttttaaacaagcagctcttgtgttaactaacgagcaagaattcactgattgccacagggagtgattgataagggatccaccaccacccccatccccaccccatgacacaaacacctcactaggctccatctctaacactgggaaattacgtttcagcatgagatttggaggggacaaatattcaaactgtatcagcatcctcactgaattactactttattatacagattaagttacccttttttggttttatttcagcgtgctcttgctaaaactggagctgaatctatcagtttgcttgagttatgtcgaaatacgaacagaaaacaagctgccgcaaagttctacagcttcttggttcttaaaaagcagcaagctattgagctgacacaggaagaaccgtacagtgacatcatcgcaacacctggaccaaggttccatattatataaggagctagaagcattatagctagtgtttgattcactagtgcttacaaattgcccccatgtgtaggggacacagaaccctttgagaaaacttagatttttgtctgtacaaagtctttgcctttttccttcttcatttttttccagtacattaaatttgtcaatttcatctttgagggaaactgattagatgggttgtgtttgtgttctgatggagaaaacagcaccccaaggactcagaagatgattttaacagttcagaacagatgtgtgcaatattggtgcatgtaataatgttgagtggcagtcaaaagtcatgatttttatcttagttcttcattactgcattgaaaaggaaaacctgtctgagaaaatgcctgacagtttaatttaaaactatggtgtaagtctttgacaagaaaaaaaaacaaacaaacacttctttccatcagtaacactggcaatcttcctgttaaccactctccttagggatggtatctgaaacaacaatggtcaccctcttgagattcgttttaagtgtaattccataatgagcagaggtgtacgcgaaattgtgttatgactgatagccttcagctacaaaaagataggactgacctggtttaaagtgttctattttgtaaatcattccatttgagtctttctgatgaacttggctatactgaaatctgttattttagtgaggctccaaaatgagcaaagctaggcctgattagagtagagtgactattaaaaaacataactttctaggagctataaatcaaagttttaaaaagatgtttggatatatttgagtattccgatcatgaaaacagaaattgccctgcctactacaaggacagactgatgggaaattatgcacctggtcaacttagcttttaagcagacgatgctgtaaaaactaacggcttctctgatatttattgtaagttttagtactgatctccttttccagtgctgcacactcctggtttggaactttaatagcgttgcaacgaaatcctatatccagtttcctgtaatttaattgaagaaaaatacatccaaataaagactttattattaacagaccagatagcatcagaaatcatgtgactgttatgattatcagaatgtcttaactttttagggcaaagttaacactgaaagttctagcttaagtgttgaaacttttgtgggaaaaaaaaatcacttttgaaactcagacttcagtgtatacccaataatttaaaattatgtgaaatgttttaaatttgtgaactcgtaattactgttttaatgattcagtttcttcagagtggtaattgtataaaattgctattgcagctttacattcaatatgatgtgcctgtaaaccaaggagttttccccgtttgtaaaaagacattgtagataattgaatgtttgattttagaaaggtcattagtttcttgttacacattttgttagtctggtttttgttgcttatcgggtttaatattgttcttgaaaatagttgatgctatgttatgtataacttttctaataaaagttgtgttataagctgtacttttttgagtattcattattcagttggtggtggtccccaagggaaagttggctgaaaaagttaatagagccaaacacttcgtttgtttgccttatctagaatagttatccatacaaaccaaatgaatttttcaaaagaaagaggtcttagactaaaaaatggaagacagactagcttgtctccaaccttctttgttaacagaactaggtgatctgaaattttaataaatatataattgttatgtgtgaaggtattaagattaaaaatgaaaccaacaaatggctggtacagaggaagctttggggcataaatatatctctgtaactgctaagtacatacaaactgacatgctatgtgtgtacatccttggtgctccaa

SEQ ID NO: 131213 - DNA, 2880 bp, Homo sapiens
aactcatttaaaatcattttcagatggaatgaaatgtgaatatgataaaagccatgctaaattatacacttatatttattagaacatacctttggaagatagaaatcagtggtgactttttaattagatttattttataattgaaatttttcttttttttttttttaatagctctttacacgctgtcttacaccgcttgtaccagaagaccttagaaaaaggaggaaaggaggagaggcagataatttggatgaattcctcaaagaatttgaaaatccagaggttcctagagaggaccagcaacagcagcatcagcagcgtgatgttatcggtttgttctgttggaatagttccttgatgaagttcacatgagtatttggcttaaaatttacctttatactgtcagagtgaaagaaatgaggaatcaaagatatactcaaatgtttgggcagggaaatgcattggatctgattgccttatttaagtatgaagcctcctgtctttccagagttttaaggttcagaactggcagggtagatagtctgctaaagaattgtcctacattgtactgagggtaggacttgtccttttaagatcccctttcccctttacgtatattgctaaaaattgagtaaatctttatggagctaaaattttatctggccttcttcattaaagaaagcattatgtatgtcttagtgtactagtttaaaaaataaatggttctataatactgttcaaaactgtatgacctatgttttctcttcatatgaccaattgcagatgagcccattattgaagagccaagccgcctccaggagtcagtgatggaggccagcagaacaaacatagatgagtcagctatgcctccaccaccacctcagggagttaagcgaaaagctggacaaattgacccagagcctgtgatgcctgtaagtaagcaaatctatccattaagtcatttgaaggtattcatacagtcagtagcaagtggtatttagggaggccttttaaagtatcttggttttgacagaaaatggtaaggaatgagtccagaggaagaagagcaacaggatatagacagtccactcggagtgagagaatatgttctgggagtcggtgcagtctttcctgactctttttgaatagtattgctttagagtgctccagagtgagcatccttgactctgaagttggttctgatttattatttggcaaacattcctgcacaccttcagtactaggcagttttaggtcatcttattaagtaatcagaataaacttcaaatacctgagaaaatgtaaagcagtatctgtctgcttcattcaaactttgactaccattgagttcagctaggataggaaagctaagcaagtatgaaggaggaaatagtagggtttggtttagggctttccaatcttaagtccatagaataaatgaatttgtgcaaagggaggcttttagataaccttaggcttcttgttcagcctccatcaagaatactctgccaattttaagaactagttttctgtgccctctggtggtaagagttgtcaataagagcatttttctgtatgagctcaggaataggaacacagtaatgagtaggtgactttcataaccaccctccttctggtaattctttagtttcttttaaagactttggttttaatgttcttaactctttctgtaaagcctgagagaagatataggaagtggacccagaaaagcaatgtcctcactcctattatttgctgccgtgagacattcaagactctcagagagaaagcttatgatttataagttacaatataataaccttacagaagctttagtagttaaaaagcatttgactcctaaaaagtaagtatgaaaatgaaacatggtttaggataagcagtcagtttcttttgtaagctacttcaatgtagttttataaaaaatcaaaaaagatatatactgtaataaatttttccttgtggggaagtatagagatataatctcagtatttctttttgactagaaaacttcagccactgtgtattttcatatttaaaataagctactttaaaagcatatatcttaaattgtcttatttgtattgctttaagcctcagcaggtagagcagatggaaataccacctgtagagcttcccccagaagaacctccaaatatctgtcagctaataccagagttagaacttctgccagaaaaagagaaggagaaagagaaggaaaaagaagatgatgaagaggaagaggtaaactaattaataattttcattccagatttagcaaaaacctccaaccagctttatttttcatattggggctaacttaattgatgctgagcatcagagttatttaaaaatgttagaatataagcaaaattttaccatattcttcgtggtattgatcatcattaggaacatcaaattttatgcttcgctgtaactcattggctctcttgtggggttttgaaggacatggaattgtccttacactgatttcttgcttggcttctaaattgcgtgtagctgcttttactatcttgtggtcagtggacgattcttactgctgttattgtctgcttctgatataaccttttctgtatctgtggtggcctggaaatcagataaccatatgttttccacttgtctgggttttgtttttgtttttcttttacttggaccagggtaaagcataactttgctaaaacacttagactgagtgaaggcttaaatgactttttctttttacaaagtaagaggtgttttaggaatcaatttctttttcctggggcatgtttacactgttgaaggtcttttttcttctttttcttcctaatttctggatcattgaggttgttgtttaagact

SEQ ID NO: 131214 - DNA, 1073 bp, Homo sapiens
taaagaaaactcaatctgtgagtttgagtgatgggccctgtttcaaatgagaaaatgagcccaactctgaagagtgtgatatgttcattgtttacagtataaaactacataggcaaaaatgtgttggcccttgcgtcattttgcttattttgtgctaaaagtctatacatactcattcagcaaatttttgttgaatgcccgttgtgttccagcctctcttctgaatggtggttggaaaacatgagttaaaacgttctatcctcatgaagtttaacttctctgctagagtctgtgtgtagaaaagcaggggaatatagtcagtccagatcttgtagctgtgtgttccatgctggcctctcaggaaaatgatcttattttttattatcattccagttaaagaaacaaaagccaagaggaagaggaagctaattgttgacagtgtcaaagagttggatagcaagacaattagagcccaacttagtgattattcagatattgttactactttggatctggcaccgcccaccaagaaattgatgatgtggaaagagacaggaggagtagaaaaactgttttctttacctgctcagcctttgtggaataacagactactgaaggtaatatagtttgcagaatttttacttcatatacattttgagcatctaaaaaaaaaagattctaaaacctttgaatcatttttgatcaagtattttgcaactgtatggcacattttcttttttctcccttaaatcacagtgtactgggcataacttcatctgaaatatatggataagtgagacctgcatttctaaaagatgtaaaatgaattttccttacattaaaaagccactgacgtgtttaataatacttctctctgtaataaattattagttatatcgtcttagtgtgttttacatctgaattcttgaaatgttttctgaatgaaacatgagtggttctcctttttccacagtaaagaattctggcttcaggaggttttttgttgttttgtttttttgtttgtttgtttgtttttccatttataggctcttttctgctcacattccacagta

SEQ ID NO: 131215 - DNA, 1174 bp, Homo sapiens
atcccttttaacataattttgtttttccattgattggctgttgtggtttggcatttctttttcaaattataactaacttacattccctatttcagatgacaaacttattagtaataatgatggcggtatctttgatgatccccctgccctctctgaggcaggggtgatgttgccagagcagcctgcacatgacgatatggatgaggatgataatgtatcaagtaagcatttcatgttcagtgattctggggatgattgtatggcatccagaaagatacttaccatagaagatgacaaactaaaagttgtagtttttagtgaattataaatatctttaagtacagtgcttatgattactggttctgattctatgtttaatcttgcacccctccccatttttttggccaattgggttcaagtctggcggggctttcccattaactagaaaaatattttttcttagtaataacaggatttctttccatttcatgaagagatttttctcctccccatttgtgggatatatgttatataccaaagctttttgtgactttttttttttttttttttttttacagtgggtgggcctgatagtcctgattcagtggatcccgttgaaccaatgccaaccatgactgatcaaacaacacttgttccaaatgaggaagaagcatttgcattggagcctattgatataactggtaagcatatgaacctttagatttatacagcatacaacataaggtcctatttctggtttttgcctgtctactgatctgctactgttgtattagataactaggcttcttgcttttttctgtttttttggcctgtctactgatctgctactgttgctttagttaactagcttcttgcttttatgtcacagtcatctgtcatagagtctttcttctatccaattataattttgagtattttgtagaatgtctgtgcaagttgctgtgaaatacaaaagtatagaacaagctttctgataatgcatatcttagtctcctggggttcccagaaagttagcagcttacttgtgtaacaactggaaaacattggaaagcttttttcaataaagtacaattctaaatgctgtgcagttggtctacgagctggaaaaaactaaaagtattctttttaaaaaaaaaacaaaactagaggctgg

SEQ ID NO: 131216 - DNA, 2041 bp, Homo sapiens
gttttgaggtattaatgttctggatatggctgatagtgtttagattggtgtttagcattacatactttttattttttatttagtatttttaaactatatgagagattattctttattagagaaagaaactgagtctcagggaagtcagggaactttagagtttacaccgcctgtaagttgcagggtcctaatgaaaacccatgcctatctagcccatgatttctaattttttcctctgtacttgatttagtgacttctgcatattacattgtatttgctgattattgatgcttttcaaatttaaatacaagttaatttccaaatcacttacattcttggattgtactggaatgtgtgaaagtattaaatattaaggcttctaaaacttggtgggttatacatatatatttttttaatttttcttatagagagaattgggatttgtttttcttatacatagacttgaaactaaaatgtatttgaccttcttttaaagtgacatcgatgtggcccagcagttcagcttgaatcagagtagagtggaagagataaccatgagagaagaagttgggaacatcagtattttacaagaaaatgattttggtaaaagagaaacaaattattagccattaattataatgttatattgtgttgctaatagcaatttcaaaagaaaaccagactatagacagaaagacttaaaatttcatgtaatgcattttcatcaagaaaagaatttggctttctaccagtagattaagcattattttcatacttggagctaattgtttacctacttctctccctatatgcaatcatagaacctatatattgatttctgcgaggagtcccaacattgaagtggtgatcacgtttaaaccaaccattttggaacagttagtttccctgttatacttgctattcaaaaacaggtattcaaaactagttagcaaggcatattgttttttaagaggcggggtctctgctgtgttatccatgctggagtgccgtggctcttcacaggctggattatagcacactacagcctcgaactcttggattcaagtgatcctcccacttcagcctcaagtagctgggactacaggcacatgccactgtgcccagaaccagattcttttcttgatgaaacacattataacgggaaagtttcagctgtgactgttaatgtaacttaacatacatacatatttagagtttatcaaacatattttaggatcatttaaatctagatctaagtttgaatttgctagtcatgccccagtgttgtaactgtgtgtaattgagtcattttaaaaaattcagatgctaaagaattaaagtttaaactagatattttaacatttgaagtaagacttcagtaagcaaatgtgacataattagaataaatcattagcagttttcttttatcacagtgctatttctaatctttctaaactaatgacaaattaaaatttgtttaggtgattttggaatggatgatcgtgagataatgagagaaggcagtgcttttgaggatgacgacatgttagtaagcactactacttctaacctcctattagagtctgaacagagcaccagcaatctgaatgagaaaattaaccatttagaatatgaagatcaatataaggatgataattttggagaaggaaatgatggtggaatattaggtatgtgggaatgatggttattccagcataaacagaatttctttattaagttgtaaagttttggaaacagttgctaattctgagtcttgaacagcttttagatatatatgagtgaattgtgatcagttggttcaataggacatttcggtaaaactagcctcttaaaatgttgtaacaaaacctaaatatgcttatctcagaatgctaaattttattagtacttaaaactgttctgtttgtgtttgatagctgtgttaagtaaaatattttttaaaatagataaataaactagaaaatacaaatgaagaatgagaatttttttttatataccaagtgttttatacttttataaa

SEQ ID NO: 131217 - DNA, 2682 bp, Homo sapiens
tggcatacttcacctattactcaattggctgaactgtgtttcatgcccactgaagaacaggtattagcagagaggaatgagacatctgtcaatgtgggggacatttgcttctcaaacaaaatcagaattgacttagcaagaaacaatggccctggattggcaaccaaaagtgttacgtgctccttaatgtgctaatgacacaattcatggaatggtttagtgcttgcttcctagcttccttcatgtttgtgttaattcgtgaatttccagtcactctgtcttttcaggatattcgatattcagggaatttataggtaaggacagagaaatgtatgtgattataaggcaactttaaaggaaaaagataaaaagaagactatgaatggcacgaaatgcaggttttggaatatgattaatgttttattcataggtgaaaatggcattacggacatcaggacatctcttactgggagtagttcgaatctatcacaggaaagccaaataccttcttgcagactgtaatgaagcattcattaagataaagatggcttttcggccaggtattgttaaacttgtttggtttttgttgttgttgtttactttggagtttctcatgttttttgtgttactgtagctaaacacattttctaaatctacatgctttgttttaattgaaatacgaggaacccttcaaagatagagcaaggcttggggaggcagtgcttcaagggaggaaacctacttgcgtctgttctccctgtgaagtaatggagctcacccccatttgttcttcctttggagctgcctttttaatacttttttcagcagcttacatagacttgagtcatcaagaggttaaaatgttggaaactaattgttatgtgatgattttttaaaatatagctcagaaaagacaattttaggattttaaactttttttcctaagtaaatattcttcgtagttttttgttattttgttttaggtaatgattggttataaaactggagtctgccaaccacaccaccatctaagaagataattaatatttaaattcacatatctttctataatttttaaaagcattgatgaaatttttattctaattaaaataatgtgtattttattaagaaatgccttaaacagtttctactgaggatacattctagtacttcagtttatgtcagtatgtgaacagtaaaatgtctgagatctaagattttatttaaaagtaaaatatttagaaaaagactacaatacttaaattaacatgtgaccaataagcacattttatctaaataacatgcttttttttgtctttcaaagtaaggcatatttattatagacaacttgaaaaatataggaaaaagataaagaaaattaaaattgtgtaattctttctccaaaataaccagctccttttaacatttaaggtactcttctgcagttattctttttccccctcataaatatcatgtttaattaggaaactattactagttatttgttgatatgtccgtttaaacatttatgagcttaatgcataattagtgctttgactttttcctaaagcaaggaatacaatttatgagcatggaaaaagagaagtacttgtgcttcaaggtattttgcatatgttatcaacctttctatgagaatataaacttaggaagttatacctacttatctccctctgatccctagataatttatgggtagctagatatttaagcttagcatttcttttctaggtgtggttgacctgcctgaggaaaatcgggaagcagcttataatgccattactttacctgaagaatttcatgactttgatcagccactgcctgacttagagtatgtgtcttcttttaaaaaaaattgttgacttggtctgcaataagcagtagtattagcttccaaatgtatagttttccttggaatgttttacattaacagctaaaatgcatatatatatttatataggatagtatataaatatggaacataaaacctagaaagttgttcttctgtaagaaaatcatgtggatgtcagctttaacacagctaagatgtgagagttttgacaagcttaggccaaagcttacgtaaactgaaacagatacgcttgttatataatgatagcagggaatgtaaactgttgcttcatgatatttttcagagttatatattaaagtcagctactggattggccaggctatactcagagccataattctgttctggtttgtttttatttttgttttaaatgaacatacgagataactttttatgaagagcaacaaagggtcattgtcatgacacacatttgagaggagagagttacacagagatggctgttatagcagagtactgtagttatgtttcccttttctcaagcccttacgatccagctatcatgccatgatgttggaacgtgactgtagctttccaagtgacttattagcataactgacaaccaagaaactctacaccattacagatttctctgctttttgaaatgatctgtggcttctaattagagtaagttatgacctattttgttactgcatgtgtgttgattagttctaggctctatctagctattttacttttttctctctttttgacattttatttgaaaattttttattatggaaatttttaaacatagctaataactagagaaa

SEQ ID NO: 131218 - DNA, 1089 bp, Homo sapiens
tctatttggtaacaggatgtaaagatatttccacagagtgaacgggcctgaaatttctaatgtttgctttggtgtgcagttcttgttgtgaaaatgtcagtttagttgtttagcataagtgtcacacgtggctcatttgcaactgcaagcttgcatactttttctcttctctcttccactcccccactggaagaaccactggccctatttgcagagctttcccagaatatgtagcctggaatctttattatatttatgtttacactttaacacacactagctcaaaaacatatgccatacctcattttacctactcctaggctaaactctgaaccagactaatccagaaagaaagcttttgcccaaacaccactttttgaaagttgctagttctagataagataatagcagaggttttttttccctcctttgttcttaggtgaaggttcaatcaatattaattttaaattttataacaccacataaaaatagattctgtttttccattaggagcaacattttactttgaatttttttaaaattagggattcattgtctgataaattctgaatttgatcacaaatttggtataattttggatgtctaaaaatgtatggccatatacatcatcatttatgctgtaagtcacataaaatgctcataaatacagaacctgagagtcataagtagggtcctagagtgctgtagaaaatacacataaaatttaaaatacaacattttcttttacaaataacaatatactaatcataatttaaacattaagcaaatgtttaaaagctttttttgttaccttagaacttgttgtgctttatggcgtggtttgggaaagtatctggggatgtttgagttcatattgccttgttctttcagtaaattttccttatggctagaggaattttgaatacttgtgtttagatggagtcttatctcattgttttatcaactactgcttttccacatactgtatcccatgttaatgttgatcaagatctgcctcgaaaaaaggttgggagtatattttctggtgaaaaaaagctatggatactattgttctttatcaattagtat

SEQ ID NO: 131219 - DNA, 1480 bp, Homo sapiens
ttaaatgatataaaggaaatatcctgcagttaatgtactcttctgaactggggttttcaagcggcctttcttaatacattagagtgctgaaggaaagtagaatgtcagtaacatatttgtgattccaagactttcagtcataagataaatctgctgtaccattgtccctgatttaatatttaaattataagtagataaatgctttgtaagttcttaagttaagaaaactatatatataattctttaccttttttgaacttcgatttttctaaactacccacctgtaaaatggggccagcccatctgcttagctttgcttggtggaatatgaaatgcttagtacagtacttttcgtgtagtagcaattttacagataatttatcccagaatcgcgatttttaatggcattctaaaaatggaaatttccacagatttttatctgtgcctgagtatctttcttcatagattttcttttcttgccatgaaaaatatattctctagctcttggccagtaaacagactatttctactgtcaatcaagatagaaatgaaacaaggcatgaaagcaatttgactcttgtcccttttactttcagctcttagtattttggggtctatttttttttcctctctcaaaattaaaacaatagatttgttttaaatctgttgtttttaaaatacatattaaacatttactcaagcattttatagttttcatattaaagagagaagaaaaattttaaatttcttatgtcttgataagtatttaaattgtcagatgatgtttacattaacttttttttcccctcttaggttttcttctgttttcatagccagccagaacaatgttctacgcacattttgttctcagtaaaagagggcctctggccaaaatttggctagcggcccattgggataagaagctaaccaaagcccatgtgttcgagtgtaatttagagagcagcgtggagagtatcatctcaccaaaggtatgtttgatgttgacatttttattcactttgttgattgtttattgatatgtgaaatagaacttctaaaacagtttttttaggtaggggcattggagtgcaaggaaaatccttagaaatgtttctttattatgtgaagtccttatcacctctagatagacttgatatgattacagattagattttaaaaaaaatctctaagtgcatatattttgatttgcctatttttaatggcaaataagcatcagtcagggcaatgcccaaatattgtttactgatctgttcctcagaggagcttttatttgagaccctgtctcaaaaaaaaaaaaaaccgacgtggaagtgctgtaaatgcgtattacttagtataataagccaatctaaaaaggctacatattatatgattgcagctataggacactctggaaaagccaaaactatacaaatgagacagtaaaaagatggtaggttggggagagaatggagggttg

SEQ ID NO: 131220 - DNA, 1049 bp, Homo sapiens
taatcactccagcaccatttgttgaaaaatgtatcatttctccattagatagcttttgcatctttgtaaaaaaaaaaaaaaattagttgaacttagttgtgcgggctatttctgggttctcagttctgttacattgactgtgtttcctctgctaataccaatcttgagtattatagctatatagtaagtcttgaaatcaaatagactaatttttctcactatttttcaaaatagttttagcttttttagtttatttgcttttctatataaatttgataatcttgcctataaatataaaaaaactcattttgataattgtattaaagattctttaaaaactaaacatatacttaacaatacttgtcagcagtcacattcgggacagttgtcctagagaaatgaaaacttaatgttcaccaaaagtctgtacatgaatatttatagcaggtttatttgtaatagccaaaaactggaagcaactaaatgtccttctataggtgaatgtccaagcatatggtggtatatgaatctcacggaatgctgtccaacagtaaaagggaatatactattgataaacgtaacaacttggatcacagaagcattgtgctagatccaaaaagccatttcaagaagtcacataccatatgattcatttatataattttctcaaaacaacaaaattaagtccagtgtggtgactcaatgcctgtagttccaactacttgagaggctgagggaggaggattgcttgagcctaggagttcaaggctgcagtgagctgtgatcacatcactgcacttcagcctgggagacagaatgagaccccatctcttaaaagaaaaaaagtgacaaaattagaaatgtagaacaggtggtgtttgtcaagacttagaaatggcagagagagagggatgaatgtgatgagttttgtagtgatggaatagctgtgtatctttttgcagtggtgattatacacatctgcatatgtgacaaaatggtataaaagtctgtagacacattgaatcaatgtcagtgccctggttttgata

SEQ ID NO: 131221 - DNA, 1054 bp, Homo sapiens
taatcgacttttttaaagattggatgaagtttggtattatcaaggaaaaaaaaataggcttaaaaggcaattataattacactttctccttattcagatatacaccaggagtcgatccaccactgctcctttggcttcctttagttattagagtgatttcctcttgctaattgtttcccacattaattttagcatcactctgccttccttagccccatcctatgccaaacaggcttctgtttaggaatctctgcctctgcatagctgggatattttaggcacggtgctctgaccagcagctgaagtgctggccaggagctactgacacctgttgaaaaatgccagtagttttaatttttaaaacgtctaaaattttttacatatgccaattatgagatcacttggtggatcttacttacttattcattaagcacatatttagtaattgtcatgccacagatagtattctagaagcttaatattaaggagttttttgtttaggatacagttgcttgcttccatagtggaacttggggcttgtcctgtacaacagcgattatatttctcagaacatgctgctatgttggatttctgtaaagttctctagattttatttataacatagtaggagcagcttaagttttgtgataacattttaaggcttgaagtaggcactgatttgaaacataggaggctctcttccggtatgggaagcatgttttaatctataaaataacaaatggcaaataaagcacctttgaggtgttatttaatgctcgtaccttaagaatattttgtctgagttcttagtatagaatatagtatttcttcattctttaatttcttttttttaaaaaataaacacggggtcttgctatattgaccagggtggtctggaactcctgccctcaagcattcctcttaccttggcctcccaaagggctgggatggcaggcgtgagccaccaccgctagccaatttcttccttccttaactccaaatttgggaggaagagtttacaacattagacagttgacaaagcctggtttttttt

SEQ ID NO: 131222 - DNA, 1877 bp, Homo sapiens
ccgcatcatcgcttgttcggtaacaaatgattctgatccattctgagatctacaaaggctgttaccctgcaggtccatctcacgtcccccaggaggccggggaaaccctgggctgcggagggaggggaggaggtttgaacgagcccgctctggggaccgggccgcctactccgcgggtaaaaatggctgtctgggaggaggcggtggcgggcccggcgcccgcggtgccagccccgggagcagcaaccttccgccgaactcgggtgcggggctcaagaaagtgcggagctggtggggctgggcggggtggggcggggggtcggcgggtgcccctcggccagtgactgctgctgccctcccgttttaaaaagataatttttacgttgggaatgctgaatatttcacagacgcgtggaaaaagagacggagggaagttgcttctttttccaaggatatttgcataattggttttcccctgaacttttctgatcattctttaaagtgattaaggatatcgggtgttgtagagacgctctgggggaggtgtgtgtttctgataaatgcttgatgcccttttcgtcgctgaaaaaggctttttgcgaatgatccgctttgatagtgtggggtgacactgtcgggttgtgctgccagacttagcggccttcttcaaatttgtaagagggaaaccctgggggatttacttggtcactctgatttgttagtgtcttcagcgtgaaaaaaaaaacagcgtttgtgcgaagagtttctgggaaaggcttgtgtttatcggcttctttttgcaagggaaagttaatctttgttgtcattatactggttagaagagtaattggttttcaggcaaaaatttctattttcttaaattgggtgtaaatgccagcgggcagtgcgagtctatagaattttggagacaggcaggagaaggtttctcaaatcgtgaagtcattaaatacctttgttaatgtcggaggcaactaattatttttggaaaggcattgatgaggacatacgccatatctgatcttcaaataagttaacagtttgtatagttgaggtgacagcagtgcataactaatagacatagtgcttttttttatacacaagtcagaattacaaaagaatttctggtgaattattttgtgaaacatacaaattctaagaaacgcttttacagtttggtacagaatggaaattttctaattcttgagaaataaggttgtgtttttagtttaaatgtcaaaccagagttgttaggcatgattatactggctggttaatgttttgctgcaagattgtcttcagagttacttttcgcatcagcagtggcactatgttaggtgtgcccttgtatttaattttcataatcttttttgatgaatattatcccagtttatagttgagaagtaacttattcaccgttacaaaacaactgagcaaagagggagcttaatttgaacctacgactgtctgattgtaaaactcttggtcaaaggatgttagaaccaaaacagaggagatttctagtgtgcagggttagaaatatcttcagagatccttccccctactcccctgaagaggtagctccgttctgatctgagttaggtattgacgttttcaaaggttaggtaaaccaccagatttcaacctttcaggttttcatagtagggaaactgaactgcataaaggttaggcagcttaactgctagttaatgacaatagcaggattatgtctttacttctgagatagtagtttttactttgaataggtggtgtacatttatgtcccgagttaaaatatgtgtgtgtgtgtgtgtgtgtgtgtgtatgtatatatatatatcaaacagtacaaaaaggta

SEQ ID NO: 131223 - DNA, 1078 bp, Homo sapiens
aaattagccagacgtggtggcaggcacctgtagtccctgctactcaggagtctgaggcaggagaatggcgtgaacccaggagacagagcttgcagtgagccgaaatcctgccactgcactccagcctgggtgacagagcaagactccatctcaaaaaaaaaaaaaaaaaaaaaagcacacgcgaagctctggatcctaaaactaacgcatacaaccctgaaacaattctgatgaacacattatgctttgcataagttttgaggggcaatttatagacccaaaacaaatgacaggggaaggtgacagaaaaacatctaagagaggggagagaaaaatgatgtattaccaagttttaaagttatttatttgttatttttactgggacatagaagtaaaatataactatagataaatctctctctgtctctctcactcaaagaatgctttaatgccaactttcggtattcaaccttgtgtcacctgacctttctggcattgcctgagctttcagagtttgtgcttgttttgttttacttgattattctcagtttgtctgtccagcagcctgccctgcttcttgtggagaattgtttctacttggattctaaccatgccctttaggtggtctgtgactaagggtattccatcttcctggatatagtcatgcagctcaaggcaggcagatgggtttgtccttaggatttttgaatgggcactaaaagagtagatgactatttctgccagtagaagctgtggatcaggggcttggaagctgctggtggtcaccatgtgagaaagcccacaccctaatggaggtgactgaaacggaaccactaaaagcacaaaaggggagggagggagggagggtgcttcgcttccttgttcctggggtcaagctgtataagactccaggccttgctcttgtttatgtacatgaaatattctgatatccttctcataaaatctctttttgcctaagtaaattcaagctggagtttcatgacttgtatctagtgttcataactaatacagttgttcagttttaggagttaaaatggttcttactgttgaattggac

SEQ ID NO: 131224 - DNA, 1028 bp, Homo sapiens
tcttatcagagttaaggcattttgagaatatttttgcaataccagccatatattcttcattttcttccactaaaatatcatcagattcacttttttttttaaactgtactttgtttttaacttcttggttgaggtcagcagcatgctgcatttatataatagtaatattaaaattgtaaatttttttttaaagttacacttcaaaaattaaaggggaaaaagtatttcaagtcagagggtttatcacaaagtttttctaggtctgttttatagcagtgaaacaggtatgccaagttgttaataaatgggcatgcattgctcttaaattcttaaaattaaacttgatcagttgtgagggacagcttatgtctatgcattgcctaaaaattgtttctgtttgttggctttacttatagaaaatcttgatttttttttcattacttgatatttttattctttgtttttcctgataagctgccaaatggtgtcacttaccacactggaacatatcaagaccggttaacaaagctacaggataatcttcgccaactttcagttctcttcaggaagctgagattggtatatgacaaatgcaatgaaaactgtggtgggatggatcccattccagtcgaggtaattttttgtgatagagggaggatgaatataaggtgtgaactagtgtcaagacagttgttaatctttttcctctctctcctgttttagcaatatttccaggtttcgaattttattggttttacttttgaccagagaagatgaaaatgtgatatatatgcataaaatactactatatttttacattaacaatttcttgtagactttgacaggcttatagtaatttttgttgttgttaggaagaaatgttttcctatggcaatttttattgctgtcagtgtctccttttaattaagtcagggatatttttagtaggaattttaatagtatcatatacttttaaggtggttttcatgaagtactttacagataaaatattatttttattattatta

SEQ ID NO: 131225 - DNA, 1028 bp, Homo sapiens
gggtctaagacaagactgataccatgctcttacaatgctgtaaacctattagattataagattctattgactcttgtaacaattaatattaagtagataggaattatgtcaataatgtgtatgaataaacttattaagatacataaaggaagctttgaatgattaaaagaacatataaagttcttggatgagcaatacatattataaaaataccagtcttgatttaatactcacagttttaatacagtaacaatccaaatcctaataagaaagcatgcaaaaacaataggattttagtgcaataccaatcaataaacaaatccaaataaaacccaaatggaatttttttcttgaaagtatacaaaaatatcaaagaaaatgttgataaatacgactaataaagcagaattcttagcttcaaaaattaaactgtaatatgaagcatattataaaaatggtaattaggtgtataatactggcacaagaataggcagattagtaaaataatctagccagaaaaacagccttcttattgtacatgagaatttaatatgacagaagagggcttgtgtggaaaattagtctttagaaatagaaactttgggggcgaaattaagctagcttttacattacaccataaatcaaaatgaatttcagagttgaaaataagacctgcaaaacaaaatattggataattttttaagtattttaaaactcggaagaaaggaaaaagatggatagattttataaaataaaattttgtaacttttttaaaaggtgaaacacacatttagaaaactatttccaaaaaatctgattgtaatacatgacaatcataataaaaaactcacagtaaaaaattggtagagggtgaggaggagaatgggaacttttagtttagatcttgaaaaataactggtgtttggtagtctagatgtatgagacattcacttattaagacgtgttatatgtttctgttgataaatatgtattacctcaataaatgtgttctgcttatgtttctctaa

SEQ ID NO: 131226 - DNA, 1072 bp, Homo sapiens
agggaatgtggaaattgtattattttggccttagttctataaataatatttctactgtagaacaataatcaatgcagctacactctgctacggagctgtagcaagttctgaaaggttatattcacaattcagaactgacatgggtttacccagttattcacaagtctacttggggccaattatgaacgtggcagggtttattaaatacatgaacctcacaaattctcaaagtttcaactttttcttgaaggagagcatactaatagattgaggagtaaagaaaggtgaattaagttgttgtaatgtgttcccttgggcaagtaaatctctgttttctgtaaaatgatgggtgagactagataatctcatattctatgttagaattttggtcgcaaatattagaacccaattctaaatggcttaagccaaaagggatttcttagttcctgtagtgagaaaagatgctagagaagagctcacagaataaaagaaaatggcaggaaacagggcttcaggtattggaatcaagtttcagtgccctcaggattctgtgtccacccctaattttagtctgtctctgtttgctccattctctctcattgcagatcggttttttccaagtggtggggaaaatggccttccactgtcctttcaccttgctgtatcctgagcccagagctaggttgcttctccaactctaaattgagaaatcctagaatgaattctaaaaagtttgggttatataaccaacccatggaccaatgatagtataaatgggtagtatgattagactaatccaggttataagctcattcttgtggccaggaatcgggtatgggagttatggaagagtgtactgtgcaaggaacaaatattcgaaaaagagggggtcaaccaggaaaatttgcaaaaaaaaaaaaaaaatccacaaacaacagcaaccacagtccactgttgttctttcttggttataatactatctcagatataatactagttatccaatctttcagaagcccaagaaaagtttacagaaaatcaaatgcatcattgactgtcatgggaattacta

SEQ ID NO: 131227 - DNA, 1050 bp, Homo sapiens
aattgttaaagttggcttattgcaactactgtttctaaaaaataagaatgcagacagtgaatggaggggtactcagttctagaagcttttgagtatatacaatgtgtgtagtttgatgtaaaatgtcagctggatctagatttccataatttatctactttttataggtgcctacaagccccagaatattattgcattaacctgcattttttgttaagaatagcttatgtgaagcaatttgagcccttaagtaggcagactttgagtaggggaaatgctaattcatttaagagacagcatacaaataacccttcttaggtttatccaagcccagactgatttgctgattctgggtccttggcttctgttttccactggaggaagagagctcagtctttatattgattggttaaggacgagcttgagtcagctgatatgcagcaatggcagtattgagttgttgagttgtatttgtggcttgcctagaaatgaaagctttttattgtattattgtaagaatgggtaatgaaagcaagtagtcatcgaagttattgatggctttgtgttttgaatcagttactagggtacacagggctagttgatttgctagatttagccataaagtataaataagaattaattggtgaaatgcttgttaatagatcataataatgcattctttccttgtctgttggagaacatttcagcctttgaaaaggaatttaggaagatcaatactgtttgaagcacattcttacaaaaaaaatccatcagggtcagagaaactatggagttacatgacatctactgacggtagagaatatcacaattcaggctgcactgagagattatctcccccacctataaatatttgtaacaaatatctgcgtgtggaaatattgtggctctggtctgtgaaactggaaacctagtgcccgaaattccctagtcagctcttactcatgctggggattggatgggaagtggttgggcccaggagctagtgttcaatttaacttctttcatgctgaaggatgatgctagcagcct

SEQ ID NO: 131228 - DNA, 1003 bp, Homo sapiens
caggtgcatagatggtgagacttggtggccgggccagaccccaagctttgctgcttgctcatttgcctgactccattttctgcaatgtttccatctcaccttgcacttctctcatcattatccttgtttctctccttctccctagacttctcgggcttcccgttgggctgaccctgaccactttgcccagcgacagagctgcatgaatacgtttgccagctggtttggctacatgccgctgatccactctcagatgaggctcgaccccgtcctctttaaagaccaggtctctattttgaggaagaaataccgagacattgagcgactttgaggaatccggctgagtgggggaggggaagcaagaagggatgggggtcaagctgctctctcttcccagtgcagatccactcatcagcagagccagattgtgccaactatccaaaaacttagatgagcagaatgacaaaaaaaaaaaggccaatgagaactcaactcctggctcctgggactgcaccagactgctccaaactcacctcactggcttctgtgtcccaagactaggttgtgtacagtttaattatggaacattaaataattatttttgaaatgattgctatgcaggtttaaacttttttaatgatcaaaactattaaaaaccagagttctttgtttaatcaaaattgtgttggttgtgaatatttcaaagctgctattccttttcccacagacatcattgtcatggccatgtagggtgccctgcagtttcaaaagctcaaacttcgtggaaaacacaataagtcactctacccattatcaagaaataactgagcataagttgtaacttcattattcaactttgccagtgcaaattgttttccacttcgaatcttcaaatccacttgaacttttatctctaaaatgtcgctgcatgaaagaaagtattacgacttccaggtaggcagttctaactgaaatctctatgtttgagatagatatatatgat

SEQ ID NO: 131229 - DNA, 1075 bp, Homo sapiens
aatgtctgtatgtctgtatctctgtgccttgtttcctcatctgtaaaatgggagtaataatagaacctgccttgtaggctccttatgaagactaaatgaagcatttcttgtaaaacactttagaacaatatctggtatataacaagtaccatagaagtgatagttatcgtcatcatcatcatcattatcattaccattcatgacatgtttagggattcaaagaatgggtatgtgttttctgtctcagaagtccacttgtcatcatgtgataatggccccctgtgaaacccatctttgatttttacagatattatcactacctatactcccattacctgccagccagcctgaagaacatggtggaccaattggccaattgtgaggacattctcatgaacttcctggtgtctgctgtgacaaaattgcctccaatcaaagtgacccagaagaagcagtataaggagacaatgatgggacaggtaagtatagaagagccctcttcccttgcttcactcactggtggttcagccccaggtaatgaggactcacgttcctctagctgttccacccaggagcatataatgaggagaaaccaggaatgaactacatctgaaagctagaaaagagtgtatgattggtgcagggataattaggaagacacaagttaagagtatctttatgccaaggatgtaaagctctcctataatctttaaggtgacatgagaaagatatgtctttagagtttgtcttagtccatttgggctgctatgacaaaaataccattgactgggtgacttaaataacagacatttatttttcatagttctagaggctggagagtcccagatcaaggcaccagcagatttggtgcctgacaagagactgtttcctgattcatagatagccctctgctcattgtgtcttcacatggcagaaagaagggcaagagagttctctagggtcctttttataagagcactgctcccatttgtgaggactccaccctcatgacctaatcatcccacagagacctcacctgcaaatatcatcacattaagaattaagcttcaacata

SEQ ID NO: 131230 - DNA, 1040 bp, Homo sapiens
taagagggtgcttttattttaggcactttggctttgatatatgctgggtatgatatatgttgtatattcattctttggatatacatgggaaatttctcatttataaaacagatgtgtttgtgtctcacgtgaatcaaggcacgtgcacctttgaggaagggggaaaagaagctttttcaacttatgttttagcttgaacagactggatttttaaagggcatatcagcaaatttttttcttcctttcatttccatactactctgaagtttctttaacagaaaacattaaaatgtgcataattatggggcaaaatgtcaagcagtcagtttaatttgctgatgaatacatagaattaatgtttcgccacagtccccggattttgcattatgaattagtggggagaaggtaatgttttgttgacatttgttaacactgttgattgcttgtttggcttgtgttctgcctgcaggtggatttcgccttcacagtgtggcagagcttccctgagaggattgtggggtaccccgcgcgcagccacttctgggataactctaaggagcggtggggatacacatcaaagtggacgaacgactactccatggtgttgacaggagctgctatttaccacaagtgaggaatctggacatgtctcttacagactttacatagctttttatattggctgctgcataaataggaactaaggccaaatcttgttaacagcattgaggaaaattagtctgtatccccgcttaagttttgctgatgtgtcaaatgtgtgtttttgaaaccagtgaaacctcttggcatgtttcatttccagaaattatggtagagtaacattttcagttggtctgaagtgtgaaaatactctcagggcatattaggtaactgaatatttagaataacaacaacaaaagtaaatacctaagtcagcacccaagggcactgttctaggtgcttgggattcatcactgagtaaagcagaaaaaattccttgccaatgcaggtcttatattctaacaaagaaagactgtcta

SEQ ID NO: 131231 - DNA, 1022 bp, Homo sapiens
aaaaaaaattccatagatgctttcaaggtgccatcagatagagttgcatagatgttatgtcaaagggcaacctaaataatcccaggacaaaatgtcctggacctcaccttgttaaaatgctttctatgcagccgaagctctataaatacttgttgaatgagtggttgggccagggtggggggatgcatgctttggggattaaaggtggacacaccgccaattgtgtcatgtgtaggttggcaggaggaagggatgttgataagcttaacattcatagggaaagacagctatggaatacagggtacaggtcactctggcttgcatttttctgccactttctgcaagggaagctggaacacattcattcaacaagtatttattgagagatttctttgtcctggtctccatgccaggtacttcagttacacagttccaggctatatccatctgagtcctggcaacaaactgaattcaaatcagatgattcaaatgaaggaactttggattccttagggaggtgtagatggggttaaaagaccccataagagagaatgaggcacctggtgagtaatgacagcaggaagcagctcctccctttggcctgaaggagttagagaaggaactccttctttcaaaggccctgagagatggcactaggatggagaggctgctctacaagtgctatgatcatggaaggacgtggctactgccagaactctaatggcaaaggagagagggagcagagaagagatacactgacctctctctctatcctgcctcgattttcctgccggtgactcccattgacctaacccaaccaggtgatgcagtccataggggtccattatctgagggcacagggcaggacaagaagagtggatagtggattttggagggcaaacacaggcaaagcagcacaccgccatggtgcaacaaatggtcaagacaactacagcatgtaccttaatcatcatcctatgacctgaagtattgattcatcctctatctttccctgggcacaa

SEQ ID NO: 131232 - DNA, 1050 bp, Homo sapiens
gtgccatctaaaaaactttccttgtcagtccccaaggggtcaggtcataagagagtggctcacacctttgcgccagaatgacaaaatcagtttattaggctgaaccatttgatatcatcatcgactcaccaaaagtggcaatttcatatggtttgacataatgcaattgtaactgtcacaaggacaagatgatcagtgcattatctattcagttccatttatgagtgcctactgtgtgctgagctccttgtaacaggcttggaacacagtggggaatgtgacaaatatagccatggctctcataaggctggagtcaaacaacctgtttgttagagagctgcttggtaagcatttaatgagaaaaggtggatgttggaataatcacatgcctctctcacaaatcaatctcaccataagcacagtttcatgcaggcccttatatccatcccccccatagaatagcccatcataggaatggcagtgttccaattccaatgcctgaagccatgaacagtactcagaggcaggcagttaatgttgaactttgggattctttgttttgtatgcttccatgggtcaaggagaccagctctgcttctggtggataatgtctttctttggatatgtcaggatattcagacacaatccagtctgtctgggagccattctgatttctttaggtagtatagcattttcatgctctgactcactgattgattttatattttcattctcagtgaaaagaaactccccgtttctttctttataaaatggtggtgataataatagtacctttctcgtgggctttatcagatgtctcttacaagatgcctcagatcctcccagctgcatctatattcaggcccctggcatttgttcagtccttgcctccaccttgggcactgaatccagtgggctgggttcttcctatgtcttttccctgactctcagtgccctgggattgcacctcagagtgaagcgtttgcacttaagtcttgcttcaggctcagtattctagaaaacctgggctatgacatgggcccattttga

SEQ ID NO: 131233 - DNA, 1011 bp, Homo sapiens
aagtatgcatttttgaactaaatgcctttattggaaattataaagtcacataaaatcagcaaccattctagagcatgcaaaacatgagctcatcttagttctagcttgaatttttttatttctcccacattgcctggtgtagtgcaagttcagagcagatgttcagatgctcagtatacatttttatttaatttgatcagagttgttatctcacacaccatcataagatatcagaatttaggaaaccactttattaagctccagccaccgtaattctttttcctgcagctttcccctattcccggacacagttggttttgtttgtttgtttgtttgtttatttgtttgctctttctgtcctctctccagttgttggggtgataatgttctgaggttgtgtgggaatggactcactttaaaactcagttttgatgtctgccgttttgtcttgctgagatttccagctcctctttctctttctgtctctgagaagaggctttgggttggaggcatacataaatacatcctaccccagccatctaatgagccccatccctttcagatcatagttctatggaattgtgacaagcccctaccagccaaacaccgctggcctgccactgctgtgcctgtcgtcgtcattgaaggagagagcaaggtaagactcgaaggggacctatatgtggaaccactgtggagccttggtttctccatggggcactttgggtcttggccctagatatcttctccctgttcctggattattttttctaaaactgtacttttctcagaatattctcagatttgaccacaataggctttcaaatcagggaaatctgggtcttgataccaactcttttatagctttgtgaccttgtgtgtatacttaacctctatgagcctcagtttcctcatctacaaagtggaaacaataatatataccttgtagggttgctgttaggattaaataaagtcaggagctggcaatagttatctttctgtaaatgacaa

SEQ ID NO: 131234 - DNA, 1023 bp, Homo sapiens
tgtacttaaaatcacattgcattaaatggagacctggaaaatggtgatttgggtcttaaatgtcttaaaacttacggcaggatttttttcttttttttttttaatgtaaaaaaaattgctgaaaacataaaattctgtaccaagttaattatttgccaaatcatattctaatgagtggatggtataattgtaagagtttgaaagtcacagagagaaagctataaagtggactaatcacattcaactgacaaatgattcgggatgggaggatgtttgactctaaatgtagaatttaatgatctgcaaggtcccaaagtccaaagaaactaatgaactagcttggctattattagtcttcatatgccatggttcttgtcctattatgtaggatgttttaagcaattgttaactcactacttttcaagatgaaatatagaaaaacttcagtaaccagcacccaaagtcctccaattgactttgaaaggaaaatgaaatatgacaagtatacacatctacctcttgaattaaaggaacagctgaaaacctcaatagcttctagaatgtgtcatgtcttgaatatgctttccgtttagcatctacaggtctacattgacctctcttgttctctgagaacagatcttcttgataggggcctggaacctatcttagttcttagaagtttaaccatcagggaaagactaactgctccacacagtctattttggaatgagcatggactcattattatacaaagacaagatagaacttatggtttaactgaagtttaattaggaaatttgattggctataattcatatgtttctctcactctttttcattgctccattactctctctgtcttgcagacatttttatccggagaattaaagtgggagggagggtagagtcactactctgactgccaccatctttcgaatttggattgagcatcatcctttccaaatatcatcaggatctcatcctcactgtgtgctatgttttattttctagattattcaggac

SEQ ID NO: 131235 - DNA, 1030 bp, Homo sapiens
aaattagccaggcatggtggcacacgcttgtaatcccagctactcgggaggctgaggcaggagaatatcttgaacctgggaggtggaggttgcagtcagctgagattgcaccattatactccagcctgggcaacaagagcaaaactccacctcaaaaaaaaaaaaaaaaaaaaagaaaaatatatataatggccaagtaagggcaaatcctctaccattccaaaaatatgagtagttttctgggcaccacagtccaatggcattgcgggacagcagaattctcaagacttaggcaagccagccaaccagcgtcaatgtggcaaagttgtgttaagaggagaatcaggatcatacccatgtggcacagaaagtgttaaatttgtgaaagcagaaaatcttttaggcagatgggcgcccgtcctcaagttgctttttttttaaggcaggacggaaaaagaaaaaggaagcatggagatgattaaaacctttggaaatagagcagatagcattggcctgaggctacaccgaagtagcacaaagagctaggaaaagattcaggaaactgcacacgcatgcattacaagcttgaagaaaggagagcagagatcttcgttgaggtgattctgaggtgtcccaaaatgaggtgggggcattgtggccttccttttggagaattcactctggaagagtgatgactgctctaaaagctaatgtaatatggaacctacactgagaaatctgagtaataccaagaaactgaagtcaccctacttggtccacatcgctgttttcttgccatcctgactatcagagccagtgctggtcatgctccaggcacaccagggcatttatccaccccatgctgagcttgggctcctgctcccaccctagggcgagctctggtcagtgttctcttaggcatagtgtgtatttttttcatcctggaactgggtaaaaggggctgtttaagacccaggcccattcccatgaaggggacaggatcataatgacttccaagggcttccttcct

SEQ ID NO: 131236 - DNA, 1469 bp, Homo sapiens
acccataattttccttttatataccaatgctcccatgaatttgatgtgaacaaattgaaagtttgtctttggtatggagcgcattttaggatacttaattgtggttgtgcagtttctttcttttttttttttgagatggagtctcgctctgtcactcaagctggagtgccatggcatgatctcagctcactgcaacctccacctcccgggtttaagcgattcttctgcctcagcctcccgagtagctgggattacaagtgcctgccaccacactcagctaatttttgtatttttagtagagatggtgtttcaccatgttggccaggctggtcttgaactcctgacctcgtgatccacctgcctcagcctcccaaagtgctgggattacaggcgtgagccagcgcgcccagccacttgtccagtttctaccatttcaccaaacttgatgggcatttcaccttctgaagcaactttttggcttgactctaaagattttgatttttgtcacccccacccacccagacttgctggtgtttttcccctctcatattcagtctgtctttgcacagctgcctccatattgagcagcaactgtgtactatcattaacaatggttttaaagagttggcacccagcccaaatgtctgctctgggaaatgtttttttgttatgttacaattttttatttcctgttttagaacagctgggatgtttttatttgcatatattcttgtcatcatgtcaccaagagagcttaatgtgactttcttgtatctattctggtgcattccatttgttttgctaccatacatgaccttttattaagacttcattgagctcggcaacttccaaaacaatccagccaaattggaattaatttatcactttcccatacctgtctctcaggacaagcagattaataaccaatagccaagtgccattaaaacttggaactctgtcttttcaatcaattggagttgtcttccagagcactttgcagagtgctgtcagacacttgtatcatatcacaagccggtagaatacattgcacttgatgtagtaagatgaagatgcatgttatttaagagaggggaacagcattggtaggtgagtctgtgatattccttttctcctttcataaccacagcagactcaattttctggagactatatagcaatgacagctttaggcatttttcttttcttttcttttcttttttttttttaagacagtcttgctctgtcacccaggctggagtgcagcggtgcaatctcagctcactgcaacttctgcctcccagttcaagcaattcttctgcctcagccttccgagtagctgggcctataggtgcacaccaccatgcccagctaatttttgtatttttagtagagatggggtttcaccatattggccaggccggtcttgaactcctgaactcgtgatccgcctgcctcggcctcccaaagtg

SEQ ID NO: 131237 - DNA, 1033 bp, Homo sapiens
tttcccaagttttcttaaactcataatgtacttgaaactgcctgtgtaggaatgtgtttgtggtaatcactttaaaagtgacagtcctaaacaaaatgaaatgctttttatctttcttaaacttcactggcataaagaaacaggtaacactcatattttgtatgttttttcgaaaagcaaaagcaatgtaatatcattaaatggtatttgagtaaaataaattcatctcttctgtagaccagtttcctgtaccccctcctagttcaggttttttttttttcttttcttttctcgttattctttctttccctttcttaggctagcatccttctctctcacctcctctttctcctgtgagttatgtcagccattcttaaacaggaatatttttcctgggtaactgaacgttcttggttaagtgtagaaactccatcttgaaagagaagacaaatgttgttttgtgcctgtgattgaggttttctgaatagtttttaatagcatggttttgaaggggtggggaacaagaacagtcttagttttgctgaatgccgtattgttaaaggagaaggagaagcaccagtaattttctcttcttctttttaagactatggggcaacatattttatcaagacttaaaaatctgattttggaagcaaagactgggcaaaccaaattgttgccagaacgatcagacttgtctttatatatactgcttgcaaaagggatcctaattgctttgtccaacatgatgattcatgtttactcttcatgcagcaacccaacctccttcctcaaaatggaaaagtgagagctgcctgctggtggctttcccgagttgctttgcgtaaattcatgcacatgggcgcccacctatggtcaatatccccacattcgcaatgagtcttcatttgctgtttactcctcttctctttctaggtatgattatcgggaaatgctgcacaatgccactttctgtctggttcctcgtggtcgcaggcttgggtccttcagattcctggaggctttgcaggta

SEQ ID NO: 131238 - DNA, 1051 bp, Homo sapiens
cctccccaaactgggtggtttctctcaccttggtgcctttgttcctgctatgctatctctacccccaggaattcccatcacctcctcttacccctgtgcctggttgcttcttgtacatcctttaagatttagctcagggtctcacttcctccaggaggcctccctgcctacatgtggccattgcttctcttctctgtataacacccacctctacctcatgtccaatcctagcactcctctcgctgactaatcatcatttgataacacatgttgtttattctggacagtgagctccctgaagagtgcctgacacatggtagacattcaactaatgcttggtgaatgaatgaaaaaggcgcaaggaggtgctcaaaggatgttaatttcatttctctcatccccatgcactttagagaactacaacagtcataaattatttttattttctttctttctttttttcttaagggatattattcaaacttgtgtataaggaaagattaattacttatgaggatggggactggagggagtagatcagctgtagatgttaagttactttatgaataaatacttgagacaaactgtgacaacatcatggggaggctagaattgtgtgagtacagagatgagaggctggatcacttgtttcttccctatcgtctttggttagcaaaaagcaggttcacttggcaaatatgcgtgctacagagggattgtgggagccacaggaggacctgtgagcacagtgcaccagcaacatccttgtctatgtagcttttgataataaggcaaaagccttcaattagaagctgctgttctgttgtgattcacagcttctgtttccattttactttaaagggtctgttccacatttgtctcttggctctgtctttgggatactggtgtagttttcattctttttaattgttactaggggttttaaaaatgtttatatccctcttattctgatataatttaccataataacttgcaattgcatagtgctttgccatttatattcaatgtacatgatttcatttgatcttca

SEQ ID NO: 131239 - DNA, 1042 bp, Homo sapiens
tatttgtcagggctggtgaaacacaaattttctaccctcatcagcgtgcagggagaaaatgacatttttaacaagctgccagacctgtagaaataaaaacagagaagggattttaaaatgtacaaaaggaagactaaataaataacacgatttttcattccccaagtaaattgggcttggtgtaagcataggaatgaactcattcttggaagaacccagcataaatcaagagttgggcatgtgtttgttaaagtggacattgttgtaatgaagggcttgcatcttatctttgttatcttcttgcttccatagcccctgtacactttaatgcaaattggtggacactgagcaccttacattcatttaacaactctttttttgagtagttacagtaggccggcccttaaggtagttgttgggtcaacagaaagtaggaccaaggtcctgtgtcccggaatccaggggaaggaaatgagaaaaatgggcaacttaatacagagtgagcaatagagagttagcacagggttcccaaactccagggatcagggaagccttcctctaggcagcaggagtggaagttaagaaaaagaaggaaagaggggcatgtagggaagaagtgctccctccacagccagcctcctgggactcagattgtcctaggtggggagctgacacccttagaacagacacactgcgctgcccacccctatcctggtcttctcgggctgctgtccatacttcctggctccattccacttaaccagtcccattggcttagagcctggcgaaaggtagttaatggtaagataatgacctcaggcttccccatcaccattgggcctgtgtgtgactcttctggacccatttatccatctgagttcactgttgctgctggctcttttattgttaatcccctcttttccccctgcaccccctccctgccactgtactcaggtagccctttatttagcattttcaaaaacgttttgttttgaaccagagaatttaggcccatgtgtcttggaattgcatttctctgaga

SEQ ID NO: 131240 - DNA, 1525 bp, Homo sapiens
ggaaaactgggactcatggccagccattcagccccacagtatcatgtgtgtttaatcaccggctttggtaacaaattagctattccagatgcttcttttggaaaatgatctatacttctgaagcagtagatggattttgggtatatgccataataatttgggacgcaaagaaaaggcaaaagaaacataacaatgccaggcctttgacatcttctgcattttacctcatatgtacaaaaactgttccaagaaaatttttggcctcatcctttctaatattcataaatgctttagttattaatttgtgcagggtttcattgtatcactttacataaacatctctaaagatgttctttaagaaatttcttctgcagacatttttattgggctcttgctttcatagcagatggcatttggagaacttgacgaatcataccattaactagagagagaaagctagcgtcgtataaaacaaagatgaaagaaaacttctctatatccttttagaaacttgtcatatgaattatccctgcaaacattgccagcagttcagacactttatgacctaggctttataaacccatgaggaatggggtgagtgttgaataatctgacataggttcaacaaatatttcctaaaagattactgtgggccaggcatagtacagggtctggggtcacagtggtgaataagaacaggaacactcccttctctcatgcagtatacattacatttggggagaaagaaggtaagccagtaaaacaaatacatgtgtgaattctgaccttggtaaatgccaggatggagatgaaacagggcaacagaaagagagtgccaggagcacaggttggtctgtgctggcctctctgagaaggggctatttgaatgcttataggcagcttgagagacatcctggagaagaattccaggcagagggcacagcaagtgcaagtgcaagagatagaagttagcattctctgtcaagaaattgagagccggactttgtagctgtagatggtgactgaggatggggcagtcagagatgtgggcagaggccagttctcatgggacccagtcggccaaggtgtagggcatgattattattctaagtgccaggaggagccactggagggtgttcagactgggggggtgacatttgaaagttgtctttggctgctctatagactatggactgcaggaagatacgattgaactcattctgtttaaaactagtaagaaccagagtatggtttctgttgctctgttcatgcacgcttgagctgaaggaggaatgggattaaggaggtataggaagaagggtgtgaggagactctggctgtcactgaattgcaaaatccatgaatgggcagctcctggagtactcttgcttcatggcgtcccagtgctcagagtgctacctgacatgtagggcctgctcaatactcctttgtccagtgagtaaatatcagggcatgaaggcatcctttgggccatctggtccacctctcctcaatccagtgctta

SEQ ID NO: 131241 - DNA, 1418 bp, Homo sapiens
ggcaccaattatactgcatattgctgtatattattttatccagcactgtgaaggccaacctgaactgcctgaaaaatctttgtcatttagtggtttagggtatgtgcaccctccatacaaatgcattaaataaattaaataatggtgtgtgtgtgtgtgtgtgtgtgtgtgtgtgtgtccagctaaattgcactgctttcttagatcatttaagcacacttaatctaatggaacatggtaggatttcagcagcttctgaatagaagttggagagaaaaaaaaaaatccgaaacgtggcaccaactaaaacccccatgtagttatttaaggcagcttaagcacttctgtggaaactgggctccgttgaagaaatagccactcctcttacagaatgaaacctcactttttttttttttgtctttttaaaaattcttccttgtatttttagattttgggtgagaatgggactctaaatctattttcaagctttcttttcctttctctgctcactcagaattattctttttatcttggttctgcccctggtgatatcttgggtaagttacttgacctctcctggctgctttttttcatctggatatttggactggatgatctttgtggtgccttccagctgttaacatttgtttgattttatgattccctcccttgttattacagaaagcacaagtgttgtgccttaagcataagataggaaagtatcccttgatcaagttgaaacatctccactttctaagttccaggactcttagtttgagcttagagagttacagttgtttccaggcagttttttgtgctaagggtggtttgggttttatttctgtttttctgtagaccttattggatatatgaccatttggtcttggtagataatattgtgtcctgacacacaccaatggtctacccttggggtgttttggaagcctgcaggcagggtcctgaggctgcctgagtcactgttaatgaaccaaactgcctgaaatgctccaatggttgacttttggcacttggcagaaaaatccttttcatgttagtttcaaggttgtcagatatcattatccccaagtattaaaaatttcaaagaaaggaggcagtgtgtttgatttatagaatagttatctagctttagctctgacttggctttggaaatggttttgcaagcactagaaaattaaatccattttttatggcactacaaggtattatctcacagcaaatgataattaaacacctgtgaaatcaattagccctttaagcagggaaaaaaagttttccaattatgttttcacacctccaaaacttttataattccaaaaccaacacttgtggagagggatatggtcgactggccgttgctgggttaactttccataaagattatccctaaattttgctta

SEQ ID NO: 131242 - DNA, 1201 bp, Homo sapiens
cacggaaataattgaatagtttggtcatctttagatgaagttttttcattttcctaattttttttttaaagtaaggagcaaagtcttaaaactacagaaacaacattttcatttgaaatcaatagtgcttcaaggttgggggacattgattctcgcaacaggggtagcaacatcacctcattgttttcttcctttgtctctcatagaaaaatgagtatttttctgaatcttacaaagtaattcatgatccaaaggactatttgatttgattttttggaactacatttattaaaagtactactcacctaacattaccttatttcaaggagatatatatgtgtgagtgtgtgtgtgtatgtaaatataaatatgagggaaaatgaatgtttatggctaaggaatttgaactccacccttccttttcaagtagaatccattaaaatgtagcttaatgaaataggattattttaaaatcaggaatagcatttatatgctagagattattgcgtttgacattaagatgtagatagtataaagtgataagttatattgagaatgaactttgttcctgctacatcatccttcaataaaagccagtattgccagaaaaagaaggaaatttactaagtgtgttttatttgaatttccagtcatagtttaggacaaggaggtagatactttggaggatttaaaaaacttctggtaattgacttcatcatgcacttgagaccagaacattcctgtgcatcctggactcagagagttgacctgtctgccagccccttagccagctctgagttgaagctgagcttacagtttgtccttccaatcctctgcgccaaacaaataaatcactatttatgggcaagattgagcttcaccacctattggaacttctgttccagtattagagattggcacattggttttctttcattaaattcttcctcatggtggatatggaggcaggcttgggcaggctcactggggttcacagagcaaactggaggacatgggtctggagagaagcctcatccgccaaagtggggcagacactgggtgggggcctgtgggcgctggcgggaagtccagcccgccaggcagaacacacacagcagggaacatagagttgtgcaaaaagtgagatttttggcaggcacttggctccggggaggtcctgggggccccaggccaggttagt

SEQ ID NO: 131243 - DNA, 1924 bp, Homo sapiens
tgaaggcagtaggaaaacctgtcatgaacttcagaaatctaacaattttaagaacactccatcccattatatacaaactactgcaaactccataaataatttaaaggaacaagttcataaacctggtgaatttagaaaattggtcattcagcacgctgtctttggtgaattgaccatttgttgatttggtagcttggcatgttgcttgaagcaaatgaatctagaactggtaagcagagttctacacacatgttgtaacttaaaatgctctttggatgaatggccgaatacatgcctgggaccaaacttgcttgtagaatggtatttattgtttaggttatagaggttgtcaaaaattcccacatggtaagggaatttcattcatgattatgcatagagaattattgctcctggggttcaaaggctaactcattattttcaggcttactgaaggtccaggcttactcattatttccccctaatgttttatttataaattaacataaatgtttaaacatgtagaaaagttgaaagactcatccaaagcacaccttatatggtgtatggattttgaatcataagtggtaggctgtttccaaagtggctgaaataataccaactcaaatctgttttaggaccacatctttttaggagtgaccagagactgatctgaactatttctagttctcttttgtgttttggggggaaaatgcataaaatactccttaactctagattgtgcatgttcttgtagttgcttggtcactcttttgaaacaaaggccagtgatgcccattgcaattgctaaggtatgtctttcctgtattctaatttcatctaattgatgcataacaaaaattcaagaggttagtgtcaccataacctgtctccttcctcctgcctgtataaagtaccatgtggatctcaggaagaatttactagctacaaaataaaatatagaatgtagtcttccacattatagagttcctttttttttttcatgtggaaaggaatgattgagggggaaaatgaattgtttgacatctaaccatagaaagaaaaattagttttctctaacttctccaggctctgtttttgtttcactttacgttctgtgtgctactggtctggggagaaattatgacatgaaagggagtagtttcccttcagaagattcactcacaatttaatagtaatcacatgtctgggaaaatggaagggttagaaatattttccacatcttttttggtagtcacctgcattctgataaatgctacaacctattcatcactgagtgttttgtttgctgttgctgcctgtaggatgatatattcttgagctgttgacatctagctgtattatctgctttggccaatgaaatgagagctcaagtcacctgtgccacctaggaggaaaagctttaagcgccattttatggcttcaccattctcatgtttccttctgccatgaaaacagtaacgtctcagaggccaggtgctctacagcgtgggtctcaccatgaagaagtggagcatagcccacagccaaccctcaatggatgtgttgttgaaagccattgaagtgatggggtcatttgttactgcaacacagcccactggcatgacatcctcatcatactgttgtgcctgtttatagttctcaggttctagaatggaatcactggaagattctaaacctggacttgtggtgatgatgagaataagaaagggcattgaggtagttgcatttacagcactggatattcttatctgcagagattggttgttctagaaatctttctccttctttaatgctcctcacttcagccctttgagagattttaagctgaatcacaaacaacttggccaaccttatgccaggtcatctaatttctacaacatggtttgtgtgtttaatgataaaa

SEQ ID NO: 131244 - DNA, 1034 bp, Homo sapiens
actactcaggaggctgaggtgggagaattgcttgaacccaggaagcggagctgcagtgagctgagatcatgccactgcactccagtctgggcgacagagtgagaacctgtctaaataaataaattaaattaaacaacaataaaattctagctcacttggttttgtctggttacaggttccttaacaggtgttaaatggcagaaaattcccaatagattgatcagcacttgactttttcgtagtatttcccaccagaataacgtctgtagaagctactctatccaggatagtcctgggggatctctggcagaatataaatatttctgctgtgtgcagcagcagctgtagcttaggaggagcaatgggcgtgggttttgtggtttccttctgacttttcagggtagctcatcacttcgaccacaaaatcactgccaaccttcagaagagggaagaaggattggccaacctacattttcttttctttttagggacaaacagtgacttgagtttttgcagaccagccggcttagttgtgtttggagtttcccaatatagtctttgcagaaatgtgagttggtttttacgttgccgcaaaccaatcatctgcattacaattggccttagtcctggaaccacagaggtggtttgctttaccccttgactcaagttgcctaatttctgtgtcactaggaagaaccaacacctctcaccagcccatgagttgtgagacagtaagcactgaaatgagtgatgaatgcggggtagccatttgttaaaaaccaggagtcatttattcattcattcaactggtatttatgtagccctcctaaatgagtcaggcattgctccaggagctgtggatactgtaataaactagatccctagtcccaaatattcttttttttgaagttccagatagtaaatatgttaggctttgtaggcctcaccatttctattgcaaccattaaacggtgacattttttctttttctgtagtagcagccacagaaatacataaaacaagttcaagctgcg

SEQ ID NO: 131245 - DNA, 1347 bp, Homo sapiens
gcagactttttgcttttactatgttcttaaaaattagtggtctgagaagaggcattatatttatttatttattattaattattattattattattatttttgagatggagtttcatcttgttgcccaggctggagtgcaatggcgtgatctcagcttaccgcaacctccaccacctgggttcaagcaattatcctgcctcagcctcccgagtagctgggattacaggcatgcaccaccacacccggctaattttgtatttttagtagaggcagggtttctccatgttggtcaggcaggtctcaaactcccgagctcaggtgatacgcccgcctcagactcccaaagtgctgggattacaggcgtgagtcaccgtgccaggcccgagaagaggcattatatttaaatataatagtcttattgtattttatcagtttcttgataataatcctttaaattatggatatttgatcaaaaagagaggtcagataagcaatgagaaagagagaaactaatgaatagaaagagtaagaaagggggctgggcatgttggctcacacctgtaatcccagcactttgggagaccaagctgggcagatcacgaggtcaagagatcgagaccatcctggccaacatggtgaaaccctgtctctactaaaaatacaaaaattatctgggcgtggtggcacgcacctgtagtcccagctactcaggaggccgaggcaggaggatcgcttgaacctgggaggcggaggttgcagtgaaatgagatcgtgccactgcactccagcctggcgacaaagtgagactgtgtctcaaggcaaaagaaaaaagggttgaagatgttcctggaaacatgttttgcttgatgcaaactccttacaaaatatttttggaaaatttctcctgccttagtcaaggagaaggaaatatctcagagtcacgtaaatactattctgaaagacctacctaaaaaaataattggccaatagatatcttagaaaattaaggtatggtctagaacataaacataacaatatttgttatatattacaaataaaagacaaaggtgatcccattttatgacaagaaagctttcttggttgaactgttaaacagaggctatatcgtcaatggcatgcctactatgatttatttcattcctgttatatagatgcatattaaggtacagaaagatcagttatcctgccaaaagtcacctagctgggaactcataaaactgggattcaaactctggccatctgacttcagattctaagctttttttctttttttaaatcttaagcttttaacctctgtcctatattatttgggttttccagctagga

SEQ ID NO: 131246 - DNA, 1034 bp, Homo sapiens
gtcccctaggatatgaaatcacatgagaaataactctagctttttaaggaaaatatggtctagtgcttatagattaaaaaaatgctaacaccgttacaggctatagagcagagagtccctgagctaaatttgttgaatgtgttttaactcacggtgtatattttaaaaacttgaattagttacggtgtggattagggtgataaatagctaggagtgacagaaaactcaaggaaatagtggctcaaacaaaatagaagtgtatttttcactcacctgaatttaggtagctcaggcctggtaacgaggctccgtgatcatcagggacccaggctccttctgctttgttgctccaccattttaaacacatatcttacatgctggagtccaagatagctgccccagctccagctatcacaactgcattccatctcatagcaaaggaatggagaagggcctctcccttggaaataacactttctataccctcttacgtggctgcaggagctcctggtgaaccaccatcagggcttggaatgtgcttggttgaccgtaggaatatcatcagattaggtttttgcatcagcgagaaagattgagtacattaatagcagaaagagcacaggcatgggcaggctgaggtttgaagataggcagcattacttactataatagttaagggagcagaaggtaagtgctaaatgacaacatgtattagcagaattcagacaaaggatgatagcaggggctggagatgatatggaaggcaaatggggaggaggtggaactcgaacagatcttgaataagcagagaaatagggaatcccaagagagtccaccgtaaagagaaacatcagcttctggcttccttagatgccatgttttaagggcatttagctaaaatctgagatcagaaaatggtgaggttcctgggtgtccagcaagcattcagctttctctaggccatttatagaacacttaactaacccatgttgtcctttctaggatatatatatatatagtggtgtgactctatg

SEQ ID NO: 131247 - DNA, 1051 bp, Homo sapiens
cagagcaagcctccgtctcaaaaaaaaaaaaaaaaaaagcaagaaaaaagaaaacctttcttgccctcactcctgcttaggatgctgcctttaaccttggtccttagagtgggtaaagctcttctgaatattttttatgtgaggagggataaaaaggttcaataaacgcaatgacaagtggtgctgcccctgcatacaactgtgttcagtgacttcttttgagttcataggaaaagcatatttacatatattgaatccagggccatgattttgatcacacccactctgtcttcctgacttagagcatttttttttcactcaagggcattctcaacaaaggagtatagctttcagatttgtaaactgccaccttattatcctattagtcaattacagctgctcaagagcagggtaagtgacagtatggcagattacagcaatttatttgccattctcatagtcttgtttggcatatcatcaggctgtttaaatttaatgataggagttttacatgtgttttagagcagttaaagttgtaatcaaaatgtttaggaaaacccctactgacctgcataaatgctcccttcttcaacgttgcttgtaaagcctcattgtaatcttgattagtaaaactgactccaattaggaaaaggaacttattttccaaagaaagaaaggccttttggtgttcttgtgtacaaagctcaggaaagatggggctgatggaaattattttccttgagttggcccttgtgggcaaatcagttgcatttaaataagtcaccataaatcccctgagaaacttggtagagtctgtgggaacagaagggcctgcaggcctggtcacaggatgggggtgtatagcatggcactgggagtagtttggaggaaggaggaaggagagctgtgggtaaaagaggagaaaataattgccctccattatgtctggttctctttcaagctaacggtgatagttattgtagtagcggctgcactgaaacgaaaaacatctctaaaaagaaaagttgagtgcttttatagaatctttaga

SEQ ID NO: 131248 - DNA, 1023 bp, Homo sapiens
gcggcagaaggattgcttgaactcagttgttcaagaccagcctggacaatatagcgagacctcatctcaacaacaacaaaaaaagtaaaagaaaagagaaaagaaaagaaaagaaagaaaaaccaaaaccagagagtgattagagtagtaaaaacagattttagtcaggaactattgcagtaggggcccaattctgaacatacttgaacaagtggggatatgtagccaaaaggcagggttaggggtcagtgggtagatagcccctaaaagggagcatcagaagtaaggaagattcttgctaaacagacctaacaggagtcgtgctgaaggcaggccagggtgatcagatctcacctggggaatggtgagagatgatgaatttggtgagataaccagcgtggggattctttctcaagtgatgtaacaagatttttgctaaaactaggtgataacgggtctggcaaggatggacttgtaagatcgagaccttgaggacttagaggaacctgatttcatttaatcaaggagggagtcttgttactggtcactgtctcatctcagtgactcagaagtacagcaacagtggcaagcgtttcacttgctcaaagcgtggttagtccaggctgcagcgaaaggcggaaggcaccagggattgggacaagctcaagtgttcagcatcacgggggtttagcagcctgcttgagtgcaaatatcttgaattgatgttactgtgccctatggaggtcagcctggatccttcttgcctcactgcccaaattccattttcacccagcaatcctcagaggtttccaaaggccttttgtttcttcgtgccattctccctgtaagctttccatatggccttggcatggaacaggtttatccaaccctgtggtattaacagtgtggcttttgttgttcttggagacctttgcttctgtccaaatggcttttctgtgcctcatctgttgatagattggaaaatgctcatgtttttcttttacttgattgtacttagaatat

SEQ ID NO: 131249 - DNA, 1017 bp, Homo sapiens
accagctggcttcctccttttgctccatatacactccctcctcccttatcttcattgttttttgctttcttttttggctgatttttaactccttctctgaatctgaaagagagagttgtatgtatatgatgatttgtgttaaagatgcttagaaattaatatactaaaggaagctcgtaataaaatacaaaagatgatgatttgcattgtaaagtaatctggatttttttggtgcaagttgtctttaaatagaaactcttcttgatttgtgcatgcatgtgcacacatgcacacacatccatagacaggcataagcatgtgtgcctgaatgtgagttttcaagtttaaacccttagaatatgtgttttctgtgtaggtagaaatgaaatcccacaaatgttatcaattcttgtgaggttccaggtaaaatatacatgcatgaccttctctacgttttacaacattactgctttccccaagtgcccgtttatctgtatttcagaaacccatgtgatctgtaaatcaggtaggccaatgtggaatgatatatctgtgtgctgggatctgcatgtgggctgctggaagtttgagtttgcaggtaatgagcgttactttggatgcgaacggaggcactaggcagggagcaaaaaggagggtaacttactccagcaaaggaggacatgattagtgtttccagcatgaaacctttgaagtgggtcagcaggaaaggaagaaaaagcaaaaacatccagacatgggagaatcagaacatttcttgttgcctaggttattctggtagactttgaaatgccagtccctattagtttggtgggtaaacattctcattattttctgtaattggcattattattggaaggtaattaacgacagtaacattttcgtataacactcagacctggatgggtcttaatgacttcccttcagtcttgcgtgaagttgttttctgtttgatttttgagtgcttgaaactacttagggttctggctgtgagtggac

SEQ ID NO: 131250 - DNA, 1009 bp, Homo sapiens
gagaattgcttgaacccaggaggcagaggttgaagtgaaccgagatcgggccgttggactccagcctggtcgacagagcgagactctgtctcaaaaaaaaaaaaaaaaaaaaagagaaaagaagcccggcaatgggctacaaagacactcttggaaagtgctgaatctgagattgaaaacaaggcctgctttagatccagagctcaagtccttagccaatatgacctttcagattgctacaagtgttcattgaaataaagcaggaacagtgcctagcacagattccagcacacaggagacctgcagtaaagataaacccactttggcacttccactcgtgggggagagcagtcagcccttagcttgtcccttaacagtaagactgccacaccatctgatgcatgactaccagctccttttgaatctactcggaaggacaatgtgcacgctctgtgccctgctggatatggtttaattttctcatttctacaagctctaggttacaggggataaagccacatgcagctagtatggacagaacaactagttctggttgaattattcagttcttaactggctgcagctttgggatcttagaaacacagtccttaaccttgcattctttccacttgaaaaataaaatgtaggtgcccagcagggaaattccatggacagaatagctgtcaagtaggggcacttcttagagcagggaggaagctgagcaagtgggggtgaagggaaacatggaggcagaggctggggggctgggaccctgggtggcaagaagctgagcacagatcatcattctcccttagggctagaacctgtgaacctgaacccttcattgaggggcactgaatttagaaggcagctcttctgtttgtcgcttgttctttctctcaatgtaattaagaagactttgaagaaggaatattgtgctaaagcctagataagaacctgttctccatccacctccccaaatccctaaagccttgtttgattttaatat

SEQ ID NO: 131251 - DNA, 1760 bp, Homo sapiens
cgttcttagtcatgaattggaatgaactcaggaagcattcatgcccaggtgttctctggcagacaataatcatataataagattgttttgaacttgctgttaaaaacaatgtgaggagcttcctcatgagttttctatatgaaaagcaggtggtgtgtataaaatcccatgcctttggggagaaacagtaccgacgttgccttagcaaacatcattgctcttcttcgctgggtgcttccagaccatcagtcagctcaggcgtcatttctggtcatctttcctgacctctaggcaggacttttctgctctgggctcccacagaacacttctctttaagtacccaccacattgtgtggaagcgaactgttttctcattggatttcccaccatgacacatgcccctggaaggcagggacctccgtgtagtcacctcggcaaatccgtctcttagaccaacacctggcatgtgatgggagctcagtccattttgctgtagttgaacggagaacttcaccagctcatcagggggctcttttgctcatgtaactacagtttgagtttagatccactcttatgagcacacggtaagatattttgatgcccagtggcaaacagtgctcaagttgccacatatggtcatttttctcagacatgtactttcctgactccccagccctgaaaggtagcatcatctaaaacaccaacaactgataagctttattttatattggttgcatttatcttgctactccttgaaacacaggccttgagggcctttgagatgtaatcttcagtttcccccacccctctagttggattaatagatttatgtagctgttgaacacaagctgcctccgaatgcttgtgttttaactcagtaggaacccagctgatcgttccgaaagcagcttttaagagaagctgatgtcctgtgaacacgttagcaagctgtcattgtgactttgtcagcaggcttatctcagagcatctgcagactcattttgagattgcctaattatttatacacgagatttctctcctttctggtgatgggctgagatgaagctggttcttaagtacggggaagatatattatgaatgctttgtcattaaaataggtcacttttctgttttcctcctatagctagtattaggaaattatatttctcccaacttctagagttgtaaaactgtatttttaaaaactcacctttccagtgtttgcaaaatgtgagcacaacatatactactgccagtctaaaatgtgtgtgcatttagacagataatgtaaatttaatcctagtaagtgcttattctgaagaccatcttctctctagcgtaaatgtgtgcttatcagtatagaataaatgtattcaaagaataggagagtaaatggccctttattcaaattgctttcatttatttttttcttttggaagtagtgaaagctttattatcaatcacttcatttttcaccagcttcagatttagagggtaaaaaaaggaagcatttgggggtcagtgttttgaatcaaaacaaatcaggaattgataaaaccgtagtttcctgactatttactgacctgattggagtcatattcttagcttggaagagctgtgttcattcatttttttttttttcctgccgtctgggtttagtaggtaatgtggaaaccatctaccataaatacattgctgcaagataacaaatagaattggaatctatgcttgcatttccctgagtttctgtttttttttcc

SEQ ID NO: 131252 - DNA, 1509 bp, Homo sapiens
cttcacacttttttttttccaatttctctgtccttctttctctctctctcctacttccctctccccaaccttctccccaccaccccactttttccagctaaagcattctcttggacttcttgataatataatttagtcccaagaattttcatgaagccacctggtgttggggggcaggtagtaccctgaggtgtacccctcttctgggaatcacttgagttataagagggtaaatgtaagagtgacatgaatcatgagtgtcaatttaattctatattaagtcacatcctagcatttatcatatataactacaaagtaccggctcctatgatattttaaagaacatacccatttcaatcttcacaaatattctcattttacacataaagcaataggtatgtttatgccttaaagtgacttacctaaagtaatatacaatctagtaaatggtagacttccttatactcatccatttttccttaaaatacaccatagctgcctgcgtttaccttcattctttgttaaacataagtttgcatgcttaaaaataaaactaaactaagaaggacataggcacatcaggtttgttataggaactgctttttatttccctttcttttttagaaaaagaaattggattccagataattgtagtcctggaaataggacaaagtttcatatttgagaagttattctcacgtttccagttatccttaagagctggtctttgcagccatgtttagtatcactgttagcttgaagctgttgcaactgattttcttagcagaaccagaagttcctgaagataagacacattctttatgttctagttaattaaagaacaaattttaagaacttcaggtcagttactgtctcttgagtaacgcgtgttcctaagaaatactttacaaattctctgagaattggcacaaatgaagttcaagagaagtgcatctaagaatttgactgttcccagcttctgccattagaacatcctttatagttcggattttttggctgaaggcctgattcattatttttagttatttctcatgttttttcaaacccagtaacactaacatgttggtattgagcctgtccgtacattcctgattagaggcgccatttaatttgatattttgataaagactgtctgtggcaagttgttgtaggactaatttctctgggcaagcaagactgaagaaaaaggaggaaaatgggagtttaatcattggagactgaaaataatttttaatactgtctgactcctttctggaatgccatattaattcatgtttagttgaatccatgataaatctttaaatgtacgtgtgttttattttaagagttgattctaactcaggggtgatctgccactttgggaaacttatacaatgttctaatacattaacaataaacatagagtttttaagtggaaaatgagagtattttcttttctcccttcatttacctgggtgttttggctcaccaaagagttgtgttctgcaa

SEQ ID NO: 131253 - DNA, 1026 bp, Homo sapiens
gttagaagaattctaagggttcctaaattgaatgggaaataaatctattactttagtctgtcacaggcatcagtcttattatcattattgctattcctggtttgtatattctccttacatgaaactagttgggtagagacttaacataagctagtatttagatgggttccgaacttgtgttccaagaattaaatcaatcaaaattaaatttgagcatttgccttgtgagagatgctgtgaaagtaacacatgttcaaagttaaagtgttaagtgaaataagaccttgaatggtgaggaatggtcaaacaactgctgtaagaaatacgagggatagaataccaagccaagagtcatgcaaatcagggatactaaagaatgaggaagcagagttggttttatgtaagcaaaagcaaatagcaggaagtgtagcctttttaaagaaatctcagtaccacagcctgttgggagagattatttgtgattgggagaaatgggagccatcagcaagcggaggggcttggaagtgatggatttttttcatggtctttttcttctgactccgttcgagattataggtccctagaaggtaaaaatctggtctttcattccacaaagtgttttttgttttgtttttttgagacggagtctcgctcttctcccaggttggactgcagtggcgcgatctcggctcactgcaagctccgcctcccgggttcacgccattgtcctgcctcagcctcccgagtagctgggactgcaggcgcccgccaccacgcccggctaattttttgtgtttttagtacagacgggctttcaccgtgttagccaggatgatctcgatctcctgacctcgtgatccacccgcctcggcctcccaaagtgctgggattacaggcgtgagccaccacgcctggcctgttttggtttttttgagacagtctcgctctgtcaccaggctggagtgcagtggtacgatttcaggtcactgcaacctccgcctcccccttctacaaagttttatcaag

SEQ ID NO: 131254 - DNA, 2951 bp, Homo sapiens
tttagttcttatgcaccaattacctggaacctagctcatggtttccagcatagcctccctactgttatgagaaataattcataaattgtgggaagaaatttttcttcagattgctcttgactttgggacattatatgtatatgctttctggtggtcatgttgtaaaattgtagatgattcactattaggggatcaggatccactctagccagaataaactcatcacactttgtcgctcctccttggcctctgccacccagtgctctgagactgttgatgtgatccaggaagctgaatgaacactggcccccaagttaggaagcctgcatcccagactcagcttgatctcttgtaagcccatggttttctctccaacaaagaagaccactgaaattaattattttcaagatctcttctagttctgaagggagataattagtttttaaatactaaattggtacctacccattgtaataaataaataaaggaataagaaaagggataaagtaaaaagtgaaagttctcctacctgccccttaggtcctaaaatagaaaattgtaaagggtaaatctcagggcttgaaaattgttgaggcaatctctaatgatggcaagatctagctctgttaggacttctaagcagtattctttagtatactctgctataggacagaaccatttgcaaggaaaggatgttaatttgggtctctctctccctcttgcaatatggtgccatttttgatctcagagccatcgtgcctcatttctaacaccttgtcttcaatagtctttttttcttcttcttcttcaggtgcctaaaaattagctctcttatcctctctctctcttctactcttcttccttttcctctttttcttcttttctccctctttttgtgcatttctgcagggatatcctaaaaataactaaacatagctcccgtgagaaagaagattcatattgcagattgtgtcagtgttttttaaaaataaaataattctgttggtgtaatcaacaaatatttactgagtgcttgctctgcagaaggcatcaagctaagtactagaataaagtgtcatgatgtgatattgaaacaatatttgcagcaggccagctcagttcaaagtgaaagatgagggagaattctgggtatcctcgaacctggcactttttgctgagctcagaagacccaggtgttgaagagactgctttttacaagctcgcagaataagtgtttgagaaatgtgaaatttaggtccaccgttggccttctttctgaggccagtctcaaagggttccccatttgcccttagctcttgacttgccttctcttggtgagcagggcagctctctgagcttgagtgggctgtgatgttggttgctgacttttgtcccttttgtaggcttcattgatgggatttagactcagttgctcattggatagggaatcggaactggccattcagaatgagggagtttcatctcttgggttattgcggttggagtaatcacttatcagagcctctgcttttttgtgatggttagagtaacatgcttcctgccaccctacagcataccaggagacaggaggccttttcttgtgccaaggtttatttggagcttatctgtatttatgatcttttcctgccattggcttaattacacaactggggaaatttaattatcaaagaacttaataacactaaagaacttgccgtgtgccaggcactgggctaaacacccactggcacctgaggcaagtgctgttagtccatttacagctgaggatgctgaaggttggagagcacgtgttattgtcagggtcactttgccagtgagtcttgcagtcagaaatcagccttggacagctcgactctagagttcacgcccttcaccttgatccttctggcatcatccatctctgcagcctgacatctaacagatttaggcctcattggcctgtctgtggttacattgcatgtaccagtggcacccagcagcaaagctatttctgagacacatacagagcattagttgactatattgtttctccagttcaggatcatgcggatcctgccatgattatgtggaaagagtttgcaaagtagagtcaaagcatttggtcctgttgctaggcttttctaagcttccgtcaactcatatgtgaaatgaggacaatgacacttggtgcttaaattgtataacatatgaagcagagacaggctcacatataattgattctctgttcatttaatttcctttcccttttcccagttgactcttcttcctccctcctcctatttcatgattttctctctggctgtcgcagtaattcagtgtatctgttcccaggctgtagttccaagtagcaagaataaagcaaaactagatgtgttttcggcagtctcaagctctcacaggaagtttttgttgtgtctgtaagctgtggttggatcccacaccgggtggaccatctttcctggagtggtggagaggaaggagtgcctagccaggagacagatatgtcagtatctgtaaggtgacctactagtggaaaacactcttgctcttatttgccttcctcctggcagcccggtttcttcatcatcagcagccccctttgacctcctatgcccttactcgtgtggtttaactggagcttgtgaaaatgatgactagtctattgtgcatctggctgaggcatttaatccactgtggagacacccttattagaggaaatggaatgcaagttatgcttatcatggggatagtgtattagggcccatcctggacagcttgtaaaagaattaatgctggtgcggtggcttatgcctgtaatcccaacgctttgggaggccggcacgggtggaccacttgaagtcaggagttcaaggccagtttggccaacacggtgaaaccccgtctctactaaaaatacaaaaattagctgg

SEQ ID NO: 131255 - DNA, 1023 bp, Homo sapiens
cattcagccaaaacagaatatttcagactttatcacaaagagtgacttttgttttgttttgttttgttttgttttgttttgttttgtttgagacagagtctcgctctgtcacccacgctggaatgcagtggcatgatcttggctcactgtaacctccgcctcttgggtttaagagagtctcgtgcctcagcctcctgagtagctgggaccacaggcatgcgccaccatgcccggctaactttctgtatttttagcagagacagggttttgccatgttggttaggctggtctcgaactcctcacctcaggtgatctgtctgccttggtctcccaaagtgctgggattacaggcataagccaccgtgcctgacctcaaatagtgatttgatatattgtttgttatttggttgttgaaataaatattttgatttttttataagaatgaaaaatttgaaataacttaaatttctatcagtaggagattgattaaaagcattgtggtacatccatttggtagaatattaggcaggattttagaagaatgagggagatctaaatgaatgcctattcaggtatatatatatatatatatggttatatctattaagcaaaaaacaaaaatttgaacattctatgcagaattattccactcaaacaatatcagcagaagaagactgatcaacttgtaataattagtcagcataataaaaccatattgaaatagtttcttagtggaatatcaggggaacccgcccccaatatttcaatgtagattctttctatcttccaaaagtgttggccggctgagaaataaagagaaagagtacaaagagaggaattttacagctgggctgctgggggtgacatcacatattggtaggaccgtgatgcccacctgagcctcaaaccagcaagtttttcattaagggtttcaaaaggggagagggtgtaagaacagggagtaggtacaaagatcacatgcttcaaagggcaaaaagcagaactactaataaggatctaata

SEQ ID NO: 131256 - DNA, 1037 bp, Homo sapiens
ttttacgaaagcatattatcaatgaaaatattaaaggagcagacgtgttaggatgtgttaggatgaaggttttttatttttattttttgagatggcgtctcactctgtcgtccaggctggagtgcagtggcacaatctcagctcactgcaacctccacctcctgggttcaagtgattctcttgcctcagcctcccaagtagctgggattacaggcacgcaccactacgcctggctatttttggtagagacgggattaagccatgtccgccaagctagtctctaacttctgacctcaaatgatccgcccgcctcggcctcccagagtgccaagattacaggtgtgagccacagcgcccagccaggatgaaggttttttaaaaagtctgtagttgtaagaagctatttatgaaaagatctttacattgtggtagcttatgaaaatcctttttctcatctcctttaattttctttctatcagtattattactgatattacaattttggtaagatctagagagaaaaattgattgtgataggctgtcttcaattacctatatgtttcttcttatctattaccttctgaagtagctttttcttaaacggtattgttaaactttattttttattttattattattactttttgagacagagtctcactctatcccccaggctggagtgcagtggtgctatcttggcttaaggcaacctctgccttctggattcaagtgattctcgtgcctcagtctcccgagtagctgggattacaggccaccacacccagctaatttttctatttttagtagagacggggtttcaccatgttggccagactagtctcaaactcctcacctcaagtgatcctcctgccttggtgtcccaaagtgctgggattacaggtgtgagtcactgcacccatccttaaacagtattgttaaactttaaactgaaatctgaactctctgttaaactgccttttccaactttaattcccagtcattttttaatgccttctattattctttctcattacgta

SEQ ID NO: 131257 - DNA, 1785 bp, Homo sapiens
ctcggcctcccaaagtgctgggattacaggcacaagccaccgtgcctggcagttttaaattttgggctaaatgacttttgctaaatcactttcctcttgcatcctcctgcttcttatatctataaaatgaactgcccatggacaattgctcaggatccaggcagtactagcattagaaagggttgcctctttagcccatgattagtccagtgtgggctctttgcagaaagcaatggaaactggttaactcaaccagaaaaagaagttattaaggaatattggacggtacgcagtatagacataatggttaggactgggctggagctgctgcctgagccctgtccagacagccgagatacactggatgttgggcagtgctttggctggacattgaaatgctgcatctgattggctaatttagtttccatttatatccctaacaaggcaagggaagagagaagccagcttctctcttgttctccttctataatgagagacaaaccatgcctctctcagacactcacaatggagaattcctcaatcctaagaaaggtggatcggttactgactgtgacagatgactgtcataactttcatgttcacggaaacttctttataaagtttctaaatgaaacgaaaacttggctaccaacctactctagtaacgcaacaacttgcccctctgttcttttgagttctggcttctgattgtttctcaccacattgtcaactccttgggaaagtactctgtatgttttaaagcaaattgccagggtttttgtttgtttgtttgtttgtttacttagacctcgggagataaaattaatcgacctctttaaatacatggaggtaccccctttctcgtttttgaagggagacacttgggaatttagaaattgggagtgtgagttctaagggctggtgtggtttagatagcccatgacagtttcaggaaggtcctggtttcctttcaagcaaaaggggccacctctgaaccaaagtggattatctcctgcagcagcaaatccagttggcagttgaattcctgcagttttatgggaatttcagtgaaacttttaaagctgtaatttttgtaactggagttaaaaaaaaaaaaagaaaacaaatctgaataaagcgacataatccattgcagagtctgtacagttctatttcttctatcatgaatgttttccaggcagatgaaaaaatgttttgaatgttgaatatatgcaaacattacaatcaaggataattgtgtctatgtgctttgactctcattttgcttttctcttccttcatcttctcctataccctataggaatgtgatcatagacatagaaatagaatttgcatttgtataaataatgcccaagctgtttggaaaaaagactccctgtattaggcacaagatttagagatggcattttctgcctcaaatctcagtttgatttagatcatggaaataatgccttttatctgtatggacatcagagtttactcagcccctttccctctgcccccttcatttgatctgcactctctaacctcatgaagttgtctgaactagtgttattattctcattttgccaatgagtgaatgagactcagaagaaagcatctaggttagagatttctaggcaatgtttctaatgtttccttcagtaaaattgttgttgctctatcaagtatatgagctggttgctgttttctgtctttgatgagtgacaggattcccttttatgtgtctcactgggtctgtctcctagaggcctcatgagactt

SEQ ID NO: 131258 - DNA, 1609 bp, Homo sapiens
gaccttttgttcaaaaattgttcaggatttcaagacacagcagagcattaaacgaagcatggcacccttctgagaagacagggctctagtgtcaccgtatgggtcacaggcaaacaaagtcagccctacctgtaaatggatctgattaaaggcagaagtatctttctattttgtaagcagattgagtggtatgttactgtctcacaatgtgttattatttttgctgttatgactaagattattattttaagtgacagtacccctgtgcccatcttctcttttgagagtctgaatcccttcagataaggactacagcttacctaatttgtgattttcccctcagctagactactgacatgatgtgtttgttaaatgcagtgaatgtaatagtcatttatcacaaggagaaattgtgattttttttttttcccccagaggaatctagcttaaagaagccaaaatagtacttaataaggtgtttgtgggaacagagatggaccattggatgaaatgctctgaaataaaactaggcctatgcagtgtaaaaagactaagacagtgagtttctgccttttttctttttttttccaaaaaacctttttgatgtaacacaagtcagtatttttgttgctagttggcacttcatgaaagatgatagccggctggggagagccaagaaaaatcagtgagtggaattgacagacttgcagtgtttgtaactctgcctttatcctgtgtgatattttaaataaatggttttcttatgtaggggacagttattactgtgcctatcccacacagcagagaacccaaaagaggacgacacactgaaggagtcataaattgcacatgtaaacagctggacatttgggtgttggtgaaacctctgagatgagacggatgaaatatgttgagacattcaaggcttttgttgctagtttttttgtagaatttttagcagacctttaaaccaagagacactggcagtgcagttattttcaataacctggactctccaggaaaatttagaaatccatccaaatagaaggtaaataaacatgtttataggcaaagccttttatataagcgtttttgttgggtctgaatctttgatgctgacagagttgaactgtctgccttcttgcttttccttatcctgtttgtcatccgctatgtggcttcggcttcagtgacccctctctccttccagtttcctagaagcaaattgcccttacgagcgaatgcatttgggtcatttgaatttgctcagtcattttggcaattaatgactttttgtggattcagttcttgggcacctccgctgcatcccacttctagccatgactccctgcattagtgattcagcctgaaagaaaaaatggcttttttaaaaagtgggagaaatttatctgaagagcaatcagttagatggacatggaagaggccctctctggggttttacctggtctgtcttaaaaggaactcactcgagttttaatccctaggattataggctgtaaagcaatggtcagcttagatccatttcagggccaatacatctgtctaaaatattttgaatacaagaggagaggaaggatagagaagcaaa

SEQ ID NO: 131259 - DNA, 1049 bp, Homo sapiens
gcctcccaggttcaagcaagtctgcctcagcctcccaagtagctgggattacaggcatctgccaccatgcccagctaatttttgtgtttttagtagagatggggtttcactgtgttggccagggtggtctcaaactccttacctcaggtgatacgcctgccttggcctcccaaagtgctgcgattacaggtgtgaggcaccacgcctggctgctcttacacttttctatgagacacattacagatagatgcccatattgagatacatacccatatacggatagatatccatgctgagagaagcatgttaatccggctgtgaaagctttatagttaggaatttctgggaagatcttcacctttggcatactccttcagtctcatcccctatgtccctaatagaagcagtaatggggaatctgtcatgatgacttactagaaaaatctattgagcctgcttatgattctttggttttggaggaggagggcactaattttcattggttcattcattcaaaaatattaagttcctactccatgtctaataactgcctttctggctagtctgtgagcatggcaacggacggatgatgtcttttgttttctgttgtgtctctgatgtctttcacattgaagagcagggaggaagtgctcgtatcatatttgtgccagagtgaggaggaagagggaagcactcagagctgacacttcctgtgatttagccttctgcctgtggatcatcttttcatcttttttgagctcatgttagtttctctactacctgtgcgtttctttaccttccttggagtatttcttccttgagctcagtgttgcaggcactgcttggtcaggcttagcccatagacagaaaatacttattgagtacttactgtatatatagcactcttccatgcactgtacatgtatgaactcacttgctctttccagcaacttaggagatgtgtgtcttcattatcaccccaattgaagaaactaaggatgagaaaggattcagacttaatgcaaatgatccactatctgggaagctat

SEQ ID NO: 131260 - DNA, 1021 bp, Homo sapiens
ggtggattattcatgagttttccaggaaatgggtgggcaattcctggaactgaggattcttcccctttttaggccatataagataacgtcttggcattgccatggcatctgtaaactgtcatggcattggtggaagtgtcttttagcatgctaatgcaatacaattagcatataattgagcagtgaggatgactagaggtcacctttgttgccatcttggttttggtgggatttggctggcatctttaccgcatgctgttttatcagcaaggtctttgtgacatgtatcctgctgatctcctatctcgccctatgactaaacacaactaaccttccgggaatgcagcctcctagtaggtctctgccttattttacccagcccctactcaagatggagtcactgtggttcaaacacctctgacaaatctgtctgcctgttggaaaggactttgtcaacttgtcatgttacttatataaatatagaaatatgtatttaaaacttgatggacacttcaccatcacactctcttctcctctcccacatcactctagcactgatccatttttagaaaaggtttttttggggatgggggttgaccagatgtggatatttagagataagtctataatcttccaactgtagaagtctttatgtctttgagtcttgcttgtgtgtgtaaatgtcctatttttttttttgatatatgaataaagtaattaatttgcatttagttgcttaagcctgtcttcatagcctggggagaaatgatggctgacacttgtcattctccacccttccgctccccacatttcatttggtacttcatttcttcctcttgaggtgtgaatatctcaagaaagatgttgactggtcccactggttgggatgacaatgagtgataggtagtcttgcacttcttgatcaatgacaagatcacccatttggcaaactcttcctcttctcttctgtctttatttttttttttttgagatggagtctctctctgttgcccaggctgca

SEQ ID NO: 131261 - DNA, 1938 bp, Homo sapiens
aggaatatcatcactgcctcctaaagtgcttctttcacccagcagtctactctaggcagtttccattctactgaatatacttgtataaacacattttttttgtatgtgactatatagtattcctttgcataaatatactataatttatcaaataattgtatgtcatttggttgcaatatgcattgttacaatcggtgctgtgactattataatcatagcatttctttacaagcctcctcaggtatttccataggataaattgtcaaattgccttccacaaaagacctcccaatttattttcttactagcagtttgtagtagtgtctgtttacccctactcttgccattatcaggcaatgtttacattaaagacttaaaaccattttttaaaattgcctaaataaatgcttccttagcaaatactctttaaagaagaaagtagttaggttttctggctaaacttcttagggcttctacatgaatgttttcacaaacatccatttcaaagagctactggaaaattggatatggactattttgctttattataaatgtgagtagcaacaagattctttgtattcaaaaagacgtttgagagtttctagcccaatggcttcatgtgccaataatctatgggtccaagaagctctgtatttccccaggatcactttgactgctacgtgtcagggctgggagtagaccctgggccatccaatttattcaacttgtagaattaggatcatagcgttagtatatatcaagtgtaattttcattacatatgaatgtttaaaaaaacattcaacagaacttgttggatatttgagtataatcttctttttctttttctttcgttttttggagaccgaatttcgctcttgttgctcagactggagtgcaatggcatgatctcagctcaccgcaacctccacctcccaggttcaagcgattctcctgcctcagcctcccgagtagctgggattacaggcgtgcaccaccatgcctggctaattttgtatttttagtagagatgggctttctccatgttggtcagtctggtctggaactcccgacctcaggtgatctgcccacctcggcctcccaaagtcctaggtttataggcatgagccaccgcacccgtccttgagtataattttcttatcatttactcctaccagcctctgtgctaggttctgggggtataaagacaggggccaggtctgcctttcccctacattattacagtctcataaggaagaaacccagaggagtgatgataaatgtatgcctcaagtatgtagtatataggtggtgcagttgtggtctgtgcacacaggtacaatgaggatgcagcaaaaggtctgattcatttgggttacagacttaatagaaggaatgaagcttgagctgagtttaaagagtagaagaattggattttaatatatggatgggtcctccatgttaaaattaatgaggttggacattactgaggctaagacggtagcagcaggtgatgggaaggtcatcagtgttggggcccattagacctataactccttgaacaacttactttgatcctcagttgtcccatctgaaaataggatgatactgtgcattccacttgtagaactaggattgtagcattagcacaggcagtgacagtcatggcattcacagtgtggagtgacacagcaagaggggtgaggctgcccagccatttgtacgttttgcctgtaggtcttaaactggatggcaggaggcttgaagttgtgatttctacctcatgttttcattataaaatgagtggtcacttgaagaaaagtgacagtgagttttgtgtttgaaacttttagaaggatccattctggaataaccaaagatttaacatgagggtgtgccatgtatatgaacagagctcttctgtgccaggtctcttaaga

SEQ ID NO: 131262 - DNA, 2295 bp, Homo sapiens
tttggtattcaaactaaaggctatttaactggtttcaactgccttttattttatccagcttaattttatcttccttctgaggataattttataaacaaattcctaatatacttaataaggattacaaaattgggaacttgcagaatcatctggttctgagggttagcatgagatttttggaatatttgtctcccaaggatacattaacctatctcttaaatactctcaacaaagaatattagagtcgttagacaacatttaaaattcaggcctatctgcccttccagtttcaagttggaatagagttgtcttccactggggaataatttgtctctattaattgagaacaaatgtgcatgggtgttttaattacacagtaaattaggagaatttaagatgcagaatatgtgaaagccaagaattaaaaaccaacaacccaaaacataagtagataaacaggaaaaatatctcagcataagaatgcaagcacatcccaagataaagagtgggaaaaaatgaagaccaagacaaattactagggttttggtcaagttccttcaagtggaatgatcccatttttggctacaagccattgttggctatacatggcaggaggaagaaaccacactcaaaggattactttgagatgtctggcttcaactagtgaccttttatgcattcagtgaaaatgagtattgaggatttcctatacaaatttcaactttacagagaactcccacagcaagtattcagtctaggttcatggaaccctggtactatgtgtaaagttgtatggttatgagtttatgggggaaataggtccagaacgttcttagattctgaatggagtccgtgatcctaaaatataagaatacaacctgctgcttgagcagggtgaacatttgttgaccttgttctctgtcacttaagataagtaaagttagcatctcataaattgttactactcctttttttttttttttttttttggcaagggcagtcagaatgacttctttctgcctctcacctcgctgtgcatgccagatacttccaaccaaacttggtgcttccttgcaagaccaacctgctactacttcagagcaccctcctctatctcttcttactataatgtatttagatatttcttatttttttttacattgccctaggcatatgagcctttactgtaagctaccttaaatcttttttggaaagaggtaggatataaattaaacatacacctccccaagatctcagagtgttgatggactgattacagagacggggagcaggtatttcctcattcatcactggaggcagaaaaatcacctccaaatatttgttctctgatagcagttgggaaaagtcctccttaaatgagaggcccacgaagggatgaatagggattttggctgacctccaaagtgaagctaagataatgcctgccttcccagtattacttgaggctaattactcagatataattacttgcactctgtgtttttgcttccaatagggttgtgtccttgcttttgtttatcttgtatcccccattagactttgagctctttaagaattaaggctatcacttcctttctattcatcatttgttcttgaggcaatgcttttcacagaatagtcaggaatgccatttaagttaatgattaagatgttaatctcacattgttgcaagttaggcaacttttgaccatcctttctaggaaccccaagttatccgcattgtgaaggaccctaaagtgagcctcaggagattgtggtgaaagtgtcatcaacttttggaaagtttctgaacttagtgatgatttgtgctttttcaggacaatttgtggtgccagcacttaagcgataaacatccccctttaaatagagctgatcaagtttaattcacagtagtcgatgcctaaaaattataggatgcagatgtatatttttcatgtaaacattacctcaaaagaaattaaaggaaagaaagaaaaaagtgactttggataaatgtcaagtatatataatttatgtgtttgagctctgaacaaactgctaaatcgtttggccatagttggagagacagaacattttacctgtctgtagctgggaatcaagtgtatttacccacaagagtggcttatttcctagtttatgtggattacacacatctgtgtgtaatcatgtctgccctttcctctgcctcaaatcctaaatggaattaataacttattgtggtcccttttaacaagacagaacagatctctctgcctcaggcttaggaggctcctt

SEQ ID NO: 131263 - DNA, 1061 bp, Homo sapiens
atgatagggtgatatgcccagtctagttacagaaagctcctggttaggacccagtaaaacaatcaaggtgaacttgaataacatctttgtgtacatttcatagtccatctattctaatggtccaatatacctatttttaaaaatctctttctgtgcctgtttttaaactcatttcttctcccaatgtgtttatccctggttctatcagggtaagccctaaagggacaatttggacttgaccctgatattggcagaagatagcttttctcctattgtggcctctttcctttagccctcgtgttatcctatcttgaccaagtaaaggttcattgtggcaggagtttacataaacaggaattgtactcataccccatttctaggaaaaatgggaacagcaggcattatctgatgtaaaatgtgttgaaccctgaacaaagtactcagtgtaaatccgcatttggctgttacaaccagccagctgagaatcagttacttgaaatagctgctggtcgaaaggtctgtggcctttccaaagatgtgttgttgactttatggcaagactactagaactttccttgttagtgattttattttattttatttattttgtttgtgatgggatcttgctctgtcacccaagctatagtcgaggggtgccatctcagctcaccgcaacctccacttcccaagttcaagcgattctcatgcctcagcctccccagcagctgggactacaggctcacgccaccatgcccagctaatttgtttttgtttttttgtttgtttatttagtagagtcagggttttaccatgtcggccaggctggtctcagactcctgacctcaagcgatctgcccgcctcagcctcccaaagtgctgggattacaggcgtgagtcaccacatctggcctccttgttagtaattttagaagaatgtttggatgccatctaatcctccctaagtcccagttatcttgtcttaaaaatgggcataatgtcatttgtcaaataagactgatattgggcttaaaagaagtcttttaaataaagtacttaggata

SEQ ID NO: 131264 - DNA, 1575 bp, Homo sapiens
gtggagataataatagcacttaataagattattgtgagaaccggatgagttaatacatataaagcatgcaagacagtgccaggcacataataatctttcggtaaataacagtttttttatttttatttttattttttctgttgttgttgaggtggagtcttgctctgtcccccaggctggagtgcagtggtgcgatcttggctcactgcaacctccgccacccgggttcatgtgattctcctgcctcagcctcccgagtagctgggactacaggagagtttatttgttaatacattgtatgtattattattatgacaatattgaaggcatcataatatattggttttataagaaatgttaaagaatgggagaggtgataaaacagttgcagggatgacccaactacatggctgcataacacactctaatctgaaatgggagcagaggcatcattcactctcagtaatttggcgctggttgtttggcacattgagtcataagcatttgagtcttccacggtggcactgtcaccatacatgtgacccacagattagatacgagataggtggagtggagaaagcagagtagctgagagagtacttgatgaggctgtttgcttcattggggctcacagtgctaagaaaaaccatttgcagaatcatgggagcagaatgatcatttctcctataatctggggtcccagcctttaggatgtatccctattcaatgtaaaacactaggttttattcagtgaatggcagtctagcatggttatgctagctgaatggtcttatagggaaagattatagcagatatatgtatatatatgtatatctatctatctaactatatatctctatataattggtatagttggctaagtgacagctgaggagccagctggatcagagttcaaaataaggtgacagtctacaaatccctggaagactggagcaacaaaagagggaatcgttatttggacacagtggggaaagtgaatgaaaagaagaaaggcaaattaattaagataattaaaacacagacattcttggcaatattgaaagctatttaatatttggctttctaactctactattcagtcatttacaaaatatggcttataatatgtcaattgatgaataacctttattttactataaaattcatgaacttctttggtctacacaaatccatcttccattttccatggcttacctcatttaagccaatgcaaaactgaaagtggggaaaagaatattgaggctttattatgaaatgccttctcatccacttttttttttttcagtctccctgtgttgctcaggctggagtgcattggcatgatcttggctcactgtaacctccgcctcctggttcaagcgattcttgtgcctcagcctcccaagtgactgggattacaggcatgaactactacacccagctaatttttgtgtttttagtagagacgggatttcatcatgttggccaagctgtactcttgacctcaagtgatctgcccaccttggcctcccaaagtgctgggattacaggtgtgagacactgcgcctggtgtct

SEQ ID NO: 131265 - DNA, 1114 bp, Homo sapiens
ttatttttgagatggagtctcgctctgtcacccaggctggagtgcagtggcacaatcttggctcactgcaacctctgcttcccaggttcaagcgattctcctgcctcagcctcgtgagtagctgggattacaggtgcctgccaccacacccggctaatttttgtatttttacaaaagatgggttttcaccatgttggtcaggctggtctcaattcctgaccttatgatctgcctgccttggcctcccaaagtgctgggattacaggcgtgagcaaccatgaccggcctgggtatttattatgtgccaatctgttgttctatataacgttcatgacaactctgtgaagtcacaatgaagctttgaaatgataagtaactttactatcttttagagaaagtagaggcagaagtggattatgaacttaggcagccaccctccttaacttgggttcctagatgctgacaccgggctcaagtgcctgattcactgtggtttgagcagctgtattatgaagaaatattacaatgcatttaatatgagcttgggctgtgtaatcacacaaacgtgtgtccaatataattatctcccttactgtctgtgatctccagtgtcctcatctgtgaactgaggaggttaaataagataatgcgaagtgcttatccagcatctgcctcaagcaggtgatcatgatgacagtggtaaggactgtgccgagaactgcctcagttacattgtcctcttccttagtggtatgcttcccatggttataatttgaagacgcttctggccttcaaatatagtgctagctagcaagggcacagaagaatgaaacagagttgtttgtgggaaacatgaagcagaagcgagtgatggacagaggtgaggccaggggaacaggctagagcttgatcagggccggccttgtgtgctaggctagagcttgatcagggccggccttgggtgctaggcaggagagttctgtctcctgcgggaaaagctgcctgtcccttggccagctttccctaaggcatgcagctttcacaggcactagccattcttaagccattttctctttccttcactttgtgcacaacctgttggaatttctcaggt

SEQ ID NO: 131266 - DNA, 1044 bp, Homo sapiens
aggcagtggaaagaaggaattgattgccttgctggtattttttcccctgcactgacccttcttaattaatacatgaggtaccatttacccaaacagatttttcagcactcacttatggaggacactaagtggcgagttcatagttcaggcagagagctggcagatcaagactcctttcaactatgagatctgtggttctatgcaaggcgaccatgaaaggagttgtttagaccccgtttttcaggccagcagcaggagctcagcccgccattaagagtttgttctgtgtgcatgttgtaagcacctgaagtttctcttgaatgttctctttagaaagatccatcgttagggtgcaagagcaattcttatttgctgcaagaatatttatccttaacagcatatagctgaatctcactttatatatgaattcttgaaataagtgcacgtatgtttcatgcttgcaaattgcatccaattagaatagcttattttaaaagctgttttagagaattcagaagtatagactcataaaatgtcaacttatcccctaatattccttttggtacatttagatttctaggtgctggttttgcttacattcactataaatcttaattgcaaagcatattcaagccaatgatcaatatcaaagaaaactattttttttatcctaaggcccatatgccagaatccccctgtcccccaatctttatgcttcttcctcatatctgcttccaaatcaagaaatgattggaatctgggtgcagtcacctgcaccctgtagtcccagctgttctggaggctgaggcaggaggatcactccttgagcccaggagttcaagttcagactgggcaacatagcaagactttgcctgttaaaaaaaaagaaagagagagaaagacagaagggagggaaggaaggaaggagggaaggagggaaggagggaaagaaatgctttggctaagaaaatgccctgaaatttggtcaaagttggagtttcctcaatgccaaagtaaacgaccatttgcccatttaccctctac

SEQ ID NO: 131267 - DNA, 1655 bp, Homo sapiens
aacttatttttgcttaataaacagtttggacatcaggaagagacagagctgtatacaataggtagtttacagtcaaatatttactgctttaaataaggcagaattggctgggcacagtggctcacgcctgtaatcccagcactttgggaggccgaggcgggcggatcacaaggtcaggagatcgagaccatcctggctaacctggtgaaaccccgtctctactaaaaatacaaaaaattagccgggcgtcgtggtgggcgcctatagtcccagctactcgggaggctgaggcaggagaatggcgtgaacccgggaggtggagcttgcagtgagccgagatcaagccactgcactccagcctgggtgacagagtgagactccgtctcaaaaaaaaaaaaaaaaaaaaaaaaaaaaaaaaaataaataaataaataaataaataaataaggcagaataagtagtatttaattagagcacagactttgtggtaaggcaggcctgagtttgaacctcagctgtgatacttattgcctcatttgaaaaaagtaaattttggccaggcatggtgactcacacctataatcccagaactttaggaggccaaggaaggaggattgcttgagcccaggagttcaagaccaccctgtgcaacacaacgagacctttaaaatttcaaaaaactactaaaaatttcaaaataattagctgggcacggtgttgtgtgcctgtagtcacagctactggggaggttggggtgggaggatcgcttgggcccccgagatggaggccacagtcagctatgatcatgcccctgcattccagtctgagtgacagaccctgtctcaaataaaaaaattttaaaaagtaaattttattgtttatatttaaggcatacaacatgatgttaagagatacatgtatatgtagatagtaaaatggttgatagtgaagcaagttaacatgtctatcatcttgcatggctacccatttttttgtatgtgtggcaagagcagctaaaatctattcatttagcagaaatatggaatacaatactattaactatagtcctcatgtacatcagatctttagactcgtttgttttacgtatctgccactttgttcttacacacttgtgtgatcttgggcaagtggcttcattacctctccacctttagatttctgttctgtgagttaaaagtaactctcagcactgttgtagcagaatccatgagtaagcactcaataagtggcaagtgcaatcattattagcaacaaccgtaataatagccatagttccattattaaaggggatgattgcccttgttatccaagtgctcatctcatttgactttgggcctttggaattaataaagcaggcttagttcctgggtttggttttcctttttcccccaaagtttgttttgtttagttcaaaccatattttatgtttccatttataaacacattctctcaagtgctgaacttttaagcatggaagtctgaagatacctcctcttgtgaagggaaatttaaaaaatatttaatgactgctttttaagtttttggtctgaggaaagagcagcattaccttggtcattgactaaaataaagacataataaaggtactggaaactgaacagaagtatggagtttgt

SEQ ID NO: 131268 - DNA, 1056 bp, Homo sapiens
acaaaaggaaactgtggtttagagggttgaagtaacatgttaaaattctcatggcttttttgtggtagagcagacactagaatcagttctccttcctccggtccatagctggctgcttctaatcttttaaaaatcagctaatcaaggtaacttggatccatttcaatcctgtcagtgaccctacgttcaatataaaagatgagtcctgggagaactgccgttctgattcacattcatctgaatgttgaaaaagtgcatttcttcagagtgctctgtaggaggtggaaatattcaataagcttgcgagaaaggtttccatctcaaccacaccatgtgtgcatgtgcatgcacatacacgcgtgcgcgcgcacacacacacaccactgccaccaccacatagctcagatctgtcacaacatgagggaggggactcgcaaacatgcataatttatgcaggattttcacggatttttcagtatttggaagtgatttcttaaattatacattgaaacagctccataaagatgaagctggagttagtttcacaatagccttaaaagtgagagaatttgcgtctctgggatcaatgtgcatatttcaaagtgagacgtttcactttatagaatttagagggtctcaaggctgtggttgacatttttagtttgttgggctaaacaaccatttgctatacaatactatggaaacgaatggtggaagagattgccctggaaaactctgttcaattccgttaagaaatattaaattcctgaggacaatctacttgtttattattttcaatttctcttaaaatagtataaaaggatcttcttgggtggcagtacagggatgacaaggaagggaccaaatctcagttgttcacatttttacttagtttggattccaaataatggggcttctcataaaagatttggaccctgccccgaggcttttggtaataaatgtggccgctttgtttttttccctaattatttcattcgtaaaagtcttatcttcccaataaagatggtaactcctctggactgggtctgcttttcg

SEQ ID NO: 131269 - DNA, 1084 bp, Homo sapiens
ctcttgccttagcctcctgagtagctgggattagaggcatgcgccaccacgctcggctaattttgtatttttagaagaaacagggtttctccatgttggtcaggctggtctcgaactccagacctcaggtgacccacccaccttggcctcccaaagtgctgggattacaggcgtgagccaccgcacccggtcttctgtgttattaacagcacttttggtgatcttgaatgcattggcatataactaaaaaatttccttttggaaaaatgtcaagaaaggggataccatttgcaaagagttcaacccagatgatgattaagcatctataatttacgtgaccacaattaattcatggagtgggttttttggtggagagcaggggtgctgagcattctttagcccttcatcgccaatattaatttgaatggcttctgtacctccttgtaattgaattattaataatcacaaagagcttataaacttcgaatttaatcttcattaatatataaagctcaaagagtaatgtcttttgaccatgagtagactgcttctctaatttatcttcaaagttgcttttttttcttcctgtaagtttctgtagtccccttgactcctaaaagtgagtgtcatggagtggctttgatcagggaacatacatcagtaactgttttgtgaccttagtcccggctgtgttttatggcttggccaaagtttatcatataatttccactttaggaatttgcccacttactaaggctttgagggcaggggaggtgaagtagtattgtgggagaggagtaataaatgtgttttcttttcagtttctacagtgagtggtctgttttgaaatgagtgcaggtggttgcagtccactccctccccaaacaggacaaattaagatcattttgctctttcgggaagctgagggcaagcctgcacaggtgaggtcacgagaggcaagctatgtgcacacctggtgtcctcgtgcttcttgggcaggccagctccatgcagtgcagtgcccctgaagggaatggggccaggagaagacataacagggcatgaggatcttctctgtgccaag

SEQ ID NO: 131270 - DNA, 1572 bp, Homo sapiens
atacccatgtaattaccaccaggttcattcaaaatatagaatatttctagcacccaataatacccctcatgcattctctcagtcagtaatttcttttgcatgttttttgatttcatacacatggaaccctactgtatacagtcttttgtctgtaacttctgtaacttgccattatgtctgtgaggatccatgaggttgtggttatctgtggcttattctttgctcttgctagcagtattcgttttatgaatatgccagagtgtgtttacacgttctactgtgggtgaacattatgcgtgtctccagtttgggactatttatgaataaagtttctatgaacattctcatatgtatgtattttgatggaaacaaacacttatttctgttggctatatagcctcaaaggaattgctgggcggtaggctatttgtgtggtatttttaatgcaagataatagatttacatactgagaattgtgcttcatagtaagcttttctgggtgtatttttcattgatagagaaatagctctaatatgggcctaaatagctcatgtgtacatttgcttaagttctttattctgagataaatgatttctttaagttaccaatgtcattttgaagactaattcagttatgttttcttgttaaagtcctggctcacttccgtagctcatgttactgttttgtgtattagccttctttctctaccagcatttagattattgttgaaaaactaatataagcgtcgagggtcaacactatcacaatctttcttgtaaaattactcctgggttgacattgaactgcagatgacaagtatgtcagatcatgtgaggtaaaactacagagcaaggaggttaatttttcaaatggatttatttgagcaacaagcatttctgaagcactgtatgaagccattgctctgtcaagtaaagtaaaatatagccattattttcaagtagctgacagtttggtggtgggggcagaaaatgaaaaccattgtttgcaatgtcctttaagcaagcattgccccgcatgttagaggggaggaagggagtggggggtggtgatgagagagcatgaatgagggcatcagaatcagattggagattcagagaaggcttcctagaaacatatattttgatggaagaaaacaaattagatatttggggagatagagtgagggtgagggctttgcactgtaggggaagggaccaaatagcatatttaaaggaatggaggcatgaaatagcattatccatctagtagtcaatttaggggataaaacattttttattccattgatggtgttattgccatatacatttctggaatgcctcttttggaatgacttttagagctaattttcaaaccacaccagaaaatcactcttgatactttatagctttgacccaaatggtatttcccagctggacgctcaccagatttgtctcctaaacacttttggctcattccaaagaaatacaatctgtcttcagaaggtttaaggcttaccactattgagaacattcaaaagcctgtgtgtgtcccagaactcagaaatcaattcca

SEQ ID NO: 131271 - DNA, 1442 bp, Homo sapiens
tagctgggactacaggtgcacccccccagtgcccggccaatttttgtgtttttagtagagatgggatttcaccatattggccaggctggtctcaaactcctgacctcatgatctgtctgcctcggcctcttgaagtgctaggattacaggcatgagccaccgtgcctggccgagcatttgctttttaactcaacatagtaacatcttcttcttggggccatggcctggaaactgatggtgggacaggcatgtcacttggagtcatttctaggggtccactctgaggtctgctggtttccagctctggccttctgtttcttcatgtttaacataataacaatacccatcctacctccattacaaggtcagagggaaaatttaacatgagttggcattatcagtgtggtacagcacactgtcgccacaggtagttgttaactttatttctggactattctgagagtgaacggggataccccaaaccaaagctagcctttgtggagtctatgttctggtgataatcactgctttcaaacaagtaccattaggtcaaaactaaaagcgtgagtcacgcagctgtgatacatttgtaaagaaacctttctgggctttcctgggaatttttagtttattattcctatataggtcatccagagaaggacatctcttccctactccacctcataatcctcaaacagaaatatgacccagtcttttttttttcattaatttagataagttatgaattttagggagaaaagttcagataagaagtacttttacatagttgaatgtgacctctggattccaaagagatgatgtgcttactggctgaagaaagcctgcagatggaggatggggagaaagtcatgaacttattactcagtttctattttgtaaccacttggaataaatatttgtgtaaaatatgagcgtaacaatgtggttttagttaaagccagaatgtggttgttcagaaataactgagcaaaagtttgccagacattcacatttcactgggcaccctttattgctgtatactaattctggccaccttacccaggaagcagggtatatgacatttccatttattgcatgccacctacacctttcatcagcaaagggacacctgtacatcctggggacagagcagatagaagacatgcattccattgccttctttcaaatagatacttttcaaaagattttagaccctgagttaagacaacctcactcttaattattgtggtcaggaattcttttctttgaaatgaaacctgcattagcactgtgtgtttccttatttacatttttgttaaatttctggacaatacgtagctccccttagggactttctaagtttggtggagaaagaaaccctagtggctaacttcactgtttagtccttaaatttaaattctttattatgtacccaccaggcc

SEQ ID NO: 131272 - DNA, 1024 bp, Homo sapiens
aatcctttgttcataggcagtgcaaagattagttacagccctcctactgtctgaattactgtactttctgaattagtagagttggcattgataatcttaaaaatataaacagtaaataaagcatttaaaaccccccatgctgctgacttcatataaagagatagttgtttttgaatattttgatgtccgtacacatttttctacagaggcagtatttaaatgggtttgtataaataagttctctttcttgaagcttgtgcaaagcatctttacacaagaagcttataagcacagtcaataaattcaagaaaatggcccttttgaaaggaagccactgatgcatctgtgggctgacttctgcatgaatgacagcgcagtaataagaaagcagacaacggcttcctccgccaccactgccctgccgtgctcacgctgcatgggggtgccctcgcagcgggagtgtgtgtttgtcctggtggccggggactgcggcttggcctttttgtttacaagagagaggacagcagcctctgccctccagctgctgtgaaaacagtgttggaaaaccagagcgaagtttccactgaagaactcacactggaaaaaaaaaaaaaaaaaaaaaaaaaaaaaaaaaccaccaacacccgaacaaacaaaccttccctcataaaagaccatctgggttaaagtacagaccactgggtcagaacccagatggtaatgagaatagttgttcttctgcaaactttccgagtgggatttccatatattaagttggaagagagcccaacgttgaaaaacaggaaactaactgaagggctgttagtgtagtttgtaaggaagattttagcagtgggattaattgtgtatgttggataaaggatccccatcactggaggtctccttccaagtgaaatgggtgctcctgctgatttgaattgggaggtgacagtggcgatggcagatgggtatggattagagcaatattttggaggaagtctcagctggggttggggatagattg

SEQ ID NO: 131273 - DNA, 1290 bp, Homo sapiens
tttttttttttgttttgttttgttttgtttttgagacggagtttcactctatcacccaggctggagtgcagtggcatgattgcggctcacttcagcctccacctcaccctgcaccccaggttcaagcgattctcctgcctcagcctcccaagtagctgggattataggcacccactaccacacccagctaatttttgtatttttagtaaagacagggttttgccatattcgccaggctggtctggagcttctgacctcaggtcatccacctgcctcagtctcccaaagtgctgggatgacaggtgtgagccactgtgctcggccagttgccacatctctagcccacattgccactgggttgtcatttgtctttccctgtagcatgtgggcttcctgaaagtaggatagttctctgtcttgttaatctatctagctttagcacccagaacagtgccttgcatattgtgggggctcagtcaatatttgttgcatcgtaaatagtgggtttgtgagttttccatttctcaactacaactctctgaagattccaataggagggagaaacagggtagtcagagagataataaacaaaatcagccaacgttgataaattcagagtatggaggaccaggtaggatgtgtcatcatacctaagaacgctgcctctgcttaaaaattattgttagctctagaaacaatgacatatctatttgtgtagccctttgcagtaaacacatatacattaattcattagattcccctaaaagattctattaaaatggtgtttaactttttagtgctgataatgtaagatcttctttgtaggattgcctctattttgttgttgttgttgaaggccagggagggtattgtaagtgttggatgatgtttagaacatacctgtgacattggggctgttactactgagcgtccatgttgccatttggattttctctctttttttaaaaatattatttaagaaaagatatctgtctgtctcccaggctggagtgcagtggtgtgaacactgctcactgtagcgccaacctcctgggctcaagcaatcttctcacctcagcctcttgagtaggtgggaccacagacacatgccaccacacccatctaactttaatattttttataaaggcaggatctcaccacgttgcccaggctggtctcaaactcctggactcgaacaatcctcccacctcagcctcctaaagtgttggaattacaggtgtgagtcacaatgcctggtctcatagtttttattctgatagtttatgctgt

SEQ ID NO: 131274 - DNA, 1046 bp, Homo sapiens
actttgggagcctgaggcgggtggatcactcaagattaggagtttgagaacaactcctcagttggtcaacatgtcaaaacccctctctgctaaaagtacaaaaacttagccaggcgtggtggtgcatgcctgtaatcccagctactcgggaggctgaggcaggagaatcgcttgaacccaggaggcagaggttgcagtgagctgaaatcacaccactgcactccagcctgggcgacagagcgagacttcgtctcaaaaaaaaaaaaaaaaaaaagaaaagaatagttaagcaaggtgctttttattttcacttggaaagtttctttatattttcactcagaatacttagggttacatacagtaataaaatttttagtaactctattaaaggaattgcctaacactcaggagtcaccgctttccttagtaaaaaaaagtcaagaatacactagggtttatgtaaaacaagaaatctccagtccaaaatcagtgaaataagaatacagcatcaaattatattattgaagttgaagaacagtgcacagggagaaaacaaagtgataacttaattcaatgctatagaaaagtgatttgtgagtcactttaacatttcagatttgtttaaaccataaaagtgataaattagccaaagagctaacaattgatattatcttaagttcacataaattttgatttaactgaagcaaatgaaatcaatgtagttactcccttccgattgcttcatctttgtacagtttataaagctaagaataagtagctctaatgaacagttttttttttaagcttttttgttgaggtttctctaatatgtgtcttttagtaatctcttcatttttttcctcccagttcttcatctcttgggctcagcatctccttctacttagagcaccctgaacatgtagacacagtggtaatgcacctttccttgtggctattttgccacactaggaactctttacattccaggggtcccattccagagatcccaatatgcagatattctactgtctatgctcagtgctgtg

SEQ ID NO: 131275 - DNA, 1054 bp, Homo sapiens
aatgagcacctcagactggattttagaggagagccccctagactgtctctgtgtggccacttgtccaattctgggttggaccggcaggagcctgtgctcatctgtccacagggaccacctcagtgtttggcattaccaggcagcggttgcgtccattgcctctactatccccttcttcgcattggagtagacttccctgggggcagcatgggaagaggttcctgctgcaccttgcaggcctctcttgacattggggttgggagggtgctggaggtggagggaggtgggaagctcaggcctgcactgttttcctctctgcccggccgatcctgacccctctctgttcctagcagctaccactgtctttgctgatgctgtggttacctttacagcagtggttctcaaagtgtggtctgagcgtcttttgcatcagaatcacctgagataattattaaaactgcaggctctgggccttactctagacctactcagaatcacttggactgggcccaggaatctacactttgtaatgacctccctaatttagtgagccttgtgtgctctaaattttgagaatctcttatttagaaaatttgattttccttttggagtaataataacaagtaatatttgttagaggttaattatgtgatgctactcagtgttttatatgcaataaccgaattattcctcaaaaataacagtgtgaaagagaaactaatattagccttgtttggccagtgggaaaattaaggcaaagagtatttgctctaatgttgattgaagagccaatatgtatgtatgtatttatttatttgtgacaggatctcactctgttgctcaggctggagtgcaatggcaccattacggctcaccacagcctcaactttccaggctcaggtgatcctcccacttcagtctcctgagtagctggaactacaggcacctgccaccatgctcagctaattttggtattttttgtagagacgagattttgctatgttgcccaggctggtctcaaactcctgggtccaagcgatccttccgcctaggc

SEQ ID NO: 131276 - DNA, 1057 bp, Homo sapiens
ggcatgcacctgtagtcccagctacttgggaggctgagacacaagaattgcttgaacctgggatgtggaggttgcagtgagccaagattgcgccactgtactccatctagtctgggtgacagagcgagggtccatctaaaaaaaaaaaaaagacatcgaagtctggagaactgagtttgaaaccttcttccattccgtgtatggaccttgggaaggctgttaagcctcctggtgccttgtttttctcatctgtaaacaggcataatgaacaccatttgcacatggttggtacgaagattagaaagagtgcaagtctagtacctggctgcataggctcttgtgttggagcagtggtgattattagttctgtcatcacctgtagagcctgttgacacttgaaggccaccttaattttgcagtttgcatgtaagggtcctctgtagtgatttccagagtttttcctccatgcacggtgcctagaacgatgcaaactgggcagttacttggggtttgcatctttccacaaaacaaaagatgaaaaagagagatcctgccaaatgcaagcaagatgaggaagcatgtgccaatgcccaagacttcaaggaagtcaggttgtgggcagtgtttatgcaagtgggaactgcattccccagcactggatctgtgggtcttactcttaggcttgccggccttagcattatggcagcagccactggagaggcacaagtggttcctgagcattttgctgtcagggaaggcataggttcaggtgaatatgtgtaagcactcatcttctaggatgctggaatgtgtcgagatatcgcttcagctgagttggcttttccttcttctccaactttttttgtgaaatctggttctatagatgctgtgcccagctgtcagattgtctcagttctctggaattagtttaaaatgaaagtttttccttgtctgctatagacagttctacaaacagaattactctccttttcttaattgcttctgtcttcaagggcaggaagagataactttctctataggaagagagggagaccca

SEQ ID NO: 131277 - DNA, 1724 bp, Homo sapiens
atcctgccgggccagagacttgtgtcaagtttagttcttatagttggagaaatgctagtgtttcctccatcagtaatttttttatctgttgatccccatgcagctgtgagtatgaatgcatacatatttctcctttttttttaaaacttgatcagccagcaggagatgaaatagagcagatcacagctccctgttcatttaatcatatgagttactaaaggaaggaaaaagaaagaaatgtaaaaatggagaaatgtctcctcccctttctttttctctctctttctttttaaaaattgttcaacaagttatctgcagaaaacatctgcctctcaaagaatgaatgtaatttgggttctgaactcatatgtccctctggttggaaggaagagttttttgcacatgaagtgaaatcagctaagatgctgtctgtgaagctgaaatattgagatttataagatgacagtaaagtagtgaaaagtggtgtttttctgcttgacactgtcaccactgtggaataagaattccgggaagaagagacttagatacagggtctacagctgtctgttcccatgccacggaaggttcttccagccaccttgttatggcgatcctcctggcagggaatgagagccatctccactgcctccctttgagtggttatctggcttgtgttgcttgtcttgtcgggagaccaagggccttgcaaagtaggtgcctgtgaagagtgtcagctgaggccctgcagggagctggaagcttggaaggcctgggagaaaatgcctggctaatgtatgaggcctggaagactcttctttgttaagaagattcatgggtctctgaggagtggagtaatcaggactaggagaagatgttgggccaagccttcgtatcctatatccatctgcttgaacatttttttttttttttttttttttttagctagttgaaaggaggaggtcccgttgaggcttatttgaacaaatatttgctctccctaattatatacccagagctgctctcctgaatgtttaatgcaaaccttaatatttacaatagcataaggaagagtttataatgtgtttgggaggcttccgaagttggggcagtaattcttctttgcacttatgtaatacttttcttcctaagagacctgagccatgtttaccttagccactgttcacattgagatgaagtgaagtgagggagggagatgaaaactccagagaaaggaggagcccctgtgggcagctgccaacatgttttataggtgagacacttgtctttgccaaaagttgtgtgccagccacaaacttttctttctggtcaggaataacatgtaagcctgtgcttacaattgccttctgatatggacgtggagagtgtcacagaggtgccatgctgggtttttgaccctgatggtagtagacttcttgctcagtgccctgctgtatgacaagcctgacccattcccttattagactcaagatttagtgagtcttaaaaagatatttggaggctaggtgtggtggctcatgccagtaatcccagcactttgggaggccgaggagggtggatcacttgaggtcaggagttcaagaccagcctggccaacatggtgaaacgctgtgtccactaaaaatacaaaaattagttgggtgtggtggtatgtgcctgtaatcccaactactcaggaggctgaggccggagaatcacttgagccc

SEQ ID NO: 131278 - DNA, 1111 bp, Homo sapiens
cctggggatgcctcaactctacattgcttgttcagaaaagagcactgtacagctaccctgccaaccacgtccttcattttcagtgtgtgtccccacccacgccatgcatattgaaaaccagccgcatacccagcaggtcaccaatccagaaaaatccatagcccaaggggatatcattgatgaattacagacaagttgcctatcagcaggaatcctggattggattagagaatcctcataccatgctggcttttctaaagaagatctggctctcagagaggaacaaagatgcctgaacacatggtctgcattgaaaacaaatattgattggcccctgctgggttgctgagctagagtgggttagaatctgatgtcaaaaagtgctggggtgtggaaaaccattaactctgctgattgaccagaataaaagctccatctatttttaagatcttaaaaaaatgagggtgaaatctttaagtgggcggaagggcagaattgatggtgagaacccatagttaggcaaaaacactctctctcagtttgtcttcgtgactctggacacagatcttaggccatttgtccctatcttctatatagcattttttggacctgtgactatttattaatgctgcactaaatttactcagttgcaaattaacgtccaaatagctgatgttctgtggtgttcagatttaggattcagaccgtctgctgggtgttcttattacactggtagaaaaatgctctggctgtatctgattgcatccgacagttagatatatttctgtcactgccagatgtacaagatactgtaaaaggagcattttctctagcaaattagacttgctagctccatggatctagattgactaaaacagcttgttgccccagggatgtagctggatttggcttggtcatttcttttaaatataggacttcagaaacctgatctagagtccttttcttttggagacagtatcttgctctgttgcccaggctggggtctagtggcatgatcatggctcattgcagtctcaacctcccaggctcaagtgatcctcctgcctcactctccctagtagctgggactacagacgtgtatcaccatgac

SEQ ID NO: 131279 - DNA, 2229 bp, Homo sapiens
ctgagacaggtggatcacgaggtcaggagttcaagagcagcctgaccaacatggtgaaatcccgtctctattaaaaatacaaaaattagccgggcatgttggtgggcacttgtaatcccagctactcaggaggctgaggcaggagaattgcttgaactcaggaggcggaggttgcagtgagccaagatcgagccactgcactccagcctagtgacagagcaagactccgtctcaaaaaaaaaaaaaaaaagtaaaataaaatgcagaatttctccatatgcaggaatggcagtgggtttcctctctcaaagaagatagatcctttgcaaaagcataaaactgaaccatgaaggatgttacagggaaggaaaggctgctcagtcagggtgattcactggggatgaggcatcttgggggttccttggggagcagaggtgagccccaatgaaagacagctttgtattaaaaccatgggggttcagagtacttattaacttataaaatatcatcagaatgagctcatctgagctaatgtttcagaccaagcacagagtaggctgtttactattctgtacctctactgaataatggaaattgtattttttggtttagccagtttgtttttatctttcttgatctctttctcaaagcaatttctgtttgagttagtggctttaaccacttatccctaggtatatatcaagattagtaaactatggaccaccagccaaatctggccccttagagacagaggttctcaaccctggtctatattcatgattttgggggtttattgtaccttatgtacttattgtaaataaatataaattctttctgaaagtaggtaggagtagaactctaaatatacatccatcaacatatccaagttggtcagactgaaaattgaaaattacccctttttggtgtgttatgacgatttgttaaaaaaaattatatatatataaagtatattatatataaagtatatatatataaagtgtgtatatatatatatatatagtatgacaactataccatacggggaagggccaatcaatgcctcaatttgagcatctccactttaaattgtccagacatgcagaagaagactctccctcttccctagttaatgagcttcattgcaattgaggattttgagaggggtgccacttccctcaaatggtattccctgtttaacgactgctactgctaaaggtattgtgggtgtaacatggagaaggaactcaaggcatcttgcactttatctctcattgtgtgcgagagctgggtaacattatagagaagtgttccagaattaaagtagtgctctgctggcctgtacctacaagagatagtgatggaaattttagttgtttctcctataaaaatgttagctgcttggcccagaatgggctaagatgttcaatgacagagattgagtgttcaattgtgttacaatgagccatttgaacaatttctgtttgtcctctgcctgtcacttttctctttcccctttccaatcctgctttaagaaatgtaggaatagcagttttgcaaaggatctcagcaattctaatatgaaagattatttttctggttaccgagtctgcattacaaattactccaaaatttactggcataaacagccatttattaagttgatggattctggggccaagcattaagataggacggtgcacagatgacttgtctttgttccacgatgtatagggtctctgctgaagagctcaaaggctgtggctaaaatcatctgaagcagcgttgtgtctggtagaactttctgtgtgatgaaaatatgctatatctgtactgaccaatatggcagccactagccgtacatggccatagggcaactgtaatgtaactagtgccattatagaattgaagtttttatttaattaatttagatataaatacccactagtggctaccatattggacagcacagatctgaaggcttgctcacccatatctagcagttggtgctaggtgacagtagactttagttggggctctctccattggaacacctttctgtggccgcttcctgtagtcggctgttcctcctcatatggtggctgggttccaagggcgagcgtcttaagagaaggaaccaagggaagtagccttggagccagcaatcttgcttccactgtattatatttatcctgtctggattcaaaggcaagggcagtagaccccatttct

SEQ ID NO: 131280 - DNA, 2072 bp, Homo sapiens
ggtcaggagtccaagaccagcctggctaacatggcgaaaccccgtctctactaaaaatacaaaaattagccaggcctggtggcacacgcctgtaaccagctgcatgagaggctgaggcacgagaattgcctgaacctgggaggtggaagttgcaatgagccaagatcacctcattacactccagcctgagcgacagagcgagaccgtctcaaaaaacaaaaacaaacaaaaaatgacagggtagtgtacagtagagaattgagaaaatcaccaaataagatgatattctactggtactgaagagttaataatactcatctatctttgtgttactcacctgtcaggaacctcccaggaatgggttgatcgtatattttattgtacgtgttttatgaatgaagtgcatttttattatcgaatgaagaaagcgtataggacaatggggaattatttttctcttaatctatcttttcagctctcctcgtctagcatatgttgggctccccagttttaattgtgaagactgggagattttgctacattagggatcacatcactttctttgtgtagatagaatctcagtctctcttgctcttttctttctctcgtggagataataatctaactctgacatccatgatgtgatgatttgccaggtgctctatttctagttacagctactagggaattgcaagaagacattgggaaatggtacttggcctccacttagctttattcagattggcttgtttcccaaggacccacaggatcaatgatgcgtgcagtgctaaagggcagctgcgaggtcagggcgtatttattgcttgctggggcatgttattgaccaataagaagttaaacagttcctagctacagctaagacattgcctcttaggcaggaagacaagagatcacctcgggcaactttcgtttacacagagaggtgtgtaaagtggaaccaaggcttgcaactctaggcatcccttgtgtttgtcaggatttcagcttatttggggtggctgcaaggctttgagacatgcccatgatgctatgcatttttctaaactcagcctttgtcaaggtagtcagggattgttcattttgaaacctctgtagatatctgcatgtttgctgcaaaggttttgtctaggtgagatggactggctcatgtttcctaatgctgatgcccttccctcccttccatctgtcttttatacacacagatctatttattactttcttttctttgaaaagtataacttagctttggataaaggaggaacaggatcacatttgattaaacgcaagcaacagtttacctcgcatgggcttggatgaataaggaatccaaaaggagcggtattcaggaaaaaataaactgtgtgtgtgtgtatgtgtgtgtgtatgtgtgtataaagtacagatatatatatacacacacacatatatatatatacacgcacatacatatatatatatatacactcagaaataagtagtgaaaaatctccttttagctttatgagatgttctgagctcagctctgaggtttatgttctgactatgaaaaataaaatgattttcctaagtttttaaagaatctttctttctttctaggtgtaaaaagaactttttttgtgaactattgaatgaagaggtgaggaaggagaggcaggaggaagaaaacaatacaaatcaggctgaaaggcctacagattaaaaactaacactgcctcccctgcagtgagatagtcctttcattttagctccttgcattgaaatagcattgaggattaaatttgtgtaagccccacaaaattcaaaatttatgtgcttttctgaccacttgccttctagtggaaattttaagcatattagaggatatgtttctgtgggagctgatcagaatggtactaggagtacaaaagaatatctaaaactaaaacacagctatatttcagatcatactgcttcatcacatcgagtgcatctacaaaggtaataaatagtatgtggctgagttagggcttgggaccattttctagaagatttgccctttctgcaattctagt

SEQ ID NO: 131281 - DNA, 4433 bp, Homo sapiens
ttcaccaagttatcaaaaatattcaagatccccttaggttgcttaggatggtggtaactgttccttgttaccttagaaaggatgcagatattcttatgtaacctgtctgtaggcatgttctctagggccatcaaatgctttttttgttttttttttgagatggtgtctcgctgtgtcccccaggttggagtgcagtggcgcgatctcagctcactgcaagctccgcctcctgggttcacgccgttctcctgcctcagcctcccgagtagctgggactacaggcgcccgccaacacgcccagctaattttttgtatttttagtagaaacggggtttcaccgtgttagccaagatggtctcgatctcctgacctcgtgatccgcctgtctcggcctcccaaagtgctgggattacaggcgtgagccaccgcgcccggccagccatcaaatgcttttaaaaaattgaattaattgccaactctaacaactgaaggatttcacatagaaatgtggattcagtgcttaggtaggaaaatggaagatttggcagccctacgcttgcatttctacatggccacggtcctccagagctaggtagaggatgcctctttcatggagagagtgttctcttttttgcctcaggccactcttacaacctgttgtagtctaaatgacactggcttggcttgagaagaagtgggtcctagtctcttttcttcctaaagcaactctttaaaaatgtgaatattttttcagatgataaaaatgagattcagacagtttagatggaatcagcctcagttgttcactgaagtgggttaggataatgtgaaacttgaactcagatcatctaactttattctaatattctttccactgaaccacagttgtcccccattattgttacgatttttgaccttcaaggcattcctagagataggtagagtattataggcatttcacagatgagtaagttgaaacttggttcagctctgaaaaaggaaagttacgttctaaaagggcagagctcatatttggtctcaggttttttgactcaaacactatactcctttagtggtactcaaaaacctcagagatccatataattctgacattttttacagcagtgatattaatgattctaacatatttgactccaaacagaagcaggaaaggtggagggacccccattgttgatgttgtctcagaactggaagaaagttcctgcggtcagtcagagaataagttatagtagactcactccttgcaaagcactgactggtctgggaccatgggctgcaaagtgggagagatgttaagaggaataaggaattgctttccagaaccctataaacttagatgggcaacctagctgagtatacctgagaggatttaacagctttataaaggccacacctcaagttcatgttaacattattttacctgcattcttacctatagagtaataagaattgtcctgttttatagtattagagctgtcctattgtataacagtagagatggctgctttgatggacacttcttgtaagccgtagtatatttgatgcatatttattagggctgtgtattggtggccaaatttgtaaagtgaagactctgtaataaatgaagaagcatacatagggtgtgttattttcctggatggtccttttcccattgcagagtttgcaatcattttgcaatcttcacctacatgtgacgtagaagaaaaagtacagagagggccaattatcataaaagacactttgcgtagtggtgaaatgctggacttgtagccagtctgccagttttaaatcctggctcaatcacttagcagcttgtgtgaccttagatcattagtttatgtaaccctttgttgcctcagttttctcctctgttaaatgaaaagattagacaattcatatccgatagagttgctgtgaaagtcagctaattgcacgtgaaacattcttaggaagagcctggcatatactaaatagtgcataggtattagctactgctgctgttttgttttgctgtttttaatcattgttgaggtgcctattcctcagttgctatgctgtagcaaatcgagctttgtaactagagctaagaaactggtgggaacctaggcatggaagttgtatatgtgtaccctttgggctgagcactataacatgaggggtttagactaatccctaatagtctgcctagctgcaagcaagtctgggatatctgtcagtcatgagaagcatcattaagcatgtgatggtctctgaggctgggccctttaacttgtatgaaaaaccccagctgtcaaaagttaggtagagagctttggacctcaagtcctgactgccactctccagctctgtgatctcatgcaaatcactttgtctcaggactttgtctccctcacccccatgtaaaagtgggatgataacatcattttccaggatcagggtggagaataaatagaccatgtttactaaatgtcctacggagtgtggtggccaagtaggtgcttagaaagtggctgcagctctcagtattattgtgaatgaaaaattctggcctcatatccggtaaatcaaaatacttcaccctaactcctaaggcaatattgttgcctagaatcatcagcatatttggagaccaataacgcagtttgcatattacatggagaatgtgggtggactaattgcatccaggcatggggtgactggcttgagattaaatcaaaaggaatttcctgagtttgtgatgtaagggaagctcaagagactggaatactcaggaagtgaaatcccagatacaaggactgaaaataatcattcaagtggtggaaaaggtgatagaaagattgatcaatggcaccgagtttagtgggacatctgcgctgtgctccctctttggtttcctccctttcgtggctgagaggtttggtgtatcagtgcttcttcctcctcagccagaaagtttcagtttttctatattctgcccaccctcttttcttgcctgtatttgtccattcattcaataaagactcatttagctccaaaatattcattgaggagctaaatgtgccaggtcctggagatgcaacagtaaaacacacatatgcatatacccacatgcacgtgcatacacaatttgcacacatacgtgcacatgcacacctccatgcatatgaacatggatgcacacatggccacgtgaatccctctcttcttggaattgacattctagttgaggaggacagaaaatttaaacaatagtagtaaggaaaatatgtagtttgtttcacttgacgattattgtaggtttccccacaattttttttttcctgcctctgctgtttgggaggttgtgtgtccaactatttctattctttgaagaacttctagcctaattgcttaagcttcacagaatctcttcaaactgtttcttaaagggctctagttattgaataagttttgattcacaatttcatgaaaaaatttgtaaacatattagaatgtggtaatatggtttttctgtttattgtgctaaaagcaaaagtgtagaaaagtacaaaaaccatgaaaatataccttgtttgaagtaaataaatatgaacatgaaatatattatttaaccatgctggaggtcaattttaaatgaattctgcttttctctgggcttaaaaagaaaacttagtaactagtgggttgctatgttttatgttaagcaacatttaaattgaaatcaaagtagagtaagtacatattttaactaaaacaggtatgtctagttatggggcaagtaaaattgtatagcaatgaaattaaataaaaaacctatgaatattttttgagtttgaaatacaattggcagaatctgagcttgctatacatctagttggcttttaagggaaactgattttttaaatttcccttctttgattttggatcttgacttaaagaatccagattcccataaacattatacagaaagttctaatggtgccaggaattagaaaaatctaatttctttttttttaatttttttttatttcaataggtttttggggaacaggtggtgtttggttacatgagtaagttctttggtggtgatttctgagatttcagtgcacccgtcatccgagcagtgtaactatacccaatgtgtagtcttttattcctcatccctctcccactctttcctctgagtccccaaagtccattttctcattcttatgccgttgcaacctcatagcttagcttccacttatgagtgagaacatatgatgtttggttttccattcctgagtttcttcacttagaataatgtcctccaatttcatccaggttccttgaatgccattatttcatttcttgttatggctgactagtattccatggtgtgtatatgtgtgtgtatatatatatataca

SEQ ID NO: 131282 - DNA, 1592 bp, Homo sapiens
ggatggtttcaggatgaaactgttccacctgagatcatcaggcagtagttagactctcataaggagcgtgcaacccagatccctcacgtgcacagttcacaatagggttcactctcctatgagattctaatgccaccagtgatctgacaggaggcagagctcaggtggtaatcctcgcttgcctgtcactcgcttcctgctttgcagcccggttcctaacaggccacggactagggtcggtctgctgcccaagggttggggccccctgctgcagacccagtgttggtatatgcaaatattgcttgcccttttggagtctggaaatgttggccactgtctggtcattcacttgctttgactcaccctttctccacgtccttttctcaactttccctctgtggattagagccacaaatctatgccctcattttccagtcctgaaaatggagacatgtgacctggcatagtttttgttgtttcttccaggactgaagtaatctgggaaatgtagtttggctgccaagaatttggcctttcctagacacattgctggttgattagaacaacagaggagaatgttagtctgggaggcgtgctcacattcccagtgtagctcaggggaccctttcaccagataggactcacagacttctcaagtccctattgcgatgtggcttctgggacaccttcaacctctgtccctggtaagccaatggctgcttcatttcccatgttggtttcccccaattttctgggacctccacattaatacctactttcccgtttccttttaaatctcctggcagttctactgcttggaatgcattctacagatatacttgcgtagataagagatgacccatttcataatagcaatcacatctaacacttgctgaggatttacctggtttctggaactaagaattttacatatttttcatgtatttcattctttaaaaaactctgtgaggtgggactgatagtatcttcattttcagataaggcaatttaagcaggaagaaagtaaaatgtaaccaaaggtgtatttttttttaattgcagctgtggttttaataagaaaagattagaaacaatgtaatcaatgtgtgtctaattaaatacataatgctttattgccaataccataggatactgtgcagccacagaaaaatggtattgaatatcttcatataatagcgtggaaatccctccataatacatgaagtgaaaacaagtaagtctgtatataaaatgcaggctgggcatggtagctcaggcctgtaatcccagcacttttggaggctgaggcgggtggatcacctagttcgagaccagcctggccaacctgctgaaaccctgtctttactaaaaatacaaaaagttagccaggcatggtggtgggcgtctataatcccagctacttggaaggctgaggcaggagaatcgcttgaaccagggaggtggaggttgcagggagctaagatcacctcactgcactccagcctgggcaacaagagcaaaactctgtctcaaataaaaaaacaaaaaaaagtataatatgcataaattagctcaaccattgtggaagacag

SEQ ID NO: 131283 - DNA, 1027 bp, Homo sapiens
gcatgttttcatttgcttaattttagagacgaaggagtgagagccagttagttgccttactaacgatagaaagaatcaggccaccattctgctacaacaaatttaggaaaaggcttttattttgggtatgattacagtcagagcaataagggtgagttagaaaatggaacaacagaacctcctggggtcttttttgtgagaaaaataataatgttttggttaatgttagattgaatgtccattatgtgccaggcaatttacatgcatcattgttgcaggctgccctgagaggtagttatttttatcagccccattttaaagatgtggaaactgatagagatgtgatgtgcacagccccaggtcaaacagcagtgagacgcagagctggaatttcagccaggtgtctccaccctggaggcctgttcttagtgcactgtgctgccaaggctaaagccttttatctgggcctggtctctgtcctagagactgccttgtcgggtggccttgtggaaatctgctctttggcttggggaggcagacactgcaccagcagcttgttccatctagccttaggaagcttcaccttcccggacaaaaagggtcaatccaaaagtggcttttgacacctgtgccaaactaggaagccgcagtggcttcttcgggaattaggccttagccccgtggaagaaactctgtcctgtgtggtcttctgtgtgcagtggaaactttcagcaaggcttctaaattcttgatgatcacaggatcgctttgcaccgaaaactggcatctggcctgcgcttcattgagggttccctacttttggcgagagcttttgaaggcctgggtctgtgagttttcctttattagtaaatgataacaaagcactttaaagaaaggagacacgtccgtggtggtagttcttgctgtgtgaagaaagggagcactggatctgagaacaaacctctcccaagttggtccctggggctcctcctgctgctgctgctgggagccccttccttgcaccagt

SEQ ID NO: 131284 - DNA, 2196 bp, Homo sapiens
tttataaggacagcagtcaactggattaagggccctccccactccaggctggggtgacagctgcaacaactgctttttcaaataaagtcatatgctgaggtgctggggtttaggaatttggcatatctttttgggagacacagttcacccataacatctgcattacccccttcttagtttagatgccgtcttttctaggaactcttctgccgtgttccttcccccaacatctggctttgatgtccctcttgacactggaactctcttgtcatgctttctagcatctctcataattgtttttttgtttttcttctctgccggactctgagcaatttgatgtcaggaataatttagggtattttagaattttttttccaaattattagaaactttagatcgtggaattttggatacatttatgcattttgatgtaacctgaaatatttgtaaccgagtcatggtcttcatgttcattttgcggggaagaagtgatacctattggtaaaagaaaaggcttgggttaaacattaccccctctctcgagtttctgtgatcatgacaaacatggattctaaatccttggcttgagagcacatgaattgccgagcagatgtggcgtcagcgcttgcaaggctgtaagcagcttactgatccagcagtttaaagactgtttactggcagtggcaacattacttctggttgcctgtcttaattcattttagattaatctgtcttgcagttcgaaggaaaatgaattgagtcagtaacttcaagagttatgtaaaatctgtacagtgctaaataattgaatggggttttatgtatggtctttaaattggaatgtcaatttgacacaaatgctccaaaacagagtgttagatgagctgatctgttcctcatataaaagctttgaaaattccattcttgtatcactctggaattcaccgttcccatcccttgcagaatattaatgttaactttggggaaggtgagtctgcttgtgtaactcttgggcctggggttgaggttttagggtaatggtacccaaacttgaacgggtttaagaaccacacgaggagtttgttaggaaggatgcttggctgggcatggtggctcctacctataatcccagcactttcggggctgaggcgaggggatcacttgagcccaggcatttaagaccagcctgggcaacatagcaagactccatctctatttaaatttaaaataaattaaaaagaaaaaagaagaaggatgctttctgggtccagctccagaaattctaatttggttgttctgtaactgggctcagggaagtcctttggcattacaggtggttctaatgctgacattctcagaccacattttaaagaaataactggttgaagggatgcacggacatgagaaggagagtatgtgaactcctgagagaaaattcaagactattttgcataaaatacatttatcacaaccaggcagaccaaaaatgacctttttgggtgggataaaggggatattttgcagacccaaagaaaataaattcttgagattttttcccagaaatccatgggaggaaggctgaagtatccttattcttatcagaaaacatatttgaattttattaccaatatctttaaccccattttgtagatgggaaatctttgaggctcaaagagcaaagaaggctaacatttgttgagcacttaataaatgaaactgtcaatattagtaattattatcgccatcatcattatctttatttaacctatagcacagccctgtgaggtgttatcactgccatttacagatatgtaaagcaagattcaggcagttcagataactagctaggattacacattgagcttgtagtgagccaggattcaatcgcagttcaacttaactccaaaatccatattctttttactgcatcaaggtagatttaagatctttacatgacaagagttgccaggtaaaatgtaggaggcccagttaaatttgattgtcatataaataatgactagtataagtatatcccatgaaatatttgaacatacttacatttaaaaatagtggaccatagtatactagaaaattcgttgtttatctgacatacaaggttaaccaggtatcctgtattttcatttgctaaaatcaagcaaccctgtatgtgggtagtgggttttcagattgtatgat

SEQ ID NO: 131285 - DNA, 1641 bp, Homo sapiens
tgcaatgaccctatttccaaataaggacatatttggaggtacttggaggctgggtcttcaacttatgaattttgcagaggacacagctcaactagtaacatacacctatagatctgtctttagtggatatgtatatatcacactgttctatacattggagaagggtgaaaattaattgtaagaaaaaattgcttgtgcaatgaatagcactataatccccttcttgacagttaagggaatcattctggaaagcgaaattgctctgagccaatgtgtggaaaattctgtgcaagagctcattccttttgttgcattttttcaaagattcttttggcagtgctgggctcggtccagatgccttccacatcaggtggtttaagcatgtgtgtacatgatcgtgtgcagggttgtgggaagccaattacggttggaaacagttgtttagctggcaattagattcctcacagtctcgaattatgttgctttaaattaagattatgcagatttgagttgctttgataatttgcaaaagccattttggggttataactaaaaatgtaatctgccaattaggagattttctacctgatatctgttttgttcattggactgtggacccattttaaatatttatcatctgctttctaaaccaatggcaagagtgtctgcataccagtgtggtgaggggagatacagtggtggaggggagatacagtggtgaggggagataagtccctgaatcagacttagctttcttgaggactcagtgctgactttgttactgtttactttagcaactcaggtaaaaacatgcgtcaaataactcttttgtttcatataaaacctgaggttttgcaagagacaaaacctcttaaaagtgagatttgttgtttaaataagaaatagtgttctattattaacccaggccagctgagacaagctttttaattagcctaaaaagagaggataatgtataaggagaatgaggtaggttttacttagtaatgtcttggagatttaaaaacttatcctatggtgatcagattcagattcaagcagactaacggatagcagtattttccgttcaagatgatggacatcttatctttataaatgattataccggtccgtctgggagaacaagatgctaaatgttacatattccttccttctttcattggaagttcattggaaattttatacacgtaccatgcatacagagaagttcgtgcatcacaaagattcaactcgataatttttcacaaagtgaacacgtctataaccagcaccaagatcaagaaatcgaatgtcaccagaactccagaggctgcttgtgtctgttccagtcactgactcagaattttgtgatggcatggaaagcttggcttgttgtctgccggcagtgagtattgatgattttgggaacacgtttccattcacagtgccttttcagttgtaggttagtttttactgggagcagtttcatgcttcttgttcattctgctagagactggggttagctccttagagttaagccttttggtgagcataatgcagagcagaagatggcctttactgcagccgggacaaagtcttccaggtgctgcctgccttcctctcttcccaccagactaaattctt

SEQ ID NO: 131286 - DNA, 1134 bp, Homo sapiens
aacattgatttatagaggattatcatagcatctataacgtgttttaaataacacaattaaaatagttatgattttacataataggacaagatcgtaatgtagtgcaaccactgaaagtgaaggtatgtaaagaccagagtcttttccctagactactagaattagtagttccttctaattctagcaaggctgaaaacttgtaaatagactctttagtagtgttagagtgaactgtttacattttatgtgtctgtaggaactgaggccagatgggtcgattgcatcctctagtaatttccaaatgaagttttattaaaatcctttccagacaagcatttttataagaatgactaataaaaccccaaacacaaattttaggttctcttattttataaaaacatgcaagttgcttctgaagttattggaagaccagtaaaataataaatcagtaaagatggaagaagagcagagactttgagcaaccccaaaataaccaggggtgagcaacattgctgggcatcttttgcacattgaactgctcagggctctgaaacatgagactatgaaagaagcattcctcatgcaatgggtttattgcttggttatttcaccaagcaccatttattgaaaggcagtgttcctggtggctaagagggcagagtctggaatctgccaccaccacttaccaagtgggtaactttggtcagagttatttaagttttgtctcagttcctccaacaataaaaaggggatgttgacaatacttaatacatagcgagtgcttaaaattgtgtgtgacacacagaaaacttcattctgttcaggtcaccctgtgagcattgttgggtatggtgggaaaagaaagacactaagatcttagagatgacttcaaggttccttttctggtccaagacgatgtacgatgaatagtcacaggaaatgactcttttctgcgatagaatctggacccaccatttaccttgtggttctgctcactgtttagtgctgagttgctaattttaatgattcttcctgttttaagaagcatggctctgagtcgtattctctctctctgcctgtctttctctctgtccacaaacacacactttttgagtacaacagcacagaagacga

SEQ ID NO: 131287 - DNA, 1124 bp, Homo sapiens
actcagggggctgaggcaggagaatcgcttgaacctgggaggtggaggttgcagtgagccgagatcgtgccactgcactccagcctgggtgacagagcaagactccatctcaaaaaaaaaaaaaaaaaaaaaaaaaaaaagaatatatatgcgcccggccaagtatatctttttttaatatattgcctccccctgcattaatttttttcttgctttcccagttatatatgcatatatataaacttcacagataccaaataggttattgctcataggtaatataatttgtacctgatgtaaaggctgcaactgaggtttcactgatggttggtttacctggaattttgtgagttggaaggcttactgaaatgaaggaaaatgcttatgtatgacccagctctctctctacgcattgaccaaaataggttgatcagggcaacagaaatgattaataggatagtgcagatttggataaagagcaaaaagattaggatttgaaagttggaggatgaagggagtcatgtaggatatagtcaggtggaattcggacttgctcacaaaatcccagaatactgtaacaaaagggcacttctttatgctagaaggagataatttcactttaaataaagggaaatggaatgtctttgcccagaggataacaagcaaatagaactcattttcccgaagaacctgtgtagtctggggtgtcagggatgtgtgttcaagaaaaatttaggcaaaacccaatgatagcttctcaagggtaagtttcaaacattcagacaatatccctaacccttgagtgaaccatcacacagggaaacgattctgttgtacagaatatgttttgatgccactgtcagacataaagtctggtgggaactggacttctactctgacccagggtgacaatttttatgtttttaaaatcggccgtcttccagaagtgttcattttacagtgcttatatctcagtacctgaacttctgcagaagagttttatttgagtcataaatttctaatgtcaaaacctccctgacaattattagccaaatgtttagcccaaaagagagattaaaaacatatatcttgtaacctagctacccaatgagttaacccagaga

SEQ ID NO: 131288 - DNA, 1187 bp, Homo sapiens
cctagtgcggtttgttttgtttttgtttttattccatgagccaacattctttggctggaatgttggctctccaggtctttggctgaggtcaaaacttagaagtctgctcctgtactttggagttctcctcctcatggtgaagcccacagcggtgagccaggagtggatctggttccttcatctgtagagttttgtttttgtttctttacctaccttagtcctgtgtctctttctaggtcagagaaaacttcttatagcaaatgactcctgtcccttcccactctgacccccagtacagtgacagggaattcctgcttctcctagcttgtcctttctcagtttctttcctcagaagcaaccactatctgcagtgccttttgtctctttctagatatacttcatgcatagataaggattcatacatacacgtacatagaaacacacatataaacacagacatgcgaatatcaagatatagtttgaaatcataattctgaactttcactctagtgtttaaaacacatcaatatttaatatctcactgctgctagttggatgaaagatgaccattttatcatgctctacaaggatcatgcctcctgtgatctgatttccctccaactctccagcctcatccagcacttttctcctctttctcagacctctaggcccacttcctgttcttctgttaattcctcaaacaagccttcccttgtttcttatattagctgtcactctgttacattctgtagtttcttgactgttcatttagggcatttagcacagtttgtaagttccatatttgtgtgattatttaaatagcatctttctgcctctactgaactgcaagttccaagaagacagaaatgaagctgtttttttttttcttttttttaaagctgttttatccctagagtctgtgcattacctggaatataataggatctccgtagatcatagttgaatgaatgaaaaacaaatggctggctggctggatgaatgaatgtatgatgtagaaacttcctttgggtagggaggaaatgctaccttttggaaaacagttgtgttttagtatccaaacacatgttttctctgtagaccttaggtattttctttttgttgtttctaaccattttctaagaagtcagttattctagaaaggctgatcataggcaccgtcaaggaaa

SEQ ID NO: 131289 - DNA, 3133 bp, Homo sapiens
tttctttgagatggaatttcgctcttgttgctcaggctggagtgcaatggcgcgatcttggctcagtgcagcttctgcctcccaggttcaagcgattctcctacctcagccttccgagtagctgggattataggcatgcaccaccacacccggctaattttgtatttttagtagagacggggttgttggtcaggctggtctctaactcctgacatcaggtgctccttccgcctcagcctcccaaagtgctgggattacaggcatgagccaccacgcccggctggcttactttttttttattttattttttcctttttataattgactcatttgtcaactactcatatataaatataatatatatgttagtcatatgtatataatttatatacactagtgtcatatgtatatctatatatgtatatcttatttcatttggaaaaattagaaactaccaggctatcagacacccacctaaataaaacaggaagattcttatattctataaaaaacacagcatctggtgaatggaacatgttggaatttctatcaagaattcttttatgcatcaattttctagaggtatctggtgtttttccaattaacctggaaatatgttttggaaagaatttatttttcctagaggccagatgcgtccttgccctttccccaacatggcccttggccaccagtggagtgttgggagctctgggaagagagcggctgccgcagacgtccaggcatgggcactttcgccatctgtcccgtgttgtaggttttcattgctttagttgttatcctcaacacaagggcctttaggggctgggaccacaactctgcctcctattctcccattacagctgcataattagttgtaaaacttttacttgtaggtgaaaactcattttggcaaccattaattcccactgtaattcatttagtaactgcagtacttctattaatgggaaagtaaggtcaagcatcaagcagcatgactaatatgtgttgataattgcatattgttgataactgtaaactctgagattgcactaataaaaggtaataattcccaaggcaaccaggaagggaactggggagcggctgcaaatttagcctttgccattttgccagttgtttagcgtcatttacgttggtgggaattctagtgctcataatgcactggaagatttttttctggactacgtaagagtaattggagattgataatgtgtcgatatgggggcatgggaagtgactgatgctggggcagatggtttctctagacaattgctaagagggtgtgcaagaaagttgcagcttagcacaagcttgtgtggtcaaaaagtaatctgcttgctctttggacccacattttatgtaagctgatactgagagcaagcacttgtagagagagggaggtgtgaagatagtccaaagacttgagctagagtctggctctgccatttaggggaatgcccttgagccagatctgttaaattcattgagcctcagtttcttccacccttgtagaatgtagttattcttgtaaagctgttgatagcattaaatgcgattgtgtgtgtgtgtgtgtgtgtgtgtgtgtgtgtgtgtgtgtgaaagaaactgatttggaaactcgaaaacccctctataaacaggaacctggaagtctgtttgtcctttcttaattttctgatgatacaaatagatatatcattgtaaaactattctgtgtacttgagtttctttcaaaacactaaccctgagtagtgcttgcaatttctctaaaaagtaaattatcacagaaagtcagtttatgacccattttctggggctagaactacctttctttttggggatggggtctcactgtgttgcccaggctgggctcaaactcctaggctcaggcaatcctcctgcctcaggctccaaagtaactgagactacaggcacatgccactgagcccagctggaagtaccatttttggtaactcagattcctatagctgtgcatggggtcattaccttggacaatctgatgcctgagaagactctgttttgtgtttccaaatggaccatcttatggaccatctttgcttggaaaaggcactgtccagaatgtgtggctaatggattgttgaaggagctggacatggcccaggcagtccggtgaatcagtgactgatggttgtttgtagtagctaatgctgttccctccccccaaagataaaagaaccaaaaaaccatcaagtggcttgatttgactatagcagcatttgtgacagaactgggaaccaaatgaaaatcaacttagtactactcttcaagagattttttttttctccagaggcttagcgtaggtcataccccagatgttgatgatgaatatattgattgctatctcagggcgaaatctcaaaagtttgtgttgcccttttaggaatttcacagtttatattgacctataaccaagaggcaggttcattatgtttaattgcattaaaagataaaagaagtagagaaattgaaaggaaaaagagcccagagattgttacctttttatcaagcaacagcatgccacaaactttgcataaataaaaaataataacctgagcctttcatcttgggaatctaatgaaataaatgtgtgctgttttccccattagccctcaccttagccagcccttacattgtggacagaggagtgatgtcattatttgtgagctagatgactggctcagtaggtgccgtgtggttcctaagaagattgtaggtcttgccattgcgtcttgtgtctcttgctgtacaggtggaaacatctgtgtgttttcattatggtgaccgctgggtaactggtcgccaacctctgtaactgaagaaacagccctcacaatagagtacactcttttcccatccagagtgtggcagtccttttctgcgtgagcctttgtctgcatttttacctcttgcaaaccctcctccagccagagattgatatgcctggatgatttatggcagtgattgtcagaaacttttgaagcccatccaatttcaggattcgggttctcatttcttgtcatttatggcacatttgatgaattctcactatcagctgacatgtttcataattgtc

SEQ ID NO: 131290 - DNA, 1327 bp, Homo sapiens
agaagggggaagggaagaatttgatcaccttaaaaggacctttagaaacgtaagagtgaaagtgaaccaagtatccctttttgtttcttcttcagtgttttcactcctcctcctctttcctttggaaggggaaaagcaggaaagaggaattacattttctagaaacagaagccaagacctcaagaagcctctaactggccaggcacggtggttcatgcctgtaatcccagcactttgggaggctgaggcgggtagatcatttgaggtcagtagttcgagaccagcctgaccaacatggtgaaaccccatctctactaagtacaaaaaaattagctgggcgtggtggcacatccctgtaatcccagctattcgggaggctaagccaggagaatcacttgaacccaggaggtggtggttgcagtgagctgagattgtgccactggactccagcctgggcaacagagtgaaactccatttaaaaaacaaacaaacaaaaaaaaccctctaatttctctttctaaactgtagacctggtatctagatgagtttattcctgataaaagcatacatgctcctaggaggtttaattactatttatatggtgtacgcacttttcttttcagaatactgttatttatttgtcacttcagtgtttcttttcccattgctcttctctcagcctcttgtgtcagccctgcccaggctggcttttatatccttagcctttttttttttttctaagtatgggaaaacatagtttagaagtaatcccttctcacaaaatcacctctctcaaccactctgtggttattttatttgagggtggtggaaagagggagatgtttgtagagcctcagagagaaaagcacggttttaaatctaatcattatcagagtgagagctaaatacttttgcaaccttcatgagagatatccctgggaattttctggataaatatcattctcaagttttggcagtgtgcagaatttaggccacccacattgtatggggcataaaactgtttagtgaagttcaaataatgtgttgcaagagtttggttgaacttgtaatttaaccttgaggaaagcaaatacttgtgggaaaatatttgtgctcaaaatcaataaggaatgtgcaagtaggatgccctcactctgagagctgtagtttgcagctgaagctagtacaaagtggcatttgtcagtagtaagtaaaacgagcaaagtggatgggtggcaagactttgacattattggcctatcacattcagatcaagttcatctgcagatgaatagtcactaagatttgttaagtgtttactttgtgc

SEQ ID NO: 131291 - DNA, 2170 bp, Homo sapiens
ctgtaggtcatcagaagctctgtgacttcagatgtgcaagtgaggccaaggcactgtcacattaatatctgtgtgatctcggtggcattgtgcttttccatcattgtcagggctgctgggctctctgtgcctaaaagctgcttcaaacaagcagctcacattccagagctctgagagatgttgtcagcctttaacagttttctcttcgagaagacattagattctgtacaggttgcagaaacgttgtcttaaggtggctggaaggaagtgtttgaaataacacatgtgcttgtgattttggtaaccaaggaaacatgtacctgatacaaagcttcctttaaaaaatgatggtacccttctgggattgcctcagaatcacccacagcaagattccaaagggatttaaaattaaagtaggtcacttccagcaactgtatcaagagttaacagagaatcacctctttaaaaatgaagaatcatctctttaaaaatgtactgtttagaagaggaacccaatacattgtggatacaatatgctaccatctgaataatctgagtcttgcttataatggatgtttaataagtcttacctggattaaattttcctctgcttctgccttattatttgtattatttttattcttagtttgccttctattccaaattaatccttagcttctcgccatctcttttctaacagtttgttattaaaattatatagtgatggttaatgcagccactacctgtactttgcaaacagattttgctaatacatccatgatatgtagaatgatagaaactggagttgacttagaagataatcatatccaaacttttcattcaataaatgagaaactgttgctgggtgtgatggctcacacctgtaatcccagcactttcagaggccgaagcagaaggattgcttgagcccaggagttggagaccaatcagggcaacacagtgagacccctcgtctctacaaaaaccaaaaaattagccaggtgtggtggtgcacacctgtagttccagctaattgagaggctgggttgggtggattgcttgagcccaggaggtcaaggctacagtgaactatgatcatgccactgcactccagcttgggcaacagagtaagaccctgtctcgaatgaatgaatgcatgaatgaataagaaactgaatctttaggaatagttacttagagtcctagaagtctgacttaagtctgacttaaatcttaagtaagttaagagtctggcttaaatctgaacacagtatgtacattttagtaatgttctggacacagagacctgagccttggtacagattgtgtggtattattaccaacaccgttttaacatttatgttacaaaagacttctgcatgttggacaacaggaaagaaatacagtacttaactcacaaacaacaaaaggattaggacagtccttctgaaagcaggggtctcaacatcaaatgtgacaacagccatacaggctttacaaatatgtagactggcctagtataagagaacagggagtgggcacatatttagcgcattgcaatgggcataaatacctgaagttacttgacccgtggaagagcccttgacagccagataggcagcaacccctttcctagtctttgttgtcatacactgtaaactgaaattgtgctgcatttttttaagtggtacatttcataagaggttgaagtgaaaagaatgtacctagaattttcacctgggagaaaattttattcctgattcttggttatctataaaattatatacctggggataaaaatttcagtttagcttaaaacttaaattgttggccaggcgcagtggctcacgtctgtaatcccagcattttgggaggctgaggcgggcagatcacctgaggtcgggagttcgagaccagcctgaccaacgtggagaaacctcgtccctactaaaaatacaaaattagctgggcgtggtggcacatgtctgtaatcccagctactcaggaggctgaggcagatgaattgcctgaacctgggaggcggaggatgcagtcagccgagatcctgccattgcactccagcctgggcaacgagagcgaaactctgtctcaaaaaaaaaaaaaaaaaaagttgttaccctctgtgaaagacactgtgaagctttgatgg

SEQ ID NO: 131292 - DNA, 1058 bp, Homo sapiens
tttaaaagtggaatctaggagtgagttggaatttaggaatatagatttggaaaccacagatacatgaaaaaaaaaaaaaaagactgagatacagagaaagggaggcaagaaacagaatagtaaaatgggtcattactgcctaagtgtttttgtttgtgaagcttaatgagctaagggctcattcttaggttacagtagtggaagagagatgagtaaattatctctgcaggtcaaagaggttatagaatctgttctcatatgaattaatcaaatttaacttctcatgttgaaaagtagacaactcataaaggagctatcatgtaaacctttttttaacttggaagaagtccaaatacagaatacttacagattgaagaaaaatgttcagtttagatttcaagtgtggtcatttccatagctatgtggtgaaagaaattgtgtttccgaaaatcgtgtttccgaagaggctatgtttttaaaggtgccactgggaaactatgactattatgagttttgcagttttgacattggatggggtgtgtgtgtgtgtgtgtgtttgaattgagttatagaacttacatgtaaaattattcatctgacttccggggaaaagtctgttttttttgaaatacctttttttttctatttattcctttaattattatacattagaaagaaatgacaaggattgcatcctagttttaaaatgctgaacttttaaaaaggcaattttatttttaagactttaaataactcttattagtaattggatttgtggcagattccaagagggtggttttggaaagcacagtggcttccggtggcttcagaccttggtttggaattgcaggcctaccgcacaccgactctggagagtgacttggagcctccaaattccaagcttcctgtgtgcgagtgaggctagcaaaccacattgagtaggacagcctgagggttaagttacaccatggatgaaaagctgatgcatggttctaacttgcccgggcttgatattcaaaaaatgtctattccttttccattttctctcttttccaaaa

SEQ ID NO: 131293 - DNA, 1888 bp, Homo sapiens
gggggtcctcatttatgcagctggccagagctcctcatccaacccggggcttagtgaggtgacagatgtgatgttggccaatgtagtcttccttttctttctttttttttttttttctgaggcagagtctcgctctgtcacccaggctggaatgcagtggcgtgatctcagctcactgcaacctctgtctcctgggttcaagcgattccccagcctcagcctcccaagtagctgggattacaggcatgtgccaccacgccgagctaatttttgtattttttagtagagacagggtttcgccatgttggccaggctggtctcaaactcttgacctcccttttctttttccttccttccttccttccttccttccttccttccttccttccttccttccttctttctctctctttctttctttttcttgtttaaaaatacatctatatttcctctagcttgtatataaactgacctctgctttaagtattagctatttattgaggaacacgatgcatgggccagacactgtgctaagggcttcacctgtaatactcggtatagacttcttataatatcctatgggtaagatactattattatccctactcctattgttttggggcaggcaccttatccatttgtttgctgctgtattccccatgcctcaaaaggtgcctggcacttactaggtgctggattttaaatggattaatcacatgcagagtaatttgaccaagtcatactggttgtatatgggagttggagatgaagactgtagggtttcaaagtctggactcgttaccctgcaccatctctgctttctgatgcctagttagagaaagaacgtcctatctgttttagacttgaggacttctttttaatgactttttcagacttgaggactcctttttaaagttgtagactgttccacctagatccttctggtcattctctactttgttgtggataaaaattttataataaattaggtaatgtttaaaagtggctttgtattttgtacatttgcaacaatgtgtgtattaacctctcctaattccatctactggcaaagcttgatttgatgagaattgggtcccctgcagtaatgtgactctgaagctgacggattagagagcttgtggttcaggcatgaaccttgtctcttgggttggacctgagtctagactgaccctagagttggaaatttagtagcttaactgacagaactgacgtgaacaattgctgctttttattaaacaagggcagttcatctcattcgcaaacattttctaagaccttgtgcaccaaatggtgagaaataagaaagttccctgcccagggagcttattgcctgctggaggagataaaacttttggaaatggggtagaatgtggtaagtgttttaatagaagctgcaggagcttagctgagggaggagatgacctttggatggtgtcccacagacatatcagtggtctttggatctagaaggaccccactgttgtctgccttgttgcaattgtagcatgggtgttcttgaaggaagcacaaaggaaatgtccactgacagagttgaagatgacactggcccagtaggtttgctatccaatttatggaagcaaggcaaaaacatagacaaagcacaggagataatgaaggtgtgaaacatgttcaaaataatcaagaacccaaacagatacctcaaatttcttcccaccccatctcccaggtaaccaaaatagctacctggttttttacaacttttcatcactttaaatacacttgggattcccatttctgagaaacaaagacagaggaagagagaattgcaaaaggcgttagtatgaatctgtggtttgcggactggtaattaggccagcaggctttt

SEQ ID NO: 131294 - DNA, 1368 bp, Homo sapiens
agaatttttgaagggccaattaagatcacaactctacacaatgagctgatgtaaataaggtatatattgacttttaatagacttaaaaagagttgatgagatcatggaaagctccacgtggccaatattgttattattctgtagatggtatttcttggaaattttgtttcattccctttctggaagtgagttggacttttacctgttttttggcatagatttggtctctcctcctcccagtagtggaggtgtaaggagtaaaaacttttcctagaaataaaacataacaagcacttactgagtgcctggtgtgtgttcacattgtgtgaggtgttatgactgcagaatgagttttccataatcactgtgtctgcattggagttggaggagaatatcttacacagagctcccaaatcccttgcaatttcctgggtgatcaactatcttttgttctaatgaggttacccttagtggacatgatgctaaggcagcatataaataagtgagggctcatgtgatgtgggctgtgtaaatgtgccaagatacttcagtgtgagaaaaaaagtcacatgtgatggcattagtctgtggaagcttcgtggagaaaactctggatagggactttggaagtgtagtttttcttggctgagtaggtctctttcctaggaaataattctgtcccattccctgcaggtatcaagtttggattttgatgaataaagtgtctcttcgttttaaaaatagggcactgaatcgccaaggcagtggcatacagggtagaacttcgtggccatggcccacgtggactgtaatggcttcaggcatttggttttgcttcacacttcaaagaactgaaaagtgaaggggatttatttattcatgaaaacctgccccacacaactgctctgtgtgcctggaattcttgttgtgggtgggcaggctgatctggtgagaacagtagtggaaagaggagaggaacatttcctccctaggatggaagtcccatagagcacgcatttgagactgctgagttcattgccatatgctagcacattaaacagagtgcgccatagagttggggctcaaaagtttctttgtaagggagtgagataataattgagctatgccttctgctcttaatttggtgttaggcatacaagcagggtaatctaatgacagaatgaacataaaacaagtgagactgattcaacagatgaggctgtgttgaatgtataggtgggcagaggtgagaaggagcaactgtccatcttggagttcaggaaggttttggacatggtgttgtacgaacttggtctttaagtatgaatggagatataagttgaatggaaatataccaggtatttcagg

SEQ ID NO: 131295 - DNA, 1044 bp, Homo sapiens
gctgagatcatgccactgcactccagcctgggtgatggagtgagactctgtctcaaaaaagaaaagaaaaaaaaaagacatccagtccatccagagagcccgggacccttatctagtaagaaggcagctgcaatagaaagaggaaggcatttggtgtgaggactcagatacgtattatgtatatgtggtggcaggtgggaggagggtggtgatggaagcttctagtcttggtggtaacattcacgatggatgacatagaagaggctgattgttaaagggaaaaggatgatgaattaggttttgggtaaagttatattgcagccttcattgcaagcaatgcagtgccacattctatgttgttaatacgcacatgccccagattgcacatttggggatgagggacctctctatatctaacttttactggtttgagagcgtgaatgaagaaaggctcacaccactgctaccatcccatctgtcttttatgttgaacttgtgctttcttcccctagtttgtttaggtctaagtagaatactttgcataggaaatcgataaatcttctattgctgtttgagtgatggggcagtttctttattaccagacagttctgcgagcaataaatatttctaatatcctgagtatatttatttctaagtgggagttagagtaatgagacatttactaacgctgggctcgactcagaattcagaaacagaaggtagatgactggcaaggactgttcctactctagagttttaaggtcattagaaagcttttgttttgttgaaagcactgtactttgtgtacgatatggttgagccttttagaaggttgctgagacttacgtcttatctttgcttatatagtatcgactagaggttggcaaactttttctgtgaagcgccagatagtaaatgctttaggttttgcacatacattctctgtcacagctagtcaacgcttgtaagaggatagcagctgtagacaatatgtaaacaaatgagctatgttccaataaaactttgtttacaaaagcatgcggt

SEQ ID NO: 131296 - DNA, 2514 bp, Homo sapiens
tatggcttgtaaagcccaaaacgtttactctctgactctacacagaaaagtttgccgacccctgctgggaggcagatcgaaaatgaataatcatcagtaatagaaagagcacagcctttagaatcaggcagtacagagtccatgttatgtcttggtttcctcagagctgcaactattacacattattattccaccttagaaggtttgggtgaggacgaaatgagataatgagtgtaaagcatctatacatgtatagcatgctgccaaatacctcacagatattcagccagtgctggtatctttccctctccaggttacaaatatttcgggttcattgccttacctcaggtcctctgttcacacagaactggagtgaaaaataccctttgcaagtctgacaatagccggagagacaaaaacccatgtctctctctctctaccttcctttatttagtgtcttttcctccataaactggtggcgtttagccctgtgaaatgtcattttaccttaaggtgaatgggtatatagaattggtcttgaccttgaataaaagaaggacacaccaggcaatcatcatttgggggaacttcagagaaattgctccatgagagtaacacagagcagtgacttctgctggaggggttcacaggtgacattttgagccctgtgcagcctgtgcctccgagacagtcagcgagggagccctggcggtcgtggggctgccttcgccagcttcagaactgtggtttttcccccattaacacacttcttgttaagctgatgtggttgctttctaaactgaatcttcccttggccagaaagaaagaaaaagcttccctgcgtgaagatgaaggtttattggcaatgtcttctttagtctcttagcaagaacagcaaacagagaactcccttctttctgacttaagttacacatattttttttctcttttttactttcaaagctggcagcctcataagagcagcattcaaatagaccgtgccagggatgcagggcaccatgaatggggcatttcttgtccttctggccccctttccctttgtgctgtctcttttccatgtgttattagccaccttgcaaagtcggagctttgccaacaaattctgggttctgtgggttgctgtctgaatctgctgcttattcaggaaaatgagttagtttctgctgtttgtagaaaaaaatcaacaaacccacttataggttacatttaggttactaatatatgtggtagcacagctaagtaaactggagattatgctgatgctatgtgcttattattgcagtgtgggttttaatgtgaattttgcacaaatccatgaatgatatgcccatttgcctttttaattttcttgctgttaaaaaattagcttattttgtagccattgaaatatatataaagaaaaaattaacttctacctgttttttttcttttaaaaatatttttatgtgatctaaccagtctgaaatagttggctgtaaatggatgtgggagtgtcatttcaaaccttttacaatttgggatttcttctggggggagtgggtatcagagctttagttcttgttattggcttatgacgatagtctggaattttatagattgtgtttggctgtcagcatggtgcttgggtgtgattaatttgtgtagcttgccattggatagataatattcattccttggatccttgttcagaagggattaaccaagtgaactggaaaacatgtctttgcaggagagctttcactgtttgtgataatcagtgaacaatctagtgctaatttaattccactcatagatctggctgactcattggctcttaatgcttcttaacttctatatttttaatcttcagttttttacacatatacaaatattatagtagacatagttcaaaacttaacatttctccagggatcttgctctgggaatgcaaagtaaataccctctaaaataggtttctggaatgttgtttttctgatgggtctgttatttctgcctttcttctaatgggaaaaaaaattgatttgaaagggtaaaataaacttagcttttttggaaagggagggttaaaataaaattaacaacaacaacaaataaacaggtgataccttagagacctatctggcataggacttttgaagcctataacatggctttgggttttggtattgatcttttatagggctaaataatttatagccaggcttttgccttgtgggatggttggagtgtgtgttccaccaggaggcaaaggtttctgttcaaatcttcctgttcacttgatttaggtgtttgataagtgactgcaaaatggagaggtcactttaggaaaggtttctctcttcttgccctctgttgcctttgagtagtttcctcctgtgttttgttcatctgaacaatgcattgacttgccctatgtaggaaggctggagagctgcttatgaattgtagtaagatgtcttatggcttccagggagcaaacctagggagttccca

SEQ ID NO: 131297 - DNA, 1038 bp, Homo sapiens
taagaattttttgacagtctttcctaaacatttcaagttgattgacaaaagataacaatccatcatattgcctactagccaatgttttgtggtgccttcacctctgagttctaggaagtggttttaatcatgtttgcgttcagctccccttcccatttattaaagattggaaaatgctaaggtttagttgacatgatgaccttaacgtaaaagggcatgaagagggcaaagactcccagcttctaagtctagttcatctgttactctcaaaggtgtctttgacacttagaaatgcttccacacccttgccgacttttactttttaggaagtgtgcagtatggtaaccccctttcaaaggccaatagcaaggccacgcctgacttcaaaatgaggttatgctttatgctggagatgcacagcagaaaacagtagtccagccaggtggggaaataaagccagaagagacagtatattttcaggagcaatttagtgcttgattgatcttacgatattgttagcgtagtgtttatagctgattgggtttacctgaagcaactgaccagcactccgtgtttggaaacagtcaagggagaaaacacattgattagttggtaagttaactctgtacctccatactctaaaattagtaaatcagcctgtcattgacagcttggaaagatgttcctgtgtctcactgatccctggccagggttgccaggactttctctttactttgtgttttccctggcccatcaattcttcttcaacttttgtgacttttttaaaactggctttattcaatttttgtttaactgaaaggcacaggatgcaaactgaatttataggatgttttatagcgagaataaaaggataaatttcaaaatcatatgctaatatgtaaactgaatttactcaaaacattccttttgttttgtttttttgagataggatcttgctctgtcacccaggctggtgtgcagtggtaccatcatggctcactgcagcctcgacctccgagctccagtgatccacccgcc

SEQ ID NO: 131298 - DNA, 2740 bp, Homo sapiens
acttatcaaaatatacagtttaccaatgtgcaatttatcgcatatcaattatagctccataaagctgttaaaaaatttatatatatatatatacatatacatacagtaagggaaggcaaggagaatgacccattaatgtgtgggagtaataaaagagaaattgtacaatgagaggctcactctcagagcggcctcggaaccccagagaggttattattgtttgatcagtcagtcaacaggtatttattgaaattcttccaggtactttgagagaatgagagatgtatgtgagcttaactgtgcctggtagtgggacccatttggaaagagctgggctctggagttagtctgatgtgggtttcaatcctggttttcccactccttgggttaaagcttttgaactcctttaccttctcttagcttctctttagtcctagggaaaaatggagatggcagtatctttattttagggtcgtttgaaggattagcaataatatgtatcaaatgcttggccaaagtgtggggcacatggtaggaatgcagtggcagcgattattatcatcactttaattgcaaaactggaagttcagattccaggaggaggatgtagttgctgtggactggccttctcaggcaaaacttcacttggaataggcttggaagactgtataggagttacatgaagtggaatggtttgactcaaagtgcagaaatgggactacataaatctgttaggtttcttgaggaagtaggggagatcaggtaggggaagggcaagaaatcctacttactaggaaagatggcttcctagctagtttggggcacaaatactcaacagaccattgctatggtgaaaatggtagaaatgagaagagcaatggagggaggaagacctgtgtcatgaaaatacttatctgactgttcagcattattgatattgtggtctggatgactctgtgtcatggagacttgccctgtacattataggatgtttaacagcatccctggcctccacccactggatgccagtaggtagcattcttcacccccatacacatgacagtcaaaaatatctcctgactgccagatgtgccttggtggggtcactgaagaccactgctttagtaattagactaagcatcagtgaagatgagattttcatttcagtgttggaagggagaaaggagtggagttcatttaaaataatagaatgaactgctctaattatagaggtgtagcagaagtaacatggttcagagcattgacagcaaggccacttataagctgtatggtctttggcaaataacctgttgtacttcagctccctcatgtgtaaaatgggggcaataattgcacctaccttaaatcagtaagttaaattgtaactgaggccaccgattatttgcttaaagaaaacagcattactcctcctttattggaaagactttgaagaaaaggggatcttcctgtctctagctctcttgagttgttttttaaaggacccatcttttgaaaagacccgttaaaaaattagtcagacatgaggctattgaaagatcaatgtggaaaatgtactttgtccctgagttgattctttttctctgggcccactgaaagatcttcagattataatgtaaaagtgaagtctttttgaacagagcagaagaaaaggatatcaagggcatgaagtggatgttactgaagggagtcgtggtgtgctgtaaaggaactcctgagagggacattggccgaagggtcatctccctcttcttggcactgaacgaccaccacagaccacaaaagggcttagaaccgacctccatttcaatgggacttttcagtgacacttgagacctcgtgtcatagccagtttgtgaccattctccaacccaagcattctgctgcttttacaacagattattttagaagctgcttaggagatgctactagggatgtgtcaggcttcaacaaattaggatttcctccccaccactctgatgatggtgagaccagcatggagactggcagagtgatgaatgcattggcttatcaaggtcatgagtggcagccggctgcattgtgtccccaattcaaacaaggatcccccaacactgcaacagtctaggattgtctcctaaattcttcacattccaagcacacaaaggaggtgtcctggagccatgtaccttggggaaggcagattatttgtaagctcttgtgttgccttcactgcagacagatgggcctcctctatcctaaacagaggctatttaataacgtttgcttcttgttaactttccttactcacctgatctaatgaacctatgctgctttggaacatcactggaaatgtttcagaacaaagcaagaatcatttggactagtacttcttttggagaggtggctattaaatggggtttaaagtttttcatttgtttgtttttttacctcttagatttggagcttcttctatggccttgcacatatcattctgtgactatgatgcccacattagcccagttgtcttacaagtatgtaaaatccttccagcagttcaggttcatttggcattcttgttaaatgtactgctgttaggactggaatgagaaaaatgatagaaatacaagtaaccataaaacaaaactagaatagaataacagacactgaagtaaaaacaaaatgtttatccatattttgtcattcaggcctattcattgaaataaagagtacaaagatttta

SEQ ID NO: 131299 - DNA, 1241 bp, Homo sapiens
gatcctcccgcctcggcctcccaaagtgctgggattacaggcgtgagccaccacgcccagcctcactttagattttttttttaaagagaccagacattttttgaacccctcaatatgttaggcactgactggagtgcttaacaatcctagctacttagtgggaagactgccttttctttcttctttttctttttctttttttttaaattaagatggagtttcgctcttgttgcccatgctggagtgccatggcctgatcttggctcactgcaacctttgcctccctcctgggttcaagtgattcccttgcctcagccctctgagtcgctgggattatggcatcagccatcacacccggctaattttttgtatttttagtagagttggggtttcaccatgttgaccaggctagtcttgaaatcctgacctcaggtgatccacctgcctcggcctcccaaagtgttgggattacagatgtgagccattgcgcctggccaagactgccttttcaaggctcttaggagacttgttatggcccaggtgtagaacataagaatggaagttgaacattcacgaattaaccaatcacaattcagcacataactgttgagcatctattatgtgatgagggttaggaaaggctttttagagagggcagtgatttggggtggaggaggagagcagtcctgtccttcgtgtctgtgttcacctatgatcatcataaggaagagcatcctggaggacgttcctgtcctgtatcccagggcctgtgtttaggaaaccaagtcacacctccatggctttttggtaatggcatagttggttgtgaggagttgttctcctaagtctgactgagtcgtcatcctgtgctcttaagctatgctttccaagcccaccaggcccttcattcccagctgtggttggaaagatacataaagttctcttccaggctctcttctctggtagaactccttgacaatttgccttgtcaaagcgttcttctgataatgtgtatgtctagttatcacacctgccatctttttgtgggaagcttactgtctaggccagaggaccccccagcactaggctccttcctagccttcctcatggatggtcacccaggcttgaattacagacctttctctccttcacccagggccaagtacttctctttcaaacggtcccttttcagacttgcccgcatgtgtgaaaatacaaggggtagatcttaggggcctgat

SEQ ID NO: 131300 - DNA, 3665 bp, Homo sapiens
tttttttttaatgaagctgtaccattgcaagccattttctctctctaagtttcctgtggaatttctttccttatcaagatagtaatactttggagttttgaatttttaagagattcagtcaaagcatcttgtcattttatccagttgctccacttcttaatctgtaaaacggagatagtgtctttgctattaatttttcttaagggacacagaatccaaatactctttgatctacaaatcttttgcaaagatgcataactgtttactgaacattttactagaagtcagcctgttgcttttaaaatctaggaatgttatttggcttaccaactaaacatattcatattttgcttagcatgccccctttcagatgacttgctgcagaataatgaggtgcaagttgaacaaagtacttttcaaattaccacaggacctcaccagttttaccacttacctccagatgtgtggaggccatcatgggagaatttacctttttatgtttggacatttttgtaaaaagcttgtggtgttgaatcaatgggttatgaaatggttttaggaatgtaacgagccatcccgtgattctacagagagagacaattttatgagcacattttctattgaatgtgtttgctggttgtacttgaaccaaaccaaacacaatctctaaatcataacacatacaacctctcaacttggagactcttgatttacaaatgtctctctgtgactgaagtggctgccaagggaatcaccttccctattttggttgaatgtgtttttaattttgcatgagctgtctttgttgataataataaaatgataacagtaatttcagcctttattgaatgggtgtgccagccactgagccacgtgttttgtgtgcagtgtttagttcacttcactatggtgccctaataaggatggattttagatgagaaaaccagtacagggagaagggaattaacttaccccaagtgcctcagtcaaagtttgcagaaacactttttgtggaattttttgtctctgtgatgcttcctcatttcagtctcaggcattttgcctgcaaatccctttcacttgagaacacccattgtgcaaccatttctgtttttggtttcaccatctcatgatgtaaagaaagggaaagtgataccaggcagtgtctttttactaataaaaggcagataagtcttcctcaaattgctcttcttggtgaagaataatacttgtgctccaaatgctttggtgatgtgatttttacacgaagcagctgagccaggtggtgttccagcttgttcctggacatgttgatacagccctaattgcttaaggtatgtgcctcttcttaatcatctctcctttaactggagaactgtgctacattatgacctggaaaatgggggcattaaaagcaaccccaaatgtaaatggcccttaccagcaagtcaccagctgaggaaatgcagacgtcacatgaagagaacctccttgatcctctaaggcccctggggactggcttcctgagagtgtacaagttggtggttgccatcttagttattttcagggcccaggtagatgttatgagtggaatgcagagtggtaactgagatggttgtcatgcaagaaagtggggccaggggactagaccttcgagtctttcagaagttggaaatgtggaattttagggaaaatctcccaatttccaaaaattgggatcagttcaaacattcgaaaaagtcggaggtccaaatcaaacacgtctgtgggccagaatcagcttgcaagaacccaatttgtgaccactggcttaagatgtgttgataaatggatctattggtccttgactaaagggaatctaggaaagatttgttttatttttggggggtaagaacataacgcataagaaagaagtcacttactcatttttacctgagagttgtttatttgtcttgtgaaatactgaaaccttagcactcattgagcgctctgtggtagcaagtgatttgtgatgatggtagtatttttggagaagatttttagaggttcagtgtggttctaagtgtgtgtatttgggtcctatgtgtggcagtaaagaaatgtgttctttggtgaacagtttttgcatccctgtgttcacctgcatggaattgcaagttgtttcataaatggatcactagtatacgcagaggctatgcattgaggtcttttctctgtattatcctatttatcaaccagctgtcagtcaaagaaacacaaacatggtgagtattatgggattaagggatttattatagaaattggtccttcctcaaatagtagaggagctggcggaagtaaaggtcttgaaggaaagtgagaggattagagaaagtttcaccagaagttcttgcgtagggttgggcaggtcagaactgcaggatgctgatgagggaccatagcagggaacggatgaaacattccaaaagctgctgctgcctctgtgtctgtggagttccaaaccctgtggtctgcagccatgtgtctggtgctgggtggagcccttgctgctcaacagggccgcttgttaggaagaaacagggatcagagcagaagaaagcaaagacaagctggaccccattgggcacctgccgttgtccatcatggtgtttccatcaaccttatgagagtggtggcctgttttcaggttcactttccaagtctcattaagctccccatatggctagccgtaccccaggaccatagcgggaagggtattccattaaatgagagttcctggcttaccaagttgacagttgtatgattcagtgtactctacaaataaggacaacatccttaggactatactgccgtgagccgctggctactctcccctgttgccctaaaaggcttgtacctgctctgaaacacagtattgaaatatcaggatttggaacctctgccttggccaggccaaagtaggtgtatttctgtttagggtcctcccagcatagtaccagcaatttacatgcacattagattaatgattttatctgatctttcttcctggaaaatttgggtctggtggggtggagaaaagggaggtactcaagaccatcatacagagaagcagaaggggagaacaagagaaattttggaggttggattgagggaagctgaactcaattttaatttgggtccagtccatgtaaatcctctacttttttgtctgcctgcctgtctgccaatcaatcaatcagtccattcattcgttaatcagttatgtatatctatatctattaatatttttctgtagatctatacctatcatatccatccatatgtttatattatatttacctaatctatttaatctatatcatgttatgcacatatatatgaaacatttttgagtggaaaattttatggaaaaagtattctatataaggtggattagtaatcctcttttgaaaaaaaattctagttcttctcaattgtgaaagatatgtctaagctttctaacaaaatgaactccaaacagtcttagatgtctgcctctttttaatcatttagtgaaataattggtttctctttttatgagaaggtgttaggataagtaagaaatcctgatacttaactcgtctgcctattgcttgactacagagttattagagttcagtctttgc

SEQ ID NO: 131301 - DNA, 1360 bp, Homo sapiens
cagttgtcatggttcacctctgtccagactgtgattgtgtgactcgcagttggcacttcagcaaagcttaggaaaatgcctcatcttcttttgtgggaggtggaaaaataagtagctgctttcaatgaacactgcaagccttgttaaagtctgtacctttcatacagaaactcctagatgaatggcaatggaaaatacgggtttgtgataactttgaatgatgtgtgattgccttgattagcactatagttactaagcagatatgcacttctttgttttaaaagagaacttgaattttttttttactataactgccagttgcttaatttctaccactttgtctatttttttaaaaaatgaatttccacctaatttgtgcttgtcagtgatgacaagttttaaaagtaactcaagttaaaaaaaaaaattctccagaaaccatcatctgtcaaaaagtttgtatttaatgttttctttcaggtagaaatgagacattttctccttcttctttccagatttgcacccttaatgttccagaaagctgagcatccatattattttgagtttaggaatttatagtgacctagtcatagttatgaggtgtttgagggaaatgaagggaaggatgagtagcaaagacacattaaacagaataaattatatagtcttgtttttggcaactagtctagcatgcagtttccttgctttgttcagtccacatatagaacaactctgtctaaaacagtgatccagttaggccagtttcctgtttaaaagctttctggaccgtcccttttcctgctggcaaaaccccaggctttgagacatagttctttctaaactgaccctaattattcttcccaggtcatctttactgccactactgttccttgtgaatatttcgcatctctgggctgttaacatatgattccttccactttgaatggcttgtgaaaaagacgggggtcttttcacaagctggtgatactcttttcagtcatgtatttagaccaaatcctctcactttgtggagtcttggaatagtgtccacgtaaggctggcctggttagtttctcctctgcttcctgagtccttgagtggtctttgtatatagcgtgaagtgcacagcattgggaagtctgtgtctgcaagcccatcaccttcactaggatacaacattttcatctttggacctctaggctaaccggagattgaaacttacttggcctctacctaaacatttcttgagcaactcagtgagctgtccatgtagtttagcagacgttccgatgattgtttcatggagtttgtgtcaacggggaaggactgctgagaggcagaaaccataatgaccagaaag

SEQ ID NO: 131302 - DNA, 1038 bp, Homo sapiens
tgtaatatattctgccgcctaaaaataggaaatatatatccaggtttaggtgttaggcaagtttttcacttctggtttctatttatcttgaatgtattgcattagccacactatttaacatggggattaaaaaaaactgctgtgcatgttctcacttacaagtgggagctgaacaatgagaacacatggacacagggaggggaacaacacacacacactggggcctgtcgggggagagcggggtggggagaacattagggaaaagagctaatgcatgctgggcttaatacctaggtgatgggttgataggtgcagcaaaccaccatggcacatgtttacctatgtaacaaacctgtgcatcccgcacaagtaccttggaacctaaaacaaacaaaaactggtgtgatctccctgtaagacaggattttaaaagcatgtctacatttttgagttttctttcaaggtgccaagaagaggctgaccacattgtttgaagaatggttaagaacttgaacttcggagtttgccagacttgcattccaggctcagctctggcactgtaagctctgtggccacacagctttgccgaaccaacctgcttagcagtaaaaatgagaataataacatttccattgaaaggtgttatgaagattaaatgaaagtgtttttctaaagctctagatatatagtgggggcccttctcaggtaatcagaaagttgtagttgcagttttgttactaatattgcaaatgctctgaaaatgtgccaccatggctatgtcttgtagatggtgacttaagcttaccttccacagtgggaaaataaatgatttatttccctttaatagccatcactctgttgatccagccctgcaaagcttacagcatggggcttatgaatcatgaatcaacacaaatgtcaccaagctaaaagagagttagcagaagtagcctatgttaagattaggtttctgatttaatgtgcagtttctaaaaaccaagtagcatgtaactggtcttatccttgctgagttaagat

SEQ ID NO: 131303 - DNA, 1151 bp, Homo sapiens
ttttaaataactgtatgtttactctaagtagatatgtgtatgcatgcattcacttatgatatgcacacacacacacacacacacacacacacacacacacacacacacacacagaaatttatgatgtcctttaagaatcttgggactatcagaaaaaagttaagtgaaataacaattttcaaaaatacatttttgtagtaaaaacgcaccatcggtgttacattactgtataaatcaaatttgctgaagtttataaatatttttatgtttactttaaacttggacataatcagatctatctgctgttgacgacatggctctcaatataaaaataatcaccttttctgcttaaagcctcattctcagaagtaaaatgtgtatgtgaggatattaactagttcataggattgttgtagaaaaccttttacatatgtggatactgaaattcttatggcctggatcagtggcctggatcatagctaatctttatgaaaagatcactgtattattacattgttactacaggtagattttcaccctggtccttgcatgaatcatttggttgtactgtccatgatgtccagtagtagattaaaaaaaaaagaaataaaaacaaaaacccaagccaatgcctacgacgttgctacaagtatcctttaacctgtggtgtgaagttatttccaaagatgaagtttgccattcaaataccatttcctggtgttcatttgatttctgtaacacctctttttctatctccgctaactctagatctgtagtccttccaaacatgctacctaccacttacactttgccaaagtgtaatttttgctctcttatctgcttcataagagaatgtttgtagtttcatgatttgtaagtgggagggggtgcttagcaggagttgagatcaccagcccagggaggaggaaatggaatcagaataagcaagaggaatagacggggtactgggctgaagagcactgtgggagggtgctattagtgattcacactgctagagtgagaccactctttgattctgtttgtagaaattttaagctaaaagtgacagattgttgcctctctttatgtaaagtattacacatgggaagttaacctctgctacaggatactgatcaagacaagtcatgggc

SEQ ID NO: 131304 - DNA, 3035 bp, Homo sapiens
ggctcaggcagttcttgtgcctcagactcctgagtacctgggattacaggcacgtgccatcatgcccagctaatttttgtattttttgtagaggtggggttttgccatgttggccaggctggtcttgaactcctggcctcaagtgatccgcccaccttggcctcccaaagtgctgggattacaggggtgagccactgcaccctgccagagctcatctatttctgatgaatgccgtccacagcatgcttcaccgatggaggtgtcatttcatttctctttgagtaacctaaaattagttagcgtatgtcactaatgtatagcatatgtcactaatgtataacatagttctaatcaactaaaaatttgtacagactcctagatgggctactaagtgaatatattttcctctgtcctctggtggacttcactacaacttttacatatttcgatactgaaattcttaatagatttggcttcaaattccagcctgatgagataatattggcatctgcccctgaagtccagtatcaggtcattcttgctccacttcaggcttctttcaaatttggtaatcgtgctcctcgtgtcttggatggctatattggcaagtcagaacccttcaattcatctctgtagacctacctgccttgggttcccgtaacccattagtaagtccctttgggtaagagttcccactaataatgtttttctctcgatttctttatcatgccttgaaactgacttgaaacattttgttaaatgcctagctaaaatcccaacacacttgtgaacagatgttagtatgatggaagaacagaaaaaagacacggccaagctaagatgttggtatgattaagttggatgaacagaaaaaatgtgcagccagatctatctccagaatcaaccaatttccacattgctttcgatctcatcctattatgttttctgtaagtaaaacttccactgcaaatattaattgatgttaagtcaaaagtactgacggtctggtcacaggggcttagggagaaacgagagaagcaaaaagggtctccccccttagggtaagctagagtcttgctgggtcagacaattaggcaacaatgtaaggcagtatataattaaatgctaaattatgtagagcagattatgtgctatggaatggagaaaatggctctcacaacatttctaatgtcctaaatcagtttcctaaatcagaatggtttcatacatccatatgtacttaaagcatgctcagtatcattggtcctttcctgcttttttgaagccatggtaatagtaaacattttctaagtatctactgtaggtcagggaactggtctaagagctttacaggtatcaactaatttcatgctcaccgtgtacctctgagataggtatgcttttctccattttgcaaaatgagggaaccaaggcggggagtctaatacctgcccaaagtgagtaatgataaattccttcctctttttgatttggtgggtctgtggtgagggtagactaggagaggcagtgttgcattctgggaagtgaacctagattttcatcctggcttcttttaacctactcacctgtgtaattaggaccttgggcaaggtgcatcatcttttggagcttctcctttgtaaaatgggacaggatgctgttttaagatttaagtgcttcttatgcaataggagctcaaagagtgggagctgttgtttattaaaaataacaatatcattatcatattctctacctaaagagacctgttgaaattggacagaaaaggaacgtttctgtcttgataagtcttaaaactccagtaccaagtgcagcattcgtttcttgtgagatatttgtagaatgggtggatagaaggatgggagaggagaggggtctgaagaattcctgtagcaagctaaagaggtatcatcttccaattgagctatttttagccttactcatcatttgtaatcaaaacaatccttttcttagccttactcctcccccacccctgcccccctactacttttgcgatggtaatcgtcattgccaacttactttctttggaatacacaaacagagctgtctctttccgtcatggagattttaacagtaaaaaactcactgcaccattacctctgccttgtattccagacaatagtaaaggacattgtaacatcactgtgtcagcgcaaacaaagaactatgtaattttatcccatattaatacagtgtcacgcaggaggtactatcattagatggcaatctataaaaatggcccctgagaccaggcactggcacaattatttattcttcaattatttattcagtcctaaggatggaaatgctgacagacactgcaaaatgctctacctaccaatttacagaaattgaatgacggaatcatttgtggactgaagtagctttttattgaccctatttttatttatttaaattctcactttcacagcttaactatgtttactacacccacttacatgatagaaatgagaggctgttttgttcataaaagctacttcaaaacaaattaatatttattctgaaagggtcagatcacaaatggaggctttaaaacggcctcaggaacattcaaatcgcatccttaatatttcatatggttttatatttagattggctattttatgtagtcttttttccctttttagtgctcatacctcttgagatcccttttctagccaggatggagggaacagttacacatagcttccatttgcagtaagtaatttcaacttaatttatgtcaggggagatttccagaaggttcccgctcctgtctgctattcttgtgattctaatatattatttgtacatgataaaatacaattcccattaattcacacttaattaagtcataaaagaatttgtttggtcttaactcctaaagtttaaaagattatttgcatttgtattaatactggagtttaaaaattatggctttctttatagatcagttccgattttccctaaatcagttattttcagttttgattttt

SEQ ID NO: 131305 - DNA, 1077 bp, Homo sapiens
gtcgttagaaacactgtgtagggtgcagcgtcccctcattacaaacatttctgtgccttagaggacactcctcctgctatgtatccttaggaggaacacatagatcagcctctcttccttttgtccagctgcagtatcgggaatggagacacaacacggtcaaggtgcctaaaactagagtggcctggggtgagtctagacttgatcttcccagatactgtcccttgtcagactccaacactgtgcacagcctggtctctctgggcccaggaatttgggcacttgcccaaagattcctttgcaggtgctcctggaaatcagagcagtgttgaagcaggatttaaagcagtaacatctgtcagatgtaaccatggcattatatctgagacaaaaaattgtaggaggaaaaatgcctgttcggagtgtggggttactgaaaacccgcttgttgactagtgttttattgtagtgatgggaaatgaatgagactggtatctacacctactggcacgggtctgaataaaacccacagccggctctcctctccctgagcttccagccttctgtggtccagattttcatattccttccaatttgcccagagcaagctgtgaccctcatccatcttttttttctcgttttgcatttaacagagttgtaaagggatttatatgctttccattagccttagcaaagctgctgtcatgaatatttaatggaaaaagcagtttgttttcttttactctttcccagccttccctccagcccccagctctccctttctcttgcctggagaaatgtaaatatctcgcccctcaccccttggccggatcccaaagccccgggctcgctcaattcaatgttctcacccgtctggtggggactttttttttttttctctcttctctctctctcgtagccccctacgaggcaactaaggtggtggccgcggtgcgcggggccggacacgcgtggggctctgcctggcccgggcctccgcgccctctgcctgcaccacagctcagcagcccggacagacggtcctttcctttgaacttcacgggagcacaatagctt

SEQ ID NO: 131306 - DNA, 1999 bp, Homo sapiens
agaataattaagacctaaatcttctgccgaattctgtttggtttccttatttcttttgccatgttctttcattccacaaatgttattgagcacttccagtgtaccaagccttgtgtttactgctttgatgataaatgcaataaggtaatgctgcttttaaggatccttcaggataggctcttgtagcagtaaggacttagtatttttgctatagaagtgtatggagagctatctatggtgcaataactgtggaaatacagtttttattctatttggttcccatatacattgagtcctcctttggtgggaatttgatcaggttggtctcagttgaatcctggctgcatatgcctcagtaaggaagaaggcctaggggactgtggaaagcctggtggtggtcctggaaggcttgagaatacctggagctggaagctccttgctcattggtgacctttttcatatgcagcagagctcttggcattcctagcatactaccttgaaaggactgtgtcttgcctcctagaaattctggacttggtagaatcatttgtttatgttattttaaaaagaaaaaaaactctgaaatgtactttttggaagaaaaatgaacttgtttttggacttttctgtgtgttgtttctttaattgaaaattctgtctggagattgattttcaacccccttcctttccctctagttttaaattgtaacattgctttccaagcatttcaaaaaaacaacaaaaaagaaatattttattattactctatttttatttgctcattaataattcttgattttctatctatatgaaatcaaagaaaaattactgtataattttcatccagttgcagtcaattctataactgaaatacaagataaaaaataagtaattgatttacttaagaaacaaaggcatctcgacctcctaaaaatttcatcaaatattcactcggcagacccttctttgtaataggagctcacttactattgtgagcactgacagtgtgagcacttgtggcagggattgggtttcctgaggaattcataagatacttgcattgcttctgggcatgagggtgaataacacagccattggccttcaaggcctttgaggaggtgttctacggggagaggggctgagacagacatattcctgaaaggaataattactgcgtgatagtggaaatatacacaaagactttgggagtaacagtgatggagggacccattgaaaacttactaacgtttacagctgttgttaaaattcatccaaaccagccaattatatctacattctctagaatgaaagtacaaaatgattacagtggatgttctaaacaccagtgttgacacaatccccttttcctactggaatggggatctaatggggaaagtgaaattctttctcaaaaccttatcggtgttgataccttacatgtacatgtaaaagcagctgactttgtgttttgtggcctttgagatcatataactcttataaagcaacttacaaattttctgggaggttcttttggaatattgctttatgttttgttttaggaatatacttccctctcccctgaattatctcagtggggatatataaatctactccctatccaaagcataaccatgtatgtatttgttttctctttatcatatgatatagtttggatatttgtcccccttaaatctcatgttgagatgtaatccccaatgttggaggtggggtccggtgggaggtgtttgggtcatgtggactgatccgtcatggcttggtgctgtcctcaggacacaatgatttcccatgagatcccattgtttcaaactgtgtgaaacctctcccctactctctcttgctccttctcttgccatgtgagatgcctgttcccccttctgccttgacttaagcttcctgaggcctcaggagaacccgagcagatgccactgccatgcttcctgtacagcctgcagaaccatggccaattaaacctcttttc

SEQ ID NO: 131307 - DNA, 1044 bp, Homo sapiens
ctgtctaacctttgaactttctgtgtttttgacatcaaaaggaactctaagctttaccaaaaaggttttattcgagtaattaatactcttcatgcacagagggaaattagcctccaacttgtggacatggtgaaaaattagtatcttcccatttgctcggcttgtttgaactatagttgattatttttaaagataaggagatcaaatttccttaatatttcagtatgttgctttttgtacccttaaaattattttttcctatgcagaattgactttgattaaaaaatgtttttgatgactattttcctgattcgtcagtatatctaattgtgttcattttactcatgaaaaatcttgtctatgagggacgtatttttagtaacatttttatagcatataagaacttttacagcaaaaacaggaatcattaagtgtgtgtgcttttatcataacttctcttttaatggaacttaaaatcttaactcgtgtttttgcagcactttttttgcacatggtaggttcttaatatttgaatggaattcagtgtgactgttctttgtgttctcaaaagtctgatctttgtaacaatttgtctttcacttgagactttttttttctttgcatatgtgcacgtctcactcttggttttccttaatcttttttaactaaacacatctatgactcatatttccctatttatgaataggagcaatttaaaatttcccaacatggtggtatgtgatgtaacataaccaaaggctacatgtttacccttgtttaattacccttcatttgtggaaagatgacgtatgtatttatgatgtaaatgtctttcagaatgacctttgggactaagcttttttttttttttcccaccaaaaaatggtcatgacctaggaagccttgttagtaaaatttaaaaaggaaaagttggctgggcatggtggctcatgcctgtaatctcaacactctgggaggctgaggtgggtgtatcaattgaggtcagagttcgagaccagcctgggtaacatggtgaaaccccgt

SEQ ID NO: 131308 - DNA, 8465 bp, Homo sapiens
actcttttgtaatttctcttattagaaaagaagattaatcatatatcaaacacgattccatgtcactccatatagatctttccctcattctgtttttacagctataagggagtctgctgtgaaaatgctccttcgattagtttataactgagtgtaaaatttggcatttcactcttgattatagtctttttctgtatattcacccccaattctttgagaatgaggagtaccctaattttgtaagcaaaattttggggggctttggggtgaaaactaatttaaatgcttattttctcagttgcctacctccatttaaaaatcagttttgagggctataaaaaaaccttatgatattaaggcctttttttctgtataaaaataacatacaatttattttttccatttattcaaaagactgaattacactagccaagaaatgatcagtctcgtgtaaaagaataacacacgttctccttgaatcaagactactctgagattcagaaatgccagtagcggaaggtggggtgtgaccccttaagtaagtgtgactagttaaaggtgtatggatattctttgtggaaagcgggctgccagatacaatttcaggctgtttcatattacttcacacggtgctttcaaactgtttattttctctcttggcactagtgagtacagctcataactggccagataatatctaagtctaggaccaggacagtgaatgggttttaccatgatttgatcaaaagtaaacaagaaaacaaaagcagaggaaaaaaaaaaaaaagagaaggcatcacatttttctcattgtggggctaaaatgctgcatgttgaattttcactttctgattagaacccacagttgaacagatctgatttatttttttggggtcaggaagaaactgtcaaattttagtttgactgttcttttctttaggtctcccccctttcttcccctaccttttttttttttttaagcattactatattaatcagatagcagccactgtttgacatgtccttctgtggtggctgcagattaagtctgaaccgtgccagaaatctcgttgcattttttgatgtagcagaaatgaacctggttcattccatcttaacagctttagccaaatggctcagaagggatctacccgatttcataaagaagagttaatgtgcagtctggtttaatacaggtgcccttaaaatacatttttgttttgttttgttttctcacttccaagtttaacatgtccatggacattggctttagtttccccaagatgagtccatgaatgaccttgttccagtatcccttgctgatttgagttcccaagtaataagcctgggaatgttttcagtgcagcagccgggagaagaagggggattcagcagttgctgttcaatgcatttactctctacctgctggcttcaaacagtattaactttatgtgctccttgtgcattgtgtttaattaaaagcagttctcttcacagaggcacttgtaggatttttttttttttttttttttgccctgaaacgaataaaacaaataggcgtctggtatttgttttgtataacacaatccccataaaatgaagagtaataaaacataattatctgtaaaggcttgttttataagcctgagaatgggcttgtttctaccaggtttttatgttcattcataggagaaagaatctctttgtacattaatatgtaacaacaataagaacaaatgcttcccaattacatgcatgaatcaaacttatcttttattaaaaaattttttttctgttgtagtaaaagtttgtcattaaattctttctgtgtaaacacattagattgaaggaaaatgttttccttcaatattctgttcaactggcataactttatgatttttttctccccagcataattaaagaaacaactttatggttggttattgacttttttaggtcagagagcactctgtggattctaaaaccgccttccagaaaagtacacatcaaacttctacgtacgtttttatagggtttgtagagctctgatccttggttaaagatccctgacaatgtctaatagctgttttgaaaactgtacctccaatctgaagctaaggttttagttttagttttagtatgtgaatatctgatgaaacgattcaatggttttgtagcattggattcaatttcagggttgggctcctttctaggaatagaggaatattcttatctcaggaaaaaaaattcagagtgtgggaagtacgaaaattattaattcaaaggtgtatttgctgtcagattggatggcagtacccacatccctaggggctcctgttcccaagactgttttcattgtttctatccagcgctgggcacgagccttgaagtggcgaattcatcctctgaagttgtgtgtccattgctgcaagaataaaagaagcagtaacagaatcatgcagcgcagtatttcatggtgacagttttatgtggttgtgtgatgttgcagagtcttgtaggtgatatctacccttttcttttgaatcaaaacacggggttttactggaggagggaagtttcagaaacaacctagtctaacacaaaattaagctcctaaatagttatcccattctgtctactacaaaactaattgcttacaggaagtagaagtacacatatctaatatttatatcctgtttgagtagtggtttctaattttagatttctaacccctttttacattatctttttgcattgaaattatactgaaacattcatattattatgaatgcaagctgaattaaatagaccaagattctcggtttctcccttcatgttgtcatctactagagaatgaacagcttaaaataagtgcatcagttcctcatccaaagggaagctgaatattccaattcaagatcactttgcgtgcttactggaaataccatttttgaacgtacttggcaacttaaagtgcccaattaaaagctctgttgaaagaggaagtctgtggatgtgcaattagtccttaggattcagagcatttcctttatgtgtggaaggccataatatgaaatcactggtcacaatagctttatgccaggtgcttagactagaaggcattttcaggatggattatttctgtactcttgctcctaaaatggtttacctaaagaggctcccaagtccataaaaatactggtgatgtcaagaaattttggaggtggcctttcacaaattttaggcagtcaataaatataactagccatgtacgtgataggcaatacacaagacttgcttatattcctagactttctattttatctgattgacagtgttcctcttcccacctttttattcatttatttatttttaaaagatgaggattgggtaccagaaaattagccagtattgtgtgcttttccttactaaaaaaatgaggcctcgctgagtagggccagatgagctgtatattctgagattatttatagtgtttatgatagagagaccaaaaacagtaagcacttaatagctttccttatttacaagtcagattcatctaagggatatttttcttttatttttctggtgcttgaaatgttcctttaaaatagattatcagaggatacacagtgacacaaaatttgttgcttgtgaaaatgcagagtggattaagcttttctttttcaaggctctgcaacaaaacaggtacatttttatttcagtaaaaacactgctttttttttttgcctccgtcacacacacgagtaacataggatagatatgtgtatgtgaacatgtggctcttgttcccagttgtgtaatggatgcattcccttaaagtttgcagtaaagtgaatgtttattaagcaaattgtttttccccagtgacttctactgtaaaaatggcattgtctttcagtaggctctgaatatagtatgttcccatattctttggtaagatgaccaatcaaccaaaaaaaaaaaaaaaacaaaaacagccccaataacaaacaaacaaaacaaccctttaggtaccataaatctataggaaatactaaccttctgatgaagctggcccgatgccacttattgttgtcccccacgcctaagctatggtatatggctttaataacaaaatggcaacacacaatagtaccacaacctggagggtgttactctttcttctgctcacccttcctcccattgttcccatgggagagaggacagacaccaaggctgtagcaaataggttattttaataacctcagcatccttgtttctatatgatatacatttgatagccaagttgaatttacccacctctctctaaacactttttcctaaccctttgtcaatttgtcacaccatctttggatgaagagtggtacctgatggtgtatgatgcttaacaatcgaaacatctgtaccttgttagccataaaggctcatcccatttccttccataaacatctattgtaatacaatatggattgtgtaaggcactgggctttaggcccccagcccgaatatctgtcatctattaagtacttactgtggataaagaaggcagtatacttaacatgcactatttcatctaatttttgcaaaagctctttgagtacattaggccagtctccattttattaatacggatgaggaaagtgagaccaagacttgagttcaatgacttgcccagagtcgtgcaaagcataaggggcggagtaggatttgaacaccgcatgaactgggctctggaatcaaacgcttccctaatgccatgccctaggtctcagcctggactgtgctcccagagtcacttaagcacttttcaaaacactgacatatgtggacccagcatttcgaggagctgggctctgggcatttgggttttgaaggttttacaagtgaccctgatgctctgtcaggcaggcttaataacgactgaattatataacatgcccagcttggtttcttgcttggttgttgaattgctgcatgaaaatctgatccctgcagtctttgagcctgcagcccagtgaaagagatggatgtgcacacaaccaagcatgaacaagatgcattatgacaagtactatggtagtacagactttgtgctctgtgataattcctatgacacgacttgcagttgatcccaggaggtagcatctgggacatagtcactttagcaagtcctatttattctagcttgggagagttccttgcatcttaactctgtatactctgtgatcaccagacagtcttggtctaggttattataaaagtcctagttgaggatcttgaatctctcccattcagtttgactgagagagcttggtgattagatcagtggtttgtatattacctcatttgtcttccaaactaatagataagttcctcaggatccactccagtgggattactaggtcaaagataaatcattaccagactggttgatggtatcacccaggctggtgtgcagtggcatgatcttggctcactacagcctctgcctcccgggttcaagcaattctcctgcctcagccttcggagtagctgggattacaggtgtccaccaccacacctggctaattttttatatttttggtagagatggggtttcaccatgttggccaggctggtctcgaactcctgaccccaagtgatctgctcgtcttggcctcccaaaatgctgggattacaggcatgagctactgcgccccgcctccctcttttcttattgagacccattgaccaatagcttggtcaatagtgcttgattcttgagtttagaaaacttctattgagcttcttactatgtcctggggactgtgctgggcagtaagaacaccagaaagggtgtggcgtcttaggagcctattaaactagattaggaagagaggtgttgaggtgtcacctagggcataggcagagaacctgtctgcctaatgatactgggtttagttcttgaattctttatattcagaatatggattagggccaggctggccttgacaacctgaatcattaaacacttatggtgactggtgggtgattagccacataagaagaagatatattcataacagatataataggagcaatggggactcgatggagagtattaaatagtacagtgtcttccataaatgttctttaattgtggagattactgttctgtagattattcactcaggcattgagtatgcgtttattaagtgctttttgtgtcctaggctcattcacaagtctaaacttcaaatttggttcttaaattcctcaagaccagagtttagctaaaagtatcattatatcctgagatggaattttatcaaattgtatgcttaaaatgaggagatatgtctgtttctccatctcgcaagccccaccagtttaactgtcaattggtcttgtcaatcaactataagaggtgtaaaaatgtcttgggctataagtacatactccagggcgtatcctggtgacagagattgagaaactgattggaagagagtgtaatcagtagtgctggccttactgttctgaaatttctggtttctttccctcgctccaaacttaattctttcttctctattttcaatttcagaagaaatttagaatgagtgagggaaattaaaatgaagtccagaagaccagcagagatttcaccgggcatgtgggtaggaaagacgtgtgagaaaaccatttgaaatggaattaaaagaaaacgtgttcagctcactatataattatagttagcttggcctggtgttttgggttgcattacctgtaagtttggaactcatttgttgtatagaaattgataccccacatttacttaaattttgcccatctgtttcttgttaaaagaaactggacatctgctaaaatatccttgttttggattactcaatcttattgtcaccttataatggttttattttgggggaggtttattcgtattagtatgatggggaaagaacagaaagatcttattggaaaataaatttagaattttccaaataataaaatcaaaagatttccagccgtaatcttaagatgccttttcatgatgtctagttttagaaactttttttcctctcagatgtgaagaacaatgctttttaggacaatagtgaaacttacatgagaattgttctttttgcattgtgttatggtgcatgatgcgaaagtttagaaataaatatatccctggatacaacaggcctcagttaagacttcagctatttttaatgcattttgttatttttggcctggcatagtatcttaggatgagaaaatccatccccttcccctagtctgaggtcacatgttgccatcagttctctgtaatggagtcaatgatgttatggttttaaaataacgggaaattaacatttcttgtccccatgattgtggccgcaggacttgatcgtttttatactgttaatcacactcctcttttacaagaactccccgactcttgtttcccccagcagttaaatgccatattttcatatatttaccttatatctggctaaaaccttgcaattttttgttttgctctcggtttttgtgacaattttaagaggaaggcaaataatgtacagactgggttgaaagaggagaaaatggagcagttgtaattccccggggcagggtaagagactgttaatacattagtggtaggagggcttctgcagaaaatacgactgcacaattaaatggggctattaaaagcacgccagcatcaattcattaaatgacagtggcaatttctttgtaatccccttttccccatctcctcctgggactcagtatatgcagggatgaaaggcagatgggcaaagatcagaaagactactgaggaagaggtacagttatttagatatctgcttcctcatcttctttgggggcagcttctgtgatgaaaacactttatgaaaggtaagacccccaaatacctgttctgtagacattggggatgaaaatgtacatcctagcagatgatctggttctgcattccagaacactgctctgactttagaagcagttatctatgcatagtatatctacttggagctaaaacaaagagagaaattgtttgattgaaaccttcttattgcaaaagtatgcagaattgacattcagcaatcttatgtaaaaatactgcaaaatgtttctttttctggaaaacagtgtattttaaaaatcagttggaatctggttacctgcatgacctagtgagaacttcaaggcttggggaaatggttgaggttagtggttatgagtatttgatatccttttgcgtgtcatttaattgtctaagcccccatttcctcatcggtaaaatggtgattctggtatctgtctttttagtgctgctctgtaaaattaaatgagatactgaatgaaaagcattttgctcagtgcctggcataagataagtgctccctaaatattaacta

SEQ ID NO: 131309 - DNA, 1085 bp, Homo sapiens
ttttttgtatttttagtagagatggggtttcatcatgttggccaggctggtcttgaactcctgaccttaggtgttctgcctgcctcggcctcccaaagtgctgggattacaggcatgagccactgcacccggccagggacatgcatggttttctacagagtggcttcagcttccacggttcatccctagacaattttgcctttttttttcaagacacggtcttgctctgttgcccaggctggatgacagtggcactgtcatggctcactgcagccttgacttcccagggtcaagcaatcctcccacctcggcctctggagtgccagcaggacgtgtgccaccacaccctgctaattttttattttatttttttagagatgggatctccctgtgttgcccgggctggtctcaaactcctggtcttaagtggtattcctgccttggcatcccaaagtgttggggttacaggcatgagccaccacttgtggcctacttggctcttttttacaggtttttggttgacacttctctgcagaatagcacctggcacctctcaccaccactgaaaaggatggaattttatacacctctttttcctaggttctctctagcagttaccaagggaccatcggaggtacttattgtggctgtttacaaaagccttgcctccagtctgagtcacctcaccctactctctgcttcttccttttagctactctttttttcagtaaccctccctctttcctctgaaggcttgtgcttgcacacacaggcagacatactcatgcacgcgcacaccacacatgcttcctgtcctctggctctcccgtatcctatgtaaaacctcctactgtcatttaagtgaaacccttctagcacataagagttttcatctcagaagctcaattttacctttcacttttcagatagagaacacccaaggtttttaataatctggcgaatgtgttaaaaaaggacatattttttaaaatctagattgcaaaagtaatactgtagcattgttgagttcagacattatagaaagtgaaagttccctatcatttgtttcccataaccaccttgaa

SEQ ID NO: 131310 - DNA, 1601 bp, Homo sapiens
tgaaagtataagatactcacttttggaactcccaggcatggtgtggcctgggagctttctcagtttgctcctattcaggacatggtgtaagaactgtcatttgaagcctgtcattttagtcccccttgggggttttacaaatggcctagtgatttttcagatagcagagaataaatcagcagtgatttggcctgcccttcagcctagggcattccctggttatcaccagcctcatcatcaggtgcttgtattacacgtttttctgtccacaccggcaggtgagatggtaatctaagagttgatttccaacacgtgcggagggactttcgaaagtccccctagtcccggtattctcttgccctgtataattttaggggtccaggcattcaggcttggatcgtcctccttatgtctttcagggccttggaaaattctggaatttagacaggggcagtaagtcagtggctgtagcccttgaatcccatttgggaccttaactcattctaccttgcattataattatttggtttttaactgtctaggtttctgtactttcaggggtaaagctgattcattctcctctgtatcccagagtccacctccaaggtggtaggttgcttgataggtgcttagtaaatatcatatttgattaactttttgtagcctcctctttagtctagaaattctagatcccaaatagaaggtaagatatggtatattctggacttttagttttctatatctccttttcaaatacagacctagggtgacagacaaaaaaatattgtgatcaaagtatatagcatttcctttcatggtggaaaaatgtgcctgataaatgttttctctgcattattttcctccaaatatattttaatgacagttatttggatatttcacactttatactcgacttgggctcagattaagtcttgtgttagttataaccttgaataacaattaggttcatgagaacagggatggtgtatatttgtttttaatctgtttcccagcacttaacccagtgctgagtttatagtgggtctccaagaaatacttgttgaatgagtggcttttggtcatggtggccttttagtgcagaaaaacttttggatctgaattgttagatttacttaatttttttgtaataacacagagaatgttgaatagaaaaagtaagtttagaagatacatatatatatagagagagagagggagagttagatttatttatttatttatttttgtgagatggagtctcgctctgtcgcccaggctggagtgcaatggtgcgatcttggctcattgcaagctccgcttcccaggttcacatcattctcctgcttcagtctcccgagtagctgggactacaggtgcccgccaccatgcccggctaatttttttttctttttatttttagtagagacggagtttcactgtgttagccaggatggtctcaatctcctgacctcgtgatccgcccgcctcggcctcccaaagtgctgggattacaggcgtgagccaccgcgcccggccgacttatttatttttttgtaataacacagagactgttgaatagaaaaagtaagtttagaaggtat

SEQ ID NO: 131311 - DNA, 1936 bp, Homo sapiens
gtcttgctctgtcgccaggccgcagtggcgtgatctcggctcactgtaaccttccactccctggttcaagtgattctcctgcctcagcctcctgagtaccaccacatccagctaatttttgtatttttagtacagatggggtttcaccatgttggccagcatggtctcgatctcccgacctcgtgatccgcctgcctcagcgtcccaaagtgctgggattacaggcgtgaaccagtgcacctggcctcttttctttctttttctatttttactattgtgtttgatataagtatcactgaagccaaattaaaatgaaccaaagggttttgctgcataacacaaatccaaataatttattggtacaggaaaaaacattatgatctttttatcatttaacagtctgtagatattgaaacttccccccctttaattgtagtttttctcccaaaagattgatagaataaaacttttggctcacattttttgctcaggttacgttcaaactctgctaactgatattgaagcattgccccagagaatgcagtaacacagggcttaattgagctatcaggctgctaatgaattcatattgagatttatcatttaattaaaaggcaaagcggggaaaagcaaagggaaggtgtacaattgttccttccgctggcctccatttcctccatttaaaatcgtggcttgtttgtttagtttgtagaatcctgtgggatattgcatagaagtactcaaggtgcataggtaaaatagagggtgtcctgtattgcaatgacttgacttcttagtgggtcttaaaaattgattcagatttggtgacaatcatatgacacttgattaagtagaaattatgttttatgatgtttttacaaaagattaggaaggccattttccaaaattattcctaggtctgtatatctgaagcaatctgaaaattcaatcagagggaatctaatactgagatgcttttgctttactgacagagagtaaatttttcttgaaaacaccatttcttatatgctacatgtgtctttaaaattcacacctgcattgaaaaagctacctttaagcaacactttttatgataactgcatttttaagtatgcaagtgcaatgttgcaaacctgtcaatgcagggcagtcagtcttttattgattcagagtggaaatgtataatattttttgtatttagattatagagttacatgtttttaaaaaagaacagtattttatgataagttaaaatttaagtacctcaatgcttagtacggttaaaaggtggagtagtgttttcctgcacttagtttagacttagctatatctaaggagtaactcaagcagggataacagagggcaaaaggattagatgtcaaaacaaatcttaggtttctatgaaaataagctaagaaatgagcccccttggatgaaaaatatgaagtgagaatatagggagtgttggtgaggtttgaacctctttgggcctcagttttcctcatctgattttcctacacagagacctctgattgaagctgtcacatctgtacatgcacatgtatgtctgcatgtgtgttgtatgtttgctcagggaggagggcatggtgttcaactgactccaaatatttgatatcagacagttttgtctggagagaagagcaataagattgtggaagtgatcctaaaatctagtttaactcttgtgtagcgtagacaaaaagtagagatccagggaggttgagcaatttgcccaaggtcatgtagttgtgaccgaatccgaaatggaacacacgtctcttgacttccagctgaggattgcttagaggttacacataagggttctggtttgaattcagatggtgactctgtcactagctacgagaccttggtcagcttccctgtttccgttcttcacttgtaaaatggagataac

SEQ ID NO: 131312 - DNA, 1958 bp, Homo sapiens
tcataaagaccacacactcacaaacaatagtatgattgatttctagagtatcacttggatttctaacctagaatttatttaatcttacgttagacaattctaacctgttaggtaatctggtttctcagcctgcagtagattagaagcagtacatttaaaaatgaaagagggattcttgcagatagtactgggaagaaaggacagctggtaacccaaatataaggaagtgggccaggaaattataaaatgtaatgcccagaagaagtaaagaaccatggcaattgaagaacagctggcccaatgcccaagaatgtgttctacaccctcctcaggaatgaatgtgcttccaagtccaacacctactgccctgcctgtcaccaagcacagcttctgtggatatttgatgaactataacatggtacagtattggctctgaaacatcatttgtgttcactgtcctttgtttaagaatgtagaaaaagaagtaatgtgttttataacttttttgaaaaccgtatgattaataaaatatactgatggtcttaagagtaagatctccatttgaaaacttgtctaccaactttagcaatttccgccaaggctccagagagacagggtctcctttcggttagcatttgatttctgctacttgttgctaactctgatttctgggttttcaagatgcatatcagtttaaacctaggtgaaatggtaagttttctgatcctgtggtgtaggcctgtagtgctagctattctttttttttttttttttgagacagagtcttgctctattgtccaggctggggtgcagtggtgcgaactcggctcactgcacgctccgcctcccgggttcatgccattctcctgcctcagcctcccaagtagctgggactacaggcacccgccaccatgcccgactaattttttttgtattttttagtagagacggggtttcaccatgttagccaggacggtcttgatctcctgacctcgtgatctgtccgcctcggcctcccaaagtgctgggattacaggtatgagcgagccactgcacctggccactgtgttagctattcttgatggactagtatctagaatgacttgggctgtgggctcaggtaaagagagtagctagcctagggctagggctggccctgcctgcctaaggcgtggcatatggatgttagggtttggagaagggaggggcccaggagggaacaagggacatctcgtctcttgtcctatggttgtcctggcaggtatgttgggcatttcacactcctagcgggggcctagcttggacgtgtagcaggcacacttcctgcacacatttcagtgtcctgacggattggtagaaatcatccacagtgccactgatagaaaatatgatcaccaccctgcttgaatgggccttgggggtgtctcatagttaattcacatgttactaaggcaggcaagctctgcctgccttctcatccccagccccagggcagagccacactcctcctccttctccccgctttccccacacacctcctttccactttctggaaagccagcacccagctgcatctgacttcttccagagtcacttccttgatgcctcagacaaggccaaattctcctggtatgtgctcatatagaacatttaacacccagctgtggttttccattcagttagctgtttgtttgtctctctccagtagattgcacagaacctgaggggaggattcatgttggtttttcattgatttactcaacagatacttattgagtgcctacggtgtgcaggcactggggattcaacagtgaataagaaggtgcacgtacctgccttctagatgctcatagcctagtggctggaggctgaggatcatggcatacacattttgtcatatattagaaggtgctggatgctgtgaagtaaagcaacgtatggaagtgggttaaggcagt

SEQ ID NO: 131313 - DNA, 1245 bp, Homo sapiens
tgtttttatttaaaacctcttccaccttgaccaggctcctgtaataaacaggattccctccagactagaagatttgctgagtacctgttatttgaatttacttttattagttcatagaacctttcaacaacagtgtgagttaggttatatccccattttacagattagaatgtaggcccctgagacagtaaagtaacaagctcagtgtcacatctagtgagaaaatggcagggttcctacctgggtacttagattccaaagtccattctcttctacaaaatgttaccatcttaaagaatcaaacagagtttctccctgttacatattaacttttaatacgtgaagcgtgagtcaggtgtttgtatatggatcttttttccattgctttactttatgaacatgtttcccgaggaaaaagtttggctcagagatgtcataaaggtggctcctaaacctgacatttaagcactgaactccttcaactcttctgttcaaggggcattggaattgtttctatgtagattctgcttgtaattctctcctagggttcttctaagaaaagtgaggaagctgattagcattctgtctgtgtgacctttcccctactgatagcatcctgcagggtgtccctctgtgattgtaagtgaaagtgaaccctggagatgtcgctgcaggtggatggggatcagagtgactgctgccccaggtagacactgtgatccaatagaatagaaatgaaaggcctatgggaatattctgtttctggaacataccacacccaatgcctccaggacctaaggctctttaaaagaaaaacagtgcttaaaaaattataagcgttatacacaggctgagcacagtggctcatgcctgtaatcccagcactttggaaggctaaggcgggaggattgcttgagcccaggagttctagatcatactagcctgggtaacacagtgagatcttatctttactaaagataaaaaaattagctgggcatggtggtgcacacctgtagtcccagctacttgggagactgaggtgggaggattgcttgagtctgggacattgaggctgcagtgactgatgatggcaccactgcactccaccctggacaatagagcaagaccttatctttctttttttttgagacagagtttccctcttgttgcccaggctggagtgcaatagggcgatctcggcttaccgcaacctcctcctcccggattcaagcgattctcctgcct

SEQ ID NO: 131314 - DNA, 5858 bp, Homo sapiens
cgtccataacggggaggacgttgtgctcctcaccacctgcaagcatggcaaagactggcaaaagcacaaggattctcgctgtgacagagacaacaccgagtatgagaagtaagtgtctgggctggcgtgtctttgggagtcagccttgggctctgccggccttggtccaggtgtgaagttgggggatggggtgagggcggatgagccctcagtcctctttcccctttgagcctggaactgagcaaatccggttcgggtgtgcagctagaggctggggacagagagttggagctcctcgggcaaactgaaaagcctggagcaccttctcgagccaagtaggtgacagtatctccctcttgcttaggaaacctgcagggcggcgtgtctcctgttaagagtcggggttagatccaagtttagtaactgcatttcaggcatgggtactggagggtgtttctgagggtatctagagacccggagaggctgtgatctacccaaagtccagagaccttccaccaagagtgatgcttttgtttgcttttctcatgagcgggggtacctactttcccaggagttttcccaacttcacattttctgtaagcctgtaattcatgttagccgtggaaatgtttaaattgtatcgaactttgtgtggccctttcctctctcccccgtggcattgacttttatgaagggagactgtaaacttgttgggcctgtggctttgcatgcatgcatgcatgcatgcattcattcattcattcatttattaattcattcatttctgtacatgtcctgtctctttcctaggataaactttttttttttttttaaatgtgggcctcagtctcactgtctaaactccagttgctaatttagatttcccgttcccttttttctttatctatttgcatgtaaattgtagactgttactctttgaatgggtgtgagatgcctccttaccctctgtagtgaggcaagttttgtccagttgctaagtaactgaattggttactttgtagaccttttcactcttcctttttccttccccgtgacagtaactgacacgggatttggagtcaaagctaaattccacaaatctgctttatcctgagcttggtggaccagtttcctagtaggtggggttgccgcccagactctcacttacatctggctgtgaaagagttagtgagttcctacagtgcatttccacgttacgccagttaaaaaccagagcagccttgtgctacccagggaaggaaggggaacctctcagctgagtacaagaggaactggcagaggttggcagattttgcaattgattcatgaaatgcagaataggggaaatgtttcgcaaacctgattggaacaggaaggggtatggtgggaaactggccttgaaatgaaaggtttgattgtcgtctgtgcattttttcagacactagggcctctataggagtgattggaagggaaattaaagtcctccaagacttgatcatagagagtgaaggagaaagtatcaagcactcagattcagctttccaacccccaataccttttgcttttcaggcataagaaaagccggagactaagatcaattatgaatccatattttcctctcatccaggggcagttatgtatgaatgtgcagttgcaatggattacagttttctcataaaagacatttaaactatggttagtaatgaactgctttgtttatacgacatttacattgacctattcctgtgggtgcttgtaagaaaaaaatgcttatagcctttcaggaatttctttgtctggtttatggtggagtaactcgagatgaagtctaacctttcagtgtcttctaaagcagtctcaaagaattctgtggaaggattctgttcttcatccttctaaaagggctaaagctgagatttcagcttaggaaatttgaattatatatattggaaaatacccttaatccaagtgaataatatctttcttacccttttattcccaaaataaatattacgtttctacgttttctgtggaatggaagcattttctagagatcagcaatgaagggaggggttggtttctttaaaactttaatttttactaaatttaactaatttttgacctctttgtgatcgggccaagaaatatgacacccacactttggtttatgtttaaagaccacaaggggtcaggacctcaggattgggtctgatcagaaaagtggcatttcgtagaaaagcaagtttgctctttctcccaagcagggatctctttagcagggacacttctggattttcattatgttcccctttggcataccttccagccctaaacttgcatgtagcccgggatggtgctgcgaaaggtttacattcactcgcctggtacacctggagttttgactcattcctctgagtgggttagcagaattatttgtctttgagaaatggtgcttacaaactttattgccatttattattggttttttggaacacatgaagatgaagcaagaactctcaaatttggagatacgctagcagagcaagcaacgtgtgtcgtgctctggcgtaagagcaactactgtgctacttatattgatgctttctggaagatggccttagatatgtgagatgcagaactcctcaagtcaagatatgccagtctctctagcgttttgggtggaggcgatattgaagttaggtctgtagacgtgatctgtgtaagtttgacttctcatactgactcatggtgtgacttttgattagtcaccttgagcattagtttgggttttgcagagtgggtttcagactgcttcaggggtgctctaagcactcatttggtaatagcttgtaaaaacacaatcagtttccatctagcttattagcaagtgtccatgggaaaaaaaaagcttcagtttaatttgctccctcaagcaatcacctgtaagtttcctttggagcaaactttatgcagcctgatgactagattgaaaatttatggtattatggtcaagttagagtatatacaaatatagagtatatacaaatgtttcaactaaaaaaaggttgcttttggtgaaatagaatattatgtgtcgataaagaatttagtgctaaaagagcaatgacttctgtctcacctgtgcctttgtgaaaattagacgttgattacaaaggtatagaaaagctgcaaggaatgaaagaaaatacttttctcttgtaatagagagaaaataaatttcttttgtcattttttgacccagacgttcaggattatattaaaatatcaatttttatgatagctgtaattattttttatcagttatatattttaacacatgtggataatgccagctaaaacaagtcattgcagtaattagatgagttgtagtgacgctttagagaaattctttgtattttatgttctttcagctacttatgcatccttatagaattattgtacttttgcatgaacttcatagttcacatccctacaaagggcattattgtgaaactttagattcagctatttgaaatagaagaaagagagggaaaggagaggtggcttctatctttgaccccctccaaggaaagcaagggtgaatatttaaagcttttctggaaacaggcaagattgtgtgcaattctttttggtatttccctttttctgtgtttgctaacactgtacctcaccatcctggtatcttcaagggtcttggaggtaagtgatcattcagcttccaacatcctgatttttacagatgtagaaactgagggacagaacgtttcaggggtttgcttaaggcaagaaaattgtttagtgacaagggtagcaccagaatgcaggcccccttaattttgccttgatctgcagtctttcatttctattctcaggcacccttgaaaattcaccagccacaaggagatccttattaatggtgtttgttatgggatttctcttagaattcttcagtaatctgatgaaaacttggaggacaacctttgcaaaaataaatgataagtaaataaataaaagcatgtacacaatttgttatatggtttcaggggctgacacacacctcccgctgagggcatcctcagacttacaaactcttgctctgggagtttacattttgcctgtttgtttagttgggtaggtctgtggagctgtttagtctaagtaggagttttttgaacctttcaatttggccctaaggggtttagggaatagactgtgcattgactgaacaataagttgaattacatgcacttacagcaaaaagaaaatatgtgcaaggcaagtaaaaatgctaaatacttttttctttttttcctcattatcccaaactgtattaacagacaccttgagcaagttcatgatccagcagtgaaccttagatgaatgttttccttctccaaaatgaaaggtgggaattgagattctcgggttttaaatgtaaaatattagcacctttctccccacagttgtacaatagcacaaaagcatttctaacataaacccaattagcacagttaaaaaataaggtagggccagccctatggaaaattatgaagttggcaagtttgtcttctgacaccgagattctgattctctccttcctttctcgcctctttctaaacctgctttctggagagcacctgagaacctcaatcacaaggaatccctgagtaaatgttggggtgttatttgctactttcagggacatttgtattattactgaattcagcctagcaaatgagggtttccagtggagtctgtgatctaagctaggggcctgcaggattttactctacgaataatggcttgttactaaggtttgggcaggtcctgcccattggaggccacctttggtcaccctgactctgacagcaactttggatggcaaaaggggagatgctacacctgcaggtggtgttagttctttctgtcagaaggcttgaggatctgccttctcagaacacagtgctagaaactcctgccaataatgacctttaatatgccaatgtcacagcagaagttgtgcttggtagggcctggctgctttgctcacaaccatcttgaaggtgtcttctcaggctatgttgctggtgtgtaaacggaggcaaacggtggtaaggtgacttgcctgaggctacgcagcctgtaagtggctgaattgaggctaaaacccaggttttatggcccgagttgtctgttcttttcacggagagaagaacattcattgctacctcactgcattcgctttgcagcactgcatattcagaatgaaccaggtgagacaaagtggtcattggcttctgcaggcttctggacatgtttcatgttcaaacatgaacacagaagcttatgtttccatgaggttaataactacaggttgagcttccctaatccaaaggtccaaaatgctccaaaatctgaaacttttgaccactgacatgagcattttggatttcggatttttgaattagggatgtccaactctaagtatacaatgcagatatctcaaaatctaaaaaaatccaaaatttgaaacacttttggtctcaagcatttcaagcattttaggccaagtccttctcagcctaaattgtgtatttgaaacaaggtattttctgaacaaggtgtttgagaagtagctattgccatgtaataattacctagcgcttccttcatactctggaagaagaaaatagtgcgttttttttctctcgaggtcataatgtgaatgttgtatgcagtggccatgtcatcagaacaggtgtgccagccccctgcatggaacatgtacatgcttcaggttgtgcggaattaactttctttagataagggataactag

SEQ ID NO: 131315 - DNA, 1129 bp, Homo sapiens
ccgcggggctcgcaccgggccgtcccgcgctccacctgcccggcagcccgccggcagcttgcaacccgggagccccggctccctgcgccccctacgcccccaacgccgcgccggcgcctcggcccgcggccgggggttatgaatgggcgcagcggaagcaccgccccccccggacgtgacgctcggccaatggcagcgcgggctgcgtggatggatgaggtcagcgctgtcgtgtcgggaatggaatgtgtaagtgtaacattcagaaccgggtaacattcggcgaccgaacgcggcggtcggcagcgttcgcgcgggggcctgcgaagcgctgctcggggccggcactgcccgcggggaggacgcgccgccgccgccacccagcgccgccgccgccgccgcctccagccgggccgccgcgcgtcccgggggccggccccgcgagcgcaggagtaaacaccgccggagtcttggagccgctgcagaagggaataaagagagatgcagggatttgtgaggttacggcgccccagctgcaagatgcactagccggctgaacccgggatcggctgacttgttggaaccggagtgctctgcacggagagtggtggatgagttgaagttgccttcccggggctcattttccacgctgccgagaggaatccgagaggcaaggcaatcacttcgtcttgccattgattgggtatcgggagctttttttttctcccctctctctttcttttcctccgtcttgttgcatgcaagaaaattacagtccgctgctcgcccgccctgggtgcgagatattcagccccgctctctcccgtgcattgtgcaacccaaagatgaaagaccgaaggggagaaagttaaagaaatcgcccacatgcgctggatcagtccacggcttggggaaaggcatccagagaaggtgggagcggagagtttgaagtctttacaggcgggaagatggcggactggagctgaaagtgttgattgggaaacttgggtgattcttgtgtttatttacaatcctcttgacccaggcaggacacatgcaggccaaaaaacgctatttcatcctgctctcagctggctcttgtctcgcccttttgttttatttcggaggc

SEQ ID NO: 131316 - DNA, 1032 bp, Homo sapiens
ccacatgaacatacaggtactcaaatacaggaggcttctatttggctcctccaagggaggagttcctccaagggaaaaaaggggatggtattcttttaatcaaagaccatggtggatggatggtaagggcaacagaatgcaattcttttgtgtggtctgacgttaacacttcggaaaaaattctaagtcaagttgaaatcgccattctctcaagagagaaacatcaagagagaaacatcaagtgaccccactatgtgcctagagaaggaaaagggtcaagtcctatactaggttccttacttagggtagaacctactagtcccttgttaatcctttctgggattatacctgtgactaatttttttttttttaactatgtcttacgacaaagcacagtcctgggaaaccagtcaacttaattattgcttgtctttgagcattagagacatgttcatattgacttgctacataacactgtagcatgttttttcctgaaaatatcaagttggttgaatggaaagctcagcaaagtatgttctgtgtgcccactgtcccagcctgggactgacgggcatcagaggctttgctttaaaatatgggtaaccagttctggaagacttccaacgcaagcaagcttggtgttttagggtgtctccagatacataagcattgtctgcctccgctcagggtctcaggaaatacacagcccattggaaaccacccacgcctgagatttggaaacctgacggaaagggaggaaggtccaaatgagtcagcagcaggatgactcaccacaagcctggcaggctgcagagccagagaagggggcttccaacaaggaactcagagaagttgcagtcaccaccaagatctggcccttcggcaggtcagcaccaggactgccaggccctctgcagaccgtaattctcttcacatctataattaggaggccaaactccagctgccaacacccttggacacaatattccagtctccactgcccatctcatgtggttcagttctaatagcagg

SEQ ID NO: 131317 - DNA, 1051 bp, Homo sapiens
tgaaaattaacagggtagtgaattttgatgatctgctgcatggcaagccaccccatactggagaggctcaaaacaacaattattatttgctcatgattttgcaatttgggcaaggcttagcagggacctcttattttttccatacatactatcattggggactgaggatccacatccaagatgtttcactgaaatggctagcatgttagcacaggcagttggctgcttgttcagctgcggtggctgctgatatttggaataacctcagttgccctccatgtgggcctgtccatgttgcgtcatggcttattcacagcatggcgactaggttcaaaggaggaagaaacagaagtttccagtcctcctaaagattaagcccagaacagacacaaagaaatttctgtcatatgctgttggtccaagaagtctcaggcctgtcccagattcaaggaagcaggagggagaaaaaagaccccatctctcaatgagaggtagggagaaaggctatgacaaaatatttgcagccatctgacataggatatggagatcattcatggtttttatttcctgtaatataaattttaccctacaagattcagatttaaattcagtattttatctctttgccaaaagatgaggtccagcctccctccacccttttatgcttcatcgtattctcattctttattaaaaaggcagggatttgaggtttgttaggtatctacaggatacaagatccatgatatatgctctttcatttaccgtatttcattgcatctgagatccaacttgtctcatattttaacatttctgaattgtaccttttacaatctaggaagtcttgtaatcactgtaggtcacatggcagtgatgcacgtctgaagtggcctgtgattgtgcatatcttcattacttcactcaaattcacctgttgagtttaatcactgttgaaaaacatcttcagaaatattatactataatttggcattgaaggaaaaatgtgtcttgtatgccaaaagtcaaagaaacagtgccattagtgaggcaaatg

SEQ ID NO: 131318 - DNA, 1070 bp, Homo sapiens
ttcagcccatttcctgttctgctgcagttctcttttaaattcacagattgggaatggcccagtacattccggctcttagcacatactcacctccttttattttctccattgcaaatgcttgtgcctttcaaaggacagagagaaaggtcaagactctcagcatctgcctgacaccggtggatagaatctctggtatctctaatggtctgcttaaccaggttgttaggctatttctgtctgccgtagcaaggaatattccctcatgccagaataaagcaacctgtagtggaacattgacctgaatggtgagcaaggtcaggagaaagcattttatttaaaaatggctctgtacataataaaaaagggatcagtgtctaatatgactgaacatcgggagaagaacagcatttgatttgctgcattttttcaaggtcatgactggtcttgacagtccctattggtgacagacttccagatggtgtgattctggaccagccaggccttcccctcgagaaagaaggctaagactgatcagtttccaccacccagcagtatgaagcctgagaccatcctggtagcagatgatcctcagagttgggcccagaatgcaggctaacctgtgagtgtcccctgaattgaatgacccagggatgctgtaacttgtacttgcagattccgtatggtcatttcatacggaaggaggaggagttctgttgaagagaaatcaagacaatctgacctgaccagagtcaagaaaatagccagtccccaaagataaagaaattcttggaacacagtaaccctctattggtattttcaaaaaggcaacattagtcacaaaagatctctgtgtgtctcttggattctgccgtctcagcatttcagataggtcactggttaatgggctgggttaatggttctttttttattatggtgacttttaaccacctttctggcagaaggtgtctgattaaatcatggacagctgtgggttaaagatactacttctctagcatttagttccccttcaaacagagcaagaatgacaaggagggaatttagaacatggt

SEQ ID NO: 131319 - DNA, 1048 bp, Homo sapiens
agaaacaacagaatgttgtactatttcaattgcaatggaatacaactatgctttcacgaagtaaaggaggtctcaaattgcatgatgaaaaccatcatctcatggctaaggagaggagtgttgggtgcattagcagtttgtggaagctttataaggactgtttatgcgtttactgtcagcaccttgactgagagcaccatttccatctccactgcctgaccacagggccaattgctgtccacatcactagagctgcctatatgtgagcaagagtgattattcagcatcttctgggcacttacatatacaattcttccattgtattttcacataggctcctctcatgtttgttggagtctttcttctgtaattgctcggccttcaccatggaattcttaacattctagaagctagcagcaatgtctttttttattttttttactccccatctttcagtgacatttagggcagcagtgtgagtaaaaagccagcctgtaaatgtagatattgactcactaatagatttttttctggggtacatttgtctgtgcctctaaaccaaaatctcttatttaacttcagtaaaacgtgtgtctgaagagtttcacatttcccaatatccaatacttaaaacaatgccagacccctaaaagcacctgattttcttgttctagttttgttctactacatttgacagtgaaaaatctcatctttctctaccttctgttattgtttttatgtgtccacacataaggattaaaatgaacatttatttgaatacttcactttcgtgaggttttattcttaaaactttacaacttgtcttccaaccgtcgcctaaatgaagtagagacattttgcaaacaggaaaactaagaaagggcatttcacccaaactgctttaaaatatcaaaaaatatagctggagagggaatgagagataaaacaagggtggcaggcactgatggttgttgaagctgggcaatgggcaatgtgggttcatagtactatcctaattttgtatatgtttgagagtgtcaataaagca

SEQ ID NO: 131320 - DNA, 1032 bp, Homo sapiens
cccacccaaatttcatcttgaattgtaatcctcatgtgtcaagggacagacctggtgggaggtgattggatcatcaggcagtttactccatactcttctcgtgatagtgagtgagttctcacaagatctgatggctttataaggagctcttctactttcactcaccactctgtcttgcctgccaccatataagacatgcctctttcccctctgccatgattgtaagttccctgaggcctcctcagccctttggaattgtgagtcaattaaacctcttttctttataaattacccagtctcaggtatgtctttataacagtgtgaaaatggactaataaaaggtgatattcatgtaccttattgtcttatattgtatgatgtcgtacagtcttggatatgcagccctatggttcttcacctttttttcaatcatgtgacttttaatctcattaaacctgtaaaccttcccttcagaaaaattcctatatacaaattttacatatactttaagagaatcacaggttctcttgatgcccattcatggaccacttaagtatccatgagcctattataagtctgatccctattatttatcatactagattctaaattagtgttgaaataaatgactgaatgatccaaagagagggaatctagttccaactgatttatttggtgaaaacaaggacacacagccaatacactattttatcttacatctttgatattcctcttggaataagggtaactcattctggatcactttcctttattgcattttggattgtgtctgtgcttgtattcacctccattcatcctgaagcaatacataaagaatgtcttctctactgtttaaactcctgaatttccatcctcaacttgtaaaaaaatcaccctcaacagtatgtcttgccattctaaaataaataaataaataatgctttattatgcctcatttgttctacatattcaagactgccatatggcttcaatggatgtctagtgaaaatatatctaatatctcataaaacc

SEQ ID NO: 131321 - DNA, 1058 bp, Homo sapiens
gatgtgcagatgagatcactaggaaagattgtcttatgactgtgtcattaatttcccctgtaatatccaagcactggaaagtactaaaagcacacattatgttctgtgactccccaactccccctaaaaagcctaaataaaaatgaggaatgttttctttcaatgtgctacatgtacagcaaaagtaaaatccaaataaacatttacaagagaaggctgaaaactcaagaccatcataccctgtggggaatttacaatctaaatataacaaacatatagagtgagataggagaaaagaaacgggatggtaatgatattgctggtactaaagtctattcaggaaatggaaatatatagcaagaggactcggctacttcttgggcattgatcaaagaaaaatacacaaacatataaaaggaaagaaaagtcgttttattttataacattttccttctgattctaggtgattatatagctagtctactcttccacccccaagattctggggtattttggctaatgttatttgcaatgtccataaactcagaagaagttagtattaacagggatatgaaagaacctccagttattgtgcaagaaacctcaaatccatttagggagcagacagttcataggaattgtgaagcagctcagccatgtttctgtgataggaagtaacaattactgcagaaaactctaacttattttctcctcttccaccatcgttaaaagcaatcacattcaaaaaataaaatttattgtggcagacactaaatatgtctgctgaccccagtttgcaagcctaacaactcccattgcacagatgagatatgactatagtagtgatgatttacctagccagggttgcgcacattgggtggagatgagtcttggatccagatctgtacacaaagatggattccatctgcaactaggaaggaaggggggtgcaggtgttttatgcaaacaattcttgctaactggaataaaacaaattagatgagaagaatgtagaagttttgtaaacactaccagagtattggggtcaataaaagaga

SEQ ID NO: 131322 - DNA, 1031 bp, Homo sapiens
gcacaagaatattcatagcaactttgactttcatagctgtaaactgaaaattacccaattatcctttgacttagaattgataaatcaattgtgatgtctttataaaatggcctcctatataggaggaaagcaaatggaccatatctatgtgtttgtccacatggatgaatactgtggagcaagaaagctaatcacagaatacacatactgtaacattccatttatatgcagtttatatacaaagtttacaaataggagcattttaatgtatatttggaaagatatatgtatgtaaattgtaaagaaaagtaaatcattaacacaaaattcaaagtcttggttacatctgaggagagcatgggagggatggaatcagggaagggcttgtatacagttttctctatgttaagctcgtaatagatacacaggcatttattgttcttagctagactctacactctacattttgtattgtctgtcatttcgtaatgtataaaacaaaacatcattatgaatgtggatggaatacacattcttccttgatatgttgtcctatttctctgtcaaaagcatcatttctcgaaaattgccaaagccatatgcaggaaacctcacagagtaatgacttcagtattttccttttgtgcttatttggtcaaataagaatttgaccaaattctcctattttatttttcttcacattcttctgtgtccacacttttacttatactggaatcataggttcatgtcatgcagcactcttaactatatgctcaacttggtcatctacaaatttcttccctgagctacttccttgtctataaagcagaaaatgtaatacctgcctcatactacaggagtaaaaattaaacaaaatgatatcagcctgtaatttagtgagcaccaaataaacattaactaatattgattaagaaatgcaataccttacgttgagtgcagcgcaatgatgggcacaaagtagacactggatagatcacagccactcttagtgtcatggatccaggccttgc

SEQ ID NO: 131323 - DNA, 1011 bp, Homo sapiens
tgagccatggtgaacatggatgaaataaatgcctggctcctgaaaagcaccagtcatttgaatacatccatatggagggcttatctctacacttacctcatcatttcatagacaggcctcatagttaatatatctatattaattaatagttgtctatcagtctgcacatcaatatgccatgcaaccttaaatatgcagccatatacatcagacacttagaaatcggatcaagattgtcaactagcatgttttagaccagaatgtcattcattctaaggacttgtatctgttttgtacactgttgtatcctaggcacttagaacagtgcctagcacagagtaggtggtcaacagatgtttgttgaatacatgatgaacaaatgaatgaatgagtgagtgaatgaaccaacacttaataattaggcatcaagaccagagcttagtttgccttattttgtaggataacacaagatggcaaatgcattttgataataggtgatgaatacacaataaagataaattggcatggtagaaaggcatgtttctattccaatctcggctgtgtcagcaaatagctgctatgtcattctttccaccaatgttgactgggtacctactatgtgccttgcacttcaccaagtgctggagatatgtgaagagtgtaacacatgcaggctgtgccttcggggaatttacaatccagtgggagaaaaagatattaatcaaatattcctggaaataaatagggaattacagattttcttaagtgctaagcacataagagaagaggccaacctggcatgaatgatcaagaaaggcttccttttctgaggaggggatatttgagctgcagctagaggcagagggaacattttgaacacaagttcaagcaaaaactgaaagcattgtgcattgaagaaatcaagaacaaacaagtgtagggcatcacagagagggtttggagagcagtgagatagctggagagaaggttcttgtagctttttgttttgtg

SEQ ID NO: 131324 - DNA, 1054 bp, Homo sapiens
tttatatatcagttccctctagaccttcccatgtatcataccctatgattaaaggagtcgctagtcaaacttccttctgttatgcaaatgcattatcatcaccccttttgatgtctcccacacacagaagtggacaaaaggcaatgacttttcccagatataagaacatgtacctcctttaacccctttactgctccacactaccttatatgaaaccaaagcccaaagattatataaaaatagacaaaacagtgcttattattctgtttataagcaaacatgtaaaagataatttcagtgttaaaaagaatacaccaacaaaatgcttcaaaataccaactactgttcaaatatcatctcaatattctattacatatcaatttatagttatttattgctatgtcttttaaatatattaatatttacctgcttactctattgtacatttatgcttcatttattgaaacaattcaagcaagtgttgcttgcaatttttgttactataaataacaatgggatgaacatctctatgcctaaatctttgtgcatgtacctcatatttttaggtagattcttagcaggtgaatcccttggtaaaagtgtgtaaacaattcaaaattgtataaacaacaaactgtatttaaaaagtgtaaatgctgcaagaagtagctaaaataattagtaatggttatgtctgggtggcagttcactaggataggcagaaatcggggatcagaatcaactgggattatctagccagtctctttcacatctttttaaaaaaaattcttaaatattacagattactgataggtagtgcatgttcataacattgtatatgcctctgagcatgtatgcacttattctactggaaattcaacctacaatttatataacatgcaagggtaaacacatcttacccattttgaaataaacacaatgcataaagttgtttataagaagtgcatttttgagcattcatttatggaatcaattttatgtacttgtatttcttaaaggttaaaaggtttaaagatgtctaataacaaatgaa

SEQ ID NO: 131325 - DNA, 1043 bp, Homo sapiens
taatttttttgtatttttagtagagacggggttttgccatgttggccgggctggtctcgaactcctgacctcaggtgatctgcccaccttggcctcccaaagtgctgggattacaggcataagccaccacaccaggcctcttaaaactttttcataggaattttgtttagtgctttaagcagagagtacacaatggtgggcatgggccatttctgtgaatacgcatgtctgccacacagacggtttcagaaaatttgaattagttgccaatatttaaaaccagatttcaacaatttaaaatataaatgtttatcttctgttttaaaaatttaaactattttgacactgggcctgtcatatactgcctgtttgtgccctcccgaaattgatatgtcaaaacactaatcccaatctgatggcatttggaggtgtggcttttgggaagtgattggatcagtgcccttataaaagcggtcccagagagctctctcacttgctttccactacgcaaagacacaaggagaggttggcatctgcagccggcaccagaaactgaccacgctggcatcctgatcccagacattcagcctctagaaccatgagagataaatttctgtggtttataaactacccagtctgtctgtggtgcagcctgaacagattcagactgggccacagccacacaatgcaataatctggtgcacagaggtggtctcttagactatggcatattaaagatgtttgtaaattatttaacatttctttacttgagaggtggggtctaggtatgctcctcttggatctggaaaggcttagtgactgctcttatcagtgaaatacgagaggtgaggctaagctaggcatacactggctcattttctatctgttgggacatgtgttcagggcagtgaggcaccatgtcacaaggccagctaccctgagaccaccatgctgtgagaagaccaagccacatgaagaggccctagaggaagaaacaccatgtggagaaagacagaaaggtcaaggagcgctaaggtgccaga

SEQ ID NO: 131326 - DNA, 1072 bp, Homo sapiens
tataatgacttcttttcctctgggtagatactcagtagtgggattgctggatcaaatggtagatctacttttagttcttcaaggaatctccacactgttttccatagtggtatttttaaatgttctgctgagaaatatttatggttattatccaagtcagtatttttactaagtacctgctgggtgccaagcactctctggactcaaatgaacaaagcaaggcagactcctgttatttctggactctgcaaatgtgatttaactggaggacaatacaaggatatctgtgatttaattctcatttgagccatatataattaagtgctctggaatacctctgaccagtagaacttctgaaatgatggaaaggttctagttctgcactgttcagcatagcagccactaatgacatgtggctattgagcacttgagttgtggtcagtgtgactaggaactgactttatactttattttaatgtgaataaccagaggtggcttccagctaccatactgaagagcatagcatcagtaattctgaggagggatggtgtggactccaagaattcaggaaggaagaaacctgagcttagaaataaggaggaaactggaagaaaactccatttagggtggtagcatgagcaaaggctgggaggaaggaaaaggtatatggtttatgaaaattacggaggaaaggaaattgagggaaacaagatgagagaggctttctgaaaataggaagaaggttctagaatctagaccattcctctactttacatgtttgttgtattttactagcaccaaacctctcattatttggaatagtggttgcatagtgtttaacttttttatgccttttataaataattgttttccacagagtcatcatttgcaatgtacaagttgtttgttgaaatttttaatatcagtcagatgggaatctaaagagaattcaaagaagccattacttagcagaggttaaaggaactcaaaagggttgttaagtcacccaggaacaagcaaggcagaggcctaagtggcaaaagtgtgggagtgtgttaaagagctctgagaa

SEQ ID NO: 131327 - DNA, 1035 bp, Homo sapiens
tatggaggctgagaagtcccaagatctgcagttggcaagctggagaccaatgaaagctaatggtgtagttccagttcaaatgtaaaggcttgaggaccaggagagcagatggtgtgagtttcattccaaaagctggcatgctcaaaactcaagacgagctaatgtttaagttcaggtctaaagacaggaaaaaaaaacccagtgtctcagctcaaggcagtcaggcaaaaggagttccctcttactcttactcctgggaaggccagcctttttgttttattcaggcctttaactgattggatgaagaccattgacatggggagggaaatctgcctaactctatttaccaattctaatgttaatctcatccataaacaccctcacagatacacccagaaaaatgtttgactaaatatctgggtaccctatggcccagtcaagctgacacacaaaattaaccatcgcagtgtgtaagatgactaattgcctccaaagcccatgctctttccactcccctatctgcctgctgtgaagtatttcttatttcaaaaatacatgtttttcttttgcaagaaactcaagatgcacttaaagaaattaacacttgagactattcaaataaaagatttaatagcttgcttatcaaaacatagttatcaccctccatcttccattttgcattttttgggctgctaggaatatgtggtgtatggttttgctgagatgtttcctgcatacctgagctattgggtccctaagaaatcaaatttgtttgtttttcaacttggcatcataatgaagcagagatgtcagcatagcatttcttagtgctgccaatatcttgagtaatcttaatcttgttagatcaataatgtgaaattttgctagttgccattttaattgatttaattgaaattgatttggcataaatgagtggacagaaatttattaacagtgaccatgagggtttgaagtatctgctatgtaagaagtatgtgactttgatttatacatctaaaggctccctctttccaa

SEQ ID NO: 131328 - DNA, 1033 bp, Homo sapiens
aatttaagatggtcataaggttgcattgttatgtcaccttgaccttgtggcttgactgtggatttgaaggatcttaaattactaatgttacattgaagaaagatgagttacaggttttcaacaattgatattggttttattcttgaggataagtatagaccctacagtctaatatgtgcggtgttcaaatgtcctatgggatttttagagagtcagttgatttagaacattgacatgtggactggataagaagaaatcaaagccactttcagagatgcactgagatgttctggcttttctaagaagaaacagaaaaatatgccatctgtgtgctttaggacttctgtccctaatattgcatattaactaatttctctgtggccttttttggggggaccaccaattctcggtgtctggcaaaaacccctgtacagtgtagatgttcaagcctcccattgtatcagaatttctacatgccaattctagaaggtaccatgtgcatagactacactgtgaatggactctaaagttgtgcagccattggtccagtcttgagccccagacaagaataaagccttctatccttatccttctctgaaataatacttccattcttagtatcccccttttcattttgttcatttttattttattttattttattttattttattttattattttattttattttattttattttattttattttattttattttattttattttattttattttatttgagacagagtttcactcttgttgcccaggctggagtgcaatggcgcgatctgggttcactgcaaccttcgcctcccagtttcaagcaattttcctgcctcagcctcctgagtatctgggattacaggcatgtgccaccacgcccagctaattttgtatttttagtagagacgggatttcaccatgttggtcaggctggtcttgaactcctgacctcaggtgatccacccaccttggcctcccaaaatgctgggattacaggcatgagccaccgtgcccagccctc

SEQ ID NO: 131329 - DNA, 1029 bp, Homo sapiens
agtggcaaggacccaaaggggttttaaactttttcacactttcaaattctaggacaaaatggtttatctttcctttccattttttcccctcctttctctctccctcccttccttttctttctttgttttctggtataacttataaatagtaaagtatacaaatcttaggtacagctcaataaatttttacagatgtgcatacacttatgtaaaccttactcagatctagacataagactatttctagaaccccagcggctcccatgtgcatccttccagttgacgtcttccaaggtaaccactattctaacctctgccactgtagatcgcttttgctttttcattaactttttttatacctggtttttttccacttaacatttcgtcttcagatttatcggtgttgagtatggctgtagtttttgttgttcattgttgaaacattccattgtgtaattatattttaatttatccattctattgctgagggacattggattatttccagtaaagctgtcatgaactttcttgtacatgacttctggtgaaaatgagcactcattttcgaaatggaatcgttgggtcttgtgtatatttagcttaatagatactccaaagttttcaaaagagattatttcagtttatgctttgaccagtattgtaggatagttccagtttctccacatccttgtcaacacttgggattgtcagtgtttttacttttatccattctggtgcagttgtaagaataatccattcatgaattaaataagacagttttaagatgaatgaaagaaagtacaggttcaggaagagcttataagggtaccattagtaggctgggcatggtggttcatgcctgtagccccaacactttgggaggttatggtgggagaattacttgagcccaggagttcaagaccaggcctggcctcacatagcaagaccctgtctcttaaaaataataaaaacatgaaaagcgtattacaagtagaaaaaaaagtaatggacttgtagagctgatatttc

SEQ ID NO: 131330 - DNA, 1059 bp, Homo sapiens
gtctcaaaaaaaaaaaaaaaaattaatataccacatgctctcttcctgtcaagtcagagttcccatccttacagagcctgcatgttattgggagatcaaaaattagacctattagaggcaatcagctaagtagaccaatgactcttttcctttagatggcgtcatttatggtgaggagcctgatgtcatgtgttattgatggaggaaactgaagtccacacatgtaggattgatgatatttacaatcctgtggcactgtttcagtaaaacacaactatcttcaagagatcttggccaagatccttttaggacactacgtttgatcccccatgttccctgttgaaattcttattagagatatttttcaattcccatattaactgtagggtaatgttactcttaaatgtttagaatactcttggcaagcttcatatctttgatacctatgaaagatgagagaaagattggactgtggtgacctgcaatagaatacattccattcattattcacggtgtgtgaccttcgccaagtatgtttaacctcactgagcctcagtttccctttccctaaaattaaattatgataatacgtatcttataaagttggtattggctattattattgatccgtagttgcaggaactccacatcaaagtttgtgagaaagcactttgcaagtggtaaagaattataaacatatatgtgttacagatatacatttgtatgtaaagaattatataaatgcgtagatatacacatatacttatgtgtgtaatttttgtttttttattgtttagaagcatctcactaatctagttaaggccctaaaacctagcaattagtgataatttctccagcccatgaaaattttgccttgcccagtgtgttttttagtaataatgattattttaaatatcaacccatttcctaaacatatacttagcatcgaatactcccaagatatttctctagtaactcaaggtagaaagaattcagaagatgtgattctcgcccttccttaaattatcatcatgttggggaaaaccatatatcttaaaa

SEQ ID NO: 131331 - DNA, 1022 bp, Homo sapiens
atgggacaagaagttcatgttttttactctgagccttttgggataacttattttttaaaaccatgtgcatactttcttttatatcaacaaaagggttagaaataaacaggataaaaagtgaataatagaatgactataaaggtgtaaaaattgcttaaataattaatcaaatgagggcccattattatttattaggaatgtggttgtaaagatacatgcatggacatggattctggaaaaagtttatataaataaaagtaattatgctaatgaggcaaattctcagcaaaaattttttctaattgtatgaaacctagtatttgaagagtaaatacaaatgtataagaatatgtataaagtaaaaaatctattataattcatttacctctagcttatccccttctcactatgttggtggtgagattttcaaagctctgtcaatcttagattgccagactgttttgtctgaattgaacagtccatctgaactggagtttgctcctgtgttaatcacttctggctgccataatgaggtaccacatactgggtgccttaaacaacaaaatgtattttctcccagttcaaatgtctggcagtctgagatcatggtgccgatgtggtttgattttggtgagggtctcatcgtgtcctcttttgcacagaggccaccctccctctgtgtggtggacagagagcgagctctctgaggtctcttatgagaacactaatcctatgtatcagggaactaccctttatgaattcatttaaccttaattacttccctaaaggccctgtcttggaatacaagttgggacttagggcttcaacatgtgaattttggggagacagagatattcagtccataccagccctgtcaatttattcatcatttggctgaattaacagatagataaattgttttaacaccaagaaatcatggacctggggttgggggtggctaacttttaaagcccaagaatgctagtattggaaactttgtatagaccaccccctaccgtaat

SEQ ID NO: 131332 - DNA, 1052 bp, Homo sapiens
taaagcaagtgcatttctttacaatggttatatgaggggacttctcccagcctttgtttatttatttatttattttttgcaaggccagaaggtaaaggacagtatataattgaaggatcagctgaaatcctaatccttttagcaacactgttgctcttatgagcttctcctgtaagctgcttctaaaatattattttcattttttagttgtggaaactcagacatagtctcacagagagattaaatgacctccctaaggacattcattgcgagtcagaggttgatccagtaatctaattaaggccctataattccagcagtgttgccaaaaccatacttttccctcctcctcctgccaaacccagtaattgagtatgatgacctgcctgcccccttgtgctgaaggccgtctgatcccccccagctgaagccatttgaccacatttaaaggttccacccaggccaagcgtgtgggatgttggtcattaatcagagagaatttaagggaccctcatcaggagtcagattttgccacctgggttttttccggcttagcctttgttggagcagcctagccccattttgtaacgtggtacttgtaatttctgttccccttcatcaggattctcccattcgtcttccagttcctgcaaggctgggagagccctgccttggtgcctgtcccaccttcccagagcccaggtcctttccccaaacctgtgccaagcagtgggagcccggttttctcctgcccactcgccacctgctcaacttcccacacgatgctgaatgtcacatgtgccactgctgtgctctctgtgattcctggatgaatccttgtcttgatcctagactcctgatctcctaacacctgcctgagtcatggcgtcttaccatgcgcctagcagctatgctgcacctgcctgcctggacttctccccattccctactgctgggtcagccccaccccaacgagttcaaggttctagccccaccacctgggaagttctagtttcttggtctggaaagaagccatccattccccacaccag

SEQ ID NO: 131333 - DNA, 1100 bp, Homo sapiens
aagtagatggccttgatattataaattgtattatttcaaaacataatttcaaaaagattaatattagtaacacattagccaacatttaatgagcacctaaatgtggcaggcactttcctaaattctctctatatattatctcatttaatccttactaaaaccctaaggggtaagtgctattattatccacattttacagttgaggaaactgtgactttgggaagtatcagtcagtaaccgtggagttcatccaggcagcgggatcaaggttcccattctcttaaccaaaaattagacaaattaaagagataaggtaaaaaaaaaaaaagcctacatgaattaagtgaagattaattatcttcctgtagtatcaaaatgcattagttagccagttttcaactagtcatcacatacatatttatttattagctgaagtgattatgtaaaaatcacactcagctgaacttggaagaaaagagatgtttgacagggtcaatatatttggaactgttttttagactgggagagaaagtgaatgccatgatgtcatacttccccaaagctttggaatttgggcttctgagactcatgtgctgtggcttgcttaatgtccaagattcaagtcagtcctattttgacaggggcatatgtcccatgacaatctgatgacttcagttgacacaattgcttctcttccagtttcatacgttactgcctaagctcaccctacattctttaacaccttccactagtgaaaatagtgatggcaactaacctttcctgaaaacttactgtatgtcacacacttgtgtcatgcactttatgggcactttttcatgtgattcttgtaagtactccataatatacagactttcatatccccagcctgtagatagggaaggtgagcttagggaagtttatgaaacttgcttatgatgacacaggtgacagattcagaactgggtaacccctgttttcaccagacattatttggggtagatggaaggcattcattcatcagatttttattatactatgctttgtgtgggacactatgctgagcactcagaggaagaaaatggtttttgtcctcacaaatg

SEQ ID NO: 131334 - DNA, 1031 bp, Homo sapiens
tgttaagtcgtacagatgtgggggttgttcattactgcagcagaacctagcctattctgacagataatagcctccatcaaatttccatctagataagccagcatgtattcactggagagtgcagggggtgtaaagtgaacttggtggggagataaagcatatatggaaaatacttcatagcacaagacactatactgtctgaggaaaggttctgtgttttgactgtcctctaggtctatctaccatttctatgatatatgtcacacctaataggtgccatgtaggtatttgttgggtgaatgagtaaacatatacttttattttaatgtgaactctgtgtattctttccatcaagatatatcttggcaatatcattttttgtaatcatttctattaattttcatattttctgtgctatacaccataagccatgaaaattctaggtgtgaacactgaccttttccaggaatttagtttgggtaaagtatatctgcattattattaaacagctagcgtcatagattttagaggaagaagaaaggggtgcagtcgtgacattattagaaattcagagcagtgatttcgcattctgatttggtgatatgcctggagctatccacatacctctagcagtgttgcgaggtagtaaatgctacaggcataacatgccaacaagcagatcttaaataaaatatattcgtgtatattaactttcttattttatatttcattgcaaacacaatctcattcttctctatattttttataccataataatggacctgtcttcaagggaacagcatctcgttgtataaacaggacccttaagctgagactgttcctgtgacttggcggtcattgaaaagattaaatgggttgcaaaacaccgtctttaaaagtgaaggtaaatttgtctcagctggaatcagaagccagctgggcctaagaatgatgtctatgtctacatagcatatcctgatataacacatgccttgccttgtttcagttcgttaattatctgcttcctgttc

SEQ ID NO: 131335 - DNA, 1045 bp, Homo sapiens
caggaaataggaatagggcaaggaagtcatgtgacacaggctattactagggggcggttaatctacaaaactattacaaaatttagcctttgagataccccaaaaagaggttaaataagcaggtttgaggtatgacccctactcaatatggctgatttgtaaaatgagtgttgttgtgcccctcagactctacaaaatcacctctgcaaccgttttgtgatgggattaatttttcttttagttctgctttgagtgtttattttaactggatttcgcctgggcagaaaaagaggtggtggttctaacagaggattgacagagaaaatgcgagatggaggaagagcccaaggagggagatggaggcagagttgtaatcccttctcctgactccaggtggcgcttggtttctcaccaaggtttagcctcaaaacactttctcaatttccttagaaaggatgaaaggcagcgtaatcctgaaacaagtggccacctatctgtggattctttatgctttcaggatgcatttcagcctcatttgaagttttctagagggtcagaagggcttggcgggatgaaccttagaagtgctcttacccgtgaaaagggatccctgagcactgttcaactcttcgtgaatgtttgttaagtgaatggatgactctaatgcctttccattaaaggacctgccctattaaagaccgattcccagccccagaaataatcacttaagtttcttaatttctcttcataatgcactactggtaggagagctcattttctagtattacaccaaactgcagtgcatgatacatttcctttcacttgcaagaaagccctacagacggcattaatggatttattttaaattgctgtttgtgaactccaaataattatataaaattgttttttaatgttcgcataattttttcatcattaaaagccaccaagctctttaatactgaagcagaatcaaccattgaacataaaaaatggttaccttgatgtgtctaatatctctgcctcacacacacagacattctttgct

SEQ ID NO: 131336 - DNA, 1029 bp, Homo sapiens
tacttacccctagaaggagaataagagtcagccaaaaaaggaagattctccattttcttagaactgttttggaatatggaacttgtagaaatagcacctctgcacaaatcctgttagaaaatcaatagatttgtctgaaatagaaaactatcagctgggcacggtggctcacgcctgtaatcccagcactttgggaggccgaggcgggtggattgcctaagctcaggagttcgagaccagcctgggcaacacagtgaaaccccatctctactaaaatacagaagattagtcaggtatagtggtgtgggcctgtagtcccaggtactcgggaggctgaggcaggagaattgcttaaacccaggaggcggaggttgcagtgagccaagatcgcaccactgcactccatccagcctgggtgacagagtgagactccatctccaaaaaaaaaaaaagaaagaaagaaaaatataaacaacagcaaagagtcacaagttagatttaaggaaaagtggagtcaacaggaaaagattattggaaacaacatttacagtctaagaaaggagaaatagaaacttctgggcccttttaaggactagtctgccctgctgtacccaggatagcaatctatattcccagagctcctaggtttccctgcactgagcaactatatccatttcatatgaacattgtaaacattatacaacttctgtccaaaaaagttatacaaaattgagatatcatcacaatagccaatgccagcacaaatgaaacaactagcaaactattgtaaagcagtttttagatagtacataatactaggatataaactgtataagtaatacttgcaaagcagagggcaataactaataagtgtgtgatacaggtaaggaaaggttgaagaagtcagtggcaaaataaaagatccaacaggaggtggctctggagatgtgagttgctatgcatttgagattttctgcagggctccctagagagttctctcagcaaattcacaggccccagtgagaatgg

SEQ ID NO: 131337 - DNA, 1009 bp, Homo sapiens
cagagctaccaaagcagaatttatagaggtgaaaccaaagactctgcaattgtacaacaggtgattctgatcggtagcaaggttggggggctattcctggttttcttggtgactctttagagacctcttaatatcatgagccagatggttgaggttaaggagctctgccatttgtcattatgtgacctccggcataattatttacctgtacaaaccttgagttccataaatgtaaagggagttgatagtttctatctcatgttgttgttcagcagcttaaatgaggtaatccatgtagaacagcaggatgctaataagcttccagtaagtgttatttattatctatgggtagaattcatttaatcttcacacactcaaattttgccagctttaggacaaataagacttggagtctgtaatcagtcttgtgaaggacacagagaagtaaaacaattaacaataaaatacagttagattctttggtatttataaacttctaatttatgaactttcactgatgtcaacaaagctgggtgacattacagatgtgcaccagctctgtcctccatctatggggtatggttagcagatgcatgtacagtgttgctttaaacatagaagcaaatggatttctgaacctaacttcatagagacatgttttcttatgagctgctttaggagtacagaagaggttgggaggagcagggcaggttacagagtcatttgtgaaatgtcaaagacatttcaagcttgtctgtccattggacaaggaggcagtggaagtgtttcaatcccagggaatagcatatggggttccctgtattgtgaaaacatgcagtgactgagaatgggcagtttggtatgaggagaacacaaagttagaagcacctgatgcacttttgggccattctttccttcaactaatatttgttgagcttctatgatgggccagacactgctcagggtgctggggacatggccaagtgcaaaatagtgtctgctctgatga

SEQ ID NO: 131338 - DNA, 1008 bp, Homo sapiens
caaggttgagtgcccatgaaatagaactggcatctggaacagctgaaagtgtgagattctcatagatagaggattaatgtgtttctgggcctgtgttagttatgggtctcttgttataagaagcagagactcctgccagttaacataagcaaagaaggacaacttattttaaggatggggtggtatcctatagtactccatcatctgaaacaacatctttcacatattaagtatgtagtaaatatttgttgaataaatgcatcatctcaaccagaaagtcattagaaacccagaaagtattctgtctccaggtttttcctctgcttctatgtgcatatatcttttttcccttttcatccctgctactggcttctctgtttcccagtccacatggcagcacatggccacccatggatggcacttgagtttatactattcagttttagttgtataatgaggctgacttgacttcctcatgcccaactctaaattctgaaaaagagagaatgtgattgcctgatgagagctagtggcccacctgtgacacaaacatggtgaccagcagttcttccccaggaccctgtggctctggggtgggggtatgggcagcattctcaaatgcaaagaaattaatttcagactaggaagaaactcccaagagtgtccactatgagcccaatcagatagatgtcataaaaaattctaaagctaactctccatgtaccaagacaggattttctggggattggtggttgaagctggagtcaaaatagttcagcctcctgatcctgggtagaagtcagccatactcttcttctagggtaattatcactcatgttctatgccagccaagagaacacagaattgtctttagcgaaagtgtcaatttgaggcttcctaattttcatgatagcagctacttggtactgaataataatggaattctattcctggacttcgtgattccatctctgagcaaatgcaaagcagatcttggcaggtatatct

SEQ ID NO: 131339 - DNA, 1082 bp, Homo sapiens
gaatcatggggatggttatctccgtgctgttcttgtgatagtgaatgatttctcacaagatctgatggttttataaggaatcttcccccaccttcaccctgtacttttccttgctgctgccatgtgaagaaggacatgttttcttccccttccaccatgattgtaagtttcctgaggcctccccagccatgctgaattgtgagtcaattaaacctctttcctttttaaattactcagtctcaggtatgtctttattattgcatgagaatatgagaatggacaaatataaagaaaatgataaaggttaaagttttgtatatttataaatgcttttaatttctattttaaattaactgtacagaagatcaatgcagataaaatttaaaatatagagatgtgtttttcttaaaaatttgttttcaccaaatagatttatttgctatacattatcaaaagtttcaatttttgtaatattgtggtcaaaacagcattattaaatcattaaatgtgttcatttttagtctgtttccttctgtttttgttttgcaccctggggagagggttttgtggggtttaaagcttacatagtttgggaaattttcctacaaaatttgaaacattaaaattagtatagtgtgagtattattttagaataataacaaaaatacaaatttaaaagagctgacaaataccacaaacatcacaaaatacagaaaaataagtttttattatctgagtgacataaccctgtaaaactttttggttttcatattttgactgtttgctcattaactgtctctttctaaaacaataagtttgtattatttttctatattaagaacagataatgcagtctttcctctattgtgtttgcctaaaatttcttggtattactgatatttggatttatatcatgtgacctctcacatgcgcatattcactggttataataatgatgtaggtttgagccctaaaataggaattattatacattctacctcctactattcggtatgaaagaaaaaaaaataaggtatgtttataattgtacatgctctcttgtcaaatatgttccacatttc

SEQ ID NO: 131340 - DNA, 1382 bp, Homo sapiens
aaaggagtaaaaatctatactagcctttgaaattcgggaaggattttatgcattccagtagacacaagagtggattgaaataactgatcagttgaggtgtcaacaaaggaaaagctcattaggagaaaaaatcaaaaggatctcactctaattctgtggaacaccaaaatactgctaagttcagagcaacggctcagagcaacagcaaagatgtaggacatccattgtagaacacatctccattctaccagcatttcatgcaaacagcaccatgatgacacaagaagcatcgtggactgcatatgttcaacccaagctgtaaccacatggctagctggctaaataaatcagaggatggtgtggttggtgcactgagatccacagctccaagagccagctccacctcttactcaccaccttcatcaagtagatattcaaggaagaacactcactggaacatagatgtacagaatccgcaaagatctgagcaaaatatcctgaccaggttctggtaattgtggaaaagctctcaggctctcaggctgttaacactgacaaccagaggaagttgggtccagttgatgccactgtagctcatttaatatgaatcaccaggaaaaggattcagcttccttctgaaaaggagatcttcctgtttgtgaacaagacagtcccatagtccagcctaactatgggacagcttttcagaaggaaaaagatgaagattgattcttgtatgttctggcctacagcacttggaacattttgggcttctgagggccattagatgtgtaggtgcaccgttcctgtttgtgtatcttgtaaacagccagccattttcagttattataccagaacctattcacatagatgaacaagtgcatttgtacctggatttatttcataatattttgaaagatttgtttctttagacaaattatcatgtagagtttcattttgagtttttctttttgtgcactgtcctcatggctttattcttgagggaacttgttcttctgaaaaccatatttaaggaaattatttccagattgaagggaggtaggtgtagcattaaagtgaaagggaaggagatgatacctttattctggattatatgtgaagcattagataggtaagtattaaaagaatataattaaatccttagcaatcagaacacttgcttccccagattttgccaactgccaatcatgtcggactgagctagtctgttcttcttcctgaaattactaaggtaaataattaacaataaaactatcttttataaagtcaaaaaaaaaaagtaggggtgatgccatggcagagtcatacggagaatagatgtgtcaggaaacacatagctaacttcagctggcacaaaccct

SEQ ID NO: 131341 - DNA, 1050 bp, Homo sapiens
tttgtgttaatagtcaaatacttacctttggagaatacttacctttggaggaatgtataaaatttctcaggcagagtcctggatataggaaaaagtaatttatgaagtaaacttcagttgcttaatcaaactaatgatagtctaacaactgagcaagatcctcatctgagagtgcttaaaatgggatccccagagaccattaaccaatactggaactggtatctagctactgatgtcttactttgagtttatttatgcttcagaatacagttgtttgccctgtgcatgaatatacccatatttgtgtgtggatatgtgaagcttttccaaatagagctctcagaagaattaagtttttacttctaattattttgcattactttgagttaaatttgaatagagtattaaatataaagttgtagattcttatgtgtttttgtattagcccagacatctgtaatgtttttgcactggtgacagacaaaatctgttttaaaatcatatccagcacaaaaactatttctggctgaatagcacagaaaagtattttaacctacctgtagagatcctcgtcatggaaaggtgccaaactgttttgaatggaaggacaagtaagagtgaggccacagttcccaccacacgagggcttttgtattgttctactttttcagccctttactttctggctgaagcatccccttggagtgccatgtataagttgggctattagagttcatggaacatagaacaaccatgaatgagtggcatgatccgtgcttaatgatcaagtgttacttatctaataatcctctagaaagaaccctgttagatcttggtttgtgataaaaatataaagacagaagacatgaggaaaaacaaaaggtttgaggaaatcaggcatatgactttatacttaacatcagatcttttctataatatcctactactttggttttcctagctccataccacacacctaaacctgtattatgaattacatattacaaagtcataaatgtgccatatggatatacagtacattctagttgg

SEQ ID NO: 131342 - DNA, 1357 bp, Homo sapiens
ggcattaaattggtttctttaaaatgctttggtggcacttttgtaaacagattgcttctagattgttacaaaccaagcctaagacacatctgtgaatacttagatttgtagcttaatcacattctagacttgtgagttgaatgacaaagcagttgaacaaaaattatggcatttaagaatttaacatgtcttagctgtaaaaatgagaaagtgttggttggttttaaaatctggtaactccatgatgaaaagaaatttattttatacgtgttatgtctctaataaagtattcatttgataatctttgtggtcatcttttacaccattcactttgaaattcagttaaaggtttgatataaatttggcagagcttatagaattataatgtataaaaagttctgttttaaacatttctgtgtaaaagtctctcaggaattgtcagtaagtcttttttctttgatgaaggtgaaagaggcaagtctttggaagtaacgttgcaaaggaagtttaaatgagaattctgttttgccgagtgtgatgacttatgccagtattcccaatactttgggaagccgaggcagaaggatcacttgacactaggaattcaggaccaacctgggcaatatagcaagacctcatctctacaaaataatttaaaaattagctgggtgcatgtggcacgtgcctctagtcccagctacttgggaaactgaggtgggaggattgctttagcccaggatgttgaggctccaacctgggtgacagagtgagaccctgtctcacacacacacaaaaaaaaccactatccatgctaaaaagaattgttttatttaaaaagcattcatttataccatgttttatatgtttcaggcatttttttcacatattcatttatttctcatcataacaaccctatgaggtgtatactcttatcccattttaaaggcttggagactaaaaaaccttaagaaacacccagtgctgcctgcctagcaggtgagaaagctgggacttaaaccccaacagtctgactccgaagtgcagactcttaatttctgtttgcctcagttcacccagattttatatctatatccaaaaatgtgatcttttcttcacccagagaagttttagcagaatgtttaacatcatagttattgtaagtgtcatatcttagaacatttttgtcataaccaaggactcatgattttagctgtaagaatttaagccaaacctgcatgatggagaaaaggttaggccacttgcctctagaacggtccctgagtgcttgtctacctgagtgtttttccgctttgtcacttctggcatgaactatgggggctttggtctgctgtattac

SEQ ID NO: 131343 - DNA, 1044 bp, Homo sapiens
caggaaaggtcaggggtaaagcttaaacctgggaactagcatattgatgagatatgaaggacgagaagaaagagtaaggccttattttcattactctgaaacaccatacttcctcttttgcacattctgttccctctgcctggcgtgttctgcctgggaaacaccacctacttatccatgcttcagatctcagcttgggaggatcctttcctgacttttgaactacgttaaactcccctaccattgtttcatagctctacactgttccctttgctggtttgtaaatgacacacacactggtaatgccatagaattgattcatctcatgaatcacgacagctctcttgtctcttggcttgtgagatttggctcgtagcatgcatcctagagagaatttggctagagtaaggagttttcttcatgaataattgatttttggatttttgtctttgcacaggggtctggaattatttccaaagggtattggtgaagaaatatgcttcggaaagaaatggagttaacgtgataagtggaccaatcttcgactatgactatgatggcttacatgacacagaagacaaaataaaacagtaagcgtttcatttctactcagtgtgtgatttttaagtcccaagatctcactcaagaagtttttcaaatattcatatactagagaagagatgacaccccttaagttttttgaatttttcaatatatatatatatatatttttttgagacggcgtcttgctctgttgcccaggctggactgcagtgatgtgatctcggctcactgcaacctccgcctcctgggttcaagtgattctcctgcttcagcctcctgagtaactgggattacaggcatgcaccaccacatccagctaatttttgtatttttagcagagacggggtttcaccatgttggccaggctggtcttgaactcctgacctcaagtgttctaccctcctcggcctcccaaagttctgggattccaggtgtgagccactgtgcccagcctgaatttatcaattcttttgattaaat

SEQ ID NO: 131344 - DNA, 1083 bp, Homo sapiens
gcttactttaaatgctcattactactcactttttatgctgaaggaatgcatatttgagttgctgtatgcatataatgatcaatgtgtgccttcttcttaattaaatcattggtgtacctgataagcctcttcaggggtcaaaataattaattctacagaaatccaatcctattggctttccattcagctgaatcatttcaaaatttattacataatgtttcctttatatacaaattgtaaattctttacaactaaaaaaagcattctgtaaatacagcatttacattatggttttgataactgtaaagcttgacccatggttaggtgatcagatcaaccacaaaagtgttaggaaaactagcttgattaaattaaggagaaggtgctatattaataataagtaagctagccattttaggtaacttgactcttccaacatttctttaacatttgatgtaaaatttaatatgcacctaacacagtttattttttttcttttttagagagacacctcctctatgggcgacctgcagtgctttatcggactagatatgatatcttatatcacactgactttgaaagtggttatagtgaaatattcctaatgccactctggacatcatatactgtttccaaacaggtcattgagaaaattggattttatattttttattttattacattcctcatgttaatacaatgattccttgcttaacagaattttgtcttagaaaatattttattttttcttaatgacagaaatcctatgttggatttattgtaagatattttgaattagcctttattcaatgttctggtaattccatgggaatatgttaaactttgaaggtagatcactaattcttttattttcttttactctgcctaagtcattgcccaatagttacagaaactgccaaggtttgtttatttattttaatagactttatattttaagagcacattttatttctcagcaagattgagtgtaaagtgcagagttcccacatactcacccaccccccttcaacctcccccactatcagcatctgttttttttttttttctaatgttttgagaccg

SEQ ID NO: 131345 - DNA, 1050 bp, Homo sapiens
gaaaccccttctctactaaaaaaatacaaaaattagccgggcggcagtggcgcgtgcctgtaatcccagctacgtgggagactgaggcaggagaattgtttgaacctgggaggcagaggttgcagtgagctgagatcgcaccactgcactgcaacctgggcgacagagcgagactgtctcacaaacaaacaaacaacaacaacaacaaaaaaacacacacaatcacctcaaacttaagagcataaaaataagacacatcttcttagtgaatcactgactctcagggctataaggagctatagttagtaaggttacatctccattgctctgctctgagtggaacgtgagtttcttacttaaatccctgaagtgtctttttataccgctgaagcttaaagtttgtgtattttcatggaaacaaaccctcatggatacattcagcaagcatttgttgaatactgacactgggctggcactggttactctgacacaactgtaccactgagagtttctaattcatggcttcaaagtggtggcataaaatattaggggggaatctagaatagctcatgctattctaagtctgctcatggcctagtggcaccaacatttaatgacacaagagagccttcaaaaatatttgtcttattatgtgcaatgcatttccttgcttagatgctggaatatgtataaacctcaatgctctttctcctgttgctctctcctatcgctgtctcttgggctttgtttccttttgggctctatcttggtcatttcttcagtggcaaagcgatgttttcttggtctgagttctttcaggcctttatggtgtttcctgtgtcataaatttggcctcccatttaaaatattcagtgtctgccctactggaggagatccttgtgaatgtgaaccaccatgtatgtgagcacacatgtattatgttcagggcaattacttcccctttctaggtacctttgaatacatatgaaggcttttaaagtagtttgtaaacctaaacttctatacagatgtaaagttgtactattttta

SEQ ID NO: 131346 - DNA, 1034 bp, Homo sapiens
cccagagaagtgcaggaaaaagtgatactgacattgatcacccttgggttgtaactatcgcagatacaggcaatagttaatcaaagtcttgttccttcactctttctttctgggaatctctctctctctattcatggtcaggcaatgaacttgggtatttcagaaagctgtggcaagatgtagttagtccagaatggttcaggaggtaaggagggggtgcctgccatctacatttggttttgtccagttctgatttgtgttcacagttttcagacccatagaaggtgaagggttttaaatcttaccatatctcatcaaaaaaatataagaagcacctgcctccttttcttaattttcattagatctcctgggattgaagccagctcctaataatgggacccatggaagtttgaatcatctcctgcgcactaataccttcaggccaaccatgccagaggaagttaccagacccaattatccagggattatgtaccttcagtctgattttgacctgggctgcacttgtgatgataaggtagagccaaaggtagaaataatctttatgtttattatggagaagtttgttgggtggctaacagtgctggcccatagaactttctgtgacaatggacatggtctataattatgctgtccaaaatggtagctactggctagtgtgactgaggaactcaaatttttatttcattactttataattaaagagccctatgtggcttgtggctaccatattgaatagcacaggtatagaccatgaaagacaaaaagtagaattcatgttgctattctgtgcagtcacagttctcaaccaaaatctttttctgttttcttcaactgtggatcacatgtctattagtcatggtcccgacgggagacaggtggcccatatagaagaggttttgaaagagagtttaggccaggtatggtggctcacgcctataatcccagcactttgggaggctgagatgggtggatgaattgaggtcaggagttccagaccagcttggtcaacatgg

SEQ ID NO: 131347 - DNA, 1026 bp, Homo sapiens
agacaggagatatattagagagttggaaaatgacattttgtaaaagagacacagaactgtatattccatttataccacccccagctgggaagagtttgatgcaacctagggtttttttttttttttttttttaaagaatagatctttttcataaagactctgtcaatagttatgtttgttgttgttgttgtttaaatcatggtgacttcctttgtcttgctattctggctgagtgacttaaaatgtaatcgaggtaatgcactttcaaccttctagtgcttgcaagatgatatggctaagtaaaagtctagagaaaagattatacagagaagccttaaaccatttaaagtcaaatacaaaaatctcaaaagtcagggctcttcccattaagttactaaaaactaactaaagagatgcctggatgttatctttcgtgtctatgttaagattttcgttttagtcttgcctgaaaatattctttttctccctccccataggaatggaagatgtcacatgtgatagaactgagttcttgagtaattacctaactaatgtggatgatattactttagtgcctggaactctaggaagaattcgatccaaatttagcaacaatgctaaatgtaagttgattcttaaaatattaagtggttagagtggtaatacaaaggaataggtaagggcttgttttctaaagctgaaatacttgggtaaaaattctggctctgctaccgcttagctgagtgaccttaaataagtcatttagactctaagcctcagttttttcatctgaaaaatggggatgataaatgctagcagctacctgtagaaattaatctatgcatattgcttagagtggttcctggcacatagtagcattatataaatatttgctcttattcttattatgtggaaattgcacttagtttgaagcatattcatgaccataaacagaagtttataagataagaattttttcaataagaagttcaggctgatcatttttatagatgaaactagagggtc

SEQ ID NO: 131348 - DNA, 1016 bp, Homo sapiens
gacatatttttatcaaacactcagccatcattgtggaagacaatctgtgaggtagtatccagtataatttcaaattcagaaggtgggaaaggaatggttagaaatgttcccacattttcagcatagatagtaaaaaatatgatggagtttgcaaatctaaccttttaaatatttttaaatatttaagtagcctagtaacccataggacactgctgactataattaagttcattgttttcagatgaattagaaatacaggtaaacatatcttggtttaaacatacttggttaaacatacttggtttaagtatttttgacaatacttaagttttttgacaatacttaagtattttgacaatacttgcagcatgtgaccaaggagtcataagtgtttctgaatgctttgacatcaattcagaggtgatttatttaagcactagtaactaatagctacgtaaaaccactcttagtcttaaatcactgaagttatataagtcagatgctctttttctgtccctttgaagtttaacccgtcttgtatgattgtgaaacacaaatgataaaatgagataaacatctgcatacatgatgccagtaaagaacaccaaagcaagaatggctgttttatttttagattgactttctttgagattaacctaaagggaacaaaaggaaccacattttatcaaaatgttcacaaaacaaaacaaaacacctaagcagttccatgttccctacttaaaagtttgacttcttgggtaatagcatcccctcaaagaacctgtggggtaggcaaaacggattggtatagccatccttttaaaagtaggactccggtactttcgcttggctgctaaggggagaacctgaagatagcactacagaacttttgactcccagagcacactcccttccatggaaccatttaaccctcctgcagtccaggagataagcaaagtggtcagttaataactatgttcaaattatacagaacattttctttatggcaaaagttt

SEQ ID NO: 131349 - DNA, 1691 bp, Homo sapiens
gacaaggagcctttcactttctccagccctgccagtggcaggtctattcgttctccttccctttcagactgagaaggggacaaaaagacctttcctttcatgtccagaagaatgtatgtaactaaagctttgtcctctgtgaagaattataaaagggaggggggaaaggattcgcctctcctacagaaattctgaattcatttaagttctaagcatttgatttatgttatttatacagttgggatctaattaggaaaatgtgttttgtagttctggataaactatttcatccgctgtttcctccccaaaacacacacacagagcaaactccctttcataaaagccctcatatccactggcagtccccgttcgcatcatggtctccatgtgtaccgccaaagtcaattatgtttgaaagcctttggtggatgttatggggcaaagttatgatttacacagaagcaactgccaaatctgtggtgcaaccactatctccagtgaaatattgtataacaccatttggaactactgaaaagacagtggcttttctacagtactcttccttattgcaccatttttgtattaacgtagaaactaagcatcagaatttatgaacaaagaatatgttatttttccttttgctctaaaatactgagatttggggaagcaattcttttttaaaaaaattttgaataactatcttttgataacacattcggcggttacgatgttggaatttagcagaactatcaaatccaaaattattttcaaatcaagatgtttaaattataagtttttttgttttgttttccagtaagtataaatgaaaatattcatatgtaaaatatgttttgcttaatgtggacaatttacacacccaacacatactgtttccaaaattatttctatatgacacaaagtatgatacctttaaaaaggtgagcttatatattgtttattaacctggaaatagacaatttggctctcataccataagcatttaaaaacatatgaaatattttgatttctttatatggtggtgtgtttttatttctgaattttccatgtgctttaatatttgtttaagaatattttttatatctgttcaatttttatcattccccttatcattagaaagtttgacaaaaatacttgaatcttggacctctaaatatacttttagttgtgtttaacttgtttaataaataactttttaagttgatcattctgtctttgtagctttttatattttgtgttaccttcttgtgtgtgtatatataataaacctgtccacatagtttgcagagagctttgtgaataggtgggatttttagctggcctcactaggaggaatgatttcagtaggctgagatggggtaaagttctctcagcagaagaaacagtatcttcaaaggtatgtaggaaagcaagggtgtattcaggaattagaaggctgtgcagttggcctggagtataagtgcaaagggaatattatcagatgttgaagggcctaaatgacagttatttaaagtttcaattaattgaatgttgtccaactgaaattatttttggaaaataggatattttagagtgtatagtgataccatatatagaattcccaactttgaaaattcaaagcacacatttcaaaataattacttgtgttataggaagacattgataaataatag

SEQ ID NO: 131350 - DNA, 1014 bp, Homo sapiens
aaatatggatttccttttactctgatagagacattcaggaaacaaagaaaaaaagcaattctggatttctagcttttcttgaaaaagtgtgagaggctttttagtaaggcgtgtgatctcttatgccgcacccagtagtctgtttactcatttatgctgttcctcaggacaaggcttttgagtttctggcctctgctttttattttattttattcatgagctgagatgaagtcctagatggcccccttagagccaaggagcccgatgataattgagaactggaatgtgttacagaccttgtctaggagggatagaaaaagaatatgggtttaaagaagagatggaaactgttaagtagaggacacattatggtttactttttaaccttgcttccccagttttccctttccttgcatttgatagtagaatattttagggcaggatcatatgtgggtgttagattaagccattgggatgagaagggagaaatggcaagagtattttccttcattactttattatttattttccttttcctgaggtaaggaaggggatataaagaaatggcctttatggttcccacggtgatagggatgaacatacaatattctctcccttctcaccacagcagctccctgtctgttactgcagagcttgaggtgactggactgtctcccaggttactgtagggattgcagtgctggagaagagaggccgggcaaggggaacaaggagcaagggaattccctagtggtttttgtgggaaagaagcggagagtttctgcagctgcctagctagggctgcagtattatgtaatgccttcttgcataagtcagaaaaacacaattctggtaaattttttaatttaaaaaaaaaaaaaaaaaaacttctttaaagcttgagagcttgccctagaggtctttcttttgaaaccagtacaaaaaacagactttgatttttttatccttaaattataatgatataattctactttttttttacagtgatctaaa

SEQ ID NO: 131351 - DNA, 1737 bp, Homo sapiens
caagtgatccagctctttttaaatcttatgctgaatatggccactttgtggacattaggatagcagctttggaagcagttgttgattatactaaaggtaatactttagaaatacgtgctcatatcattttagaaagaactatttactttttaaagccagtgttgttggggttttcgtaatatgtataacacagatattttaattttaaattcttgacttagtgatttagaaatcatctttgataaatgtagaattcacataagagttaataaatgagggaaaggaataaaattataggtatctttagcctttccaagaagtcagttttcatcctgtagctttaattggacgttattttaggaaatagaatatttttgagaaatttctaagaaggattcaagaaaacatctcacacctgtataaaaatttgtgtctgtgaaagtagaggactagacataaacacaaacttcaggaggggaattaggcaaggcatcatgaatatagaaaaaacataaggccaaaaaagtcgctaagggaagaatacacatatttttttttaatttaggggagaaagatacagagatggaaatgttaaaaagtcgtgaagaatagagcaggtagaagacaagctgtaatccaagaaacaacagaatactctgggggggcgtaaatgaagcagacctacagtagtttctgatgaaattttaatttttaaggctaagggaaaatgtgtgagtttctaggactatcagaaccagattatggtgcaaggcaaaagaatagtgtggcctctgaattctttagaatatgtagattcaaaagacagtgaacaaatggctatgtcatttttagggaaaattatgacccaagattttctgctttgccaaagttgttgctcatgtagccttggagaattaaagctgcatctcttatgtaacattcttaaaaacataactcccaaagataattttcagctgacctggatgtgagtcaaaataataactcaagactggtgaaaatgtgaaatgaaagaactagtgatgaataattatgcctgtcaaatacttaagcctaaatatttgttaaactggttgtaaaatgtaatgcatatttcaaaaataatttttaaaaaatatgaaaatagaagaaacatggaaatataatctaagtctaaaattccagattctagcactaaaatatgagaggagtaaaaaacttaaaagtatgctaaacttttatctgactgtggaaggagaggaagggctgagagaagttcttcagtagatactggttcatttttaagtaggggaaagtatacttacatctttgtaatttttggtaaatttctgtagaaatacttgtttacagtcagaaaataaagggtaataacagcataatgtgtatattcttatgtgttgacccaacttcgaaaaggactgtcatttgtgcttcctttttattgaaggttaaaatatcctttcctgttagaaataattatttataaaaacagtgattttgttgttaaatgtattttttggcatgaaagaaaatgtaatcctatatctctctccatttctgttttgacaagttttgagatccaccaaatatgtcattgttgccagtcttctttcccaagatgtatggatagtttttaatgtctcataaatatgagtaagattttataagttagtactaccttaaatgaaatagaatactaatattaggattttcaaaaga

SEQ ID NO: 131352 - DNA, 1137 bp, Homo sapiens
gttatcacaaaatattctcagcatgctgatagaattcatttgcttgctccatgttgaatttccctggccacagcatctgatttgctgagtataaatcaagccatatccaggtcacctttcaataaattgcttctatgagaattgactgccatgtagattaggatttgtttttttttttagtggcttccttctcttttctgtttctctggctagaactcctacattaaccctccagtttctttatgctttcctcctattttctatcattagttttccatcagtaaactaatgtattgttatagtgaatctcttactgttttcagagtgaccacatgcaaagggtggagttgaatgtttaccagaggacttgcttgtgttttgggaaaatttttattttatctaaaatgtaattatacaaattttattttgttaattttgatcagaagagttaattttgttatcttcacttaatttttctttggcctagttttcagataactattatcgtgcagaaatgattgatgccctggccaactctgttacacctgcagtcagtgtgaataatgaagttagaactttggataacttaaatcctgatgtgcgactcattcttgaagaaatcaccagatttttgaatatggaaaaacttcttccgagttacaggcataccatcactgtcaggtatgattaaattccttactttaaagttatatgttcttataactgtaaaagaaatttatttttgttatagaaaattgggaaatatagtaaagtaaaatgagaaaactaaaattctgtatgattctaccacccacagataaattattagtatttggagaatgtccttctaaattttttctctctttaactacataaatttttaattacttgagattatactgtatatgtagttttgtattctgtttatatcatactttctcatgtcatcacaaattcttcataagcattgctttgatgtctgcatattcttttatttcgttggattttatataaacattctctattgttagcctttttttaagatgacttttcacttttaccagctttatatggctatcatgcagttctgccaatttaagagtttgctaaaagttgattcaaacataaacaatttta

SEQ ID NO: 131353 - DNA, 1064 bp, Homo sapiens
gttacaaaatgtattttttcctgttagctactgtcaaaaaaattggaaagtcagtgcttttataccaattcacctttctgataatacttctagtggacaggagagagagagagattggtgcctaaatgaaacttgagtctcaaagggcagaaaaggcataagacaggtatttctacggaaaagcgcctttccctcagttgttcctatagtactaaaactgactgttgttgctcttgttatctctgcttcttcaagcaagaaaatgagccattttcctttctgacctccattttagaggatatagttattttgagtaagaagaggggctagtccatatctcgccatgtgctaaagactgagatgtctatgcatctgtagtcctgcctagcatttaattagctttgttttactgatagagttaaccagtgtgtgtaagtcatgtttctacattcttaaaaatgttgcctatgaaaatttggaaagagaaaaattaggctgcatttcagataatttaccattttgtccttaggttgaggattgggtgttcatgaggattaggtgttgggacaatcaatttgttctaagactgaaggttggctccacctacttatatcgtttattgctgaaaatgattgtgaggaaatgaggctcctactcaataggcaacgagctaaaggcacctagcacagaaggtagtagagcttaggagttgaataatggtccatctaatgctaaaatctgtaccttttccactgtatcacacagaagtaattctaaaatctgtgccttttccactgtatcacatagaagtgaatttatataatttacatcacatatatttcctccagcaaatgaaggccaaggcacatagcctacagagtgatgtgcagtcatggaactcttcccttagtttcctgcccagctcttctcttatgttagaatgctttgagatatgttgtcagtgggaggggttggggtgtggaggtgttaggctccatccagatatctatgtcagcccaagagtaacccttttctatttatagttcaatgaattgtagtaacaa

SEQ ID NO: 131354 - DNA, 1017 bp, Homo sapiens
tttcttaaccttctgcacctcagtttaaaatttatcttttttggaattaagatcaagtatgtaaagtgttttatgctatgcttatattaagttttctataagtggaatttttagaaagtggtggttagagtcattgttttaggaaaggatatgggaatgacaggatggtcagcatttgagctatttggatatcatacatagaggtttttttttagtaatttcataatgaaggcagagatcagattaactagattgaactagaaaggaggagtgaagttgaagtagagagaactaatgaagcctattctttcaagattttagtcaaagatataagaacggatactatgttgaggatgaagcaaggttgagaaaaggacttcttgggtttgttttgtacaggggaagaacaaacttgaggcatgtatgacacagggaaaagagccagtgaagaggcagagatggaatagtcaggtgggagaaagtaaatagagacggctgagcaagttctggaagtgttagagggtggggcacattaaggaagtaaattttagaaaacaacattcctttttttgaggcaggtggaatgtagattaaaaacaagtgaaaagatagatgttgaggggaatgttaggcaagttgaaatttatttacgatggaaaagaagtaggttgcacagcagcactggggtgccttttgagagtggaagccagaatgtatttatagtaaatctaatcaggacagattcaggatgatccaagttttgggaaaggtaataatggtgtgatcaaagaagtctgtggcatcctgttattttgtttttaagaactgctctgtattaccatttcacgaatttatggtatagaagcaagttaatttctgtgtccacctgatatatctgtctcatgatgccactgtgctttcatgtagcttaggtcagtgtttcaaattggagttatgaaccattagtgaagggatcatgaaatcagtgtagtttttatttctatttttatttttttt

SEQ ID NO: 131355 - DNA, 1746 bp, Homo sapiens
gatgagtatcattagcttcttaatttctagtttctatataaactacaataaattataggtattatatattattcttactataattcttaatattattcagtacatcattaacattcaataatgtttatatgaagaatggttttgtattctggctgcttatatctttgcatatttctattgctagtagtctttagaataatctgtgtaataaatagtgaaattattgtcttctataattgactacaataaagttataatgcaaagtgagtattctatataattgaaaagaatctgttatatgaatttactaaatgattttatccttacaggttttcaataaactgctaagtctggctagtactgcttcatctcagaagttccagtcacatatgtggagtcagatgttggtttccacatctgggtttttgaaatccatttcaaatgtctctggcaaagatattcagccgttaataaagcagtgggtgtatccttttcaatagcagttcaacagagtggggaagggaataaggtatgtgtgcaaggggaagatggaagaagagaggtttgagggggactcaaggaagtatgaactgtttatatttctaaacaatggtagaaataatgatgaactgtgaattgtttcatctaagatgcctactagacattaaggtgcacacacatgtatgtttatatttgtaaagtttggcatattttaaagtactttctagtgagtaaagaatatgtgagtaaaaaaattggtttgatgataggataggtaagtaatctaccagacagacctgtaggattacttgtgaggtgtggtagtttagtgacttgtggatgtgattaggggttggcgcaatttgagtggtatcttggaattttgcagtttttgcatttttcactttaaaacactattaataactttgtatagtggttctgcttctttcaaaacacaaatttgtcagtgtttcagaaattttatttaaatctgggaaagcatttttcacaagtactttgaatactttgccacctggtttactgtagcgtatgctctcaaactttgaactggtgggaatgcacttgaaaattattaataccatgatggataacttactttgtttagtacatattcgtttcagtatgtaaactttcctttacaattcttcagagatcagagtggagtggtaaaattttatggaagttttgcatttaatagaaaacgaaatgtcttggaactggaaataaaacaggactatacatctcctggaactcagaaatacgtggtaagtctttttccaaaatcgcctttgtactgctatctcctcagtttcaatagaagagggacttagggatgggttactacttagaaattaatgagattttgtttgaagtggataaattgagaaaacattgactttgtcaaagaagggaagaggaagtacagagatttctggggactcagaatcttccagttgccctctttggcaccaattgcctatctaggtctccagatactcattttgtgtaatattttatatcttgatttatatttctctgtacacataagcatacatattggtattttttaaatcacatctctgaacagtacgttttttttttaaaagggaccacttaaagtgacagtgcaggagttagatggatccttcaatcatacactgcaaattgaagaaaacagccttaaacatgatataccctgccattccaaaagtagaaggtaggcat

SEQ ID NO: 131356 - DNA, 1083 bp, Homo sapiens
gagtgatgttaattgccatttttctagagaaagcaaaaaaaaatgaatgaaggaattaaactttaggttttagaatatcattggtaatggcataatgcatgggattggcaataatagcatgtagacttttagaattgaacagtatagtcctggctatgagcaagtatttccttagaggcagagacagtaagaacagagttgggcaggagggaagcagcactgtcagagtagagcatgtactctggtaatttatacctgaagcaagactgtaaagcagtctcataatgaaaggtaaaggcaggtgtgaataaggtataataaatgggcaagtagaactcagaggaagttgggaaacctgataatttgttaataattttcattttctttatgaaggcagggaaatacacactacacttattccgttatcctctttgacattatctgaggagtttttatgattaaaagtaatttatgctttgactttttgcttaggtctgatgaatgggtgctgaagggaatttcaggctatatctatggactttggatgaaaaaaacttttggtgttaatgagtaccgccattggattaaagaggtaataacagctagatcccttatccacttacaagtcttatgtcctccatttttaatgactgtaaaatacttttaaaatactgcttgaaaatccctaatttttcccagcaaaatgggaattgatttactgagaaagactaatggtctattttatctaatctccattgtcaacattggcccctaaaaacctttttttcccctaaggaagagaatatttaagtttcttaaacatcagattggtcgttaggtatgtcccagctccttatagtagtcgtttgtaactgtgcttcctaaatttgttagctttgtaaccttaatctttccaagtctctgtttaaggagggcaattgtagtgtctgcccataggcagagattattagacattatacaagtaatgtgcatgatgctttgcacatattaactgcttattatattctggctaggctttgaatgcatttatgttgtcattgtcacatctttttttttttttta

SEQ ID NO: 131357 - DNA, 1031 bp, Homo sapiens
gacaaagtttttgagataactcaaaaggctcatcttcatccagaattaactaatattagtattttccctgttttagtcttgtgttcataaattctttaaaaattgtacaaattattgtatgactagtatgaatttttttctagcactatttaaaaatgtactgatattgtcagaaatttactgatatcatcagtggaaaatgtgttctttgctttaagcaagttactaagatgatgaattttagctaaattttgaaaagattagaaaggtgggagaattttttctctatttagcttccattgttttaaaagtggaattattttattttcactgaataagtatttatttcttggttataatgagctttcttctcttttaaattccagcacaaatcttttacacagtgccatgattatagatgagacacctttgactagaaggtgtttagcccaatccttggcccagcagttttttggttgtttcatatctagaatgtcttggtgagtgacctgaaagttcatactactgagaagagaatcaagtttatttttcttttctttctctgcatttaagctgacctttgccctaattgcagatagctaatttaagagacactgttctatatgtatttaaagaaaaatgattataagtttcatcctaactttttggccatgaaatcaatatagtcacttatatttattagttaattaaattagctaatttaaaagacactgttctatatgtatttaaagaaaaatgattataagttttatcctaactttttggccgtgaaatcaatataatcacttctgcagtttataaggtaagattttggtaaaacagtgtcttaaagaactgaatgaattctataaataaaagaacttaaatgtacagaaatctgaagttagaattttaatgtcagtgttcaaagcaattggaaataactcaatatttaatgtaaaatagtactcctctgcaatattaataattatttagggatttgcctactagtgctcagctttgtaccagtt

SEQ ID NO: 131358 - DNA, 1035 bp, Homo sapiens
tttatatctaacttaaccagcactcagtttgaatttatacaatacgttacatactccaaaaaagcagttttataatttaatggaataaattctgaatgttagttatgctttataaaactttttgctgtgagccttttttagtttctagaaatgaatgctgcataaaaactgactaatatgcggatacaagttaaaattattttttaaaacactgaaagctaagaattgcttaactctttttagggtttgaactgatggtaccacataatatattttcttaatattgccaaatagtatttggaaacagattttattttatcagatttttttcaggttgtacagtaaaaagcttcagtagccaaatagctaaaggttttgtttgttcattttctagaaatgctaaaataacttgcatgtggggaaaacaatgtagagaactctttgaatacattttctatactgtcaatcttttttctagattttggttcccttgtgttgattcatactctgaattgtgtacatggaaattagaatttacagtagatgctgcaatggttgctgtttctaatggcgatttggtggagacagtgtatactcatgatatgaggaagaaaactttccattatatgcttaccattcctacagcagcgtcaaatatctccttggccattggaccatttgaaatactggtagatccatacatgcatgaggtaagtcagagctttcctctcttactctcctcctggccctttactgcttttaaaaagatagatattggcaaggcacggtggctcatgcctgtaatcccagcactttgggaggccaaggtgggcggatcacagggtcaggagatcgagaccatcctggctaacacagtaaaaccctgtcattactaaaaatacaaaaaattagccaggcgtggtggtgggcgcctgtagtcccagctactcgggaggctgaggcaggagaatggcttgaacccaggaggcagagcttgcagtgagctgagattgtgccactgcactccagccttga

SEQ ID NO: 131359 - DNA, 1493 bp, Homo sapiens
ttcatgctgctgataaagacatacctgagactaggaagaaaaagaggtttaatgaacttatagtttgacatggctggggagacctcacaatcttggcagaaggcaaggaagagcaagtcatgtcttatgcagatggctgccagcaaaaagagagagagagagcttgtgcagggcaactcccattttgaaaaccatcagatcttgtgacacttattcactatcacaagaacagcaagggaaagacttgcccctgtgattcagttacctcctaccaggtccctcccataccacatgggagttatgggcgctgcaagatgagatttgggtggggacacagagccaaactatatcagtaagtttggggttggatttggaaggcctaagtgtgcagtgtgggagttttggactttttaggcattgtacattgtcagaaatgttgagaggaggatatggcgtaaccaaaggtgtattttgggaaaataatacaagcaatagttataattgattggaggtagaaaaccaataggggcagcctgttgagttaatataggcagacatatggtaaaagtctaaactagggtaagtagtgtggtttttcatataaatctcagtcctcaattccatttcatgttcagcattaaatctttgtctttattatatagaccactgtaacttatgtatcaatgtgtgtatatgtttatttgttgcagagttaaaggtcctgaagatacacatcaatttttctttggatcagcccaaaggaggtcttcattttgtggtacccagtgtagagggaagtatggcagagagaggtgctcatgttttctcttgtgggtatcaaaattctacaaggtagattatagattcttaaatatttcaattaatttttaaattgcattttttatgtataagcaagacatacatttggtgtaaaacaagaaatactagttttattcccttccaaatttagacttctttcaaattactttctgttagtcattcctcttaaaaaaaaatttttttttcttttttttttttcagacagtcttgctctgtcacccttgttggaatacactggggtgctatctctgctcactgcaacctgtgcctcctgggttcaagtgattctcatgcctcagcctcccaagtagctggtattacaggcattcaccactacacctgcctaattttttatatttttagtacagatggggttttaccatgttggccagaatggcctttaattcctgacctcaagtgatctgcctgcctcagcctcccaaagtactgggattacaggcatgagccaccatgcccgacccctcctcaatcttacatctcccttcttctctctcattttcatgtctactgttctaaaataatcatctcacttgattccttcttttttaaaaactttatattgaagtaaaacatacatacagaaaattgcacagaatgtaaagctcgatgaattttcacaagtgaacaagcct

SEQ ID NO: 131360 - DNA, 1046 bp, Homo sapiens
cgtatctttttcctgtctttcatttctttcgtatttttttaaactaatttcagtgaggaaatgtaatatgtgtatatgtacacatataagttgcttttatggagtacaatttaaaaaccagttgagaacaacattttcacgtttctgtaagacttcatcgtattgttttcatcaaatgggaaataaggtcagataactatggaacaaatatttatgtagtagtctctcctgacatagtgaatataacggtgagcctgctgaaaattctctgcttcattaagcttacattatgatgcactaatgggtggaggtaggtgctattacattttgaggaactgagtcccatcctgatttgttttaaacatcttaatttttgtcaaattataaagcttgttgaatccattcaattttttgccacattgatagggaataattatttattcagtgcttcacgtattctttacatttgtatcaaaaaaggatagtggctttggcattccaaaattaatgaagaatgtgatagtcataataatagtcatgtaacttggtgagtagaatatatattctgttgtattcatagattaatagtttttaacatggtgagtagagcaaaccattacttggctaaagagtgttcttagaaattatataagaagataaaatgcttacaaataattggtatcaaatgatatttaagaaaatgctcagaggccaggcatggtggctcatgcctgtaatcccagcactttgggaggccaaggtgaatggatcactagaggttaggagttcgagaccagcctgaccaacatggtgaaacaccatctctactaaaaatataaaaattagctggttgtggtggtgggtgcctgtaatcctagctactcgggaggctgagggatgagaatgcttgaacctggaggtggaggttgcagtgagttgagatggtgccactgacctctggcctgggcaacagagtgagacttcatctaaaaaaaaaaaaaaaaaaagaaagaaagaaaaatgcttggtaagatacatggcttatt

SEQ ID NO: 131361 - DNA, 1557 bp, Homo sapiens
ggattagagggaacataggaaagtatctagtgtaatgtctggtacctggtagcagccattataatctagtcctctgtggttgctgtctgaattttgtcttagatatttctgttatagcctctgaaatttttctcttcacgttggagtcctgaaatattgctatttcatgctgtcccttgttttatgtttgagtacatcaattttcaacccaggatattaaaatcaattaacatatattctgtgtttcatctgttcgtctttcccattgattcaatacaagagggtggtgggcagtctgtatttaactgtttttcatgtgttggatacagagacattgctaccatacagctaacatggtagaactacatatggcctctggactacttgacaggaagtgattgaacactgtgatgtatttgctgctcctggatatggcagcagatttttcctacttgccttggtatcttttgtagctcttgctgttttacctgtcctaatttactcatgagcagaaactcatacttgttagcttcagtggtataattttttacccctttttttttctgccatgttctttcactcatcacccttctgattttgattccctttctgctctgtaatttttttcttcttccctttttagggcctagtctgtttagaaattctggtttttgagagtagtgagcccttttacttttttctgactgcctaattttcactgatagtgaatatgaaccaccaggatgataaagtatacataactcacacccattcagtcactaggacaatcatgtttgaaattaagatacttggagagcatatgtatgtatgtagctattagggattttgtctctgtagtataatatgtgtacaagtggtaaaaataaaagaaatatattctgaaacataccagtctttataatgaagttgttattctctatctttacagggatttgtggaactgactatatttcccacagttgcaaacttgaatagaatcaagttgaacagcaaacagtgtagaatataccgagtaaggatcaatgatttagaggctgcttttatttataatgacccaaccttggaagtttgtcacagtgaatcaaaacagtaagttatgcactttaaaagtcactatttttaacagttttgaaaaaatgtttttaatgattggattagtttttctcaaagtattttttttttggatcgttaatgggctttgaatcccaatctttatctgttttaccactctgtacatttggttcaagtgattttgctagctgtgcccaacgtagttactaagtttcccttcttcatgttaaaactttaaggaagtgttatctgggaactttaattagattttcttagtcattttttttactttcagtgtttttcttaattatttacttcataaattttgaaagtaattttcagtgggttagatggtcactgtaatctgtagaccagaggctactttaaaatattctataaaaaagttttagaaagtagataatgaaattgactgcattaaactatcttataaacatattaggtcta

SEQ ID NO: 131362 - DNA, 1121 bp, Homo sapiens
cctggctgttcggttgtcataataacactaataggccaataatgtcattttttatgaggaaactgaggcacagtgggctggagttactagctcaatatcatacagttactaagtggtagagctaggatttgaatacagggagtctacctccagaacacctgcttttcacggtgacactacactgtccttaaccttgtagtgtacagtaaataaaatcctataagtgacccagaagtagtcgtggaaactaggagaatgcctattttccactaccctcgtttatagtgaatgggagagtaagtagcttcttgtctaggaggattcaggaaccatttcatttaaggcaagagggtagagagggagttttagaaaaggttgaaaagcacaggggaaatgtttaaaatggagtgtgggctccaggagaatggttatctgtgaagtggtggggagagagcaagaagcaaggagtgagaagctagatgacccgagaggcttgcagttatgccagtggctaagggcagcagagattgaagacttgtagaggttaatgggtccgaatgtttcaggcagctgtaggttagagccctaggtggtggcagaggcctgatggtacaaggagactgggcttttcctatcttcctgaaatacatttcatcattctattattgttaccagagtttagaaaaccagatgctgttcttatgtcccacccaagtagcagttgacagtacttctttaatcttttgttttgtagttgtcttggttctaaatcttatctttcagctgatccaagctcatttaaatttagaatggtcattggatgacagatatgctaattaaaaggaattctggtcttccttcctacagcagctcatagtttacacctttaaacacagaatctttatcaactttattttggcctttgttcttttgttctctgtgtttctagctcacagatatgtgctgattgttctaatttaagtgtatggctctcctcttacttgggaattgagaacaaaggggctacagaatctctaggctttcttgagcggttggactaaatgttacctaaaaacaattcttgcatatcatttaaaacccttgtacccacaggcattatg

SEQ ID NO: 131363 - DNA, 1834 bp, Homo sapiens
ttttgctctctggcaacttggggtgtggaacgtacaataaaaacgccttcacactaataacctccaggcctgtccccaggattctacagcatgagctttgtgggtaaagagagctcaccaaattcagcctccagcagcacacacagctcagtagcagcgccccgcccagatgtttatattttcctccatcggccccgccccccgaccatgaggggctctagccacgcccccaagctcaagtttctggggccggactagcccagcgcgtctgcctacccatagggattccctctccagccaatccagtcagagcagcggagctgccccgaacaaagatggcgcgggaagcgtctgtgagggcagactgatccgagcacccaaaccctcggcggacagcggagccagtggtagccgcacggccctaaaaccatggaggagggcggcagcactggcagtgctggcagtgacagcagcaccagcgggagtggcggggcgcagcaaagggagctggagcgcatggctgaggtcttggtcaccggggaacagctacggtaaggcaagagacacagcgggtgagctcacgatggcactgccaacgcgtgcccgctgcagtcctgcgcgcacgcgctccctggctcgtggcttgcgactcgcgtggggcgccggaacggctgcgggcgcgtggatggtcctcggtgcgcccgcgcttagctgctgcagcctcggtccctgaggactcgctcgccaagcggggctgcctggcagaagccgacgagcgggtggtgcgcgctgcgccctagcctggctgctgcagtcctgtgccgggcaaagtccctgccacccaccgcgctgtccgtcttcccgtgtacctggacgccgccaggcctcccggctgacagcctgcgcctcatccgcgaagagagcaagaggggtcgctgtggggtcccgaggcgaccccagcccctctactccttgataaaaggagcaagaccaacgatagtcttcactaggttttcctttttgctgacaagtcttccttcactcccctgagcctcggtgttttacatctgtaaaacagggctgattcaagggctttttgtgaggttaaactgagagagcatttctgaaaccctgcacctatcagttaattggcacatcgtcctcaatcatttgggtccgcaagggggcgtggaggcaccttgtcgggctgccttgaggctgtgccaactccccgggctcgcacgttttgggcagcaggatccatggggaccctggctcctgcaagaattaagacttgcggcgtctcacggaacttgggaacaaggacgacccccagaatcccccttgccattcccatccctgtatggtccttcctctagggctgtttgggaatagtacttatggtctaactggttctgcagctgcccttcgtgtggttataaatcagtttgccaggaaaaagaaaacccagctctgcagcgtttgagccacaacttgtacgcgggcccctgttacttctagttcttagcctgaattccccagcttgttttggtttctaaatgtctgtgtttcaggacctgaaagagtgtcttgcaaaggtctctgaaggagaccaatattggaagtcagaattaactgatttttaatgttacaaaaggcaaattgcacctatcgattctttgttgatttttaaaaatacgtggtcagaattaaagggaataaaaactttttttccttcatcaaaagtactttctaatgaaacctgtcacgcggtgcccgtgtgaagagaccaccgaacaagttttgtgtgagcaataaagctttttaatcacct

SEQ ID NO: 131364 - DNA, 1029 bp, Homo sapiens
cccgccttggtctcccaaagtgctgggattacaggcatgagctactatacctggcctggagctacctttgattatcaaggtgtcaatatttttctccactattaataagattaagcttatacctcagtatatcattgcattgacattacaacagtaactttggcattgattttgtactgcatcttaccataaatataagtaatagtaatgaatccaaataaaagtggttttatgctcagataatactgtatgagtttagccttttattctatgaaatgggtagcacgtgtccacatgcagcaaaccttttgtactcatgtactgacaaggaactgtgatatgaaaagcatgatttttcttatgcctgtgttgactacaaaagagagaagctccagttaaacccattgagaagcatctatgaaatacaagaagctgggcttggagccaacacatttgtctacatgttcactatttgctgagtctgcgctaatgagagctttaagccaagaagagcagagtctgattactaaggactttattataattttttttttttttgagacggagtctcgccctgttgcccaggctggagtgcagtggcacgatcttggctcactgcaacctctgtttcccaggttcaagcgatcctcctgcctcagtccccttagtagctgggattacagacacacgccaccatgcccggctaaattttgtatttttagtagagacggggtttcaccatgttggccaggctggtctcgaactcctgttctcaggttatccacctgcctcggcctcccaaagtcctgggattacaggcatgagccaccgcgcctggcagactttattataatttacaattacatctttcaagtgaaggtatagtggttaggggcaggaattctttagaaaccactatcccaatgcaccaggatttattaagccatttcatttatcatgggacaaaaagttatttgattatttatatgcttaattaaccaggggaaatctcttcaattgtcttcctct

SEQ ID NO: 131365 - DNA, 1176 bp, Homo sapiens
gctctccctgatgctgttagaaagatatgataatttcagccaggcgtggtggctcacacctgtaatccctgcactttgggaggctgaggtgggcggatcacgagatcaggagatcgagaccatcctggctaacacagtgaagccccatctctactaaaaatacaaaaaattagctgtgtgtggtggcatgtgcctatagtcccaactacttgggaagctgaggcaggagaatcgcttgaacccaggaggtggaggttgcagtcagccgagattgtgccactgcactccagcctgggcaacagagcaagactctgtctcaaaaaaaaaaaaaaaaaaagaacgaaagatgtgataatttcactctcattgattcacagcagctatttgttgatggctccaatgctttctgaagcaatggacacaggtcatactgttagcctttggtctgtagaatcacaaggaacacttgctgggtgagatgaaaatgtaaggaaattccactatttctgtatttctgtaacagttttcctttccttattttattttatttatttcttttttatcctttttaaactttttttttcaattttccttttcttgattttatttttgtgctaagtgtctgtgatacatattatgaacatccgctaacatttacacagcatcttatattttggaaagagattttatatacaccattctgctgatccccaacatcctactgacccttaatcctatgagcagagaggaacctgagtgattatgttgattcccaatttagagatgaaaagctttacgtgaagtcttgtaatacttccttgctcaatgttgtgtccccaggatttggtacaaagatgggtatacaatagacaaggaataaaaaatatgctaagtggcaaaataaatggagctcagagagaaactaagtgacttggccatgggcacacatgactaagtgatggagactgctcagatttaggatttaggattttttttttgagacagagtcttactctgtctcacccaagctggagtgcagtggcacgatctcagctcactgcagcctctgcctccctggttcaagcgattctcctgtctcagcctcctgagtagctgggactacaggcatgtgccaccacacctggctaattttgtatttttagtagagatggcgtt

SEQ ID NO: 131366 - DNA, 1040 bp, Homo sapiens
gagggggtggtatattgggcaatattattattttttttgagatggagtctcgccctgtcaccaggctggagggcagtggcacaatctcagctcactgcagcctctgcctcctgggtttaagcaattttcctgcctcagcctcctgaatgcctgggactacagccatgtgccaccacgcccagctaattttttaattttttagtagaggtgggtttcaccatgttggccaggatggtcttgatctcttgacctcgtgatatgcctgcctcagcctcccaaagcactgggcttacaggcatgagccaccacgcccagcctattttagttattatttaaataatgtttttatatttgatctttctatatattttgtctttgtctaaaattgtccctgagactgtttcttctcagggaagaagttttcagtttccaggactaaacatttcatggcaatgcagtgtctttctcaagagtgagtataatctgggtgtttccagaaatgacttgcagggctgtcacaaacagattctaggctagctctctcatcagcagtccactcttggttaaagcactagattagcaacttctgtttccacagtggcgctcaaccaatattctggtagcagtcaggaggtcaaggtttaactcttatctgggaaaagaggcaagttacctaacttctgtaagtctccgtttttccagctgtaaaacagtgatattggcaaggacttgaactagattgcctgacatttctttccagttaagacaattcagtgattttggttatcagttaggttgataccatagaagagatgaggttgattccagcaaacctcgcagtagggagtggccaagtactctctcacctggacttttctctgctttgacttaccactccaccagaagggctctctttctaatcctttaacaaaagagaacagccaagtctctccagtaattgccaatcaatttttccttgattcaggacttcatttgttaaaaaaaaaaaaaaaaaaaaaagctgaaatgctacttagtgg

SEQ ID NO: 131367 - DNA, 1035 bp, Homo sapiens
aagtagggtgggccctgaacaatttgtgataaagagggtgcactttgtttcagtgcatttctagggtttttgtttgctggttgaaacaataaccccactggagagagaaaaagcagggagtgaggcagagtaggggatggagagcttttctcactctcaggagtggcaggagggttctgggttggctgtgattgtttcaccctcatatttacctctgtcatctagatcagaggctggagtcactttctggagcctttgaactctgacagtatggaaatcaccaagcgagctaaagatattcaatgacaccttcatgcctttagaacttctgttatgttattactgtctgggattggtttaataatttgtgctgtcatcagaatttccaaagtaattgctaatttttctttcaggctcaggctgcacgaagaaaaggttattaaagatagacgtcatcatctcaagacctacccaaactgttttgtcgcaaaagaactgattgactggctgattgaacacaaagaggcttctgacagagagacggcaattaaactcatgcagaaattagcagaccggggcattattcaccatggtgagtgcggtggcgagtcaaggtgacttgagagaaatggaaggactagatcttttcatgaacatacccacttaagaaagaaaacattttgctttattttatctccagtgtacctctccctgattgcattttcttcctgcctctaagaggcatttgggttctttctttttttttttttttttttgtatttttagtagagaccgggtttcaccctgttggtcaggctggtctcgaactcctgactttgggtgatctgcccgcctcagccccccaaagtgctgggattacaggcgtgagccactgtgtccagctggcatttgggttatttctatgtactgctttatacctgtctgtatatacatctttaaggaatgcatcatattgttttaaaagttttctatcattatagaagtgcatatttatgcttttgcaacttgatcaac

SEQ ID NO: 131368 - DNA, 1014 bp, Homo sapiens
tctgtagccttatcacaccatatttcaattacagttgacatttctccttacctcactagatttcacattctttgaggctgatgcatgccccaatatgctttagaagaatttgtggattgcatgatgaattgaattgtgtgaacttcctaaatatgatgatgatgatgatgatgatgatgactatggtgatggtgatggtgataataatagctaaaaatactgaggacttactctgtaccaagtactatgtaactattttacaagtattagctcatatggtacatatttgcatgcatgaagaatgtgatagtgaaataattcttaattagcatcatacttcgcttgagtaattaaataagagcgattttttttctcatttgcttctctgtgcatattgtgtttcagtgtgtgatgagcataaggaattcaaggatgtcaaactcttctaccgctttagaaaggatgacggcaccttcccattggataatgaagtgaaggcctttatgagaggacagaggctatatgaaaagtatgttccgcatgaaatcccccctgtaatcttgacttatagaaagaagcagaactgtgccagtctcattatgttgatttcagcgtggcttttctatgtgggctggttacataactgttcttttccatatgagaaaactatcaagcatttgctgtctctttgccagaaaataagtcaatttcataaggttcttaataaagaatttacttaaatcttattttctgtatttaagttgattctacaaagctccagaatttttgtttaccatcaaatgatgtggatgcccctttcctctcttatttttattttttattttttggcactgagtctcactcttgcccaggctggagtgcagtggcatgatctcggctcactgcaacctccgtcttctgggttcaagtgattctcgtgcctcagcctcctgagtagctgggactacaggcatgagccaccacacctggctaatttatgtatttgtagtagag

SEQ ID NO: 131369 - DNA, 1050 bp, Homo sapiens
ttgatctgctacttctgtggcctctttaccattctgccttcctcatttagttttccagggcaaccattagaaaaaggggtgcagaagcaatggcacgtgctttgtaaccctggctgccttacaagacttgagggaattgaaaaatacgtatttatcggccaggcacggtggcttatgcctgtaatcctagcactttgggaggccgaggtgggtggatcacttgaggtcaggggttggaaaccagcctggccaacatggtgaaagcccgtctccactaaaaatacaaaaattagcccaccatggtggtgagtgcctgtcatcccagctacttggtaggctgggtacgagaatcgcttgaaaccaggaggcagaggctgcagtgagccgggatcacgttactgcactccaacctgggtgacagagtgagacatcatctcaaaactaaaaaaaaacaaaacatatttgtcacataaaagagcctgttgtacagtggttgggggtaagggtctgggtgggtgtctgagtggtcagattaattggcatgatggttaaaagccagacagagtttgaagtgtagccctgtcaccttacctttgtaaagctcagtgtcctcattagtgacatgacagcagcaatagaacctacctcctagtgctgttgtgggagttaaacgatagctgtgtcaagtgcttaagtatttagctcagggtctctggtgtgtagtaagacctcacagatgatagccattccaaatacgagcacagtactgacggccaccctcgactgtgtccttcctgtgttatgcgctctgtcccagttcttgtctccgtttcttgaggtggaatgatcaccatttgatgtcctaatttgtactcagtctactatcacttgctttctatactgaaatggagaaactctctcatctttctgactcacatgaatttgaatggaagggatccatcagaacctccatttgtttacttgaacatgtgcatttgttttgttgctactttcttttaatttcttagttccttttgtaaaattctagca

SEQ ID NO: 131370 - DNA, 1023 bp, Homo sapiens
attagccaggcgtggtggcatgcacctgtaatcccagctactcaggaggctgagacagaaaaattgcttgaacccaggaggcggaggttgcagtgagccaagatcgcaccactgcactctagcctgggcagcagagcaagactccatctcaaaaaaaaaaaaagaaaagaaaagaaaagaaaaaagttgaattcaggattatcaagtcctctgtatagtaacaaataaaatcagctataaaagtgagtgtgtgtttgaggtacaatttggtttttcctcactaaacccagtagttgaaatgtatattttaaactaacttcgattttatcttcaaacttagaagagacttcttaattttaattcaacctcagttttgatatggaactaaatcccctcttaatctggttcatagacacattagtctagttgttttttttttttttttttttatccaaagggccttgattttctcagcagcaggagtttctatctccagctactattagtctctttatcctgcttaggagtttagacctgatgaagaattggcttaacaagcccgtatgccattagatgtctattgaattcctactgcttccttcaatttcttttccacaggaccaaagagaaataaaagggagagagtacatccaaagaggcaaagcccttctgcgtgttttatcttatcagaagtttctctaccctgtgtgttaggatctttctcctgttctctcccagtgcctgggacaataaatatttgttgaatgaacaaagggctctacatgttgtgatcgctataagctgctgagcctgtaccatgagctacacagagcttgcttttaataacaagcaacaatagccagaattcaccttgtctggcctctttagagcccacaaaccatcatatacattaatttgtttgatcctctgtacaactctgtgagttatatccagcaggcataattattcccattataaaaatgggggacatgagctgtggagagaggtttaatgactgagata

SEQ ID NO: 131371 - DNA, 1069 bp, Homo sapiens
atcacagctcactgcagcctcaaactcctgggctcaagtgatcctcccacctcagcctcctgagcagctaagactacaggcatgtgccactacacccaactaatcttttggtattttttgttgagatggggttttgccatattgcccaggttggtcttgaattcctgggctcaagtaatcctcccaccttggcctcccaaactgctgggattaaggtgtgagccagcatgcccagtctgttttgcttttaaaaataattgatcatattaacacatgacttgttttttaaagctctctttctaaattctgaagcatctttttgacctaagccccacaggccattttgtctccctccctggcttttgctcctgtacatcattcacatctattcccaggttacacagggcctcctcagctcttttgaattttttttcccagtgtacaaggagatcgctatcagcttatttctattcttgtactggcccctaaatgtagtagttccttctattgtagtgctgccttccctctaggttaatacgggtctgggaaatctgagtcagatatagatccaggaaaggtggaaatcagctcacatgcacaagcaaaacctggtgagtgcttgcagcaggcaaatattggtgtgtgtgtgtgtgtgtgtgtgtgtgtgttttgagacagtcttgctctgttgcccagactggagtgcagtggcacaatcttggctcactggaacctccgtctcctgggttcaagcgattctcctgcctcagcctcttgagtagctgggattacaggtgcccgccaccacacttggctaattttgtatttttagtagagacagggatttgccatgttggccaggatggtcttgaacttccaacctgaggtgatctaaccacctcggcctcccaaagtgctgggattacaggcatgagccactgcacccggcctctatgattgaattttaagagttattatgttctggatgcaaatctgttattagacatagtctttgcaaatattttctcccattctgttcttgatggtattgtttgtagcacaaaagttt

SEQ ID NO: 131372 - DNA, 1018 bp, Homo sapiens
tttttttttgaaattactaggagaaaatgcatcttgtttgcttctgaagcaattagaaattacatgtgtggtaggctgggcttgtaatcccagcactttgggaggccgagacgggtggatcacctgaggttgggagttcaagaccagcctgaccaacatggagaaaacctgtcgctactaaaaatacaaaattagctgggtgtggtgacacatgcctgtaatcccagctattcgggagatcaaggtagaagaattgcttgaacccaggaggcggaggttgcagtgagccaagatcacgccattgcactccagcctgggcaacaagagcgaaaatctgtctcaaagaaagaaaaaagaaattacatgtgtggtggcacctgacagctgcatctgtctgtctgacaactttgctgtagtacttcatggaaatctatgatttcaaatgagctgttttcctttcgtataggtttacttttcttttccctttttttcttcccaggctgatgagccctgaaaacacactcctgcagcccagggaggaggaaggggtcaagtatgagcgcaccttcatggcatctgaattcctggactggctggttcaggaaggtgaggccaccacgaggaaagaggcagagcagctttgccaccggcttatggagcatggcatcatccagcatggtgagcgtattgggcagcttttgctgcaggaacaaacagccagccccaaatcttgtgtcttacaacaacacgtacttatttctcactcatgaatctgtaagtcagctgcacctctgcttatgttcagcttgtctccaagttgggggtcaaattcaggtctgtgctccacgcctttccattctgggacacagactaaaggaatatccactgtctgtgatgtgttgtttttaataaattattgcagatgctaaagagggcaggcaggttcttatagcgcttccaaaagttgctgcttggatgtgatgtaacatcacaactttgtatctaactggctaaagca

SEQ ID NO: 131373 - DNA, 1993 bp, Homo sapiens
ttattaataaataaactctatgaggtagatattctttttttaaaaaatgtattgtgataagaacattaatatgagagctaccttcttttattattattattttttttttgggacagttactgctctgatcatgcaggggcagatctcggctcactgccacctccacttcccaggttcaagggattctcctgcctcagcctcccgagtagctgtgcaccaccacactcagctgatttttgtatttttagtagaaacaggatttcaccatgttggccaggtgggtcttgaacttctgacctcaagtgatgcgcctgccccggtctcccaaagtactgggattacaggcgtaagccaccatgcctggcctgagagctcccttcttaacaaatgtttagatgtacaatactatagggccagtatttttattatctccattttacaaatcagaaggtgaaggcaccaataggataaatcacttgtctgaggccactcaggtagtaatgtccaaatggatattactgctagtaagtgtgaccttggagttgggtgggatgactggggttttccccagtgaaaaatggtaggtttgggttacagttggttctttcatatctttgctctacagagaaaaagtaagatgaggctgggcatggtggctcagcgagctggccaacattgtgaaaccccgtctctactataaaaacaaaaattagccgggagtcatggtggatgcctgtaatcccagctacttgggaggctgaggcagtaagaatcgcttgaaccctggaggtggaggttgcagtaagccaagatcacgccactacactccagcctgggcgacacagcaagactccatctcaaaaaaaaaaaagtcagatgataccaacttctaggagaaaaccagcctcttatactatgatgtactgacccacactgtatatccttggctttagaaagaagatagaggatgctgtgaatggtttctaaatgatttccaagggataagtaattatgcttcaattacagtgtaactctgtaatgctataaacagaaacaccataaaggtacaatgtaaaggataaaacaaatgcatttttgataataaatctgttttgtttttttttgtttttttttttgagatggagttttgctcttgttgcccaggctggagtgcaatggtgcgatcttggctcactgcaacctccacctcccaggttcaagcaattctcttgcctcagcctcccgagtagctgggattacaggcatgtgccaccatgcttggctaattttttgtatttttagtagacagagggtttcaccatgtcagtcaggcaggtctcgaactcctgacctcaggtgatccacccaccttggcctcccaaagtgctgggattacaggcgtgagccatcgtgcctggccgataataaatcttaaccaccgaagtatgcttcccgtgattgtaggagtactgaatattctacatagcaactggggtttctgagggagtttcagtttcccagcacagtaattcattgataggtcacaggttgtaacttggagttatgaaaatatggctaccatacctgtgtatgttagagctcatggtaagtaccagttagtgtcttgagcaaagcttttaattgtctggctaataattaatttcataggttaaacattaaggaaagtcagcctttaggctttgagcagaaggtttctggataaaagtggttccctattttgaaaccagtaagtgtaaaaatcaggcttacctgtgaaatcctaactagcttcatctatgaatggtgactggtgcgctttactcaaggcagaaattgttagatgaataattaacatgcatgtgtatttatgtggatatatatatatgcatgtatatgtacatatttatacaaatgtctgtatgttgaccacatctatacatatttgtctagctttttaatttatagatgtgtaccatctataaaggcattaggc

SEQ ID NO: 131374 - DNA, 2157 bp, Homo sapiens
gtcctcaaatactgaccacttttcttacctcccatccatctgctgagagattctgtttccatcttgatatttgacctactccctcttgtttggcgaacataaattaatttttgcttttatgagatttctgaaagcaaaggtgataagatcagcaacctgtcacctcaacaagaagcactggattgcctttcactgagagggtgcttctcaggccagaaggccgttcatgtaaccagtgggcgaggtccagctgcctggtagatcatcacgccttgccccacgctgcctttccttgtctgctgcacactctttccaggactggtacctggcctctgactgtcactagcaaaggggatcggaggatgccacctcaccaggttaggccccttggctggggccttttctgtttctctgtggcacttcaagttcacaatgtctgcagagctggattagaatggtctctgtcccctgaccccctggctacttggggaggatacgacagcccctctccagttcttagtgagcacaggatggatgggggggttcattatcggtgggttttaggcagccgcaagtcaggaattggctgctgtctgccatcttggtgggcaacagcagtgagctgatgtgaacgggtgtctcaggaggacagcatgccactatcttcctgagcttctagaccctttcttttgcttgcaggacagcatggcccagagtaaatgtggcacagtagctgagagtgtgggtgctggtgtctaatgcctgagtttgattctacttctgccacccattcgctctgggaccttggacacaatcaatttaacttttctaaggttgtttttgcagttataaaatggggataacaatgatcctaactcattcattcttgtgatgattaagtgagttaatatattcacctcacatggtgcctctctagcatatgttgagtactcagaaaagttcactagcattattactcatggcagaaagcagtgggtacatgcagtcctaggtgttaagaaggaagtgaggctgggcggctcatgcgtgtaatcccagcactttgggaggctgaggcaggcagattgcctgaggtcacgagttcaagaccagcctggccaacatggtgaaaccctgtctctattaaaaatacaaaaattagccagatatggtgttgggtgcctgtaatcccagctactcaggaggctgaggcaggagaattgcttgaacccaggaggcggaggttgcagtgagccgagatcgcatcattgcactccatcctgggtgacaagggcaaaactccgtctttaaaaaaaaaaaaaaattgacctgcccccttatccccacccctggcactcttgctttccttctctttctttttttccttagctttgtaaggtaggtttagggttatttatgtttgctgctatttactgtctccattcagctaaaatataaactgtgaggcagggatctttgccactttttctcactgatggtcacctacgagatatcaataaatagctgctgaatgcatggatagaggacttggaagtgcttatgtcttgacattgtgtttgtctgccagtgctgaagagacctgtcacctctgaggaactccttactcccggggctccgtatgcaaggaagacattcacggtaggctgatggtctggcctttttctcccgtgctgcccatttttctgcaccgtgtccatgtgtcaatgggtagcttatagactgaaatgaaaactacttttctaattttctttttgtttttagcgtaattatgatactaggctttcttgacctcaaggcactaaggtgcattaggacttcacatgcgttattattaatataccatttaaaaattttttgatgtgttctttgttaaagaaaagatttccattatgcatttattctaatttaattgcaaatttcaagattggcatcatttgcacttgcatttaccttaaaatctaataattttagattttatttcccaccattagtcatttaaattattattagattttatggcaaatggaagtgcaaatgatgccaataatcccttctgcattaggattaattctagaaattatttaaaacattaggggagtgttaagctagagaaaggaaactgtgggataaactttt

SEQ ID NO: 131375 - DNA, 1032 bp, Homo sapiens
caactcagagtaggaatgttggccaggatcataaaaaagcaagcatttgtgtccatgccaaggctgaatttttcattttctaatggaactcttggctggggaaggattttatattttatttccacaataaagtacctggtataaattttttttggcacaatgcttcagttctgagtgtgcactcactcgcatgatgctttggcttaaagagcatttcttttgaggaaagcaatgaatttatttacattgcaactaaagaccttgttttgcttagccaaatgtacagtgaaattaattgatttagtttatctttgttgatgtacatacataaccgttctgggcattgtcaactcattaactaactctttaacgtatattccctgatcgatgttttacctgatatattttttcaatttcataagctaatacttcatatggtttatatgtttagtttcttcagaggtacacagtggttttcttatgttatagagctttacagagttcattagagcagcctttccatcactgtattattacacagctccctggtccagcaaaacatctgtcctgaggttctctgatcaaagcagttttaaactgccacatactttatccccctcttagaaatttacaaagcacattagcatattgaaaactctgacaaacctggcaggaggaaaaaaaaaccttgtttaaattgtttaacataacattttatcatttaagagaaacatgcaaaaggaatctttatcagtgttgttgttaagatatagccctaaaacccttctaagatttttggccaaacagtattggaattgatataaagtcatacaccacttaatgacagggttatgttctgtgaaatgggttttaaggcaattttgtcattgtgtgaccatcatggagtgtacttacacaaacctgggtggtatagcctaccacatacctagatatagcctattgctcctaggctataaacactgtacagcatgttactgtactgaatactgtaggcaattgtaacacaatggt

SEQ ID NO: 131376 - DNA, 1078 bp, Homo sapiens
cctcccaaagtgctgggattacaagcgtgagccaccacgcccagccgaattttttagctttattacaatcttataagatgatgggaggccaggctcagtggctcatgcctgtaatcccagcacgctgggaggctgaggtgggaagatcacccaaggtcaggagattgagatctacctggtcaacatgctgaaacccagtgtctactaaaaatacaaaaattagtcaagcatgctggtgggtgcctatagtcccagctactcaagagactgaggcagaagaatcacatgaacccgggaggcagaggttgtagtgagccaagattgcaccattgcactccagcctgggtgacagagcgagactgtctcaaaaagaaaaaaaaaaaaaaagatgatgggaccaccatcacatatgcagttcatagttgactgaaacatcattatgcagtgcatgactatacagagatatacatttttagtattactgtttgttggttaaattacaatgatagcaaataccatgtccttccgtatagtttagctgcttatattcattagaaattattttgtacattattttcttaccgaaaatactgactcaattatttcctattttaccatttgtcatagaataatttcacttacaaagaagccatttgtataatctattcgtaaaggcttgttcccagcaagctgtcattgctgctatcttcaactcagaaaactgcagagtttggggtgtgtagtcgtcaagagggtcctggggtgccctgtgggaaggatccgcccacttgggcactgattaacctgctaggtctgagtggtggaaattttccagcattctgaccacatgcctccttttggcatctctgactgtccagagctgacctaggatagtgtaaagtgcctcagtgtcccttcctgcactgaatgtcaggctctccctttagtcagggttctcattttccccaggttttgaatgggggcagagccctgcatctgggcctttgtggccactccatccagtgagattttcacacttttgctatgactactttttttttttttttttgagatggag

SEQ ID NO: 131377 - DNA, 1021 bp, Homo sapiens
tgagacagatggaaaactttcatggcatttctgctcacagcttgttggttggaattgtgttgcgtggtcactttaaggggggcagagaactcaagtattctaatttttttttttgagatggagttttgctcttatcacccaggctggagtgcaatagtgtgatctcggcttactgcaacctctacctcctgggttcgagcgattctcctgcctcagcctcccaagtagctgagattacaggtatccactaacatgcctggctaatttttgtatttttagtagagacagggtttcaccatgttggacaggctggtgtcgaactcctgacctccggtgatccacccacctcagcctcccaaagtgctgagattacaggcatgagtcactgcaccccgccaagcatcctaattttataggtaaggaaagtaaggcccagaattgaaatgacttatccagggccaactgagataaacaaaagtggaatctggtcactcctgaccatgctgttaagtaagttgtatgaaatagactcacttcagggcttggcccatcgggcactcataatataaattttccatcccttctctgtcctctgttccacttctactatcatagttgtttcagagactaatatgatctagactttttaaagtttatattatattcaactgttcttaataatagtaatgcctaccgggtgtggtggctcacgcctataatcccagtactttgggagaccgaggtgggtggatcacctgaggtcgggagttcaacaccagcctggccaacatggagaaaccccatctctattagaaataaaaaattagtggggtgtggtgatgcatgcctgtaatcccagctactcgggaggctgaggcaggagaatcacttgaacccgggagacggaggttgcggtgagccgagattgtgccattgcactccagcctgggcaagaagagtgaaactccatctcaaaaaaataaaaataaaataataataataataataataataatgcctt

SEQ ID NO: 131378 - DNA, 1212 bp, Homo sapiens
atgcctggctaatttttgtgtttttagtagagacagggtttcaccatattggtcaggctggtcttgaattcttgaccccaggtgatccacccacctcggcctcccaaagtgctgggattacaggcgtgagccaccgcacccagccaagttttaaaatatggatttttttctgctgaaaagaaaatgtttacttctccccacccctctccataatacctagacccatatccagtccgttttggcaggagtttgtgctgactggtgaaaagttcacagagcagggtattaaatgggccttactcttgggatggagagagtgcagaatgccagctatctgcataagggaggcccagagaggccctctgcatctctgaggagaaagctgtctttatcatggccagatgtggccagctgtgtaattgctgatcgctggggccttaactgccctgtgctctgggtggagtgactgcctgcatgtacccacagctgggttaatgagatcaagtttcactttttagagccagagtaatcaggaccaggcacaaaccatatcctcgtaagcctgggggtgcatgggtgtcccctgccttggccaagccaggggaggccaaatactatggcggaccctcatctgtgtaagctggaatcctgggctgtgatgtatctgcggagaacagactttagtgtctccaatcctgcaggagtcaaatgtccttcctcttccgttatttctgatattgtggaaataggatatgtattaaaagaaattactaaaaaaagtacctgtttgaatgtttagggcaggggcactactctgtctgatactataatggtgggtaccggtcattatacatttaaccagagccatagcatgtgcgacactaagagtgaccccagtgtaaaccatagactctgggtgataatgatgtattgtgtaggttcatcagttttttttttttttttttttttttttttagctggagtctcactgtgttgcctaggctggagtgcagtggtgtgatcttggttcactgcaacctccgcctccttgtttcaagcaattctcatgcctcagactccccagtagctaggattagaggactgccaccacacccagctaatttttgtatttttagtagagatgggatttcaccatgtgggccaggctgatctctaactcctgacctcaagtaatgcactcgccttgtgctg

SEQ ID NO: 131379 - DNA, 1013 bp, Homo sapiens
ttcccgagtgggaccacaagtgaagctggtgatgaaggctgtgaccttgttggctggtgggggccttgagtccactgttggtcagtagggccatcagctggggagcagaactgcatgtggagcaatggagggcaaagccgagctgaaatccttcagcacctctgcgtctacctctcactacatttaaccataacagccacgagtgaacagccatggtggctgcttcacttccaccttccaggtattatggaaaattctttctggccaacttgaatctggaactgtgcaggaaagggaatctgaaaaatgtagctctgttttggccaagttgacaccaaaaagctccaccttcttatttgattcatgttcttcctcataactggtccagaaaatgtgcttggtgcaagtgtgagccaggaatggggagaatgaatgtgagagtcatccagtaaaagagaagtgaggatgggctgataagggggctagagagcttttggtgagtatcatacctaatacatgctactggatatggaattctttttttttttttttttttttttgagacaaaatttcactcttgttgcccaggctggagtgcaatgatgtgatttcaacttactgcaacctctgcctcccgggttcaagcaattctcctgcctcagccttccatggagttgggatcacaggcatgcactaccacgctcagctaattttgtatttttagtagagacagggtttcgccctattggtcaggctggcctcgaactcctaacctcaggtgttccacccacctctgcctcccaaagtgctgggattacaggtgtgagcaactgtgtctagctgtgagctatattttatagttgaggccgaaagagtttgagtcacagcctcttgttgtgtaactacatggcagagccagaagccaagctagcccaggtctgtctggctccagagcccttggtcttttcattatatcacagcacccttcaaatgtgtgatattacctgactttt

SEQ ID NO: 131380 - DNA, 1949 bp, Homo sapiens
cattttgttttataaatcagctatagcatctttctagaattaatcctgaatatgttgaatgttaaaatagagaagtttgtatatacacataattaaaaatcaacccttctggcaagatttcactttgaaggtgtctgtttttaagggaaggctaaaactttgctgatatgtgataaaacttgaactctaaattgcctccttagcctgaatttttactagctttctagtgtaacatattctaaggacatgacatgctgcttatttggggggattatttttcaccaaaatgatcatcttgtgttgtaacttttcagctcacttgtatatacgcacgttttcatttttggtctagaaaatagtgcattttggggctcagcgtgcagaggaaattcctcaaagtgccaaattaggcagtcaggaaatactaaattcttcattccaaataatggatctgaatgatgacgttaattttttatcatgcattaacaaaataaaatatgagaattgtaccacagccatttcttttcattaggttatcgtaatgtataggtactggtggaatggacctaccgtgctaaatatgttatagacatatatatatatatatatatatatatatatatttctggtaatccaacttttctgatttgtagctttagtcagagaataggattttggagtgacagagaatgtctaacagtaatactgttgatatacatttgagaaatactatcacctctgtgtgggtgtgcatttgtactgtatggcaggctctgtgcatttaatatatatgatatcctttaaccctcaatgcaaccttgcaaggtagatattaacgtccacatttttcagatgtggaaactaagcctgagcaagttttaaaatggtctctaaattcacacggctgcaggaactactaggtgaaataggctgaatgtaaacacaggtttaacgctaaatcccatgttactcccctcaacttttccccatttaaggaccttatattgagggtttattctgagccaggctgtatgctaagactttacgccatttgtccttatttacctgtgaagtcaatacggtcattatctccattttacaaatgaggaaactgacttgtaaagtggttagtcatatgcccaaggccacaaaactaataaagtgggaaaccttaccactggcttaaaaaaattttttatagcatctttaaaagatgagtcttaaatgctttctgtgctcaggtattcattaagtgacaaaagaagaaggaatacctttcgagaaatggtatctccttttgagaaatggtatcttcttcttgcctgctttacccattatcttggaccctggcataatagaacttcccttcagccaacctaagcaccagagaagcatttctctgtatctattgcacacgatctcctcttggctgtgaggaaggaaggaaagaagggagagaggatttccttctttggttcccatcaccctaagttcaaaagccaaaggccatgagagctttcccttagctactcctccagcccacccctgacatctttacacagcaattaaaaagactacccctaccttcctggggaccctatctcactccctccagcccttgcacatgtactttcttcttcgtggaaagaagaatgttctgtcttactgttgcctggaaaattctttcttcatgtaaactccctttagaaattatctcctctgagaagccttcaccagctccccagttctaggattgatgcctcttctctaaatttacatggatccttaagtcctccctatgccccgttagagcactgatgacatttactttgaaattcccctgttacatgtctgtttgcctaagtagactctaagcatctgcagaacaggggctatgtcttagtatccagggtattttcttcacctggcacaattcctgccacagagta

SEQ ID NO: 131381 - DNA, 1195 bp, Homo sapiens
tttgaatatgtggtataagtaatctgctttaagtcctattttaggttgggtgcagtggctcacacctgtaatcccaccattttggaaggttgagaccaggagtttgagaccagcctaggcaacagagtgagaccccatctttatagaaaataaaaaattagccaggcatgatggcacgtgcctgtagtcctaactacttggaggctgagaagggaggatagcttgagcctgggaggttgaggctgcagtgagctgtgatcacaccactgcactccagcctggacaatagagcaagacactatctcgaaaaaataaaaagacctgttttaaactgatgatattaactattctctcctgttgactattaatcttgtttcatttttattataaataataagaatgactaaaacatttcaattttgctggttggctgaaatctattgatgtagttgaccatggttttactcacttaaggcagaatttcaggtgtgacatgttttttcttcagttcagtaccaaaaggacaaatctgccatgtaccaaaatgaaatttgtcatcaaaaacagcatatggtattgtcaaatgcattaaaaatattaaagatacttaatatatatctttattttaaaattatattgggatttatttgctcctcttatgaaaatgtataccataatacttaaaattattgcatgaaaacacatagctgtatagcatgaaataaatgttactttttttttttttttttttgagacagagtcttgctctgtcaccaggctggagtgtagtggcgcaatctcggctcactgcaacctccgcctcccaggttcaagtgattctcctgcctgaacctcttgagtagctgggactacaggcacgcaccaccacgcccagctaattttttgtatttttagtagagacagggtttcaccatgttggccaggatggtctcgatctcttgacttcgtgatctgcccgcctcggcctcccaaagtgctgggattacaggtgtgagccactgtgcctggccccacattttttaaaacaatgactttagggtttcagcttttcctgtcttttaaaacaaattagccattttttattctaagaaagggttgtattataaagctgacctactactagcttatcagaaaaaacacgtgggtctcatatctgattctcctatgtagccaa

SEQ ID NO: 131382 - DNA, 1073 bp, Homo sapiens
ttttttttttcgagacagggtctccctctgtcacccaggctggagggcagtggcaccatcacggttcactgtagcctcaacctccagagctcatgtgatcctctgtttcagcctctcaagtagctgggactacaagcacatgccaccacgcctggttaaatttttgtatttttttttttttggtagaaatggggtttcgtcacattgcccaggctggtctcaaactcttggcctcaagtgatcctcttgcctcagcttcccaaaacgctgggcttacaggagtgagccaccgcacccagcccgatgtgccttctttttctttctcttggaggctacatgattcaccatggaggtcatgggttctgagatggaagagagctaccttattcatatgaaactttgtgtgattgtgaaataaagctttattgtgtaaatccactaagcatttgggatgtatttgttactatagcatagtctgtcctatcgcaactcacacaaacaataagatcccagaatatgctctaactttttggtcttgtatattgggaggatccttattaacaaagaagcctcccaataaaacaagtaagaaatacagccatttaagttacatactaggatgtaagatgaccattttcctcacttgcaatgccaagtgaatataaaaatatacatttgcagtctcttgttaggaaggaagatttacctgctggtccaggggggcctcttggaccttgggttccaacgcctggatttcctttttctcctttgataccagttagacctgtttaaaataatttttaaaaatgtttaaagttctttttaaaagaaaatcttggtagttccatttttctggagttcgaaagtgcttctctgatgaagacaattaagtgggttcgtttggggttatgagtaccatgggacttttaaattacattctgacattggtagtatatgtagaatcacatgttgaagtctggttctgtatttgagtgtgtggtctgtatttgctattctgccagtctctctttctccttcctactgaagtcacacagcctgccaagaactggtcc

SEQ ID NO: 131383 - DNA, 1085 bp, Homo sapiens
ttttgctattgcaaattctataccattttaacatgcttgctagtgtagagttttattgtaaatgtacttaagttgatgtagtttgaaaatattcagctttgataagttatatactaaaaacattttaagttgtccttgaagttttgacaggttaccttcctataacagttctgtaaatatgtatctgattttcttacagaaacaccatcataaatgaatttatattcctgaccaagaggggtgtggtactcttttttttaaaattagaaataataaagttgctgttaaatcatgtatgtgcaaatacatattatacacttgaagtcatatttcatgaatattctaaagtgtattctaaatcagttaaactggcaccacactaatataataattcacaaattatatttagtgttattatagtcagagtactgaccaaaattttcattctgctgaatgatttctgctttcttttgaaacaaattagaaagtgcctgagtgccttcattttattaatagaattagaaagggcttttctatagctatttttaaggagatttttagagaaacttagagccactagatgcattttttagttactactctgggaatagattttcctgccctctctcttcattccagatttccctgaggcaggaatatgcattagacactaggttttcctttatgctttattaaggttgtgattttttcctcataaatagtcacacgcatatgttaacttgtattttcaaaatagtaaaataggtatacgtttactgaaacgtatggatagtataggtgtactagtcatttaatataaatcattctgtatttctttctccctgcacatttgagctgacatcaagtccagttagtctttattacgtgaaaagtgtgtgaccaggaaaaatatagtcatttttggattaaccaaaagcttatctaagaaatagatgatcatttacttcaaggctcttgagtagaactttctacaatgatgaaaacaactctcagccaggcatggtggctcatgcctataatcctagcactttgggaggccaaggcaggagtacctcttgagttca

SEQ ID NO: 131384 - DNA, 1805 bp, Homo sapiens
ttttcttttgagatgggggctcactgtgttgcccaggctggtcttgaacttgtgggctcaagaagtcctcacacctcagccttccacagtactgggattacaggcatgagccatcatacccagccttcatctctggtttctttgggcagtagtttgtagttctcattatagagatctttcacctccctaattagctgtattcctaagtattttattctttttgtggcagttgtgaatgggagtacattcctgatttgactctccgcttgactgttgctggtgtctaggaatgttagtgactttttgctagtgatttttgcacattgattttgtatcctgtgatgtctttgtccattgatttttttcatatatgtaggattatttaaaataaatccctggaagtgtaatgtgttttgatatcaaaggaatgatcatttataggtcttttgataggtattttcaatcatgagttttctaatccatagaagagcatacaaatgtttgttatcccaaatctgtgcaggcacagtattatctttaaaaataaggctgttgtcttttgatatgcagctgaatatttacatttacttaataatgaagtttcagtgttactttatcactttctatggacgttttatctattaagattattaatccacttttgttttttacttttaacaaaatttttatgtcatttactgtagttatttaattttatattattacatgccttttcctttgtaatttcttctgttttccagtctcagaaattctttcttgttcagattttcataaacatttacttctaattttttaggggttggttgaattgggtgtgtgtgcaccttgaactttcacatctaagtctttagtcatctaaaatacattggcatgagttagagatacaacttaacaactagttgtatcaacagaattgtttaattttaaataggacaggattttgtcatatttatctgtgtgtccccagttccagcatgatacacatttaagtgtttattgaattaatttcaatgaaaaacccttggctagcatttaaaacaaatgttctcttactccatcccatattggaggaaagaatgagttattttcttactagtaaaaatcaattgagtgttgcattactcaagtcatcctccactcaaaattttacattagctttccaaatacgtcagaataaagtccagacttctgaaatatattgtaaatggtatgttttagaatttgccatctcaattttcaaactagaaagatcatctttcagcatagaaattgtaaaatatttttttccatggagagaaagaatgcaggaatagaagtctagacaggcatttctttttctaaaactgaaattccatgaaaaaagagaatatcaattttaaaactacccatctttctcagcaaacttctaactttgacaagttttattcctaaaatgtgttttcttaaatcatctttaaaatattttcaaattttattgaagggaacatatggaaaaaatcacctttaggtaatcttaaggttttttgcagattccacactgactttccaatttcttccccctttcttgaaaatcgtttggacttcatctgtttaggaaaatagaaccttacatctatatatgtattatttttgttttaaatttcccaatccctttcacaaatattttttcatttgacccagaaatcttttgaggtagatagcattatttattcatatgagtaaaattatatgcagagaggtaaaatgagttgcctgatattacactgggagtcactgacaaaacc

SEQ ID NO: 131385 - DNA, 1813 bp, Homo sapiens
gctatttttcagggaaattttgtatcagacatttaaaggcacttaatacaaacatttttactgaagtgtaattattaatgggaaaagtcacaagaataacagtaatttgcctttaaaagatgtattgttgttattggcaaccttattaaatttcttttactttgcagtgttgagattttccaaatggccagccaactctttctatacttagatgttatattaaaaagtaacagaaatctattcaaggatttttgatgttgcactgtaacttgctttttattttttaatatgttgtttgaactttgataagctttataaataaccaaggccactttttcttaaggtttttatttttcttacaaaatcttgtttctttttaaaatgtaggtgactgtggggatcatgttgttataatgaacacaagacacattgcattttctggaaacaaatgggaacaaaaagtatactcttcgcatactgggtaagataatgctgttgtcagggaaattaggtagttaaaatatattactttaagaatacagttgttcttacttaaaagaaaaaagatatttttaaaaatcagcatttattactaattttactcatgccatgtatataatttactcaatttttaaaaaccacacaactataccaaatatagctattacctgacagtatttgtttatcctacaagtgtttcatataacctgtggacaagattattctcatgttttagtcactcttttactttgtatttctgcttcctgtaattcatcttactgctgttttcagaaccatcccaaaccatctgaaagttaacaagatgtttaaggaatggtcactcttctctagataaaatcttgtttgtcagtatctctcttaagtaaatacactcacctgggtgtgttctgctggtttccaaatacaacgtgactctcctccatttttcagttaggcaatcttctgttgcaatagaacttttcttcaaggccatagtatttctgtatttgagtttactgtcagctaaaactcctaagtctttttcaggtatattcctgttgaatcatgtcttctccttcctgtgtgctttagttgtaatttaattcaattgcaagaccttaagtttactccatgttaaattttatctccagccttttaagatcctgattttatcatctcatgtattagttaacccatagcttcaggtcatgtgcacatttaattaagtgtactttctatactgttactcaagttatggttagaaatgttatcttttattcttgatcaaaatcactattttatttccaactgcatcttcgcctttgatgttcccatttgttacttttcatctctttccccaagtgcatcttaaatatttggaacaactgttttgcttccttgagccagcctttgcccattcctccccttaaaatacattcatgaaatctttatataatttaacaaaactgaatttacatccgtctttagtaatttcagctattggcagatctctatgtataaaccaagttctacaaaattgagaggtaattgggaaagaaatattaaaaatcagaataacataatgtgataaaagcataaagggaagtattgacacaaaatgctatggtaattactatagcaataatatgtagtattactgcaaatgaaagaaaatgacagcacagccagtagtgaacagctaccataatgtgtacgtcagctggtagtgtccctgtcagtagtgctttctcactgataggtgaaaattcaaactcctttacaagtcattggaaaccagttcccactgctgctt

SEQ ID NO: 131386 - DNA, 1025 bp, Homo sapiens
ccctgatggtgtaacctatctgagaccttaggtttcctgacatgaagctgttgagttttcactttgtctgaattagtttgaatttatttggccatttaattgagcacctagtattatactgaggagtcagataaagttagaagtttaaggttagaatttttgtaaataaactcacaattcctatttctaaaaattgcttactatttttcaacttaatttctcttcagaacatctcttgatcaagcactagagctatgatttatttacatttggtacatatatattaaatgtgcagttttaaattaaaaattataaaatgaaactatatgtatttaacttaatagaaatttagacagaaacaactgtgctatatccagggttacagtcttacagtaatactgactttagtgttaatgaaatacagttaaaagcatgtatttaattgctggttagtttttgtttagagttagtagagaaatgcttcttagaatgaatttactagagatttggcatatattattgaggaagaacaatttttcccagattagatgtgataccttagaactgaaagaatatgattttcagttgctttgtggcaatctgtctaatgccccttggaagatcttttttgctctctgtagatattttttgagtggctcgagatgctttacctatatttaaaacttaacaatttaaaaataaattcagttttaatggaaagtttaaagattccattttttcctccaaatagatgttatggaaagagcctacaccgggtgttaggtaacttagcgtgtgagcctctgcaaatcacttaatcttcttctgctgtaaatgtctgaatgtgagctaaagtaatttcagtgttttttgaggttgtctggttatcttcccaccttctttatttgctgttctgctgcattcgcccaactgcctcagtagccaacagggtgtcacttttaggaacttcaaccatttaattaaacattgtcagactattcttttccatctaataacagcaagct

SEQ ID NO: 131387 - DNA, 2705 bp, Homo sapiens
tcctttaatctcttaatctagaataatccttcttttattttcttctcattaaccttttgaggagtccaggctaattttcatctggagaactttcttcttgaaacacattcttcacttgtttccctggattcacttgtttccctgtttcttctccctttcttagtacccttggctatcctcagccttctaaactctcaaatgctcttctcaccaaaaattggaagtgcgtcagggcccagtccttgaacctcttctcatgccttagatgattgcattttgtctcatgtatctaaaaatcatctatatgctaatgcctcccaaatttaaatctccagttttgactgcttccctgtattctagactcacatatacacatttctattaagcaaattcatctgttgtctagtagacatctccaatgaataagtccatttggagatgtcttgcttcttatctacttcacccaaaccaacctgttccttcccagttttccctgtctcaattaatagcatcactgttctttttgttgctctggtttgaaggctttgccttatctgtgactcctctttgttcaaccaaaaaaataaaaaaagtacatatatatatacactcacacacacacacacacatatttaaaaatatattagaaaaaagtatatctgaactctggcacgtctcatcatctctccctctactctgattttaagctgctgtactccatcctgttttattccaaaaactgcctcactgtgatctgttttcttctgccattgcctccacgtaattctttctccgtagatcaactacagttatcttttccaaatgaaatttctgtgtgtcctacaagaacctaaataatatggtccctgttacctttctgactttctttcctttatttatttatttattattattttatttatttttttactattaattgtttctgtcaatccactcagacctatactgttccattaacttgcctgccgagcacatttttgccttatgccttttttttttttttgagagagagagagtctcactttgttgcccaggctagagtgcagtggcccaatcttggctcactgcaacctccgcctcctgggttcaagcatttctcctgctttagcctcccgagaagccgggattacaggcatatgccaccacacctgactaagtttgtatttttagtagagacagggtttcaccatgttgccaggctggtctggaactcctgaccgcaggtgatccacccaccttggcctcccaaagtgcttacaggcgtgagccaccatgcccagcccttaggcccttttcacacactgttccctctgcctagatattctttaccagatatctgcatagcttatttcttcatgtctttcagatttctgctcaggcatttatattctgagagaggcctcgcctgattcctctgctcaccctttcactctatatacctttaccttgctttaaaaaaaatagtgttcatgtatcacctgaaatgttatgtaagtatctgtttattatctaccttctttcactagactaagttccaagagcacataaaattttgccggttttgtacacagctgtatccccagtacctgtagtagtgcttcacacatagttggaatgtaagaaatgtttgttaagtgaatactggcatttatgaattccagttgtgaaaatgaagaaaatacttttagtcagggctctggcattgaagctaagtcagatttttggatctatggagctaagaggaagagtattccaaatgatttgatttgagcaagagcaaggattttctgtaatttcttatacttgctgctctaaccttttttctctacctaatgaaaatttcaataagatatcaaaataaacccatactctgaaatctgtgagtatagaatatgaatctgaggttttgtctttttaatctttgtttttcaagcacccagtacaatgtctggcccataatagatgcttgccagaaatcatttgtagaatgacactttcaaacagatgttttgtgagtagcctgttcttgttccctgtagttatcctgtgaacactggattagtgaataccgaaccattgcttctggggggaaatacggagttaggttcctctgaacctctggtcacagcattttcatcaaccaatcaatacataaccttgttttatgtgtgtttctgtttaaagatatcttaacactgaacttgtgaccaacagcagtataataacaagcttatctaacacacatattatctctataaggcaacaacacagccttcttgtatttaggaacactaaatagcactcagtataccaagcttgggggatattttaaacagtgaagtcactaagaaaaagtccacagatgccagaaacatagcactacatagaaaatgaaaaggatgcttgtttgttgtatgaaaggtgaaagaaggcagagcatcaccttgttcagcctcagctgggaacatgtgcgtcaagtaacacaaatttatttccactctgagcatgtccatgaatgactgcaaaagcactatgagtattgattttggggtaacaaataaattttaacaagtaggcaaatttgtaaatatggaatctatgaataaagagatcaactgtattttgaaagtaaatagtgatcaggagacttacactttcacttataaacctgtttactttaaaaa

SEQ ID NO: 131388 - DNA, 1916 bp, Homo sapiens
tttgtttgaaggtggagccagtaggacttcctgaatattgagtataggccaacagcaaaagaagaaacaaggattaccccaaggttttttggtttgtccaactggagggtgtgtcatcaactgagatagggaaggctgagattgaaccaggtttcaggtggaagaataggagttagtttgggttatatcggtctaagatgactctcaactcagtgccgctccaagtatggttccttccttgggctgtttgttgcctgtctgtgatgagataaatacaggaagtaaaataaaaattttaaaacctttttcagcaatctgacatcgcccagcatttgtatttttttcattaaaaattttttttttctaagtatcaaactattagtctacaatggatggggacaaaaactggcctttttcttatatgtagactagtttgaggttgtgataagtaaatttaaaataagaccagctagcctcgttctatttttccagcattgtttagcctcttgtgtatatgcatagagaaagcatctggtggagatctttctggcctagaattttctaagaatttgaatacattgatgacgactgtaaaaacaatgctctattcctgaggcaacctaaagatacctatttcaggcaactttttaaagttgaaatttattccacatcacccatctgtactttcccaactacattgttctatttaactctccccaggaattgaactcctgaatcgtcttcagtttccagttggccactcagctttcaatataatgtacctaataatctctaaatgtttttgaagaccttcataaacagcttctactttcttacaagcttctcattgcccctccagattctattatgtgttatacaaaaaaaaaaaaaaaagtcataccgtaaagggaaatatatctttgggatatttataacaaaacgtaagtcatattgctaacaggaaaccaggaaggaataattactgtgtttgtctttgcagaatgattagaaaaaacaacccttttccagaaatagaaatgaaaacaaaaattctttagcaatagagttatttttcaaagaaattgttgacattaattgtagaaacgtgatgatatatgataataaatttaattactgtatttccattttaatgataattatctttattttttcctcttcttttttttttttttcccccccaagcaatgggccacttttgctagaatatggtatctcttagatgggaaaatgcagccacctggcaaacttgctgctatggcatctataagacttcagggattacataaacctgtgtaccatgcactgagtaagtattattttagacctgtcattaaccactgtagttttcatgccagaatagaatcttgatgaagtttaacagggctgagtttaagggccctttttatttttcctgaggatcctgtattccattcttgctgaaaccatactagcgcccaaaactgaatttggcttattcactggaaaaccgtatggatcagtttacccggaacaagcctattttatgccactgcccagcgaaattattagtagcccttcttttcacactcagaaataacctgatttgccccatgacttaaactttcacttttatatatgtcttttcacgtgatgacatccatataaagagtttttaagggaaataattttgccctctcttctaaaaaatcttttcccctagaaaaatatatggtgctagctaggtatgggaagcttattttcactaataagactaatagacttgcttttctgtatcctttttccaaaataaaattaaaaagttgttttcgttctagaagatttctgcttacagatagtttttgatagacttcatttaccccagcacttcatggccagatccagatgtcagtttttag

SEQ ID NO: 131389 - DNA, 1327 bp, Homo sapiens
ttattgcaggaaagattttctttgatttgtacctcaaatgtatatgtaaaagagctcttgggagtattccaggggttctcatgataaattttacttcccccttgcgtgtttagggtttcttatacacacggtccttgttttgtatgatagtgttgttctttataattgattgtgcaaagcaatcctaatataatcaatgagaaaaattagaattgtcccatgacctttaatatcttttgtcaaaacattaaaaattctcttactgttataaaattttatggaaataaaaaaatagtaaaaataaaatttattttgtaccctgtaattttaaaaccttaggtacattgagaattaaagtgttttatttctttgtaaaaaccttaccaagagtagtttgagcagtgcttgccaccttcacatcatcacgtaacttatgatacagaatgaacatcttttattggcgaattatcatattccagttgtatcaacttccaatgttttattcttcgattttttttttctttttttgagacagggtcccactttgttgctcaggctggagtccagtggctcaatcatgcttcactgcagcctcaacctccccggctcaagtgtcactatcctcctaccttagcctcctgagtagcagggactataggcatgagccaccacacctggctaattttttaactttttgtagagacagggtttcattatgttgcccaggctggtcttgaacacctgggctcaagtaatccacctgttttggcctcccaaagtgccgggattacagatgtgagccactgtgcccgacctggactttcaatgttgtgaaatatctctgagttcctttaatattaaggtttttgctagcctcattttctctgggacatcttcacctttttgatcaaaaggtgtttgtcacagcagctatttttagaactctatttacattagctttgaagattgctttcagtgttagcactttttgtttctttggtgtttctttatctctctctttttaaaaaattccctcatccatttatccatttttataaaatatcacatgggtttacactgggaaaccagaaggcaacacaattacatcctttgctacctgtgtgtgaactgaatggcacttgcacagtgaccaatcaatgacgtactttaaaagtagtaacatgattggttactgatcatgacacacatcttttatgtatacagtggttttgtagactgagaagcttgcaatgaagtcttaaactatgcagttatagttagtgaatataccatggtaactgaaatttgaaccaggttgttggggaac

SEQ ID NO: 131390 - DNA, 1922 bp, Homo sapiens
atgtggttttattttcaagcctgttcagtgggaggtatacctggttccaagaagtggttctttgcagtgcaggcaatatatggattttatcaggtaatataaatttaaagatagctactaatgaatgtctttactaatataaataatttcatgatccattatttaatacaatcttttgatttgttagttttgtagttctgattggcaagagatacattttgatacagaaaaagataaaattgaagatgttcttcaaacgaatatcgaagaatgtttgggtgctgttgagtgttttgaagaagaagacagtaatagcagggaatcattatccttggctgagtatgcttatatggtttttgtattatcattaaaatacttaatattagacagttattttaatccatgagaatgaagattatatattttagcatctttactgaagaaactctagttaattgaaatttttgactctcaatttgggccttttatttgaataaaattctttaaaatgcatgtttcttaagcttacataatgtcaagaatcataaaaagtgatattttaataaacatgttcctttcttgaagataaattctgcctaatattttattttatttttgaaacagggtcttgctgtgtcacccaggctgcagtgcagtggtgcagtcacggcttgctacagcctagacctgggctcaagcgatcctccgacctcagcttccagagtagctggaactacaggtgtgcaccaccacacccagctaatttttgtatttttttttgtagaaatatcatttcgccatgttgttcaggctgacctcgaattcctgagctcaagcaatctgcctgccttggcctcccaaactgctgggagtacagctgtgagccaccgtgcctggccaataatgtattttaaaagcttgaatagaaatgttatttaatgttaatagctagcattcataccaaagtatcattttcattttgctatttgaggctgaaatatgtgacttctttaatttatgtgtatttgcagcatttcaggtaccttttaaaatccatagagtttgtgaggattatatgtacatgattgagttcacttttaggtttttttcaattgtggtacaatatgtaagttgatccaggtgacataagttgtgataataatttttctcttgatgaaatatcccacctcttatagttaataccttttattttagtctttcataacatttcatgacaaaactgctcttattttagtattcacatattatatctgtaagtagctgtagacttaaaaattttcattttcctttttccagatcatatttgtttgtactgattaataaaaggagacctttccaaaccagagaaatatcattgaaccagggattagtagaggtagactttatttacacaatcttaggccagtcacgtaacttctctggtcgtttgttttctcatccataaagtattgaagtacttttagataatttcttaggtgctttcatttacccttaaaaactcttatcatcccatatgttttcctaccactgttaaagacaagtatagccaggcacagtggctcacgcctgtaatcccagcactttgggaggccgaggcgggtgggtcacaaggtcaggagttcaagaccagcctggctaacatggtgaaaccccttttctactgaaaatagaaaaaattagccgggcgtggtggcaggtgtctgtaatctcagctactcgggagcctgaggctggagaattgcttgaacccgggaggcggaggttgcagtgagctgagattctgccactgtactccagcctgagcgacagagcaacactccgtctcaaaaaaaaaaaaaaaaaaagaaaaggcaagtataaaagtttctgataagtgacctaataattatttccacaagggg

SEQ ID NO: 131391 - DNA, 1044 bp, Homo sapiens
agataacatggctttcaataaatgatgaacatttaaaaagtttgaattcctaagggcgtatattgttttggagaatttcagaaattaaaactaaaagcttcctttgtcttctaaataaatataaaactaatttttctaaataaacataaaattcagttcttcagggtactattttgagacatttcagatctaactttttaaaaattacaaaaatgcctttttctctttctaggtagagcaatggtagatataatactgttgctttctgacaaagatcctcctaaattgaaagactatttacctactgtaggagcattaaaacatttgagagaatggtattcagcaaagatcactatagcaggaaatcattgtgaaatgtaagcttctttgttcatatttgattattgtctgccttgtctgttttcacaattaacatactattctcttttcagactcagcgtttgaaaattattttaatatgacaacataaaattctatgttataccatgattgcaaatttgtgtattgagaagaatctagatgtttcatattttatatttatgtttctgagatatttaagtttttagtaaatattattgatgctgttttacaaccattattgaggattaattctataagcacactgtgtgcttttgaacatagatacactggatttgtcatgttgtatttggttttctgttatgtgccaatgtaggaataaatatacactgttgtgttttatgatattctagcaaggattaattgtatattacaattttgatccttaaacattcagttggatttaataacttcatgatttgttttcattcaacgaatgtttattgagcaatacctttatggcaagcatagcaatagatgcttgtaagttaagaaagtgagaagacatgatctttttcattgaagtgcagggagaaacaggaatgctaacagtcaagaaagtctgtggtaagtgcgttacagaattccatgcaaagatgtatgggaacaatataggagagcagttctctttttgaagataaggaa

SEQ ID NO: 131392 - DNA, 1088 bp, Homo sapiens
ttagatgtttggccgtgtttttacataatattcagtatactttttgctaccattatgttaagaaaagttctacaacttgaaaaaaaaaatcttccctcaaatactgtatttatgcttttagaataggcagaggacttcctggtatatggtgtagagaggagggagaaatgttaggaatctgtggaaaataaaacaagtaatttataaacttaaaaaatgtttaaatgtttctcctgccatcagcatgaagaaacctaagaatcagtcagctgatgtatcattttatgtatttaagtaaatataaatggtatcacatgtatctgcaaatatattcaacatattttaaactctcttttaaaaatatataagcatgtttagaaatacacctaagaacagaacattttatataaaaagaaattgttattggctggaaatgaaacactagcatagtgtttttgaatttttatttaggagctacagtttttataaatttcttgttcttatagtttatagtaatgctctatatagtagcactgtttcttagcatattttcagaatcaaacaaataattggaaaaatacttatccttagggaaaggcgtaattgttaactgctacagttaaattttttaatagatgaatttaagcaactgtggaagaattgaaataatgaaacttattttaaggagtacattgtttcatgggtaccattacatcatttctttaactccttagtacagaggattgacaaacagtaccaaacagaattctgtgttgctgttggagcagatttcttctctgtgtagcaaggtattgagggtttcttgggggttttttgtttgtttgtttttatacttgccatttaaggatgtgtaagaaaagggaatgtaacttattaatctgtttgcttgatgacttggtttctttaatgtaatataggataattttggtcctaactcatattaagatactttggacttttcataataactgtaaaagtactctgcaaacataagtgacattttgtttttaggagatattttcagaaataagctttatgactggtaattgctttaaagttttaaaatt

SEQ ID NO: 131393 - DNA, 1032 bp, Homo sapiens
aatagaaaatattatccaggcgtggtggcatgcgcctacttgggaggctgaggcgggagagtcacttgaaccagggaggcagaggttgcagtgagcagagatcacaccactgcactccagcatgggcaacagggtgagattgtctcaaaaaaaagattttgaaactcagatttgaaatgttatttggcgtttatattctggagatagaatgatagcttgaacagatcatcctcaagtctctcagaggttatctaatgattagtgtatgggtgagaacaagttatcagcacctaagtgtattaagaatgcattataaacaactgacaattttattttgtagggaattatagtttgtgtgatttagaaatacttattttcatatttgtagcaaatgtctagtcaatttcagtctgtctcaaaagtgtggccatttcagctaatgggtcccaccacatttatattaggttataagtaatgcattgaactgcatttagcatccctaaaatgttgagaaagctataactgggactcagtctggcatactcacattacagccttgtccacctttttaaccgtacagtctggtcacattttttgggttatgaagtcttatgtatgcaagaaagaactaggatttagtgtcgagaaaattagatatattttttatatttaatgattattttctattgctaaatatttttatttttaatttctaattcttaactacataaaatatatttgactttaaaaagattatggctataataataaagaaaaataagcatatttcttttaacctttcttattttgttcctaacatattaggttggtgtaaaagtaattatggtttcagaccatgaattttaagtcattataactaggctcaaacacatctttatgaataaaaatagaaaccattacaatcaacacatttttgccaatgataattaagtttttttattcctgtagtataaaaatccatgctttggaattctacgaactcttggaaagcgttttctgcatcctgccttg

SEQ ID NO: 131394 - DNA, 1182 bp, Homo sapiens
tgcctacattggaaactagattttgctttattatttcatttttggaatgattattaaaataattggttatattattttgccatttctttatgaacatatataataactatcagtaagtcggaatattcacttacccagaatatcctgtttcccccgtagtcctgggatatattttttccttccatcatgtggaatattatttatcctttagattattataattttgtttacatattagctgttaaaaatgagtattataaggttttaagaacaactaagaaacttattgacaaagaatataacttgatttttgttatataagaattttttttgctaatactaataaagacataagactttattgtggtttatgtgttatctgtaaactttgatgcaactaatagacacttggtagtttctgcttctcccattttatctgtatagtatatccaaaatatacgtatgcttttggtggagaggggcatacaagccaacaccttatcaaataataatgtaagtaaacataacagttgaaaatagacagacttttttttagtaatcattttcccttattactttaggaagagtgatgaggctggaataactacgctaattgtaaatctgttactctctgtggcatttacataaaagttatttaataagtcttcaattaacacctgccaaatctggagcaacattttttaaatgactgcagagtcattatggctaagagagttgtttacagtaaatatttttcttttgaggaaaataagattgttgtaattacaagcttcagtgattaaaatgcaaataaaggtgatgagatttaaaataaatgtggaaagaatgtcatagattgaagatatatatataagttgaatcagcaagcagctaaaatggtaaatgaattaaggtcactgtatcttttggcaaaccttaatttctaataaaactggtaacaacaagtgtttttcttttctaataacctttatttaaattcatgttctaaaactgcagtttatgagcagaattaatgtcactctagctatctaattgtaaaaattgtttttgttacttcatcattgtttttgggaatagactataacccacggtatcttcctatctatgaaataaactgtagctattgtaataaaattacagtactttcttagtattttggga

SEQ ID NO: 131395 - DNA, 1062 bp, Homo sapiens
atgcaagttatatgaagcagatttattacttacagataggcagcaaggaacaaaagaagcctaggatctgttgtgagccaggcccccaaggctcacgaaagcttcccagggcagatggtgtcttgactgcatgtacgccatttgcaccacagctaagggaccccaaaaggcagcctgacctggcttctatatttcaggggccatgtgactcattgggcaacgctttgaaggacatcctgcttttaggggacagaggaaaaaaacccaagctatcctgggcagttcctccctatttcaagatagtacatttccagtgcattctgcagttattctgagtaaaatgggcatgaagaatggggagagagacacggctaaggctatcatgggaccatccagcacatttatctaggttggattcattgtggaggggactgcacaaaaaggaataacaggagatgtggttcattcaatggcttttgggggtatctttacagactagctaccattccctatctgtgatttctgatcaggtagaagaaaatgtgattcagggaattctactttgctatctaaattccctcaatttaaaaatcaggtcaatgtttaaaatgcaaaataattgagtatgcttattttctgctgcttaattattattattatttactttgaaatatgtaaggtcgagagaggtgagtgattgacttttattttttgttaaatccttgctataacacatttcccaggaactgagtactaattgttggcaaagggcatcattaatgttgaccttttttttttcttatttctcaggttttccttttgacttattatcacttccacatttttctggggagcagattgtacagagagagaaacagttagctaatgttcaagttttagctttggaagaatgcctaagtaagtaacaatttgtgtattttatcctaccctaaaaatgttgacttgtttggacataagctacctttatttgcacactttttcatatatagtttatcttttagttatgctacttaattatagaactatttttgaaagcaatga

SEQ ID NO: 131396 - DNA, 1069 bp, Homo sapiens
aaaaagacaatgaaccttatgattttctcactaagaggatgtaatagaggcagaatatattacagctctcattttactgttactaatattcttgattgtggaaggaatgttagttatcttgggtcagatttggaaggaccctaccaatgtccacattggtgatgcaggattttacagaggcttgtatcatgaagctgatgttctaaagtagaacctcgacattggttgcctccttcttattctactcccttgcattatttatgtgctgacctcaggtagtgtaatgtaataatgctttaatcctctgtgtctaaggacacagtacagtgctttttaggcagtaagctcttaaaattaataaatgtgcgttttgttgaattctctatgaacttctaggttagtattttattgtggaagaaaatgttactagtctagaagtgttttaaaatggactatttttatcaaagtgatacatggatatagtttgaaaaatcaagtgatactgaaaaagcttcaagtggcaaacagcaatgcactacccatgcctccccatctttcagtccctgtgtttatagacagctatcctcagctcttccaggtggacccctatacaaataatgtacgtatgctgctatttcttgatttactagtttcaggcattatcttaacatctaactatggaagataaaaacttcactttcccacataatcctcactttctctttctgcttcttcaagtgaagtcatgaattttggttaaatcagtggttggctttaatattattataattttataaataagtttactgttgagccatgtaataaatgatgatgatcagatctctcttatataattctttgtttctcttatggttgataatcaccttattttaaatttgcctactcttctgtatagacagaacattgttatgtttttccagaggctccaacatttctgctgcactcctatcattaacattcattgtgtattcaaatacatcagttcctttttatttctctattgttttctttcctggagtgtttcatattttgctcgactatggactga

SEQ ID NO: 131397 - DNA, 1027 bp, Homo sapiens
tgcgtctgtaatgtaaccttttgtatgttagcatctttacttgacaagtcggaataatgattgctttttaagcttggcatgccgattttcactttacaaagtacttatttttagttattatttcattttgagataagacctattccatctttttcaaggaaacttgtgaggattaagaatatattatatgtaaagtagtttgaaaaatataaagtcctgcatgtatttcaggtatataataatgattcagtgcttattcataatgtcatcatcatggctacaagagactttggggagatttctgattattgtctcatttcacggttgtgcttcaagtaatctttccagttcatggaaaattggaacattcagtcacttccctcaaaaatttatagtattgtggggtttcagaacatacaagagaatttagatttaagttttatagaattggtaacttcacaccactgaataataggccatcattaatagataatgtaattatgtttcttttaagtagttaaaatactacttcttgacatgataactgcaagttttattgtgacctaaagattttttaaaacatagttagaaactaagttatttgcaaatattttactttattgtctgtcctaaatgtttaattctcccatgttgctggtgtgtttttctggtttctgctcacatcttcttttcccgactgtgcttttttttttttttgactctggcttctctctggattgaatccacttttaataaatctgcataacattattttcccagaactggttcattacctcattcatctgaacagttgctgggccacaaagagggtcctcgggactcaatcacattgttggatgctaaagaattgctgaagtactttacctcagatggattacccattggagatcttcaacctttaccgattcaaaaggggtaggttataaacttataatttccagttaactttttaaaaattacttttaaataaaattgtgtctcatttccttattaattgatgtcctat

SEQ ID NO: 131398 - DNA, 1270 bp, Homo sapiens
aaaaacttgtgagtgaaattaaacaaaaataggtaaggttgctgagggcgattgatatgagaaatgagagacaatatggtaaaggaaagaagtaaaatgctagataaagatttccattttacaaaattattttaataatcatcgaaatactggggtcattgtaatttactaatgttactttttgtggaataatttaaatggatgcatttgaatataatgtctgctttttaggattcattaattggcatgaattttacattttaatgtaataatttcgaatgcttatcatagtaccctagataattttcagtggcaggacagttttcattaccaatgccataggggggaaaatgtgatagcaaatttattcttagtactctactatttacttacccttctacataccatttccaactcttctgaactcaagcccctggtatttcattttacctagtaactatttaaagaccactgttgcataatttccccatttcctgaacttctgagcttcaggaccatgatccattacattacaacagtggtttccagctcagagaaggacggcacctatcggaataatccagagagcttaatctaattgcagtgaccctcttctttcccagattttgatatatcgctgtagttctaggtgtggaaaggcttgaacatgaatattttatgtaaactcgacatatgattagttctaacatgccagttgattgaaaacctacttcagaaaaagaactgaactcagcagttagtctctataccctctgatatttaaaaagttgctgactcttaaagtaggtgccagtgactacattctcaagcaaagaaagatctgggtcccacgtgttttagtaggaagtaaatacttttattgttaccaaagattcaagttgactttaattattcccctgcagaaaaggatttaactaaatgcctaaacattagtttactctaccaaggaaaatcttccagaaataaggctgcctcttggctggacgcagtggctcatgccagtaatcctaacactttgggaggctgaggccggcggatcacttgaggtcaggagtttgagaccagcctggccaacatggtgaaaccctgtctctactaaaaatacaaaaattagttggacatgggagcgggtgcctgtaattctagctactcgggaagctgaggcaggagaatcgcttgaacctgggaggcagaagttgcagtgagctgagattacaccactacaccccagcctggacgacagagtgag

SEQ ID NO: 131399 - DNA, 1016 bp, Homo sapiens
cattatattgcctcttgccagactcttgaaattcacatttccaattttactctagattctaccaattacccatgatagaagtcggactcatcagtaacccttagggttgcttctggtttttaatgaaatatgtttcttaagcaacagactagagaaagaatattagctagagagatgccaagacctaggttctactccctactctgccaccaactcacattcagatttagagatcaattttgtcaccggttaaattaaactgagtagatcagagatttttcagtcctagttataatttagaatcatctaagtagactttttaaaaagtgtgtatttttaatatttaaatataattaattttaatataataagatgttttgatgtacgtatgtatagtgaaatgatcactgtagccaggcaaactaacataaccatcatctcacatagttacctcttgttttgtgtgccaagagcacccaaagtctagtctcttagcaaattttcaatatacagtacatatgattaactatagtccttgtactgtatgctagatttctagatttattcatcctacataactctgcaactttgtaccctttaatctacatctttccataaccttccccatccccataaccactattctactctgtttctatggatttgagtagttttttaagaatcacccaggcagatttttaaaactgtcaaagacagagtattaccctagaccaattaaatcagaaacactgagcaagtagtatttcttgaaagctcttcagatggttctaatgctcagccatgtgttgaacaggagtaagatgattcttacactttacatagagatagtataccaaaatggttaaagtcaggctctgaagtcaccaacctgggtttacattctggctgtgctacatattgtcagcatactgccagctttactgtggtagaaaataaatctaatgatgatgataacaataatagtaacatacatttcttgactgccctgtttgcat

SEQ ID NO: 131400 - DNA, 1889 bp, Homo sapiens
aggacaagaaaaaactggaaatgtttttaatacatattgaacaataacaaaaaagcacatggaagtgtggtgtaacagagtgaaaagagttacaatttaattgggtgcctagtggaatactagtgagaagcatgttaattccacagaagctgaggtgctcaggatttgaagacaccagctatcatggaaagcaggggcgagggtccatgtagaaagcagggaagtttaaataaagatctacaaagtgacctggagattgtccaacttgctttgcatgctcttctccccaaatgttcactacaaggtctatcatgcataggtttttccacccacctcagtgacactgtaggaaatagtcgctggggaaaatattggaagctgcagtggaaaagctaactggccatcttgtcactctaccttgaaaagaaaccagtgacaatctctgcacagagtttccagtcagatttttagtgtctcacttttaaatatgactagacagccatggattagcaggctttgaggaaagcttctaacacaattgatgccaaaacatataggaataaagggaactctgaagaagcaggaagttgaagaaaacttcataaaaactataattctcatagaaagaagataatcgcatccataaaactagaacaggatgctgtttccaaaaaaagcataaaacatgaaagctccataactttaaaaatatgataaagtcaattaaatagaaaggctgaacagttgagatgaaaaaaatttaccagaaattagaatcaaatgacaaaaacattaaatccaggctaagaaaattggaggattaatacagaagatccaaaatgctaataatatgaattttgtattttttgaacaattttctctcctttgttctcaaagtttagaagagagaaacttgttcaaaaatataacaaagttttccaggagtggacacaagcgtcctagcttgtccaagccaatgaatgaaaattcttcaacgagtcacataattatggaatttcacacctcttagcatggagagaacattttctaaaagcttcccaggaaataatctagtttatatatagtgaatcaataatcagaatggcattggacttctccacagtaacactgtatgctagaagatagtagaaaagtatcttcaaattctgagggatgtgcatttctagaattaaaaaaagaaaaaagaaaaaagaaaagaaacttctgagggaaggtgacttacctagtattctatacccagtctggaatgcagtcaggtatgaggatttaatgaagatacattcaaacatggaatatctgaaaaagaatttattttacccttttgaggaatctgctagaagatgaagttcaacagaacaagggactaaatcaagaaacaaaacaaaaactaatctaaaatggaaaagacaagtcctaataggaccaggcctaggcagcaactagaacaaattagaggaggctatgggagaaagatctccaggtttaaaaaatttaattaaaaagaccaaaagcagaaaggaagctgaactgagagattatcctgtatacttcagggcttgaaaaaactttgctgtacatttagcccatttattgccagtatttaggagtgaaaaacccagaattatatacatggaaagctgagcaaatgaaaaaagctaacaggtagttaacaggataaatagaatattggaagaaagataaattataaccataatacattaattagcacacaattgaaagtatttacatagatacaatagtgtaaacactgcctatttacaatcaaaaattgtggtacaactgttcttcaaaggaagagaaggaaggttttgtgtacgagacctgaatccatccatgacgttctccct

SEQ ID NO: 131401 - DNA, 1101 bp, Homo sapiens
gagtttcagcttgtttgtttgcatttaggggctacgtgcatgaaaaattccatacccagaagtacattcaatgcagccagatgttcaaactacaagagacacaggggagtgaagcctaacccaggaaataatagattctcagtcttatttcatgcttgtgctgggacatatagatgctcaggaaaggaatattcagagagaattttacacagtatttaaattcttttctccgtcacatttatttatttttcttatagttgaatttgcacaaattaaagtcatgttattgaactcccttgcatatttgtccagatgcccagctcttgggtgctatcttaacctcattggagaggagatggcagaagagcagggtatagtggagccctttgattccagaccagaaaaatgagagcagatcaccaatttgggtcttatacaaggtgatatgccaggtgaataaactagtctccattttgatgatgtctctctctctctctctccaggctggtccattcaggtccaggaaagggatcaccccaggctggtgtggatctgtcctttgcaacgcgaactggtaccaggcaagggattgaaacacatctcttcagagcagagaccagcagggacctctcccactggacaaggagcatagtacagggttgccacaattctgctgaactcattgctgaaatcagcactggtgagtactgcagtgagctaccaaggacacattgttacgggaagatgaaccctctactccaccggggccttaaagtagttttcatcactggcctctggggatagttaaaattccagaagcaaatttaaattcttctaaattaaggaggtctataccctactaaaatgtaacctaaggctttgattatagaaagacttatcctaccttcattcaagaaaagttggtaagttggatagtcagttacagttttcctacctgtaacctctgggtggcttcctggaggaatgaactttgaggcatgaatgagtagtgctcttggttacaaacaacagaaactgattccgagtaatctatcacagaataaaattattggaaatatattaggcagttaataggattga

SEQ ID NO: 131402 - DNA, 1033 bp, Homo sapiens
cttgcatgacaaaaatttcgtgccctttggccaacacatccccatttccctctccccgctggaaaccaccattctactctctgctttaagagcttcgtcattttagattcctcatataaatgggatcctgtagtgtttgtccttgtgtgtctggcatatttcacttagcataatgttcttcaggttcattcatgttgtcaaatatgggagaatttcttttttaaggctgaataatattgaattatatgtaaataccacactttctttatccgttcatctatagacggacctttagaggcatcacacttcctgatttcaaactgtattacaagcctataataatcaaaaccttatgatactggcataaaaacacggagaccagtagaacagattggagagcccaaaaataaattcacccatttgtggtcatctgattgttgacaagggtgccaagaatacacaatggagaaaggatattctcttcaataaatggtgctgggaaaactggatattcatatgcaaaacaatgaaccctattttacaccatacacaaaaataaactcaaaatggataaaagacttaaaggtaagatctgaaactgtaaaacttccagaagaaaacatagggaaaaatattcttgacattggccttggcaatgatttattgtatatgacacctatagcacaggcaacaaaagcaaaaataaataaataaatggaactacatcaaactggaaagcttctgcatagcaaaggaaacaatcaacaaaatggaaaggcaacttacaaaatgggagacctcatatctaattaaaggttaatatccaaaatatataaagatttacatttcaatagcaaaaaaagaaaactgattcaaaaagaacctgaatagacatttctccaaagaagacatacagatgtccaaaaggtgtttaatgtcactaatgatctgagaaatgcaattcaaaaccacagtgaggatgtgcttaggatgtgtgttaggatggctattgtcaaaaagacaaatgataatg

SEQ ID NO: 131403 - DNA, 1044 bp, Homo sapiens
cagagtgaaagtgttcattgtgtctgacccatccagattcccagcagcgctagcagacagcacctcttgacataactccaggcagcctagctgccttgccttcctctttgtctgggtctgctgggcaccaagctctttcacctacatgagtgtggggaagtggtgttttgtcctctgtatgagctgtttgcttttccttcccatcagagtctaaccactcccctgtgctcaggctgagtcaagatgagcaaggctgggctggactctcattgtgccccatctcctcactcatatttcccaggatggccctgccctgtgtcttttgcttgtgcttccttcaccccacagccctgcagctgtgcctcatcccattcccttgggactaagcccagtttcccctctttctcttgctgccccatcttatggtcagcctcaaactgaactgcaaaactatatgtctgactgtagagctaccacactatgctgaccaagatagattatagataaattaaatgacaaattgatacatggaataaaagacaagtaaggaattccagctacctattgctgagtaatagctacttcaattaaatgccttttcactggggcagcagcttaaaagcaacagccaatttaacatctctcacaattctgtgggctgactgggtttagccggaaagaacttctgctccatgttctgtcagcaggacctgcagtcatctggaaactgcactgagctgtaccatccaagatggtgcacacatatggctgataattggtcctggttgtcatttgggacctcagctgggattgtcaactggagcacctttgttctccatgttctctgtctgtatggcttgggcctctctcagcatggtggctggatcccaggggcgcagtgttccaagtgcatgaaagcaggaggtgcagaatgtcttcaaacccagcttcagaagttgcacagcatcacttctgctgcatcctgttagtcaaaacaagtcatggggcctgcccagaggagagaaagagactctacttcttgat

SEQ ID NO: 131404 - DNA, 1122 bp, Homo sapiens
tagtcccagctatttgggaggctgaggcaggagaattgcttgaacccgggaggagaggttgcagtgagccaagatcgcgccactgcattccagcctgggcgacagagcgaaaccccgtctcaaaaaaagaaaaaaaaaaaaatctagagacttttttgaggggggtggatgatgaaaatattctaaaactatattatggcgatagccccacaaaaataactgagaataattgaattgtacattttaaatgagataatatggtggtatataaattacatgatagcaaatctgtgtaaaagtcatcttaacatgacttttaaacagctattaatgtttaaacgctttttaaaagtttaatgactttgaaacagctttgttacatagcttatacacagaattgacatttaaaatgacttttaaatgctttttattatataatttatatatataatttttaaaaattaatttaatagattgcaaacaatatttttctcttaattaaatagaatagaaaatattagattgtgtttatgtagtgtatcaggattctccagagaaacaggagcaataggatgtgtgtgtaagatggagagggatctagatagatacatagaaacacagggaaagataatcacatgattataggggctggcaaatctgaaatctgcagggtggactagctggctggaaattgtggcaacagatgaagttaaagtcttgagtccaaagacagtgtagaggcagaattcctttctttcgggggaacctcggtcttttcaggtcttcaactgattggacaaggcccacacacctgatggaaggtcatctgctttactcaaagtcaatgtgattaagtgttaatcacatctaaaaaatacattcacagcaacacctagactgatatttgaccaaacagtggcataccatagcctagctaggttgacacataaaatttaccatcacacagagtaaaaatagcattttgtgaaaagtttgtttccatttgcacactcacctgtgtgtgaactggcttgtgattttcaatgccttcattactgtgagtcatgggttaaaaaatacaaaagcctctgctttccatcttcatatgcagacagatgactg

SEQ ID NO: 131405 - DNA, 1037 bp, Homo sapiens
gctttagggtcatcactgttctagtcattatacatgtaattcagcccatttctatctgcagatgaggaaactcagatgcagagaggtaatttctttctccagggccacttagctcatagccagtacttggacctaggcaaactggctctgttaacgacattctaacttctgtgctatgcggcctctcctagacggcagtcattgggttctgtatctgccaccacccaaataccccccccaccagcccccccacccccacacacacacttcagcctctgtggacagtgagctctttgaagtccatggctatgttttctgcctcagtatctccagtacctagcaggctgcctagcaggaaacaaacattcaaggaatatttttgaatgaatgattcaaacatgattaaggttgtttgtacttgctgcacccaaaaatctaacctctttcagtttatgtttttgtagaaggtacatttaagtcttgctttcaggccatgctttcatgataattgataaacacccctcatacaaattgcccaagggtacactgctggatgtaaagtttaatcacttgactcacacatctggagggaacaaatgtttggaatgctgtgaggcagaggcagacatctgaccacctaggagctcagaaggtctccctggcagcacacacagcattctcctctcgctctccactgcctgctcctcccaacccaccccatgcaccttgatgccaagaagtagaaagttttgggttaatttctttcatctgtaacaatttttctgttctactattttaatacacattatcttaaaaaacaggaactaatgaagtcgaaacaaaacaagtctaaccccatagttttgctgcctcacagagagactgactttcttcccaacttgtctggcaccttggcatttactataagatgagaaagattgaatttcatgtagtgtgaccttttaaaacttgagttgaacatttgcattattctgatttttgtccttctttgcagaattgcatgacaatttaaaact

SEQ ID NO: 131406 - DNA, 1085 bp, Homo sapiens
gctagaaatggaaagaacattgtgtccatctactccgaatgatgaagagctgctaggagcagacctgagactcaaacccagagcttctgagtccatgtccactatgcactttccactgaaatcttgcccctccttttgacttcaaagaggaattgtccataggattcatttaaagatctaggttcccccaggagagttttaatttgatctacttacaaagctataatatttgcacacttattacaaaatactaagtaaatagagaaataggttatttgacaccttagtgacatcttctgcttacaatcatcctctcacttccctacccaccaacccctaacatctacttcacaagcctgtggtcatccttcagtcctcatacggatattacctactctgagtagtcgtttctgtctgcttccttcaagaccagagttgttgatattgttcttctgagaaaccctggctatcaattttccagcccttgccgtatgaagacgaaggtattaagtgacagaattgggtttgagctagccctttctgacttcaaagcccatgtgtcatggaaccatcgtattacactgtcttcaaaccccttccaaagctaccctaaccacattgtatggcttatgggaaagaaagcctatttcctccaccaaactatgaatccttcttgttatccatgctgaagcacaatcccatatttcgtttgtgtcctaaagcacataataggtgctcaacaaatgtctgacaatagactagaggaatgtatggataacaagaaagctagacctatactttctaggacatgatacatttttatgagttgaaaggaaccttagagaaaaatttatactaaagtcaaattgagaaggtattccaggctacaacagtgacttagcatcaaaatgagacaatgaatgatgtcttgtcgttttctagcttcttgctactcaaagtgtattacagggacaccagcagcatcacatcacctggggatttgtaagaaatgctgagtttcagaccccactccaggcctgtggaatcagaatctgcattttaatatgattcatcccattacagtt

SEQ ID NO: 131407 - DNA, 1026 bp, Homo sapiens
tttctctattgcttacattacctttttttttactttattttttaatccttctcatgaatatattttgttcaccttttacctgtcatattttagctttttgttttctgaatttttttatagaattttgttcttttttggatgtcatattttccgttaattcttggagaatattctctctttttacttttctttgtgttcttttttcctccatttactgttttctgtttgtttgtttgtttgtttgtttttatcttcatcttctttactggaggttttctcaaatgtctggtgatccattgctatctgttcatttcttgcactgagtaaaacatgttggaacctatgtggggagtggggagggggatgtcaactggtgagaattcacatagagttattgcttggtgaaccaagccttaccaagagatccttcccaattctgcaaatatcagtgtttagaagctttacctgggtctgtgcagttacttatgggagaatcattctgtctttttgagtgtggattgggggtagatagtgggagaatacccactttccactgttctgagagtcccaacactcagcatacagacttcatttagggccctcttttcagggccatatcaccccctaccctgtctctggaggttctgagcccatgcaggttgtgcagagccaagggactcacatctggatggaattctctttgtggccctttaggttatagcattttatactcttcctccactctgcagagtcagtaacccagctccatcgctgtctgtcctccaaacatgttgtgcctgtcttgttctcctgtgagtttagacctcctttactgtctttttactggatcttacaaaaggcaggagatcaacatgaatagccaaaccaccgtttttcccgaagagaatccttgcataatttgcatattggtatataacagagtacacaaaagattcattttaatgagcttaaaaaatatttttctagtcttgttatttttaagaaaatttgttttcttcctagata

SEQ ID NO: 131408 - DNA, 1049 bp, Homo sapiens
cagacaaaaaatttagacaaaaagtgtttatgtaagttctcaacattatatagctgttatatagtctagctgggcttcaaactcatgcctataaaatgggtgacagtgtcagttaatcatttccagaaaaatctaaactgagacaaaagcttactgagacattgtaggagcaattcatacactagggagaaaatttgaatagatgatttcttgggtttcttccagaagtagacttatatgctacaacagcactcccaggtcatttaattatattttaaagaatattttgggagacatcagaccttaatttagatattggaaacttcagtctgtatatcaagccagtagaggagaataagtttcaaacttttatattggtgctcgtcaagtccaccattgacgattatacatagggcttcccctgtgggagagggagagcctgttctgctgtggtgtgagaaccagcagggcagaatcaaacatgagaatccagctaagccagatggttccgaagggacttcaggtccagacaggtcccaaactgcttctaacaagaagattgggggcctaggtgaggcttgcccatggtagaagaagagaagaaaataaaaaggaaacaaatattttatgaaactccaggtacaggctgagcagggtatggtgtaccatcagaaatgtggaatctgcaaaacccaactctatgctgaatgcaagagacacatctaacagagtgattttaaaaggtgaaagatacaaggatgggcaaaagcttacaaggtaaatgcaaactattaaataacaacagaaagcattgattttgatcttgatataagacaaggtaaaatgcaggctgaaaaatgtccaaggtaaaatgtccataaagtagcacaaggaaggactgatttatgttgaaggcaagagttcacaagcaacatccagtagttatgaatacataccacataacaaaacagcaacttttatagcggaaactgcagaagatgcaagaagaaatagacagaaacatattcatattagatatttcaacatat

SEQ ID NO: 131409 - DNA, 1043 bp, Homo sapiens
aacagtatttcttcatcactgtgcctttgggcaagcacagatgtgttgcataccgttaaatcactctcttcttagggtgcaatgttgttctttgaaagtatttggttctccttccacctctctttcccccaccctctccttatgccaaataaggcacatttcccagacttactctccacacccagcaaggtattgcttcagaaatcctgagtgatttttttttaactcattccatcccagttgcatctccaagctcatgatacatgtttcttattcatttcaggtttgcacacattgagcacctcttagtatggagccctaaagtagattccagagatagaaacgtattaacaaagcaccaacacacagacctatagagaggccaccttcttttcttttcttccagtggagtttgccttgaattagagtcagggagaaccatagtgtaatagacacttcaatcttagtaacaaaaagggttgaaattatatttcaggcaatgttgattccattaaaagtatgagtcttgagagggaaatgatggagaagcagaggacttcttatgtgaatcaggtagtgtacaacatcctgtacaaccagctaccttttcgtaaaataaaatcccaaacctttgaaataccatcaaaacttgctacaattttagcttcaaaccaattttcccatttcccaggttaacgctatactttagctaaattattcaatttaccatctaaaaacactgtaaaatataggacttgccacggtacttggctagcagcaagcaactagtttatatttggagaagaatgagtgaatgaattaacatgaattatttcttcttccattgcaattaaaaaagatttaaaagctttagggataaagtagatttttgttatatggatgaattttatagtggtgaagtctgggattttagtgcacccatcacacaactagtgtacattgtacccaatagacaggttttcatcacttacccccacccaccctccccttttctgagtctccaatatccattatccctctct

SEQ ID NO: 131410 - DNA, 1077 bp, Homo sapiens
gtgagttttctgcagtagctgtgatttttcaaaaagtcatgaaaattagtatggaacaggaaatgagagtggtaatatctattatagtataatttcaagttttgaaaagttgcataatgcccagtaggtgtcaagtttttaggacataaatacttactgttgtttgggcctcattacttaataaatagatttgttaggtatttctttggtccccaagtgtgtcatgaaaaaatcactaagtcactaaggacaccgtttacccagaaaattgggacctctgaactgaagactcttacactatctgcatgcggaaatcctattaactgaacattggactctccccatattgacccactaataaactgatttttgttgctatttctccacttttccttcatttttattcatttttttttcattctggagaactagatttttatgtacaactcttgtattgatttttcattccatctatcatatctctaagttcccaaaccattttcttgttctttgattgttccttttttatatagcatcctcttgttgttttgtagacacattatctttgcttgtctgtctgagcatattataatagttttttgaagactattttgcaccagtattgactcagatgtctccaagttcctttttctctactttgtttttgagtgtgctatgcatatctgataatttcatctattttgagatttgttccatctttgtgtaccccaagagacagaatctgaaatgaggatctaagtgcaagaagtttatttgggatgtaattctagaaaacactggcagtaaagtgcagacatgagacagtgaagggaatgaaccaataaaggccgtactgttagttgctcagtccctctagagctcagcatgtcccaattgaaagtgagtgagaaagccggtaaaatggatttaccaactctccagccatctttgcgttaagggttgcttctgggacattaactccctggtcagcatctctatgagggctgtgtgtactcccaacaaaaagatgccttcagggagagaactgaaggtattttctgtaagcaacctgcagcc

SEQ ID NO: 131411 - DNA, 1107 bp, Homo sapiens
accggctcaagtacttcataatcagcctcaaataccctacctcctcaattacttgaagctccctgaaatcagaagccatgccttataccgctttaacttccttttgtccacccacagtgtcttcagtttgtgtagtatacagcaggatgggcctgatgaggtgttagatcatctgatttccagcacctgtttggagagtaggaagtcacctactctctggcacttccattttactagagccttaccaacctcatgttactctagagggtgatctaccttaaatgcaaaactgagcatgacatttccctgcttaaaactttaccctcaatctgaaattaattctgtaatacgcccccccaaggcatggtcctcaattccttacttttttttccccactcttccccctcagtagtctgaaggtcacattctgccctcttagccacactgagctacacatgaggcccagactctttcttaggctacctgaaggcatttgccttctataatgccctgtccaagagcagaccagatacccttcccatgggctaccacagcatctcataatgcccataatgtagccatttttcctccctcttgtaggtatctgcatggtacttatctgtatctgtcaatagaatgttgcttctttagggcaatgttctagtagagtatagtacataaaagacactcaataaattagttgttaaaagagcaaatatataaatcgatgagaaactctcttgcaatgagagaggaagcgattatttataaaggtgcggttcatcatctaatgactacccaggacatttcttaccattacaacttcagcaaactagatttggtaggcagaagaatgcccaccctctcctccaaacacacccacgtcctggtcttctccagatcgtgtgaatatgttaacttacgtggcaaaggggaattagggttgaagatggaattaaggttgctaatgagatgacatttaaatggagaattatcctggtgtgtttcttagtgaccaaagtaatcacaagggtccttaaaaatgaaagggaagcagaaaagagactggaatgatttgatgtgagaaggaattagaccgccattgca

SEQ ID NO: 131412 - DNA, 1053 bp, Homo sapiens
ggagccgcggagcagctcagcgctggagagagtccgtgggaggaggcacgctggcggtgaagggcggggacccacaacccagcggccgctcacctgttccagccgccgcagcctcggcggtcacacgccacccgcccgcccagacctcccctcctctgtccccagagcgcacgacgccgcggggacagcttcccgagcgccttccccgtcccgcttctctccagcccaccgcagccccctttcttcccagctcccccactccgtgggcgcccacactgcaccttcgccgggtgcgtgcgtcccgcctcggtgccctcactcggtcctcctgagccgacttccctttcatacccagcccgtagaattgtccctgggtcttaacaactcatttgtaactgatccaggtctcctccctctgcttcctcaaacccaggcttcgctgcctctgcggagttcttacctgtctctcctttccacccgggttccctggaggaagctaaactcagaccaaggccctgggctccccaggagttaaaagggaatacgctgtcccaagattctagaatgaagagtcaacgtagcccgagtggcttaaacctcctgtccttaaatgcaagaaatgttttctatcgagccctggacaggtgtctctgctggcctggggttttcaacaggtcatgcctgcctcagaccccagggacaaatgttcttccagctctaactcattctatgctttaagcttttgacctatctttgttttcccagtgccacaccaaatgctgcctggggatctctctttcttcctgagttcccatataagaagccccccatttaagaattcagttggaatgggttgtatttcaaaagttgctttgcaagttagttatttggatttcaagttgcattttaccagggtaacaatattataatgattgtttaccttcccagagcaatccagaaatgcccacataacccatgtcacacctgaaccaccctgagttcttctatccttgaacctctcaagctttcccctaactctaagcaggtctcatg

SEQ ID NO: 131413 - DNA, 1041 bp, Homo sapiens
gggtgatagggtaagacccagtctcaaaaaaaaaaaagaaaaagaaaaagaaaaaagaaatagaagtatggtaagaaattggtatatatcttatacctatatacctaaaggatgatcaatatgtggttgatttaaaaaaaaatctgagtcaaaaaggaataattaaaaaaaaacagagactcaagtttatactagtgagaaaggcaaagaatggataagtggttttccaatattgtccatcatttgttattgatgaagaaacaattaatgaaacaaatatcaatggaggtaatttgacatttgtgggatggaaaaatgtatatgtgaaaatatgtgaggattaataagattcccttgcaaataaatatgaggttagattttagcaaaaggtaagaaagcacatggaaaatagactttaaaatttagatattatcatgctatataacccattttatatatgtagtttgatagcaaaagcaaagaaattacattagaagggacaaagaaatagcctggtgatttttaaaaaaaggagctggcaaaattgagacagaggagagaatgtagaaatctagccaaaaaaagctgataattttcaatagcctttatataaagcattatttcacgattcaaatttgcaggaaggccatgggaaactctcctattgctgctattgcaaaaaaagtgtggataaaggagaggaaaagtaatagccaaggataggatcagtttgaaattaaccagcacaggaggaactggaacctaaaaacattcaaatcttacgtgttatgaaagagtgcctgggaaaagagtttagggattgagatctaaagcctaaaaaaaaaaaatctcaatttggccaggcgcagtgggtcacgcctgtaatcccagcactttgggaggccgaggaagtcagatcatctgaggtcaggagcaagaccagcctggccaaaatggcgaaaccccgtctctactaaaaatacaaaaattagccaggcctggtggcgcgcacctgtagtcccaggtgaggcaggagaatca

SEQ ID NO: 131414 - DNA, 1040 bp, Homo sapiens
ggggacggagggagaggcgctaggggaactggcacctaagactgtgtaataggacacaggtcttgcaagtcctcctccccaggcaccgcccctgtgctcccagcgcctctttgcagctttaattatcctttcagcgccgttcccccgcggctgcgtttccgtggtcagaggaaaaaggctctttcgcctcccggttctcaccctcatacagaccctcctttcagacccgccctcctgttcacagggacccatttcggagccctggctcacgctgggcgggaactgccgtgacgaattccccccaaggtgttgattatccatcccaacccagcctctggcttccctcccacctccaccccagctcccacaggcccctcgccccgttcatcggctgggcgctcgagacggcgcccccagatctcccaccgggcagtgtccccagctgcagctgaggagagaagcgccggcgtgcgcggtgccacgtcggaattggctctggggacgccgcagctgccgaagcgcagcgcgcggtccccacgcacgccctgcctccgggcggccggcgggctggcccggcgaggagaggagggatgcgcgccctcctcccgctcctatctgcgggtgccaccgcctgcgtcagggacccctggcccgagtaagcccagactgacgagcctgacactttaatggggtgcgggaagtgcaaaggaggggaggcccgggaaaggggggagtggccgagaggggatggtagctgcgaggaggtagagaaggaccctccttctccagggtcccagcttgtcggagctggaagcccagattgcttaaccctttgcattcccagcaagaagcgactttttcacttagaagtaaaacgcgctgggctattccagtttttctccccacagtgtgtgtgtgtgtgtgtgtgtgtgggaaaaaaagaagggaaggggtggggcggctgtgcagaatgcattttccttacattgggaattcttgtttcctaactctggagcccctctgctgctccggaagatgca

SEQ ID NO: 131415 - DNA, 1045 bp, Homo sapiens
taataattgaatacagggaatatgggtaatcagaaaagactaataattcaagtacttttttaaaaattcaagaaaaagaaaataataggaatggagaacaaatgagacaaatataaaaccaacaggaatgagttgatttaaaagcaaatatgtcattaattatattaaataaaaataccctattttataaatcaaagttaataaaactggatttaaaaataatgttcaaaaattaaacttggcatagctgtattagtatcaacaaagtcggctgtaaagcaaagattactactggagaaaaacagaaatatttcataatgataaagaggtcacttgaatcagaaaatataacaataccaaattttagcacctaaatttttatgcatctaatgacatagccttaaagcacatgaaaaaacagatttaactaacaaaataattagacaaatacaccatcatggttggcaattttagtctttcattaactcatagaaaaagacactcttaaggatttgaaagatctgaatgccaagattgataaatgagccattggcatatatagatatcagatgtcagaggtgaccttccatcacttttttcatattctgttggtcagaagcaagttgcaggttccacatacacccaagaagaggggattagataatatgactcactggggctcaccttggggtgtctctcccactgccattcttatacatttgatagccatttatttagattgtccattatgtatcagatactgtgctagagctaggactactgaggtaagtaagctgtagttatctgctctcaagcagcttttagtctagtgggagacaaagactcataaacatttaataaacaatatgtataggcaatgagaaaggtatgaacaagaaatatgaaatagaggcacctagcccatcctcgtggttggtgacaggagtcagggagactgcatggatgaagacaggcctgagatgatttgggaagaataatttctaattatttaggtggtgagagtggggaaacacatcacaagtaa

SEQ ID NO: 131416 - DNA, 1003 bp, Homo sapiens
gtggctcatgcctggaatcccagcacttggggaggccgaggcaggcggatcacgagttcaagagatcgagaccatcctggctaacatggtgaaacgctgtctctattaaaaatatgaaaaaattagcccggcatggtggcgggcgcctctgtagtcacagctactcaggaggctgaggcaggagaatggtgtgaacccgggaggcggagtttgcagtgagccaagatcatgccactgcactccagcctgggtgacacagcgagactccgtctcaaaaaaaaaaaaaaagagtcaaaataatgtgattaaatgagttttgtaaaaatcatgcaacaaatggcctgtgctcaattaatattagcaggatttttttagttctcttttttccccctagagttcaataatgttatgataagtagcagaaagcatgggtgagattgagggtgaagagaggggtagatccttcaagtcagggatcaagaaacttcatagtagaggtagaatttgagttgagcattctgtgtaaagatgcttggcaacaggagatgaaacttttttttttctttttttcaccgtgtcttaacccattaactaaatatcagcaaaaaccctgaagagagaggataatattggacaattggggagcttcttttggactggcagtgggttggacattctttagcataggagcccttatctagctagccacagtggattattaaaggcttggtaactattccttaaggaatgtgtttgacttctagctgcattgaatagagaatattacttctacaattatgctgatgacatttcagctagtgaaaagagccacgggcagtaataaatggatctgtcattatccactgatatcccatcatacccattctgtgaagactggctgctgctaactgcagtgaagagagagagggacctcttgttcccatcccatattcaaaggcccacttagtctaagatgatagaaagtgaaaggatgctggggttt

SEQ ID NO: 131417 - DNA, 1032 bp, Homo sapiens
ccctctctaggctgtgaattgcccaggattcctctgctactttaaaatgtgcccatgttaaagctcgctccagaacaacaaaccatacccgtgacacaaacagcactgccccctcctttacacttacatgaaggagcgagcatgacagaatgtttcaccactcccagcccttttgatcataagcctcttcttttgatcctgatcaccacctatggtgtgcagggcaagagagtcagccaagcctcatctccccacgcagctgcaaggtttgagggaagtgggttaggcagtggcagctctttcctccgtcacagagaaagaaaatgacacatacaagatcaaatgctaagtagccatggaacctgggctaacaccctttgtttttggcttgtgcgccacaatttttttttttgtttgttttttagtattagaatttcatccaaagttctctgacaaagctaatcattcaaaattggtgaaatgaaaatgggggagataagaatccagagaagtcgtctattaaatatctttttggtgaacttcaactttcttttttagcttatgttttaaatctggaattttgttcccagaaaataatactgtgacttgattatctccatggcatagaggacttggttttagctcttagcctgctgataatccatggaggaaggctgagggctcagcctctgtgactgaggagctcctgggctaggtgacctggcagcatcctgatgtccaggaagcatcctttttccccagattctcgaggagagtcctgtccacctgactctcagccctcagcctttgctttgtaggagtaatgggcatttacatttacatttgcttttcttttctttttctttttgcttttctttttttttgagatggagtttcactcttgttgcccaggctggagggcagtggtgtgaccttagctcactgcaacctccacctcccaaacgattctcctgcctcagcctcccgagtagctgggattacaggcatgtgccaccacacccggctgatttt

SEQ ID NO: 131418 - DNA, 1053 bp, Homo sapiens
agagaaaggaaaaaaaaagaaagaggaattggaaactaacctcacaggggaaagaaaactcacttctgcataatcccacgctggtatttagttatgcccactgtgagtgcttttagacaacaagcaaccgagaaaccaatgtgcctgaggggacccgaaccacacccttgccccacttgtcacgcgtggggcctgaagtgtaagagcaggacctcgacagaggcagaagtgagttcgaatcatggctttgccccatgccagctatgtgacgttaggccactctgctgccatttcttcatctgtaaagggagattatcattgtatctatatcattcaaattgtttgaagcttacaagaaatcctgtagttagagaggtctctatgagttttcagaaggagttagaaaagggtgactctggggattgggtagggggggtggagggctacttttcattagaagatgatggttttcattataagcccctatagtgcttgatttcttgaccatgggcatgtatctgtctgctaaaaatatatatatatttttaaagcctcttaagaaatcatgtaaatccagcattgtgcacaatgtttggcaaagagtaagagcttaataaatggcataaatgaagacctaagtgccagccctagaggccgtccagtgtgcaggcttaagaactggcacagccacttatgagctgcagtgacacataaatgcccttcatctctataaacgtcagtttccttttctgtaaaatggggggtagtaacacctgcttccttggcttgttttgagtattaaatgcaacaatgtagggagaatgcttggcccagtacctgagatcttgtacacattcagcaagtggtcactatcatttcactgtggtcagagataacgtgaagctgggaacaatagtgaacatgttggatgatagatacagcttcctgaaagatctcagcagacaagaagaatggagcaaatgcagcaattcagagaacagcatcaagtcccacatgagcaggaaacgcggccctgaggtgtcacgtcctgcg

SEQ ID NO: 131419 - DNA, 1051 bp, Homo sapiens
tgccaatcaggcctttagtccactttcaggggggaagagaaggaaggtgggatggtaataggtccagagcgtttacgtaaagaccctttctcgtggaaggaaaatgtgtgagaggtaagaatccccctttcacatttaagaaagttgccaagaatttaataagcactcactttgtgtatcagtgctcttcatgcattcattcaataaatcaccaactatctattgatcacctgttttgtacctggttctcttctcaggctcttgggttcaaaacagaaagagattccttctctcatggaacttacatttttggactgaggagagacagacagtaagcaataatcatgataagtaaggaaatcatagactatgctagaaagcggtcattgttatagaaaaacaatagtaaccttagactcgagggaagtggaggagtgagccatggggctttctggggaaagagcattccaggcagagcgacagctggtgcaaagaccctaaggcaggagcgtgcctgaggggtgtgagaaaagcgaggagtccgatgtgtgcagcagaaaaggccatgcattctggagatgtgggagccagatggaaaagagccttatgggccacggtcaagacctcatgcctttcagagtgatgtgttatgtggttcacaccccgtagcaactctgtgatagttgttgttcttattatccctttctttacgtgaatgcactgagatacattgccaaaagccccctttattttacagctgagaaaattcatacccagagtagggaagcaacttgcccaaggccacagagtgggaaaaatggcacggagctagggttcgggttccctgattcttggtccagaaccctttctctcatgtctctgctccagaaatgaacttcttttgaaggaggtgactctgggcctctcttgaagattcagattagatcctggagctcttaacactgtgctttgctgcccagatcttctatgttaactacagtatttccttcctaggaagaggtttaacatggaaaacctgagaaaggctaac

SEQ ID NO: 131420 - DNA, 1040 bp, Homo sapiens
aagggtttttcgtgtatgattatagaagttatatgttggagcagggaaccccactataccctcattactttttttttcccttccttctttttttatcttgggcacacactagaatgtggcattgctctctgtgggcccatccgcactccattcagccaagtattctattgctaacagagaacagagcaggttgcacaagcaatggacaaaatctgaacatttccaacttccctcaccccatcattcactcacccatgagttcatctaaacccttcttccacttgtttatatttttagctggtacagcctctcgggcccagtgacttccatgtgttttccaccctcggtgtgaagtggcagaggcctgcccggctcgtatcctcagatgacctcctttggactccaaggggtcctccctgttttttacctttccagcattaagggaacaaaataagaacctcaatgatatgtttgcaattagcaaagcacacttatggacataattttgtagaactatagaacttggtattggaagaggccttaggaacagtttaggccagtgttttcctaaaagtccacaatacagggagtatttccagaaatcactgcaagttgtacagtccccaggatatggtggcacggggtggcatgggatcgtggggggtttggttttgtttttgcttcgggctgcaattggataacaatggttacctcgttttgttcagaaactccagcagttatacatatgcctggttattttgttaatagataattaatgtatgagagacagaatcttttaaactttgtgttgtggagaaggtggacattgatgggaccctctattctgagctagatctgtgagtggagaggtcactgcctgaaggttgagaaatatatattctggcacttcactgcctgaagggtgagaaaatgggctctgaagtggctccctgaccccagcagaagaggctggtacatggggccactggactagaatccagattgtctgactctaagtgccaggctagctccagggcacc

SEQ ID NO: 131421 - DNA, 1390 bp, Homo sapiens
ccatttcacaggtaaggaaaccgagtttcagccaagtggcaggaccagcatccggagaacagtggtagatgctgagtcagaaaagacaggaaagagccacaacacatagggcctggaggacttggtagagcaatttggattttgtttagggttcagtggaaagccttcaaaagtttaagcgggagagcgctgcgacctgatccacatttttagatcactgcccagagtggagaaggcaaaagtggagacagggaggccacttgtgaggctgctttggaagttccagtaagagatgagggcagtgcccgtggaggtaaagtagacagattcagagatacgtagagcatctaaagacagccttactgaggattggatgtagatgttggcagagaggggaggaggcatggtttccctgtgggttgctgggtggttgatttaggacatcttcaggaggaacctgttggaggttgtggggaggggagttaggggatccttgcaaacttgtcaggttacagtgacctaggcacgcacttttgcaaagagtcaggttccccaaacatgcgtccttctctggcggagagcaggtcttattctcttgctcctgggcattgactaaatgctttctgtgaactgagtgagctagaatgctgccgctggctctgagaagccctgtattccttctgccaccagggaaccagggagcaagtaatgacccttctcagaatgttgggtctgatacaagaaacaaacaaaaacccccgatgtcctaccttctaatgtttcagactttgtgtatttttttttttttttttttgccagtctccatgggatctttcctctgctcatgtttgaaagtgattctcttttttttttaaatgttgttactcaggccttaaataacctttgtcctatgatggcttctgaaaggatgaagcctaagttagtgcaaaagtaactgcagcttttgccattgaaagtaatggcaaaactgcaattacttttgcaccaacctatagaattataagatcaacaccaacaataggcatttgtagagtgtcattccgttaaaagacctctcttatatacattccatgattttagcctcatgaaaatctaaggtaagataaatggtgtgtttagctctatttgagaggccaaggaacgtagcagccacgagcatgtgaactacaataatagcattaaaacattaaaagagttgagctggataaggtactcagaacagggcctgcaatatgaatgttagctgatgttgttgttattgcgattagcctccagatagagaaactgaggcatgatgaggctgtgatgtccccacgctcagtagtggaatcaatttcaagttgtgttcccagatgccaccctcagaagg

SEQ ID NO: 131422 - DNA, 1052 bp, Homo sapiens
tcccaggatgtgagcaacacgggaccggtgagtaccgtcgcgtttggcagtgtggggcctaggctggatttcaacaagggaaaggagagggatgggaggggcaggggcagctgagctctggcagctctgaaactgtatttccatgcacgtgtgcctggaaacagcacagggcccagaatctaggtgtgagtcccttggaatccactgggttcctgccaatccctccccaggagcactggagcctgcaggtagctggactgtcctccctctgctctgatgatagcagcccagactcaccatccagagggcatgtgctcagaagtgtttccagtaaacctctagccagggctagggagatattcttagaacagagagggagctatctggctcacaccatttaggaaaccatggccccgaggagacagtgctaaagtgaggcaggaaagccacctttgcacatttgaaaaactgtcatgagcagggcagaggtgggcagctgttgactccacctaaggaaacattcctaacagaagagctatgcaagagtgcaataggaaacttgggaagtagagtgagttccctgttgctggcagaattcaagcagaggttggagaaatgtctgtgggacacgtcgaaggggagagtgcaatgttttacagaccctgttccctggtgatctagaatgctgtgagggacaggcagtgggaggagggaggtagtgtagggaaagtctgaatgaaggaagcttttgaactcgtgcctgcaaatgctcagcattgcctccgttttaggtgcaggttctcctgtaaaactgtttggaagccaccagatgaaatgaccctcatgtctctcctacgttgttgcccattggctggctgtacctgagctaatgccagacaatgcacatatcatagacatgagcccaaacacctgctgtatgtggtccagggggcaactctcaaagcataatgagagttttgctcagaggctctggggagcctatctcatgccagaaccaccaaaagagttactggctagtcatgtcatcaagg

SEQ ID NO: 131423 - DNA, 1061 bp, Homo sapiens
tgcacaggctgtatattcagctgagccctgtttgctgtcaggggctggggaaaggagggagaggagaggactgaactgtgacttggcaagtcttttttttttttttggagacagagtctcactctgtcgcccaggctggagtgcagtggcacgatctctgctcactgcaagttccgcctcccaggttcatgccattctcctgcctcagcctcccgagtagctgggactacaggtgcccaccaccacgcccagctaattttttgtatttttagtagagatggggtttcaccatgttagccaggatggtctcgatctcctgacctcatgatccgcccgcctcagccttccaaagtgctgggattacaggcgtgagccaccacgcccggccgacttggcaagtctttaagcaggacttgagctttgaggacaggtactgtgtgcttgcattcatagaacctggcacgtagtaggtgctcagtaaatgattgtcaaatatagtgatgaggaggcagcccagggaggcaatgtctgtggttcagagcatggtccctggagtcagaatgccggattcccatcccagcccttccactagctgtggggcctcaagcatcagtctcctcctaagatagagatagtgatagttcaatttaatgagttaattcacatgaagctgctgggatatagtaagtgctcaataaatattaatccttattcttattctggatgtgagacatgaacccaggttaaggcccaatgatgggacaggaaaaagtagtgtaggttggaggacagagcactgggctgggagtcagaagccctggcatagctgcagggcagggtcaaggaagcaatccccaccggttagcacatcctctaagctggagatgctgtggaaggctgtcaaggtggcactgtttttcctcctggctccctctggtccctcctggttgaaagcggaggtggccctgctatttattcctagctgtgggcctcctggagagtggtgtgacctctcagaacacccctttttcccagtgaatggggacacccttactatcctc

SEQ ID NO: 131424 - DNA, 1001 bp, Homo sapiens
gaacactggaaatactccctacccttgtccctttggaaccttgagatagagatgctcatgaggggctgggcacagtggttcatgcctgtaatcccaacacttcaggaggccaagacaggtagatcacctgaggtcaggagttcgagaccagcctgggcaacatggtgaaatcccatttctactaaaaatacaaaaattagccaggcacagttgtgcacacctgtaatcccagctattcaggaggcagaggcaggaaaatcacttgaacccaggaggctgaggttgcagtgagccaagatcatgccactacactccagcttgggcaacagagtgagactccacctcaaaaaaaaaaaaaaatagagagagtgagagatgctcatgagtgagaacatgccacagtggaagtccaggtaacaccctggacattaccctaaagagcagctaaaacagatgctgcccaatcgcccgatcactttgacaataggaagtcaagttagagaaccctgatttcatgtcccaagaaaccacaggagaaaagaaacccacccagggtttcagtgcagtaaacctgagtgactgagaaagcagtggcatcatctctccaagtcccaacacttgattaacgcccattgacctacgtgactgagtgcctgatgcggatgtgatattgctgacagatcatttgctgggaatgtgagcgtggctgcaggatccgtgcgggagcactcgggccctcctccctcatcctgaggcatcagtacctataaaacccctctaagcaccttgacattggagccttttaactcctggagggaggtcatagtgaagatgagagtctgtattttacagataaccaaactaaggaggtaaagtctgatactaattaaagctctgtttctttgcctttgatcaaaatcttaggttcatatttgtggcccaccatttaccatctgtgagactttgggccaagttattgacttctctgtgcctccatttta

SEQ ID NO: 131425 - DNA, 1085 bp, Homo sapiens
gcaggcgcctgtaatcccagctacttgggaggctgaggcaagagaatagcttgaacctgggaggcagaggttgcagtgagccgagattgcgccactgcactccagcctgggtgacagagcgagactccatttcaaaaaaagaaacatcaaaaatgaaaaaatatatatacatatatacaagtgtatatgtacataacatagatatgttggtgcaaaggtaaagcggtttttgcaattacttttcattgcaaaagtgtgctaaaaattagaaataaccaaagcaaagaaaagaaaatggaaaaccggaggtagtagaaggagcccccggaaaagggcaaggagccgtgtggcctggagctgcctggaattgcagtcctgggccttgggctgagaaaggtttttccaggtggtccctgtcttgcttctcccaccctcgcgccgcccccaccacccccatgtctgagtctcttcctgttggtgttgccaccctctgccgcgcttgccggccagggctcatcaggggacagtgtgcagcatgacccaggctgaccagtgtttgcgttgggctctggccagtcggagagctgtactgcagccagcctcctgccgtgggtggtcctggattacttctctcaccccaggttgttccgagggttccaagccacacagcaggagccccctctctaccccttctccaggggtattccctttttaaaagggactaagaggaccaggcagcagtcatctcattcttcagtggggccaagcaactcgggatccacagagctgcctctgcctctgaaaatgcagacagagcctgcagagttcagagtccagaaacacagaaacggcccttgatttttttttttgtttttctttttttaaaattattttaatggacacataattattgtacatatttatggggcacagagtgatatttctatatatgtatacaatatgtaagaatcaagtcagggtaattagcatattcatcacttcaaacatgtacatttctttccgttaggaagattcaaaatcctctctgctagctattcaaaaatatacaaacaattattggggtt

SEQ ID NO: 131426 - DNA, 1050 bp, Homo sapiens
tgcactgaactgaaatttggcctgtgtaggaatttgtcctgcttagggagagagctaataatggccaagtctcccaggagcattgaatgatttttttgttgttcatctaagggaatcataatcccctgaaacaggatattagaacaggttagagataatgggaagaatggactcaaaattaaaatacttaaaataaatgagcagcaaagcagcttctatctgcactgtgtaatctgctaatgggtatgagtactggggtgatttgggcaaaaggagacttggtacagagtgaaggcgggcaagaacacttgggaagattaattgaaggtataaatttagctttctctcccccaaggaattccccagtggctcgtacaaatccacatgtatttagagagaaggagaaacccctgccatgtcatcacggccagagagacccacagggagtacagaattaaatctaggtgcaaggcgtaaggattgcttgggaaatgtttactgagctcagtgtgtcatttgaagccttaacctgacccagatgaatctgatctctcttttctctgtcagtgtgttggccttttcctgagggcttgcactgatcctctaagtgtccttgttggttaagggcagtcactgttagcttaagggagcctctggattttgatcattaccgacttgatgtagaagtaggctctaaggatgtaacaagatgcctctgtctccacagccaggccctcatttgctgtaagccagttttctcttggaggtgcccagaccccttactggggaggagggattgggacttttcgtgatcacaggcatcaggtagggttttctgactgcaggtacccgaaaaggaccctcgctaagttaagcaaaagataatttgttggaaggatatagaatagctcacagattctaagggcctgctgagaaccctcacatggatgggggaccagggattcaggcagtaggcattgatctcatcacatcccttgctgggctaaaccagcttcgtctttgattctattcttgtatctctccctttta

SEQ ID NO: 131427 - DNA, 3574 bp, Homo sapiens
ctcagctgagagccttttagaaatgctgtgcaaggctcaaacatgcaggctgtggatttggcctttgaaagtgaatgtattttgtatcctttgatccagtttgagccatatttagatataccaagatgctatcagtcattctttggttgctgggcttgtgggtgtaatatttttgtttccatactgttctgcatggattacttttataagcagagaaaaaaacgttcagagtgtgaatttagctgaaatctgaatacatttaagaaacatgaaaaacgaatgccgtctgtggtcaggtcatggggctgagtacagaaaagacaaagttaaataagacgtccctcgctgccttcaacatgacaagtgccatgggaacagcaggagagggaggtgttctcggaggtcagataactatgtggaagtgactttgttctcttctctccgtttgtgtccccgtctttctgcaccaggtaccgctggctgcccagtaggagaggaggagtatcaggatttggtgtgccccctgctagcatgaggcgagctgctgatcagaatggcggaggcgggagacacaactggggccagggctttcgacttggagaccagtgaaggggcggcctcgggcagccgctcctctcaagccacatttcctcccagtgctgggtgcacttaacaactgcgttctggctaacactgttggacctgacccacactgaatgtagtctttcagtacgagacaaagtttcttaaatcccgaagaaaaatataagtgttccacaagtttcacgattctcattcaagtccttactgctgtgaagaacaaataccaactgtgcaaattgcaaaactgactacattttttggtgtcttctcttctcccctttccgtctgaataatgggttttagcgggtcctagtctgctggcattgagctggggctgggtcaccaaacccttcccaaaaggacccttatctctttcttgcacacatgcctctctcccacttttcccaacccccacatttgcaactagaagaggttgcccataaaattgctctgcccttgacaggttctgttatttattgacttttgccaaggcttggtcacaacaatcatattcacgtaattttccccctttggtggcagaactgtagcaatagggggagaagacaagcagcggatgaagcgttttctcagcttttggaattgcttcgacctgacatccgttgtaaccgtttgccacttcttcagatatttttataaaaaagtaccactgagtcagtgagggccacagattggtattaatgagatacgagggttgttgctgggtgtttgtttcctgagctaagtgatcaagactgtagtggagttgcagctaacatgggttaggtttaaaccatgggggatgcaacccctttgcgtttcatatgtaggcctactggctttgtgtagctggagtagttgggttgctttgtgttaggaggatccagatcatgttggctacagggagatgctctctttgagaggctcctgggcattgattccatttcaatctcattctggatatgtgttcattgagtaaaggaggagagaccctcatacgctatttaaatgtcacttttttgcctatcccccgttttttggtcatgtttcaattaattgtgaggaaggcgcagctcctctctgcacgtagatcattttttaaagctaatgtaagcacatctaagggaataacatgatttaaggttgaaatggctttagaatcatttgggtttgagggtgtgttattttgagtcatgaatgtacaagctctgtgaatcagaccagcttaaatacccacacctttttttcgtaggtgggcttttcctatcagagcttggctcataaccaaataaagttttttgaaggccatggcttttcacacagttattttattttatgacgttatctgaaagcagactgttaggagcagtattgagtggctgtcacactttgaggcaactaaaaaggcttcaaacgttttgatcagtttcttttcaggaaacattgtgctctaacagtatgactattctttcccccactcttaaacagtgtgatgtgtgttatcctaggaaatgagagttggcaaacaacttctcattttgaatagagtttgtgtgtacctctccatatttaatttatatgataaaataggtggggagagtctgaaccttaactgtcatgttttgttgttcatctgtggccacaataaagtttacttgtaaaattttagaggccattactccaattatgttgcacgtacactcattgtacaggcgtggagactcattgtatgtataagaatattctgacagtgagtgacccggagtctctggtgtaccctcttaccagtcagctgcctgcgagcagtcattttttcctaaaggtttacaagtatttagaactcttcagttcagggcaaaatgttcatgaagttattcctcttaaacatggttaggaagctgatgacgttattgattttgtctggattatgtttctggaataattttaccaaaacaagctatttgagttttgacttgacaaggcaaaacatgacagtggattctctttacaaatggaaaaaaaaaatccttattttgtataaaggacttccctttttgtaaactaatcctttttattggtaaaaattgtaaattaaaatgtgcaacttgaaggttgtctgtgttaagtttccatgtccctgctctgctgtctcttagatatcacataatttgtgtaaccaattatctcttgaagagcatttaggaagtacccagtattttttgctggattaattcctggatgcagaattcctgggttttcattttaatgaaggaggatgcttgctaactttgagtgaggagtcatatctgattgtagcatgctttatggcatttttatagcttctacccatggatctgagccctggaactttataaaattagtttaatcctgtttcctcataaggcacacacagactagatagcaggtgccatgacattcctgagcccttttttttttttttcctcgagggtgaacatcccagtctgtatcttgggccttcgacaggccaacttcactcatcacaaggtgaggtgacaggaagcaggttgtatgtatgtccctcttctattactggggaaatactgaagcaatagaaaaagatcccgcttatttagaaggacacattgccagtatcattgtgttctaagctaccttttgaatgacatggatctaataataggcaatgttgcagttgccaacatcttcgtttattgccaactctgtttctgaggtccctgcccctcttacactttcagcagtaacttaacactctgaataactaacctttgaaagaagttactcctttctggactttatactgtttttttcttagaaggctgggctgagcaaatgggtttactggcagttcacttgtttgccttccagagtgactggtgatcagaattggccaggaataccatgtcctgtgtttacttctttcttaaccctccctcccaccttccctccctgtccc

SEQ ID NO: 131428 - DNA, 2083 bp, Homo sapiens
aatgttcagatacccaatggacttgggaggaagaaattttctatccacacctcagtttttgtaagtgtttttgtcctgtctcatctaacattttactgcctgtgttcttagtgcatcctaatgagagctccatgaggagtatgatttacccctatgccccatctgctggagaaacctgaggcaacaagtgacttaccctagtcacacagtcacaggaagttagggattaaagcttaggctcagttgccttcctgttactcttttagccagggaccactgacaactagattccaacattacaggaggcatctcagctctctgagcctgctgagggacctgatgcaactccagagtgcgaaacagtaggctggtgaatgggcagagtcacaggttagtggggtgtcttttcttggcccatcagtttttacccatgattttgcccaaggaagggtaagttagcgtgttggtcagcaattttaaacatttttatattaaatactatggagtagacattttacaggactgttcagagttaaaatgagagacttgaggtttgtataggcccaaccccctgggagtttgtgctctttatctgcttttagggtttactgaagtgggctggtaagggcaacagctttgatttttgagacaaacttggatttgaatcccagtcccctcagatagcagtttttatactgggaaagttacttaatcaaacctccaagcttcagtttgcaagcctgtaaattgtgggagaagcccctgtctcacaggactgcatgaggtaagatacactgttgggaagcacagtagcgggttctcggtaagtaaagctagctgccatattcctaaaggtgggggtaggagagcaggattttgacgatctgagaggagacgcgcacacacccagaagcatgtaatagtcgtgtgaccgttctgtcagtgaggcaaaaggctgtcgaagaacgggccagttaaatcaccatctgggtgtcacagcctgcctgacaatcatgcctaatctcatatcagggatatgcagtaatagcttgcatttgaaagctttaaaaaaacaaacaaaccaaacccttccacatcttgctaattttaatgttttgcagttctgtcattcctctaagggatcagtgagggcagtaaaacttgagcaggcctcctctttctccccttccttttatagggtaggggtatgtttttcaaagacttttcaaattgtgaactgtaatatacagagatataccatattggtggttgtggtgtgtgtgtttttctttaagagaataaaaagaaacttgtttctcttctgagccttgaattgccttcaggctaaaaaaacaaatgaccaatctggtttctaattatcaaaggacataataacagcaggtttggctttctgatctaggtttatcaagtaggatggcagatgcatcaattaaaaaaagcttggtgcttttggggggcagccaacagttactttactttaaatggccatattctaacttaacggcttgtagctacttctcagttgtgggcaacacaggatacaagattctagtggcaaaatcagcgagccctggagcctgccttccacttgaactttctctgttgggggaagtccttctgctaaattttgcataaagatcagatgacaaaatacagctccttgcaaaagcagtaactgctttgaaattaccataaatttttgttgattatgtataattgggtatctttttatactaattatttgcatttaatttcactatctacttaagcagtggagatggcttccatattgtcttagagtgagtagcaaagcaagacagccctagcattttctccagcaagtgttctattttattatgtactttggaggaatattattgtaccagaaggcatggatgttgagaaaccagcacttggaaaatacattttgatttaatggtaaagctgtatttgtttaaaatggaggaggtgagtataggaaggtataactgcttttctaaatggaatgctgatacatttgtatcaccattttccattccatttagagtagttatatcttctc

SEQ ID NO: 131429 - DNA, 1197 bp, Homo sapiens
cttggatttggtaaggggctcaaatgttgagttcatctggagagctttcttatttgggagagtattagtttaagatatcaatgcataatgagataaaaattcagaggaattttgcaagatatgtaaaagaagaacctaaaaagatggggtatgtttattttatttgtagcaatttgttggctggaatcttagtgtgattctctcatgggccttgcttttagtagcatctgtaggacactcatctgctttttgaagctgtctgtttatagcagttcagcagggcctgtattgcatcagacctgtgggcaaagtactgtgtccttccagttacaaatacacaattaagtctagttttagataggaaggtttaagtatagtgggaataatgctagattgatcctagaaattttgcagtgaccttccagaggatttatataaagcccttgtcagtgtatccttacccactttagtccccgtagtagctgtgtcctcgtcaggtgtggctactcacatttgcatatattcattccatcctaggcctgctatttaccctgggttatccttggattcaactatatcatcggaggctcgtaagtgatattagatttatttaattggaaactaatccttggaaaatttccattagtttttatctttctctaacctttatacaactttaaagaatctcaacattgacgcattagaaccctatatttatggaataatttcacttcgattgaattgattagattgcagggctttaagcatatttaaccttgaatggttgtgattttgttaacttattgttacacacagtatgttcctatgtgtatagtacaggaataaatatgtatttctggattcactattctgattgggcaaacagagacctaatttttgtctgagttggctcctctaagagctatgtataaaattactatgtcttatattcttaaggcatttccagaatgccttggaaactgcctatcggtcatagaaatccagattcttagataggatataattttgcaagtggtttgatgatacagaacttttttttttttttttttgagacgaagtttcacttttgttgcccaggctggagtgcaatggtgcgatcttggctcattgtaacctctgcctcatgggttcaagcaattctcctacctcagcctcccgagtagctgggattacagg

SEQ ID NO: 131430 - DNA, 3261 bp, Homo sapiens
cctctgacagaacttaacggtctagtggaggaggacagggatcaagcatgtaatccagaatgcggccatcaggtcatggcgagagccaagaaggaaaggctgacaggctgggagggagcttggggggcctcactggtctttgggatacagggctcagaagctgtggaattgactgtactttctctgggtctgttttagcctgtggtagtcagagcatgtcacttactggaattcagttaggagagcatagattaaccttactcaggtaactttgattcagggctttattggggacgttgtttagatatttttaaaaattcacttttttagagaggagtggtttttaaaatgttctcattttggctttttctgtaactttttgaagtgtttctctatgtagatgttactttgttgtgaaattctgaaccatgacatttggcttgtttttgtttccaggagcttttgatgggaggccagcagactatttattcatgctcctctttaactggatttgcatcgtggtatccttcagtctgtgattttgggccagaaataaaccagtttttttccaggtttggggaaatagaccatattctgtaaacgtttcaaattacaatatttgcatcttggttgactaccgttaataagaataattatagttttttaaaaaaaactgtagtaaatcatatagcccttgagtgatgcattctcttaccatttgtgggatttttttccacctttggttgagtagttttatgactgttccctcttcttgttcccagttctctgtgttctcatgtgtgacagcttgttgactgaggcacaaagagagtccgtgccatgagacagcttttgaaatctgtggtccttatcagaaaattaatttacaaccagcatccttttctgacttcattgctgtccttctcttggggtcctacatagtaattcagtccctctgtgaagtacccagctctgggaagggacacagtacgtttctctgctttgtatcaatagcagttgtcagcagccctccaactgcaggactcttacagatggtgagagcagcagcagctctcgatgtctcaggtcctgtgcaaaattggtgagctcaaaattgcctttgggctcagctgccatttaaacttggctgagggccagaaaatgtggcactgtggatgccctttcccccctcctttgagggaaggaaaaaatattttggactttaaccatgctatagagtcctgagaatgtaagtagaatgattatttccttcaaaggctacaggcatcttcatcctttatttgaaggagagatgttaaaatgcaatagcagagaaaaaggatgccagatgaccagactaagtcatatgcggaagctgttgatttctactatgtccttgtcatggtatcgtctaatggaatatgcataatgaagattagatacctttgtgttgtagaatgttttaagcaatctgaactatagaaaagtattttccttcagaacactggaattaacttaaaaatttttttaattaaaaaaatatgtatataaattagagatggggtcttgctatgttgcccaggctggtctggagctcctggcctcaagcagtcctcccatcttggccttccaaagtacagagattacaagcatgagccaaattacacctggccaagtgaacttttaaatgggaggaaaataaccacatcagtcttgactaggtacagaatgcttttttatgtctgatctttaactttacaaaccaagattactggcttagcaatggatatgcaggtaagtgtccatttaaactatctatttgcccttttatttgtttcaaatatactattagtggcctttgtcagaagttgaaattgcattaactatggggttaattatgtggtattttgaaattatggaattacagctgttttatttatttatttatttatgagatggagtcttgctgtgttgctcaggctggagtgcagtggcttgatcttggctcactgcaacctccgcctcccgggttcaagtgattttcctgcctcagcttcccgtgtagctgggattatagatgcacgccaccacacccggctaatttttgtatttttagtagagatggggtttcaccatgtcaccaggctggtcttgaactcctgacctcatgatccgcctgcctcggcctcccaaagtgctgggattacaggcatgagccaccgtgcctggcctatagctgttttattttgaggatcttaagtcagctaaatctttgaagatcttacatgagctatctaaatcattgctttccttgctcatttctggcctctttttggtgtttgaacattgacaataatggttgtctagtattttctaggcatgtgacaacagtggttgtctagtattttctaggcatgtatatggatgttttttaaaaattgagattatatggtaatgctttgttgcttactttttgtaaataacagagcttgactcttacatttctgaatccatctaaaataatatagttttgttgtattttattataggattttgtaatatttattgtatgataaataataggatcaatttataattctgatcagttgagtttccctttacccaggtgaggattgttgtgaagaggaggggtaaaaagcatagtagatgtacaccttttttaagtgcctctggagcctggtttttacatgtcgacttcttttgcagttgctgatgattcctctgatcatgtcagtactttatgtctgggcccagctgaacagagacatgattgtatcattttggtttggaacacgatttaaggtactttgccttggttggaaaagtgtccttttcatttgtctgcagaaatccctcttcagtccagagatgtactttctgactcatccagaaggggtcactgcagagcagtgtaccataggcaagcccctttctgccctcctcaatcccagctctatttaattagccagcctggagtccgttgctggcctttgtttcttcactccctctgtacctcgggcccctcaaggttatgtccctgagtgatcttatgtgtctgtgttagagagaaggagagataactcatgtgaaaccctgctttaaaaatctgttcttatccctccctcgttccctgttatttgctttatactgtagctgaaacagattgtttttgcccccaaacacttctctttgtacattctttcacaattttccacctgtaacatcttgattctcttcttt

SEQ ID NO: 131431 - DNA, 1188 bp, Homo sapiens
ggggttcaagtgatcttcccaccttagcctccctagtagctacaaggatgggtgttaaaccgccacacctggctgacttttgtattttttgtagagatggggtttcaccatgttgcccagcctggtcttgaactcctgggctcaagagatttgcccaccttgacctcccaaagtgctgggattacaggcgtgagccactgtgcccagctggagtaattattttatattgatagtaaacgttatatcaatagtaaaatagattaagtgtggatcatttatgatcagttatttaaaattttattctggaaaattttcaaacatatgcaaaagtggagggaaaagtcaatgaaccttttttctttttactgagaccaaattcacataacataaaattcatcattttaaccattttaaggtgtacaattcagtggtctttagtatattcacaatgttatgcagccatcaccacaatctaattccagaacagtttcatcattccctaaaaaagccaaagcagtcactctttacctcccactttccctcctcccagcctttggcaaccactaatctactttccgtgtatatggatttacctattcaggacatttcatatgtcctttggtgactggcttctttcactttgcacaatgtttttaaggttcattcctgtcatagtgtgtgtcagtacgaacccctccttaaccatctaatggttatcacctctaatagttatctcatagccaatcttgttttatttatatctattgctgtcctccacccctgattatttgaagcaaaatgccaggcatttcatttgtaaatatttcagaatttaactctgaactataaggacttaaaacataattctaatgctattattaaacctaaattgcaataattccatggccacttttttttttttttttttttgagatacagtttcactctgtcacccagtcgggggagtgcagtagcgtgatctcagctcactgcaacctctgcctcctgggttcaagtgattcttgtgcctcaggctcccgagtagctgggattacaggtgcatgccaccacatctggctaatttttgtgtttttggtagagatggcatttcgccatgttggccaggctggtctcaaactcctgaccttaggtaatccacctgcctcagcctcccaaagtgctgggatt

SEQ ID NO: 131432 - DNA, 1001 bp, Homo sapiens
atttttggacaaggtttgtcattccagaatattctttccctaaatagaggcattactgtactgttggaaattaagcctttgtaattcattttttgatgtaggcttaattgtatgcctgatctcagcaaagactaaccatatactcatatagtattgattttgtttcaacttgtttagaaatatttgttgcttattttatgatgtcgttttattccattgatttgcaaagtgatgtgattgtatttggtgtgaacacttttcttcagttgttttcttgagttgtgttggtaggatcactttcacacctctcattgaggaggatgctttgttaattttgtttagttagaagggaaagaaataaccaggcttacagaaactaacagctgtgtttattttgatctggacagatttggaggccaatcactgccaccttttatttccctgtgggtccaggaactggatttctttatttggtcaatttatatttcttatatcagtattctacgcgacttgaaacaggtatgttacccatagttgttttaagcattgtttctttctcatttactaatccatgtgtttactttggaggaatttggagggcagttagcattacaaaaagaaactgcataaagatagtaaatgcttagtgactgtgccaggactgcaccaggcacttagcttactcaatttttaatcctcacaacatcctgaggtataagtagcagtgttaccattttatagatgcaaaaagtagcagatcagaggttgacatggcttgtccatctccttagtggctgagctgtgtgcctttcatttattttgagggtctcactcatttcttttgcagcagtccttgtccttcagtgcagaattgggctggagtatatatgtctcctagattggggttgaaaaacatcaatttatgtaattaaaagcctagatttattctctaattgaaaaactcaactctaaaatacagtatatagccaagatttaataat

SEQ ID NO: 131433 - DNA, 1227 bp, Homo sapiens
cacttcgtttgccttcgtcccctttaaataccctccaggtggacccagccgcattaaaactctgagaactaggtgaatggcatttggcctcgccactggccggagcgtttgccgttgatccaggcaaccactgttttcccaccagtcgtgtagtcgctctacctggctccgccccccaggacgccgagcctcggccgggcggtaaaatcggcgcttaccctttaagcggcgggacttctggtcacgtcgtccgcggtcgccggaaggggaagtttcgcctcagaaggctgcctcgctggtccgaattcggtggcgccacgtccgcccgtctccgccttctgcatcgcggcttcggcggcttccacctagacacctaacagtcgcggagccggccgcgtcgtgagggggtcggcacggggagtcgggcggtcttgtgcatcttggctacctgtgggtcgaagatgtcggacatcggagactggttcaggagcatcccggcgatcacgcgctattggttcgccgccaccgtcgccgtgcccttggtcggcaaactcggcctcatcagcccggcctacctcttcctctggcccgaagccttcctttatcgctttcaggtacttaccggagacggggggcgtggagactacaggccccaggaggcccagcggcggctaagcgtaggctggcatgttgcgggcgcgcggtgcctgctgggatttgtagtgggtccggcgccggcggtttagggcggggtcctttgggcccggggaggctctgggatctggagcggggtgctggatagctggagttgtgggctggcctggtggggaggggttgacttcactggtatagtgagattgtgcttcccgctcttcgcactcagtgaaggaagcagtgagattagtcgttggtagttgtcaatctgttggacgctggcgattaggtccgcctggagcattgccctctgacctccctctgtcacccacgtgggtggcctgtaggtgtcaacttcaccaacttatagctgagttcctttcacgtttatggagtttttttgttttggttttcctataggagtgatttaaagtcagagatacaaagaacgagtgtattgttctgcatttccctctagacctaatttagtgtcccccacgtagtaatagaatgtacgaaggaatgggcaaagagtacatttgtccagaaatggaaggccttgttattttctta

SEQ ID NO: 131434 - DNA, 2262 bp, Homo sapiens
ttttcatttaagtttaatcattacatatgtgtctccagaataagattgaaaaataagctcccttactgttttatatggcagtatgattaatgtgggttttaaagaatgatttcttaaagcatttgttcattcagcaggcatattttgagtgtcttttgtgtgttgtaggccaggtgctggggtacagtaatgagcaagcagtggtcctgtccttacagaactcgcctgccagggtattcatggtagatacattagaaatggaagtaaaactcatgcacgcgtaattcactgtgaaacattccatacacaaaaacaaaatctcataccctgttgttatcacttaatcacagtttataaatctgtttatatgtgtgtttatttttttaatatctgtccttactactaaattgtaagtgccatgaaagcagggaccatatcaattattcttagcacctggcttgttctgtgtctgacacagtgagttttcaagtatttgatgaatgaataaacagtagctattttgataatgagtagcttctgacctgtttttctgaaatcctggtaagattgattctagaggagcgggggtatagcggtagcagtaggagagggaagaatgaacagacgaaatgctttacttgccatatttttcataatatcaagtaatacgtgacatagattcaatgtttgggtttttttctttgacagaattatagtgaacattattcacaacacttccgattaccatccaaaagttttgcgatttttgaatgtggcttttgatggcacaggcgactgcttaattgctggggaccaccaaggaaatatttatgtttttgacttacatggaaacaggtaagcagataccattgatatctacgttctttaacaagttattaattcactgactgttttcgtacctgctattcattattcattcagaaagatttattaagttctattatatttcaggtaccttgcaaaatactgtcataagtgctaaaggacgaaagtgggaaaaaacagaatgataacatggttcacattttaaagaattaaagtgctggttttaatagtatctctagtagtttccttttttttttcttaaatttaaaaatttattattgctaatttttttttttttcttcagacggagccttgttctgtcgcccaggctggagtgcagtgggatgatctcagcttactgcaaactccgcctcccaggttccagctaccgcacccagcccatagttgctagtttgtcaatttctggtacatcatgaggcaatgtagaaataacacagttttctttgcacattgttgttgtggggtgccagatctaagaattttaaagaattgattttcagctgggtgtggtgactcaggcctgtgatccagaaatttgggaggccaaggcgggcggatcgcttgaggtcaggagttcgagaccagcttggccaacgtggtgaaacactgtctctactaaaatacaaaaattagctgggtgtggaggtgcacgcctgtaatcctggctatttgggaggctgagacaagagaatcacttgaacccaggaggtggaggtttcagtgagccgagatcgtgccactgccactgcactctagcctgggcgacaaagcaagactccatctcaaaaaaaaaaagttggttttcactcttcttcctcttctcttcccttgtgaaacaatttagtccgaaagcaattaggtgggattgatggagataggtattcatgcagcggggctaagagggaaggacagctgcagcagcctagcagagaggcagagggtgtctgcatagcgaatggggcagtgatgggaagctagtttaatacagggggctttgatcaactaaatatattagggataatgagggccaagtttctcactcttagaaaagagacttacatatatggagggcagaaaactagaataaaccccatggtattgtattggaattagatatatcagtttgaacccctggttttgaatatatagagatagatatagcactaaatagaggtatgtacacatatatgtacacattccctagcttcgtacacccagagggcctgggagcaacagcatgccagcagcaatgaatatacccggtgttgagttcttgttttcaaaataccactttctactaaaaagaatcaaggatatttgcaaaaatggccaatttcagaatgcagacagggaaagtacaggatgagcctgtaacattttgtagccagaaagaag

SEQ ID NO: 131435 - DNA, 1599 bp, Homo sapiens
aatttttaattgattaaatattgaaatactaatgttttagacacatattgagttcataaagtatattagtctgttctcatgctaataaagacatacccgagactgggtaatttataaagaaaaagaggtttaatggactctctgttccatgtagctggggaggcctcacaatcatggcagaacgcaaaggtacttcttacgtagtggtggcaagagagaaatgaagaccaagggaaaggggtttccccgtataaaaccatcagatctcatgagatttattcactaccatgagaacagtgtgggggaaactgcccccgtgattcaattatctcccactgggcccctcccacaacatgtgggaattatgggagccacaattcaagatgagatttgggtggggacagagccaaagcgtatcatatattatcaagattaattttacctgtttcttcttacttttctaatatggctcctagaaaaatttaaattacgtatgtagcccacgttgtatttctttcagacagcatgactctagatgagtttcacaagggccttaaacaacatgtttaaaagcaggtttattatttcctacccccaaacttattcctcttttgcctaagttcaaaagcttaattttttgtaaattaaactccagctaggtgcccagtactctactgagcactcaacatgtattctttcatttagtcatcacaacagccctgtatctattcttatcttcattttacgcaagatcgggtcctgattccctcttcttcactccatgttgaatccataccgaacctctgcttggcttctgaaacctctcctatttatgctcccatatctctggctgagattttctgtagtaactttcttagtgatctcctttattccttgtccctctatccatttgccattgctgccaggatcgtcttcctaaaacacatacctgattgtgattctgctgtgctaacacttacagtggtttcctattctgataacatccaaactccttaatatggcacatagcacccttcataatctatttttggcctaaaatggtagctcatttttctgggtttcattttcttcgtctctacggactccttccacatggaatttgtaattattggaagaatttgtgatactaatgcaatgatctcttaataggttcaatcttgttcagcgaacagcacaagcttgcacagctctggcctttaatcttcgtaggaaatctgaattccttgtggcattagctgattattctattaaatgttttgatacaggtaagaagttctcctatttttcttttgaagcagagtaaaatataaactgaagaactgcaagaactttatcactctgtacagcttgagggggcagtccccatgacagccctcccttcagacactaggtgcaagctgagggtcctagaaacagcctcactttagatcagttgactacaaagtcagggtttcctgactactgtcaggtttgataatttactagaacaactcacagaactcaggaaagcactacacttaatgacagttttaatataacaaaaggatacaaagtataactagccaaaggaagagaaac

SEQ ID NO: 131436 - DNA, 1066 bp, Homo sapiens
aatattaggtgaaattttttaaactgtcatttagaattttgtgacttgcctagtcattatagtgtacctagttttcgtttgaagggttttttttttagttaataataatttatgaaataatcagtattactccttgtcatatattagaaatgtattttccccagcttaagaaaataatattttaataaagaaaaatagactacttgtataattttaaatttaaagtctctatgtgaaccttatgtgaaaactaactttctctattcctccttaggttttctttctaccattaagtaataccatcctcagctgttttaaagataattccatttttgcctgggaatgtgacacacttttttgcaaatatcaattgccagctccacctgaaagctctagtatattatacaaagtgtttgctgtaaccaggtaatgtgcattttaagacactaggaatatttaagaaatttaatttctggtaaaaaattacaaattttcatttagtttttattcagtatctttttgtcatattagaaaaagttaccttcaaatttagatatgatctgctaactttttttattttgcaaaatatcaaatatacacaaaaatagaaaaatacatgaacccctaagaatttcttctttttttttgtttgtgtgtgtgtgttgttttatttataccagcctttcctccatcagaaccactaaatatttccataagctacaataatcatcaacgaatggccatttcttttcttttcttttttttttaaatggagtctcactctgtcacccagactggagtgtagtggcatgatctcagctcactgcaacctctgtctcccgggttcacgcgattcttctgcctcagcctcccgagtagctgggattataggcacgtgccaccatactggctaatttttgtatttttagtagagacagggtttcaccatgttggtcaggctggtctcgaactcctgaccttgtgatccgcccgcctcggcctcccagagtgctgggattacaggcatgagccaccgtgcccggccatttctatttttatcaataac

SEQ ID NO: 131437 - DNA, 1046 bp, Homo sapiens
aattcctctcttttctcacgctgttcttctaagtcatcagtaaataccatcaactcaaccaaaccatatagcaaattggtcaatttgtttttattcattgctgtggttattaccctaatccaagctaccctagcctcttttagactactataatagccttcttatttgttctccctgttttcaatctcatttcctatagtcattctctacacagcagataaagtggtttttataaatcagtaagtcagatcatgtcactttcctatttaacctccttcatcacttagagtaaaattcaaccccccacccctcatttcccctgaggccttctgtcacctggcctacgcctccctcgcttcatctcatttccttccttagtctgctctagccacatccgagtatagcagtgtactttcatatggcaatgcacttgagtatgacctcttacttacttttccttatatactaaccttattgctttttcagcacttttgtaccagccagtctggaatactgatcaggatagaattcttcctccaagtcatcccatgactggcctatttgtgtcattcaggtagcagatcttcctcctttcccagctttcatcaccttattttatagttctatatagaacttatcacctgctgagatcaagttcatttatttgtttgtttgccttcctctagaccagaagtcctgtaagagcaggattacttggcttgtgcagccttaactgactgtgtccatggcttctgggaccatacctggcttatagcagacacttgaaacataaccatagtattaccacactttttaaaaattagtaagtcctttacaagttcttgttgaatgagtgagcaacggccttgcaagtcaaaacaacttactctttttgtatcttattaaggtagctttctttgagcaggaaaaaagtttgggctgttttgtttttttcatatagccatgtaccaccaattctatatagctgtacgtgaaatatagaaagttggatagtgataagtgactttgagattatgctataaaat

SEQ ID NO: 131438 - DNA, 1010 bp, Homo sapiens
acatcaggagttcgagagcagcctggccaacatggtgaaaccccatccctattgaaaatacaaaaattagccgggcctggtgacacatgcctgtaatcccagctactcagcagggtgaggctggagaattgcttgaacccagggggcggaggttgcagtgagtggagatcgtgccactgcactccagcctgggcaacaagagtaaaattccatctcaaaacaataataataataataataataaaataaaatatataatatctcactgagaatagaatttcctctaggtgtccctctcaaaatatatatatttatacacacatacacacatatacacacacacatacatacacaaacgttgcatacacgtaaagacgtgtatatagtaggactttcagacattgactatcacatgtttttaggaatttatattttttctctcttaggttcttggagtactaagtcaagatggtattatgagatttatcaatatgcagacttgtaaacttctctttgagattgggagcctcgatgaaggaattagctcatcagcaattagcccacatggacggtacattgcatctattatggaaaatggaagtctaaacatatattcagttcaggctttaacacaagaaataaataaggtatgtatgatgaagtaatcaacatcagctttttataaacacttatatattatatcatcaagaataaaatctttatgctactatttctaacttacctggaacttatccatttttctggatatattttgttgctcttactcccaaagccacatctctggccttgatttctcacgtatgctccattcttaaattgctgccttcctgagggacatctccgtttgatgtctctcatttaggtgttactcattatctcgttcccaaaagagttctttctgcaattctctctcatgttttcttcccatctcataggctagaaaccttgaagttctatgacttcctatgcctttattttctaaatccagt

SEQ ID NO: 131439 - DNA, 1016 bp, Homo sapiens
cagctctcatagtgtaaacaagtatcctttttgtgatctacttaataccatttatttttttgcattttgaagctttttgttaagattctactgcttaaagtggtccccaagcgtagcgctgaagcgctatttattgtttctaaatacaggaaggctgtggcttaccttacagagaaaatacatgtgttaaataaactcattcaggaatgagttatagtgctaagctgtgagttcaatgataaggaatcagcaatgtgtattaaataagatgtctttaaacagaaacacacatatatgtattgattgattaatgaggctctcaggaacctgactctgtgtttcccctaggagcagtgtttcagtattcactaatcgagtgttcatggtgactttatagaaccactgcaaatagtgagaattaactatacatatatgtttctgtgtgtacgcacatgtgtgtgtatgcatacttgtctctaaacatatgggattatactctgctgctgttttgctctttatgtcattatgtatactatataagtatatttttacattataatatgtgctatatattaataaatttttttaaatgtattaatatctgctcttactgagagagttttcagcctgctgaatagtcagttttacagtactagctaaaccttcttttctttttttttttgagatggagtctcactctgtcttccaggctggagtgcagtggtgtgatcttggctcactgcagcctccgcctcccgagttcaaacaattctcctgcctcagcctccctagcagctgggattacaggcgcgtgccaccacgcccagctaatttttgtacttttagtagagatggtgtttcaccatgttggccaggctgctcttgaactcctgaccttggtgatccacccgccttggcctcccaaagtgctgggattacaggcatgagccaccgtgtccagccttgcaaaccttcttaatagaggcaggcagagagctgagaaaaactatggtaag

SEQ ID NO: 131440 - DNA, 1086 bp, Homo sapiens
tatgatcaagtcacagcagtgatagagctaagattaagcccaggttccagagccgaagactttttttaaaaataatttttattatgaaaaatttcaagcataaataaaaaataatgtaacaaatatccccatgcccatcacccagcttcaacaattgccaactcatagccaatcacgttgggtgaatattcccactcactctacaccccacatcccaacatacacacactccccttgctaaatatatacatatgtatccctaaaggataaggactctttttctttaacataagtacactatcatactgacacacaaaaaagaattaataattcttcagtatgttcaaatattcaatcagcattcctctgattgtcttaaaaattttcttatgtaaacttgttcaaatcagggttcaaacaacatgtacacattacatttggttgataccccactgagattaatctatagactctgatacctctttttttcttacaatttatttgttggagaaaccagatcgtttaacccatacagccctctatgttctgggttttgctgattttatttcatagtattgtttaacatgtttctctatctcctgaatttactataaactggcagttagagctaggggcttgatctgagtcaaggttttttttttcccccctttggtatttgtttctttcacttgcaagaaaacttcctaggtggttttatgtacttgttaggcggattataattaatacctggctgtctctcttttcgtgatgttgtccattgatgattattgcctacatccattatttcaccagagattagcaaaacagtgataatataattctgttccttctcattttataaaccgggaaatttctccaaagaaaaagttcttaggatcaactacttggttaccggaagatacaacccatgtaggaaaaggcaagttaaatgcttggtatctttttttttaaacagttttcagaatagtaaacttattaccttggagctccccagagcaatcagtgtattgattatgaactcagattgaacatatagaccttttcagtacatagaaccaggagttc

SEQ ID NO: 131441 - DNA, 1005 bp, Homo sapiens
agagtgaagtctctcatcagatgccgaaggaattaaaagaggagagtacattacttcaaaaatgatgattttgtgcattcttctgaaataataaatttcctgagttcagaggacaaggtagaaaacattttctccttctgttgaccccctcactgtagggaatgaagaactgattttatcaataagtaaaagttactcaagtaactgtttaaggtatctaaaatttcttataatttttccgtatcctaggattttagactttctaaattatgaatgcttttcttgggtacttgttgatgcttcttccttatccccagtagtacaacttaaaaacagaatattttaggattttttcactctttcattaagttctgttcacattcacattaagagcaaataatactgctctgctttttgggaaagagtgaggtaacacttttaatatcatagtgtaagctataaatttgattaaaaattcaaattatcagagaaataattttgatgttttctacctaaatacagtgtatacatggggaccttcttgagatgtattttccaaaagatcttcctaaagtgacaagaggttgctcatatcatttgaagtttctcataaaatgtaataagctgttacgctttatatacttatatgcctactagtacatttacaattaaagttaccattgtaactaattctgtgtaggtgtactttaaattataatcctagtttagttaaagcttcaaagcaattttttttgttggttctgaaatttctgtttttctaaatttttaaatttaaattttacatttctgtttctactaaaattcaaaattgtaacttaaaagggagggattattctacattaaaagagatagagatttaagggcgataaccaaattcaatgagtgagccttttttttctgctacaaaaatggatcaatgaatgagtcttgtttagacaattggggaaatttgagtcttgcctgattatgaaacaatactacaaa

SEQ ID NO: 131442 - DNA, 1485 bp, Homo sapiens
atttgaggagattggcatgctaatgttgattacatttaatgaagggttaaataggggccctttttaaaaagatcatttcgttaatcaggtgatgaacaaagcaggagtcaggagccagaatgccatcaggagtactttgggaagttgtgattgtttgttttaattaacactttttcattgactactgtaaggaaatttgcaaaatttctgtaaacatactatgttaacatgataggattttaaaatcgattgtcatacaatataaagagtttttttttattattcatggacatattgagaacataaagattggatacatttaagaattgcaaagagttttgataacatggaaagatatttaaagatatgttttcttttttttccttcatagtcaattggtgtcaacactggtttgaatattttcctaatcctcctatcaatattcttagcatgatagaaaatgttttggcatttcatgacaaggaactgctgcaacacttcatagatcatgatataacctcccaggtaagaagcataaggtttttagaataacatgccttattttgtaagctaacattggttctggtataaacagtcttttcttgaaggagtataataaaaagcatactacatgttgtatttttaacagtattccattctttttcttcattaaactgccttcctgaaagtctgtaaagaagggtccaaattaaggtagttattttcataattatgtatttaatatgattttcatagcttaaatcgaatgtaagggaatattaccaatgactccctttttacttttccctagaaaaataataaatttttccttatctgttttagctatatgcatggcctcttcttgaaactgtgttctcagaagtgctgacaagagaggagtggctgaaattgttcgataatatcttttccaaccatccttccttccttctgatgactgttgtagcctacaacatatgttctagaacgcctctgctcagctgtaatcttaaagatgactttgaggtaacggtccttgttcttaagagaaggttctcaaatatcagttatttctctctattttttttttaattttttgagacagagtctcgctatgttgcccaggctggagtgcaatggcgcgatctcagctcactgcaacctccgcctcccaagttcaagcgattctcctgcctcagcctcctgagtagctgggattacaggtgcgcaccatcatgcccagctaatttttgtatttttagtagagatggggtttcaccatgctgtcagggtggtctcaaactcctgacctcgtgatccacccacctcggcctcccaaagtgctgggattataggcgtgagccacagtgccaggccatatcagttatttcaattgaaaaatccatttatttattgagtccctgttatatgtcagacactggtgctaggtagtaggaatataaaggataacaagttagaccacatccc

SEQ ID NO: 131443 - DNA, 1011 bp, Homo sapiens
attttcaaaggctaatttataatttattttggattttgaagaaaaaaaaaatccaagcagagtttgttccattgttgaagcattctttttctattgtaagaaaagccttcattttttaattttatgtcagaatttcttatgattgtgaaactcttacattttttaaataaattgtctttgttgtaaaacttgagtaaagaaaagctttaatgaatttgcaaaaaaatatatattcttaaagatagatacactttttttaaattcttgttttaattctacctcataattgctttgtcaggtaaatctcgatttaaacaccaagttttcttacagtttttttttcaccatcggaataacctggatataaatgttgtgattagacaagtttatcatctcatggagaccacgcctactgacattcatccagacagcatgcttaatgtttttgttgcactgacaaaagggcagtatccagtatttaatcaatatccaaagtttattgtggactatcaaacacaggaacgagaaagaataaggaatgatgaattggattacttaagagagaggtaattatggaatagtttttctttttctgatacaatgaaatatgttataaacataagaaagttttaatgaaaaatacatttggctgagcgcggtggctcacgcctatagtcccagcactttgggaggccaaggcaggtagatcacaaggtcaggagttcgagaccagcctggccaacatggtgaaaccccgtctctactaaagatacaaaaaattagccaggcatggtggcacgcccctgtagtcccagctactcaggaagctgaggcaggagaatcacttgaacccaggaggaggaggttgcagtgagcggagatcatgccattgcactccagcctgggcgacagagtgagacttcatctcaaaaaaaaaaaaatgcatttaaattatgagtatttgtgtaaaatcagagtttgaaggctagaaatattaaagatagttaattc

SEQ ID NO: 131444 - DNA, 1048 bp, Homo sapiens
catagtgagaccctgtctcttaaaaaataaaaagaaaaaacttaaaaataaatacataaaagtatgttaataaggtaaaatgtgtaaattaagtaaagtaatgggataaacattgagactaagcccaatagttgggaaactcacttctgtgtttattgattcctattcttagatggaactttatgtaacagatttatagtgtgggttaaaaggaattactgaactgagccagtgagctttctactaaaattcttaaagcataagtatacatcatctttggtaacggtggagcagttctcgcattcttctttcaaataaaggatatcaattgtattgaaatgatcagcatggcagacctgttatgaaaaaactaaatcatattaggaattgctgtatttgttccacttgatgtattttgtatttaaggctagctgctgtgaaaagagagctgaaagtaaaggaaatgcacttacaagatgctgcaagaaggcgttttctgaagcttcagcaagatcaacaggaaatggaactaagaagactggatgatgaaattgggagaaaggtttattattcttaacttagttctcatacatcatctccatttactctcacttaaatgtaatgaacaccttcaaattaaataatattcttagagtccaccatgaatactaaatagccgctttaattttatttacttttcccctcagctttctcattctcttttgtatttcatgaatggctaaatatttaagaaatgccaggaaaattagtcaagtgtccttggtgactatttctctaaaactagaaatatcagtatcagttagccattaagttattttttcttttcttttcttttttttttttttttgagacagagtcttgctctgttgcccaggctggagtgcagtggcgtgacctcagctcagtgcaacctccgcctcccgggttcaagtgattctcctgcctcagcctcccaagtagctgggattacaggtgcacgccaccacacccagctaatttttgtatttttcttagagacgggatttca

SEQ ID NO: 131445 - DNA, 2672 bp, Homo sapiens
ctcagctaggcagtttatactttctagattccgcttcctggttatgcaaaacctcagagttgaccagaagtgtgagatcttaggtctttctgtggtctgagaacacagcccgtagcatatacacagccttacacatgcacatgaccttccaggaacctatcagcttttttaagcctcctgtggacatctgattctccagtttttcctgttaagctttttacttagcctattggttgctcttctaagatctactgccccaagtagccaagatactcaacagtttgctctaattgttttcagcaacttccccagggataaggctattctgcactaggtgagctctgagtgagatcaaaaaagacagccttaggagtggtctttcagggaccaccagacaggtcaaacagtgacagttctccagcaatggtggtttgaaggatctccgtccaacccccttttgcttggcttccttccttggcttccaggctgctggttttcaagactaatgtataggctggacatggtggctcacacctgtaatcctagcattttgggaggccgaggcaggccgatcacatgaggtcaggagttcaagaccagcctagccaacatggtgaaaccctgtctctactaaaaatacaaaaaagttaaccaggtgtggtggcatgcacctgtaatcccagctacttgggaggctgaggcaggagaatcacttgaacccgggaggtggaggttgcagtgagctgagattgtgccactgcactccagcctgggtgacacagtgagactctgtctcaaaaaataaaaagactaatgcatagcttgggagtggggtgggaacaggaaaaatgcaagatgaaatgtcagagagctagctgttcttaccaagattcagccatttttataagtaaatgctccccagatagctccaagcctttggttaatttccagaatgctgaagaagttcattttgacatttttttttatcagtgttctcaatgcttttatggatgagaggatttccaggggtccttactctgccatttttgctgatgtctccagtcgttgaattttactttgaaaattagatgattacagcttttatttgtgtgcatattactattctgaaaaaagtcatttttgtattctagcgttatataaattagtgatttttttttacaaatgattttaacagaatcttactgaaaatcaagaagctcttgcaaaagaaatgcgagcagatgcagatgcctatagacgaaaagtggatcttgaagaacacatgtttcataagctgatagaagcaggtgaaacccagagccagaaaactcagaaggtaaaaatatgatccatttagtatacatgcagaggagaaattttcatctgtcaccctcttaagagaacaaaatcgaaattaaactctgtgaagttgagttagtttgtttctttgcttcagttgtcacagttcctagaatctcacattgcttccttttatatatgggatgcttacttcactgacaatcacatgatatgcatgtctttttcctacagtttgaggaaatacaaaggaatagtgacttacaagaaaatacaaaggagtagtgacttagaagaaaatacgaaggaatagtgacttaaaagaaaatgcaaaggaatagtgactttacaaattttactgtccttctgtgttctgcctctgaaattgtccctgtgttgattaggttcaaagcatcaggtccctgcatggtatgtaagccagcacttccaagtgtattgtgtggactattaactattattcaataagatgggggatggtcaaataagtattggaaatgctgtcttaaagtgaggtatttttcacgccaaatttgaggatttaagagaatttccaagatgtatttcagagaatttcttacggagtacactttcagaaatgctgacttaagtgaattgaaatagaacttgagactttcaaagaagagctttctctattatctctttaacaaaatgttaaatgggtatgtgtaccggtctgctcctattccaaaaaccaggaatagtgtaccgtagataccttctgttgtacaacagtctcttaggtgatttcctcaagatattccatttttttttaataggcttgtgtccagtctgttaaaatgggctcttcttcagagtctcctcttcagagtgctgaaaacatggaaattgttgaatcccacccataccctagccgataagttcttaaccttggctgtaaattagagtcacttgaagagctctttttttttttttttttttttttttttttttgtagagatggagtcttactctgttacccaggctggagtgcagtggcacaatctcagctcactgcaacctccacctcctgggttcaagcaattatcctgcctcagcctcctgagtagctgtgactacaggcgcgcgctgccacgcccagctaatttctacctgaagagctttttaaaggtgctggtaccccgctgtccagtgattggtttaattggcttgtggcagggcccagtcatcagcttattttaaacactcccaggtgattctaatatgcagccagagttgtgaacaactgccccagacacttggatacattgaatggttataccttcattttatgtactagtagtttgaccttgttt

SEQ ID NO: 131446 - DNA, 1486 bp, Homo sapiens
attccagtattgtgtaaaatatttttgctaactcacatttttatatgcatctataaattctgtgccagaatatgaattaaaccaaaaatcattcaagagtcagatgaagtatgagagattctcagctactctctattctgacatatcaaatggttatttggcagcaaaatacaaaagcatgaaagttgtatttctttgggaggaaaaacagtttttcagaaattgaagctgactgactatttgaatatgtaactaaatttcagagaagtatatttttaagggcttttaaaaaaaatttcagtgttcactagcccctctaaatcagtaacgctcttacacttggacatgttgtagtattttaatcttgattctggaccttcctgatattagccaatattaaaaagcatttgatttacttatttttatttatttattggaaaggtaatcatggtgtatatttcacagttttatgacttggaatgccttttctcattactattaagcatcattgtgaggaagcttacagttgcacaaactcaaattctctcttaaattaacaagctttgtttctaacttaagattgtttgtatcccaagtatttcaaagcagagaagttctctgttagcattcattcagtccaacaaataattatttggcttgtaaatggaaccacctagggccaggttatatgtaaaatttaggttttagaattgcatttcattatttgtttttacaacacatttatctttaaaataaatgctgtatcaccgctaacatcagaaaactcagcttttctaaattttaaatttcgttttcaagtttctttaaatagaagagcagtagaatgggacaccacgggacagaatcttattaagaaagtgagaaatcttcgccagagactcactgcccgggctcgtcacagatgtcaaacccctcatcttttggctgcatagaatgcatgtcaccttgagacggtcgagagagagacctattttgcaatcagtgacattgatttttagattatttatttaaaattcctataaagatcagccctttgtacagaaaaatgtgtctataaaaattatgtgttatttaattctgatactttttggcttgtaaatggcttcttgaactttttacaataaaaatgttttagaaactgttaaagctgtgttaagctttcaggttgcagggaccagcataaacctcagtaactttagttgataaaggtttatcttaaagatgaatagagaaataaagaacaggaaaccatctcaacagctctatagcctggactgagggagaactcagcagcaggtggagagcgccagcagcgtggagtggcctatatcaccatcttcctgcccacccccgcctctgccagcgggaccccctctttgtcagggaccccaccggacttgtaacatctcatctctgcccagctccttctgccctctgcctgcttcttctggcagcaccgactgct

SEQ ID NO: 131447 - DNA, 1038 bp, Homo sapiens
attagtccttgcggtcaagttgctgtggggtcagcgagatggaagggtcacagaacactgacttcaaaggagcaaatccagagggcctgtgtgagaggagtctgattgggaggctcgttcctttcactccaaattacttatcctttcaatcccttgacttccacaggaagctcttttgaggccggaagctcttttcaggtgttgctctctgaagatttctttgagcagttttagtctttatattttagaaaagatgaatctccaatgtaaagttgggcaattgattccaagtcggaagctttagggattgaaatgatagttctagtgagggtgggtacctgctttttaacctggtgggacttgcagccgactcaatacctgggctttctgaacatttcctcgcggctttcctttatctggaagcgttgggacttttcgccacgcattgagacttttcggtttttcaggcttctgcttcagtttacccaacctcagcaaacatcgtttgctttggagaggaacttaaggactcagcaggaaattgaagataaaatgaaagggttcagcttcaaagaagacactttgctgttgatagctgaggtgagtgtatccctcgggtttatgtgaaacgaagcatcatagatattttccctggctctgatagcattttttataaagcagggccaaatttaatctactgaaggacttgtctccctcctctgtgtgccttttgatcactcagcaatcaccaaggcggcctcttgatcggcattcccctgcagcgtgcgggaccgcaggggctgtgtttcatgtacttgtcagtgcttgttagcacctgcctgcctgaacatcatcaatgcccaataattgtttgtttcagtgctgaataaatgaatgaatgaatgcttacatttgtgtagcagttctattttttttcctccattcatcataacagcttgtgaagttgagtagagctagaattgaggctcagagaacttgtgacttgcctgcggtcagattttcagtgggagagctggt

SEQ ID NO: 131448 - DNA, 1081 bp, Homo sapiens
ctacatggctggggaggcctcacaatcatggcagaaggtgaaggaggagcaaagtcacgtcttacatggcggcaggcaaagagagtgtgtgcaggggaactgccttttatgaaactatcagatctcctgagactaactaccatgagaatagcatgggaaaaacccacccccatgattcagttacctcccaccaggtccctcccacaacatgtgggggttatgggagctgcaatttaagatgagatttgggtggggacacagctaaaccatatcactagaatagtgaaatcttctttaattcatttaaatattcatgtaattcattggtcagttataacattactttccacctaggaaaaaaaatcacccctattctgaatccttttttctgttatgttttcctcctttcatttctttatttaacaaataatttccagaaagcactgcaggagtattccagtatctctgaaaaattgtcatcaaccaattttgccatgaaaagggatgtccaggaaggtcaggctcggtgtctggctcacctgggtaggcatatggaggcgctggagattgctgcaaacttggtgagtgattttattgcttattttcacacacattcctataagggtggtcgaatggtgtattttttgaaaacaaaacaaacttcttgctagtagcaaaatctatgggtttggataagcagaagaaaattgtcaggggtgtgagagttttattatgatgaacaacttggaacctagacataatcattttcttgtaatatttttcttgtgtcatgctcaaaattctgtattgcctgaaaatctcctttgcagaggtttttctcttgttaggagtaacattcagtgtggaaggactatgagtgatctgttttcttcgttagattgtttttagacgttgttctccaaaatttctacaatgaacagtatttttctaagccaaaaaaggtcccccccccaaaatgactaaatactcattaccaagccacacttagtagtcctttttatttttaagtggaatttgcagaatttttttttctttttccttttccccagtcaacgaaagg

SEQ ID NO: 131449 - DNA, 1030 bp, Homo sapiens
tcctagatgggcatttcctcagacttctctcctacaggtttttggtatttggttgcattggagcctccttctagccttaatttctgtctcctttgctgaaattctagttttttgccattatgacattttcataatagcaccatatctataattcttctttcctatgtcctttcagtaaagaattgtcaatccctattccagtcacactaaagtttatctacaagaaagcatgtctcattttaaagaaccaatgtgggctgggtgcggtggctcacacctgtaatcccagcactttgggaggccaaggtgggcagaggcaggatcacttgtgctcaggagttcaagactaacctggccagactcttgaagaagtctttttttgacgtttaatcaattatattatgggaaattgcttctgaatatgaggtggaaaagcatagctcactctgtaataggctattttcatgatttcaagtggttttatgaagaaacagaaagcagtgatgatgttgaagtgctgactctcaagaaattcaaaggagacctggcctacagacgacaagagtatcaggtagaattcaacatatggtgcttgaagtgggctcttgttttatcagttatggcatatgtaaataacagtgtaccaagttagtgtggtgtttatgaagatgagtttaatcttttgtgatgtgtgtttataatctgaggctcccaagtttccgttcttttctgcttggctctgtatgatttgtttgttttctgtaactccaacaaaaggatctctttggggtccttgtccttgtaggtttattcctcaaggttctgaatctcctcattacttaggaccctctagcacagacatttcacagtgccacaggagcaaatcaccccaaaatgtataagaaaaagaactaacaactagatgttagattgcgttacatatgtatctcatttcatctgcatgagaatcctgtttttattttgctgatgaaaaggttataaagtaagttagtggcaataccagaattca

SEQ ID NO: 131450 - DNA, 1849 bp, Homo sapiens
aaaacaacttgtaaaaatgcaatttaaattttaatacagtacatttttcttctaatatgatggagacattctgaatcttagactttctgagggggtttaatgaccactagagcttgtcctcatattcagtccagtttaatactgtatgtctagtaagatgggctatatattgcctctattctttgagatgtgattaagcttagaactttgaccaaaaattttacagtaaaaattgttagaaatgggtaaaaaaaaaaaaaaaaaaaaaaccctgatttattactatgtcttatttatcagaccctgcactaagattaaaagttgtgcatgggcttatacaatttcaaatgtaaaaacagcctatttatatatgttgaaacaataagattttatggtttcactggcccttaataattggatccttcattaaacacatccatgaataccactgtttctactgttacttgttccattagaagctgatttgctttttattaaactgcaggaaattaattctgaagaaggaaaagaaactgacatggtaatttggatagggtgaagctttgaaataaatactgcaccaaaaatgtgaaaaagaatcacgtagtaaatgtatacttagtgttttcttacaatcgtggaaatcagaaatgtttatacaggtgtcagatcagaatttttaagagttatctttcagtgaaattttataacagtttcagtgaatagagaaaaaattctgaactgatcataatgagttaaaagttagcttttcacttatgaatcatgggagtgttaactgttaactcttgccgtatcaggagactgaaagttcatactaatttacaaactttgtaaagactggtgctgttcattcatattgggaagaaccctttcttttgtgaccataggaccatttttcaaaatgcgctttcttcgtagaagaaatgttcagtttaattagctttggattttaacatgtttttctgaatgaccagatgtaggcttagccagtttattttctctaatttaatggataataaatattaagctcttggttaaatgtttttcagccattgaaaatgttatgaaaaagccttgaatatgcatgctgctttcatttttataaactttttattttttaactatagctttattagtaattccaaaatgctgcaatgtagctgatttcctcactcagacagctggctttgtgggtggcttttttcatactactgttaacttttttaaaaaagaagcaatgtaaagaccgtaatgcactaagctttttttttttcttttacacgtttaaaaacttcttaaagcactctgtaatataatgattaaattgctcccttttataaacattgctaatgtggtctgagttttgtttgacaataattttaatgttctcaaaatttgaaatgtcaagtattagaaatgaagcctttgaatatagttgtttcccttgcaatatgttaactctgtgtagctgtatataactattaatttccctcatctcttttataggcctgataaaactcttctctgacgtttgctagcttttaaatatatttatttgacagagcaaaagaaccctcttctggttgattgtgaccttgaatacaaaataaaagtagtgattagtagtttacagtgaccttttttttttcattttattaacaaagtcaatttttaaaacattgtggtaaaatatatatcacatactatttgccattataccagtttttaagtgtaaattcaatggcattaattatattcacagtgctgcaccaccttcaccacttttccaaaagtttttcatcaccccagacagaaactcggaaccatt

SEQ ID NO: 131451 - DNA, 1088 bp, Homo sapiens
gctctgttattctgtgcagtttttccttaattcccttacatcttctctctggttttatttattttaacaattatttatagagagcttaatatgtaccaggcactattcttactgcttggcaatcctttttcaggttttctccttgttaatattttttaagggataacagatgaaactaaaaatgtacctgttttaataagcagtataaatatcattccaggttatagggtataatgtaatcattttaggttataagaagttaaacagtttcatacagctttatcctgaagtgcagccctccatttcctaatgtcagaaatcttcagagcaggctttcttctgacccagatacataaaatatttttaacaggcattttttttattgctaaacacaagaatgtgcactcagccaagattaaatcaacaaatttgttgctgcagtgaatgttgttgttgtaacctctgcaatgatttttttggggagttgcagtcttccaaaaataatgtgaatttttctgtacagtttagtttgacctttaattttgtatagataattcttatgttatatattaacactgtaatggatactaattctggtcagaaaattcatcctaaaactacagttttcaaaagactgtatgatgtatgctatacatgcactgtattagtccattttcacactgctataaagaacgacctgagactgggtaatttatgaagaaaagaggtttagttgactcacagttttgccggcttaacaagaagcatgactgggaggccccaagaaacttacagtcatggcagaaggcgaaggggaagaaggggaagcaagcacatctcaccatgaccgaacaggagagagagcgaaaggggatgttccacacaactttcaaacaaccagatctcctgagaactcactcactatcatgagaacagccagaggggaagtccacccccatgattcagtcacctcccaccaggctccctcccccgacactccctgattaaaagttatgtatgggcttatacaatttcaaatgtaaaaacagcctatttacatatgttgaaacaataagattttgtggtat

SEQ ID NO: 131452 - DNA, 1050 bp, Homo sapiens
tttcctttggtgtacttttccccttctttttagttttcatttttgaattatttccttaaataggcaaaaaatgaagctttagtgaagggggcattgcaataaaatacattttagttatctttagtatttgtttgtgaatcccctcaacctgcctgccagtctcccttcatagagattgggtaactttccttcaaaacaaagtaaaaaaaacccaattcatatgaaaaataataattaagacattaaactctacataataataataaaactacacatgataatcatttatctcttagctatactagtggtacctagtcttattagggaaaagaaaaactacttcagaaaatatcaaaaatgaagatgactgatacaacaaggtgactgttcaaaatgtatgtggttgatgaacatatacgcagattaaaaattttcttaacttacatttcagtcatctgatttagacagcttccgtttcacatgtcgtggaggttcccaagtgtcactatcatctgtttcttcttcatcctcttcctggtcatcaataacttcatcttcctcctcattttcctcaaataattctatacctaattctgatcttctctgtctttctgcaaaccactctctgacctgctcatagcccatatgtgatttgttaacaagttcatcaaggtcttgctcattaagaaacttgtgcttcaggtaataatccttaagtattgcagttccagttttaaattttatgagtgatggtcccctgtcccagttgttaattcttttgcttcctctaggccgcccacgcggtcttcctcttccccgtcctttgggtctccctctccctcttttcctaagggaagacagaccattcatactacttgaattggcgctctgatagtagtagtaccatttcaagtttccattcttccaagcataacgggtgtccccaaaccaactaactatgtctgttctagcaagcccgctttctttggccaacttgtcatactcttctggtgatggccactgtgtccggacaaatgcactcttaagcat

SEQ ID NO: 131453 - DNA, 1048 bp, Homo sapiens
accctgattcatttggcattcgggcaaaaaagacaaaagagcaactggcagaattaaaagttagctaccttaaaaatcagtttccccatgattcagaaattatcagacttatgaaaataacaggcctgacgaaaggagagattaaaaaatggtttagtgacacaaggtacaaccagagaaattcaaagagtaatcagtgcttacatctcaacaatgattcctctaccaccattattatagactccagtgatgaaaccacggaatccccaactgttggtactgcacagcctaagcaatcctggaatccttttcctgactttactccccaaaagtttaaagagaaaactgcagagcagcttcgtgtccttcaggcaagttttctcaacagctctgtacttacagatgaagaattaaataggttaagggcacaaaccaaacttaccagaagagaaatcgatgcttggtttacagagaagaagaaatcaaaagctttaaaggaagagaaaatggaaatagatgaaagtaatgcaggtagttccaaagaagaagctggagaaacttctcctgcagatgaatctggtgcacctaagtcagggagtacaggcaagatatgtaaaaaaacacctgagcagctgcacatgcttaagagtgcatttgtccggacacagtggccatcaccagaagagtatgacaagttggccaaagaaagcgggcttgctagaacagacatagttagttggtttggggacacccgttatgcttggaagaatggaaacttgaaatggtactactactatcagagcgccaattcaagtagtatgaatggtctgtcttcccttaggaaaagagggagagggagacccaaaggacggggaagaggaagaccgcgtgggcggcctagaggaagcaaaagaattaacaactgggacaggggaccatcactcataaaatttaaaactggaactgcaatacttaaggattattacctgaagcacaagtttcttaatgagcaagaccttgatgaacttgttaacaaatcacatatggg

SEQ ID NO: 131454 - DNA, 1682 bp, Homo sapiens
atttttttctgattcttatcttattctagatctttgtaactgagctatccagccacttcatataagtgaactataactataatttgtttaaaagatcatagttactcattttaaaacattttaaaatttattttaatgtaggtgattggagttgtgcttcaaaaatttcagaaattcagcagtattttatctgccaacaataagctctttacttgattgcaccatgagaaagctgctaatgagacttgttgagcacaaaaatggacttgaagaaccaaaagccattgttttcaaatgaagaacactgaacagttttaagcctcgatgctttttaatcaccactgagcttttcctcataacatcagaatggcaagcaggcgaaaatcaacaacaccttgcatggtccttgccagtgaacaagatccagaccttgagttgatatcagatttggatgaaggtcctcctgtgcttacacctgtagaaaacaccagagcagagagtatctcaagtgatgaagaggttcatgaatctgtggattcagacaatcagcaaaataaaaaagttgaaggtggatatgaatgtaaatattgtacttttcaaactccagatctaaatatgtttacttttcatgtggattcggaacatcccaatgtagtgctaaattcatcctatgtttgtgtcgaatgcaattttcttaccaaaaggtatgatgcactttctgagcataatctgaaatatcacccaggagaagagaattttaagttgactatggtgaaacgtaataaccagacaatctttgaacaaacaataaatgatctgacttttgatggtagttttgttaaagaggagaatgcagagcaagcagaatctacagaagtttcttcttcgggaatatctatcagtaaaactcctatcatgaaaatgatgaaaaataaagtggaaaataaacggattgcagttcatcataactcagttgaggacgttcctgaagagaaagagaatgaaatcaaaccagaccgtgaagaaattgtagaaaatccaagttcttcagcttctgaatctaatacaagtacttccattgtaaacagaatacatccaagtactgccagcacggtagtgacaccagcagcagttcttcctggattggcacaggtgataactgctgtatctgctcagcagaattctaatttgattcccaaagtcttaatccctgttaatagcattcccacctacaatgctgcattggataacaatccccttttacttaacacctacaacaagttcccttacccaacaatgtcagaaattacagttctttctgctcaagcaaaatatacagaggaacagatcaagatatggttttcagcccaacgtttaaaacatggtgttagttggactcccgaggaagtagaggaggcaagaaggaaacaattcaatggaacagtgcatactgtacctcagaccataactgttattcctacacacatttccacagggagtaatggtttaccatctattttacagacatgccaaatagttggtcagcctggtctggtccttactcaagtggctggaacaaacaccttgccagttacagcacctatagccttgacagtggcaggcgttccaagtcaaaataatatacagaaaagtcaggtacctgctgctcagcctactgcaga

SEQ ID NO: 131455 - DNA, 1415 bp, Homo sapiens
agaaagataaagggtttctttggttcacagttctgcagactgtacaagaagcatggctccagcatctgctgctggtgatggcctcaggcagcttccactcatgacagaagatgatggggaatgcatgtgggcagagatcacatggcaagaaaggaagcaagagagacagtggggaggtgccaggctcttcctaacaaccagctcctgcaggaactggtagagcgagaactcactcattaccacatggacagcaccaaactgttgatgagggatctgaccccatgacccagacacctcctattaggctctgcctccaagattggggatcgaatttcaacatgagatttgaagggatcaaacatccaaattatagcaagctgttattaaaaatgagacacaatatctagagtaaggagaccacagatatggatggtggtgcagggacagaaatgtaacattactctgccatgtacagtatggtaagtactagactagaaaataaacgggaggaaatgggaccaaatgaaagggagaaggtgatctctagtaggggtccccaacccctgtgccatggaccagtaccaatccatgacctgttaggaactgggccgcacagcagaaggtgagaggtaggcaagcaagcattaccacctgaactctgccttctgttagatgagcagcagcattagattctcataggagcacaaccctattgtgactgtgcatgcgagggctctaggttgcgcactccctgtgagaatctaatgccagatctgaggtggaagagtttcatcccaaaaccatctcatcccctcgcaccgcggtatgtggaaaaatggtcttccatgagaccagtccctggtgccaaaaaggttgaggactgctgtcctagagggcacacagatcaacacatcaagtgtcctaacctaaggaagggcctgagtaagggtctgaaagtgcattgaatgtctgtggaatggcagccatttctggtatacctaaagcataaggaaacaggaggaaggaaagtgaggttagactaggttgtgaaagggattatatgtcccacaaggagtttgaactttattccttcaacattaggaacctgtgtcaggagactgatgtgattagatctgctttataacttttggtagcattgtggcaagtgctaagaataatgtttctggtaggccaggcacggtggctcatgcctgtaatcccagcacttttggaggccaaagcggacagatcacctgaggtcaggagttcgagtccagcctggccaacgtggtgaaaccccatctctactaaaactacaaaaattagccaggcgtggtggcaagcgcctgtaatcccagctactcaggaggctaaggtaagagaatcatttgaacccaggaggtagaggtcacagt

SEQ ID NO: 131456 - DNA, 1008 bp, Homo sapiens
gtcaatgagagggaactagtcctgcttcaagcccttggctgaagttcctaaaatagttgccattaatgtgacttgacaaagacaaagccacccaggctcagtgattctctgttctagacttcatagtaccctcctggttccaaagaattggactggtcctgatgtccaccctagttcctgccagagaccaatgtcacataatttagacattattaggggaaacccatattataagaaagtgtgaccctggcaggcgacccgggagttgtctgccacaaaagtttagcagataaaatttgctgacttactctctcatgtccatttgagccaattatttgatacatacggtgaacactcaccttgtgtgcagtttacacacagtatctcattcatacttacaatggccataaaacgcctagtaggtaggttctagtattatttttcttttacaaataaagaaacagatgctgagactgattaagtcattcactcactatcacatataagtggcagaagcaggacttaaatgaggtgtctgtgactcgaaacccatgctcgtaacaaccttccttgaacagacactgtatggctttggcactcagcattccagtatgcgccagtggcaactcctgcaaatgttggtaaccctacacctgagggttttctcatgactcacggtggaggtggtctggaagtggcaaagagttaacacccctgtgagtagcttctggctagacatagatgggagttggtgaataataacccgttcccttggccctttggtgggatatctctgaggtgtgttctacactttatctctaggttctccattagagttgagcacgaggtcccacagcagcaaccggctagaaactgtaccgttgctagcttccttcccttccctttcttatatccccactcccctactcattctttttggcatcacctcccaaatgaaccacttgccctcatatcctttactcagggtccgttttaggggcagcccaa

SEQ ID NO: 131457 - DNA, 1600 bp, Homo sapiens
caggcaggagccaccatgcctggccttattattatttttaataacagatcatttcactagagagtgctaaattttaaaaaaagatattacttacatatgcatattattggtaactacaaaatataaaaatgataaccattagtatatatatagtatttagtatacctactaaagtatactatgtagtatatatataatattgatacctacaaagtgtaaaatactaaactctaactacatcagtaccttgattaatactatttgaatttaacataagatgaatgcaccccagactcatttcaaagttatttaaataatgaagtcctacaggtaaaatctatgtggcagtcttaaatactgaactgaatgtttattttcactatcaaatatatacctgaatattaatattcttaaggttgtttactgaaaaagtaatgaaatgtttctttagcttattccatattgaaacttactatttgctcttcctcccctttatctagaaaatggagcaagaggtagaaaacttcagttgttccagatgatgatgtcatggtatcgagtattctttatattcagttcctatttaagtcatttttgtcatgtccgcctaattgatgtagtatgaaaccctgcatctttaaggaaaagattaaaatagtaaaataaaagtatttaaactttcctgatatttatgtacatattaagataaatgtcatgtgtaagataactgataaatattggaactttgctagaacaagaccctgtagtaatagtaataatagttgaagtttggccaactcttaataaagttattttggtaactaatgttttatggcacttaagaataattagcagcgttaaattttgtttgtattaagcacttttaattttatccttcctaaaaatagtttattgtatctgacaagaaacttacttaaccattgtgtccttcccatcttttttgtcatctttgttttcttcaaatgccctcctcccatctgccttgagattccctcgtcttcacttaaaagccagagtgcaagtcatgatttgcgggagggctcttgaaccacttctggctgcaccacaattctgtacttgagtatcacagtcattgtttttgagacaaacatttttataattctaatttgggttaataaagattttaaatatttcttggtttacttttgtaattatatacacaacaaatgtattaataactaccttgttaaacaccttttaatagcacaaggtttttatatttgcaagctgttgatatctttctaaaactgtttaggttatagtctattgatactttttatatacaattttataaatataaatattataattttatattaatggtaccaaaaatacatttcttaaggttaaaagcatgcacttccatgcatacttgcttttggggagagtggggagaagacattctaataatcagtttgtgaaatagcttctgttggaaaccttttgaggggaataaggaatggtcatctaaaatgagagattctggattttaatgcagttcaaagttgagctgtatttttgttgttgatttatctggattttttttaaagccttctaa

SEQ ID NO: 131458 - DNA, 1024 bp, Homo sapiens
ttatgtagtatcttttttagtttcacataataaaattagttaaaatgtacttatactatcataaaatcccctgcaaaaaaactttgcttttctcctgttaatctaaattgaggttagtttttaatttgtttgtagatgcttatggctagacttagaattggcaatcccctcagctctagtttttagaatatgagttactcaaggtcaaggccaggattatagctagacttaagtacatttaaatgtcagagccactgccagaggctgccctgtgtcatcagatggcttggtctaccctctgtcaggcttgtaataattgcccaaaccttctaaattaagtatcttgtctgaggaagtttctctctcacacatattgacactcatattttcttttagaatcttttgaagactgttgttaaaaaaagtcaaaactacaacatatttcagttggaaaatttgtatgcagtaatcagccaatgtatttatcggcatcgcaaggaccatgataaaacatcacttattcaggtaaactcttgagtggaaactttttacaaatgctcttgtggtcacattaatatatcacttatgtaggattgttgaggctttatttaatctgtgtaagaaactgattgtaggaacttaaagaccatctttctatttccaaagttgatgtcccattccataaagatcatttttaatatgtggattatgaattatttctaaatgcaagtgagtttagtatttttccaatctataacttaattagtttgtttgtttatttatttatttatttagagacagggtctctgtcgcccaggctggagtgcagtggtgcgatctcaactcactcactgcagcctccacctccaaggttcaagcgatcctcctgcctcagcctcccaagtagctgggaccacaggcacctgccatcatgcccagctaatttttgtgttttttgtagagatgaggtttcactatgttgcccacgccgatcttgagctcctgagctcaagccatccagcca

SEQ ID NO: 131459 - DNA, 1247 bp, Homo sapiens
caggagatcgagaccatcctggctaacaggttgaaaccccgtctctactaaaaatgcaaaaaattagctgggcgtggtggcgggtgcctgtagtcccagctgctcggagaggctgaggcaagagaatggcatgaacccgggaggcagagcttgcagtgagccgagatcgcaccactgcactccagcctgggcaacagagtgagactccgtctcaaaaaaaaaaaaaaaaaaaatttcaagataaaatcaaaattttttaccattttatggtctgggccttacccacttctccaccttctcacagtatgctctattcttgtttctgtattttaatcatacaaaatactgtggtttctcactatttatcctttcatatatcagggtttttcactctttgaatttcagaaaatggttgaatgttctttcatcatttttctttaaatttcttgaagctcagttgaagaggaaaattcgcaaaaagtcaaactggtacttaggcaccataaaaaagcgaaggaagatttcacaggcaaaggatgatagccagaatgccatagatcacaaaattgagagtgatacagaggaaactcaagacacaagtgtagatcataatgagaccggaaacacaggagagtcttcggtggaagaaaatgaaaaacagcaaaatgcctctgaaagcaaactggaattgagaaataattcaaatacttgtaatatagagaatgagcttgaagactctaggaagactacagcatgtacagaattgagagacaagattgcttgtaatggagatgcttctagctctcagataatacatatttctgatgaaaatgaaggaaaaggtacgtctttttcaattaaaataatttactgattttaaaagatatttcaaagtttctaaacacctaattgcatcttagtttattgctttttgcttgcctttcagagagcagatgttagttaattagaaaacaatagcattatctttactattgagctagtaaggatagttacaagctgtggcatcaaacagacctagatttgagcctccagttcactacttagtagcttgtgacctttggcaagatacttaacttgtcagcctgtttgcttatctgcaaaattggggtagataagatagttgcttggtaatgaggcatttttaagattaaatgtaacaaactaaagtatatgataccctttcatttttaagcaagataagagtctgctatgattcttgctgagtg

SEQ ID NO: 131460 - DNA, 1045 bp, Homo sapiens
agaccaggaggcggagcttgcagtgagccgagcctgggtgacagcactccagcctgggtgacagagcaagactccatctcaaaaaaaaatcaagataacaagagaagcagcttctgacaaccaagaggcagcagacaagttcccaaacaccattaagaaaatcactggacagaggccaggcactatggctcatgtctgtaatcccagcactttgggaggctaaggtggtaggattgcttgaggccaggagtttaagaccagcctgggcagcagagcaagaccccatctctaaaaaacaaacaaaacactggccaggcatggtggcacacatttgtagccctaccttcttgggagactgaggtaggaggattgcttgagcccaggagttcaaggctgcagtgagctattgattatgccacagcactccagcctgggtgacagagcaagaccctgtctcaaaaaaaaaaaaaaaaaaaaaaaagaagccactggggagaaaggtaatctttcattctcctttgtcatttctattacctaaaagttttaccacttctttccaggactactgctgtgtggttatactgcatctagtctagacagaatatttaacctctctgtaccttagtttcttcatctgtaaaatgatgatgataatggtagcaaacttcattgggttaaagtgaaaaatttttttttttttttttttttttttttttgagacggagttgcgtcacgcaagctagagtgcagtggcatgatctcgattcactgcaagctccgcctcccaggttcacaccattctcctgcgagtagctgggactgcaggcaccggccaccatgcccggcaaatttttttgtattttttgtagcgatggggtttcaccgtgttagccaggatggtctcgatcacctgacctcgtgatccgcccgcctcagcctcccaaagtgctgggactacaggcgtgagccaccgcgcccagccaggttaaattaaattttaatgagtaagcatacataaggggcttagaagaattcctagtatatg

SEQ ID NO: 131461 - DNA, 1378 bp, Homo sapiens
ctctgttgcccaggctggagtgcagtgacacaaattatctttcactgcaaccttgtggagatagggtcttgctgtgttgcccagcctagtctcaaactcttggcctcaagcaatcttcctgtctcagcctcccaaagtgctggggattacaggcatgatattattatgacctacacaattggaagagacctggagagccacgtcttaagttgctctgaaggatgggtggcaattggatgaggaaagaatataggctgttactggagaatacagctgcccaagaataagaaacaattactggaggatacagctgcccaaggaatagaaacaaatacaaaacaaaaacagccttaaatcaagtgaaaggttttatgttaaatatattatcataatctcttacgtatttattctctatctcctatattgcctggcatcgaaacttgactcacatgttatgtttagagttaattttgtgatttgatcatttgcttgaattttaggttcctgattatgtcactgtaataaagcaaccaatggacctttcatctgtaatcagtaaaattgatctacacaagtatctgactgtgaaagactatttgagagatattgatctaatctgtagtaatgccttagaatacaatccagatagagatcctggaggtgagcattagtgaattttttttcagggggttgagttggggggcagctaacacttagggttgatttttgtgtcaggtgctatattataaacataatcaaaatactatttaatcctcacaacaaccattttacaaatggtaaaaatgaagtttagaaaggttaaaaacattgctgaaggtcacacttccaggaagggacagagtgagaatttgaatgcaggtttctttcattcccaaatccctgtttattaacaattacatgatagatcctctaatgagacacaaaatggcttgtatactttgtatatcagtgctcttcctcaaagtggaaaagtaggcactctgtaatgaaatagtttttaaaatattctattagttaagaccattataatttttattacaaaagcaatataatatagggcttactagtagtaatatttttaaaaatctagtcccccatttcctttctccaaaggcagacactgttaagtttgaggatatcttttcagacctttttctgtgcatataccccttctgctttcacctatcgcatctattaatataaaatttagtgggtacaatgtatgttatttgggtggtggatacccccaaagccctgacttcatgtgcagtctgtgcctgtaacaaaaattacacttgcaccccatacatttttacaaatttttaaaaataaaatgtataaaggatttttaatgata

SEQ ID NO: 131462 - DNA, 1110 bp, Homo sapiens
tacaggcgcacgccaccacgccagctaattttttgtatttttagtagagaccgggtttcactgtattagccagggtggtctcgatctcctgacctggtgatccacccacctcggcctcccaaagtgctgggattacaggtgtgagccaccacacccggctgcctcttaaattatcttaaaggaacagaggtaatgacttgtaggaattagcattccaaattacaagttactaatgatttctggaggggacgtagggttagagattatggtaatacttttgtatttcaaatctttggattccttgcatatatgaggaagataatccctcaaatcctgactctgttttcattaaatcatttgtcaacctcaatgttatggaggagcagtaactaaattcttccattcatgtgaagttttgcaggctttggaggtactcccagtagcaccaccacctgagccaagatcactgacagcagaagaagtgaaacgactagaagaacaagaagaagatacatttagagaactgaggattttcttaagaaatgttacacataggcttgctattgacaagcgattccgagtgtttactaagcctgttgaccctgatgaggtattagtttaatctttggatcaagtgtattctaggccataatgcttcacaatcaaaggatatttgaagagtttatgtggttctgcctacactcttaactagttttatctatttggaaacatgtaccgggttagtgtcctaagcacatgtagactttaagagcagggtaacgcattttcctttcctgcagacaattaactttgtctccccaacctaaacattccagaagtaattgagaatgtcttattattttttttttttgaaacggagttttgctcctgttgcccgggctggaatgcaatggcgcgatctcggctcattgcaacctccacctcccaggttcaagtgattctcctgcctcagcctcccaagtagctgggactacaggcgtgtgccaccacgtccagctaatttttgtatttttagtagagacagggtttctccatgttggccaggctggtctcaaactcctgacctcaggtaatccacccacctcagcc

SEQ ID NO: 131463 - DNA, 1263 bp, Homo sapiens
aaaagtaaaatatcatcaagtcagttcctttattaattgtagtttgggttcttgagttctcatgatttttagttccttaatctcttgtaaacatggtttatacataaatctaacattctttaaagacttgtttaaaaaatatacaatttagcttgtcattaaaaatatgtgtataataacctgctattgtcttgaatgactgacacatgcatttcatatgcatgtgtgtatatatactgcatacatatgtttatatactgtatagatgctccttgacatatgatgggtttatttggacataacccgattgttaagtggagggacatactgaatacatgtcactttcatgctgctgtaaagtctaaaaattgtaaattgaaccattgtaagttggggatcatctgtatatatgatatatattgcatttattttcttttttaaggtgcaagaattgtttatccgtgattatggagagatttttaatgtccagttaccggataaagaagaacggacaaaattttttgaagatttaattctaaaacaagctgctaagcctcctatatcaaaaaagaaagcaggttagtttctatatcaaagttaatatttaataattttgagaaagtaggaatgaaatagttaatggcattgacatgtatctgataacacaagctcaaaacctaagtcatgaggttgatgcatctgctgcttaaaaatctctatgcttcccattaaaacagactaaagttcttaaggtacacaaagtctttcatagtatagccccaatctatctttctaagctcattttgggcacttgtgttctgcctcagccctccacccccacattttttttctcataaaacactatctttaaaccatatgtaacataattttaccttttcactattttagtaatgcttgctctctcatcagtaaagcttctatctctatcccccatctctgtctaaagaactacttattcttttatttttattttttgagacagggtctgtgtcatccactggagtgaagtggcatgatcgaggctcaactgcagcctcaacctcctgggctcaagcatcctcccacctcagcctccgaagtagctaggacaagaggctcatgccaaaatgcccggctaaatacttgtccttttagtatacctcatttattctttattatgaagcctttcctaacttatatgggcaaaatgaattgcttctgcctttatgacccatcatacttttaaaatactactaatatggc

SEQ ID NO: 131464 - DNA, 1510 bp, Homo sapiens
ctgtttttggtatttgtatattaacttttttttgtttgtttttggttttggtttttttgagacggagtcttactgtgtcaccaggctggagtgcagtggcacgatcctggctccctgcaacctccgccttccgggttcaagcaattctcctgccttagcctcccgagtagctgggactacaggtgcaatgcatgccgccacacccagctaatttttttttttttttttttttgtattttaatagagacggggtttcaccatgttgcccaggatggtctcaaactcctgggctcaggcagtccacccgccttggcctcccaaagtgcgtggattataggcatgagccaccgcgcctggctatattaacatttttaaaacataaaaatattttatatttgtagttttgtttacttttgattaccacaatagaaaaatcttctagatttctccagctgttttctagttgcttgaagaaattatctttttccaaaaaaatgaaacttttaatccacatttaaaaataaggttgtgggattttggagaagcattttaaaaacttgaggactttatatgttactcctgggaggttaaacattgtttcagactaatagaactagcattattaacgtgctgactctaactgaatttgttttgttctctctctactaggtgattcgtgaagctaagagaacagcaccaagtatagtgtatgttcctcatatccacgtgtggtgggaaatagttggaccgacacttaaagccacatttaccacattattacagaatattccttcatttgctccagttttactacttgcaacttctgacaaaccccattccgctttgccagaagaggtaatttatgtggggcggtatcattatactttcaaaaagagttgtttctaccacaataatcataacttattgaaaaaattcaaatgctgtagaagtgaataaaaggataagttttcttatcaaatataccattggtaactatttggtatatgtgctcattgggcaagatggtatatgtatatgtgtatgtatatattaaggatacataaattttttctcttgaaaaatggtattatatgccgggtgcagtggctcacgcctgtaatcccagcactttgggaggccgaggtgggtggatcatgaggtcaggagattgagaccatcctggctaacagggtgaaaccctgtccctactaaaaatacaaaaaaaattagctggacgtggtggctggcgcctgcagtcccagctactcgggagactgaagcaggagaatggcatgaaccctggaggcagagcttgcagtgagccgagtgagccactgcactccagcctgggcgacagagcgagactctgtctcaaaaaaaaaaaaaaaaaaaaagtatttaaaaaatgggagtatatgatacatactattctgcaatttgctttattcatttatcaataaatgtattcatgtatttgttagtgctaaagtctctttaagagctgcatggt

SEQ ID NO: 131465 - DNA, 1156 bp, Homo sapiens
tatatcataataagataatagctattctttactgaccattttgtagtcatccttttaagcattttacatatattatttcatgtaattttcacatcattcctgtgatgtaggtagcagtatctctacagatgaagaaatggctggagagcattatgtgaatcttctaaggtcatacagctagtaaattacaaactggaatgtgaatctagtctgtgtgattttaaaactcttgcttttgacctctgtgctatacttagtgcttgtgtattgcactcttaaaagttgattgattgttgatggccattactaccctataagtttactgggtaaaagagattttggtcttattactcttaaatatttgctaactatattccgaggctgatttttaattttttttttaaccatggtcatgctaatagagttttgtgtttctttgtttggtcggctggttcttttcttcccctggttgctttggataggatactgtggagcagatattaaatcaatatgtgctgaagctgctttatgtgctttacgacgacgctacccacagatctataccactagtgagaaactgcagttggatctctcttcaattaatatctcagctaaggatttcgaggtagctatgcaaaagatgataccagcctcccaaagagctgtgacatcacctgggcaggcactgtccaccgttgtgaaaccactcctgcaaaacactgttgacaagattttagaagccctgcagagagtatttccacatgcagaattcagaacaaataaaacattagactcaggtataaaacttgattgaccatttaaagttagtttttataatcagtaaagtgaaatgtttcatacataccagaaatatttatttgtaaaagaatctcttgaaaagaatttggtaatgctttacctgggatatttgaaggaaatttactccatggattgcccttaatttaacttattgtaagtttggggtgcatttttacatttacttattaattcatatctacacaaatatttttgattctttgaaaaaatttaattgaagtatgctgacttggtaactgaagcaataaagatttgctttgcaatccaaaagttactaatgtacaattttttggttttatagatatttcttgtcctctgc

SEQ ID NO: 131466 - DNA, 1025 bp, Homo sapiens
gtctcaaactcctggcctcgagtactcttcccacctcagcccccaagttctggggttacaggcgtgagccaccatgccttgccttttttttctttttgatgttatatattgtttgagaactcttaagttcctttgtgaaattatgctttataaaatgtcttctaggattcatttgtggggggtctaacaaccgtctgttttccattgatttcaatttctgtgggccatttgggatgttattttatagatttttttaatccattggaaatagtgaggtgccctgagaaaatttattcacatgtaatgcgttaaatcttacaaaagaagaaatattactgaatgatatagactgtgttcatagtattaatctcttctctcttatttttaaaatttagttctattgtttccaccctgctagctcttatggatggattggacagcagaggggaaattgtggtcattggtgctacgaacaggctagattctatagatcctgctttacgaaggcctggtcgctttgatagagaattcctctttagcctgcctgataaagaggtaagaatttaatgtcactcaaattttgacaaaatatattgctgtttattaataataagtcttggtatagtaaaaatttggagattcttgagttttgtatcatggtcttgtcaaatgatagtaaacaactcaaatggggacaaatttttattcttttctttaaatataataatgccttcccaaaattactcttaaaattatttcaatttgagtgtagcctttggatgttctaagtgttgcttcagaacatatggcttaatgagtaatcaatccttagccagtttgttagccttgtctttttcatgaatatcatcatataatcctaccgagtttttttaagtctacttaatcttctgggaaccaaagaggaaaatatgtcaagagctgtctgtactcttaaaaacagctcttaatatgcaccagaatgaatagctactttagtagttacttttctcttatttgtgtttatg

SEQ ID NO: 131467 - DNA, 2176 bp, Homo sapiens
gagaggtcaaggtaggtggatcacaaggtccggagttcaagactagcctggccaacatagtgaaaccctgtctttactaaaaatacccaaaaaattagccaggcatggtggcgggcacctgttgtcccagctactcgggaggctgaggcaggagaattgcttgaacctgggatgcggaggttgcagtgagccgagatcgcaccactgcagtccagcctgggcgacacagcaagactctgtctcaaaaaaaaaatagaaagtgccaggcatggtggctcacacctgtgattccagtgacttgggagactaagacaggaagattgctttagctcaggaatttgaggttgtagtgagctatgatcatgccactgcgctccagcctagctgacagtgagaccccatctttaaaaataagtcagaaagttattaatattaaataacatttacttcttacaggaaatgttggaagtgcctagttaaagtaatttagtaaattaaaaacaaatttcttgaattttctttcacatttcttcttccttacaatatacgttttcccccatacaaattgaattatatgattgtgatatgtgattacatatgcaaggtaagataatatgatgaacatgatgaatgaattgttaaaatgtttcaaatagagttttatttacagtttcaatattaattttacagtatcagtattaactcccaggttttaagttgtgctttgtggtgcgaaactgtaccataattcagttgtcttacacattttaattttctaattaaatgaatcatgaaattggtttctaatttttgttttaaaagtctgctttttaaatgtaatactaaaatgttaatgtattgttttacagaggttgtttgttttatgggccacctggaactggaaagactctggttgccagagcacttgccaatgagtgcagtcaaggggataaaagagtagcatttttcatgaggaaaggtgctgattgtctaagtaaatgggtaggagaatctgaaagacagctacgattgctgtttgatcaggtatgatattaacattttatatatctggatagttctgtaatctaggcagatgtgtgtgaggattagataaatcttacatttaatcagtgttctaaataaacccagaagaattagactatttctttctagattattttcttttatatgtcgagatgacactgacctacagtgaacagttttatagtaagaagggaaagaaataattggatcttagttgtttggagtcttaggtctcatgcatataggaagagagtggtaatctcatatttagagagatagtagtagtgaattatggctcagtatgggagttaaagactatttctgccctggagcggctttcattttcatatcccagattgtattgacagcacattgtaagataatactttctgatctactgaggcatattgctgcaaatgcttttaaatctctttttggaactctcccgaggttcttttttacttttatgtttatggaaatggataaaaactgtggcatcttgctaaataatgttttcccatcctgacttggaggaagactatgtcactgtcttctattctttgtcttgtttccatagttcaataaatatttttgcgtgtccaggaacgatagctatgtgaaatctaaggtatataaccagtggagtatatcttttgaatacttctggttgaaaatgcaattgaaaattaaaccatatatcattataatttagtttgaattcttaaaaccccgttactagaacttatgtttaaatttataaattataaatagttataaattataaataaattgagactgaggcaggaaaatcacttgaacccaggaggcagaggttgcactgagccaagatcacgccactgcactccagcctgggtgacagtgagactccatctcaaaaaaaaaaaaaaattatatataaattctggtaagtaagtttgaagaaaaaccgattcaaatagtatatattcagctttataaattctgttaagcatatttgaatgagaatttattaaaatggtttatattaagtctacgtgtttgaggctgtttatgctaacaaatgaccactccacctactttctaggcctatcagatgcgcccatcaattattttttttgacgaaattgatggt

SEQ ID NO: 131468 - DNA, 1081 bp, Homo sapiens
tttttagtagagaccaaatcttgccaagttgctcgaatgatttttagtggagacaatgtcccgctacgttgtgcttgaacacctgtcaagtgatccttccccctcggtctcctaaagtgttgggattacaggtgtgagccaccacacccagccccaaatattctaataccctcttaatcccacctttctctttgagaataactgatttatatcaagactaagaagtcaccctgccttctcctgtctccatgaacatttgatattcagctctgccacagtctttagtcttttttcctttcctctcagttgtttaagtcttttattccatttgaaagattcagcgaacaaagtttatgtcagtgggtcagcagatgtattaattttatgataaactttttggagcattaggtatttctgatgcttttcttatgccttttctttttcctgcccttccttatcatgatttcaattttgttttttactttaggcgaaggcatgcaatccacagtagtgactcgacttcatcttcctcctctgaagatgaacagcactttgagaggcggaggaaaaggagtcgtaatagggctatcaataggtaagtgccatattgatgcctttttaaactagcagacacattttgtaaaaattgctaagaaaacagaataatttgggtataagtataggctggctgattaaaaagttgcacaacaggttaatgtataaactagaatgctgtcttgttagaattatctacagttgaatcagaataacaggttagaacatatgactgatttcttgactttttttttttttttttgagacagggcctggttctgttgcccaggctggagtacagtggcgtgatcttggctcactgcaaccaccacctcccgggttcacacgactctcctgcctcagcctcctgagtagctggggttacaggtgtgcatcaccacacctggctcatttttgtagttttaatagagatgaggtttcgccatgttggccaggctggtcttgaactactggcctcaagttatccacccgcctcagcctcccaaagctatggaattacagctgt

SEQ ID NO: 131469 - DNA, 1125 bp, Homo sapiens
cttcatagaatgatttggggaggattccctctttctctaccttgtggaatagtgtttacaatgtttttaaactgaagtaatgacctttctacagtatagagtaattgctaagaacctgggcccatgactaggactgtctaggcttggagctcagctctactagttattagcggcctttggcaagttacttaactctgtttcagttttttttttatctgtaaagtgaggatagtaggacctatctcatagtattgtgagaattagatgagttaatacatgtaaagcatttaaaatagtgtctgccatacattaagtgcggtatgtatttgctattataactgtacttcgatgtttaaaaataatctccattttgcaaatcaaatgtcagaaatttcatgttggtccacaggttgtgttattgtttgcttttaactttattggtttatgaaattaaaaaactggaaatcatcagtatagtaatgtatagaatgcagattttttgaataaacatataggtttgaattctgacactatcaatgacagattctgatattttgagtaaattatttaacctggaagccacactggccctaactgtaaattgagcctactaataatccacttttccaaaattttaattaagattaaatactatatcaagtacatggtacagaaagcagtcagttaatgttagtcttttttattaattgggaggttagtctgaattctgtgactacatagtgagttcacataaaattatgtgaatacattaaagtctaatattcatggtaataatgaataagttagtttttcatataaagttgcagacttgtactggatataataattttagtttcaggctgatcacaaagatggtcttggtgtatttgggtaggtggatgggtgaaagattattttctcatttatttctgtgtttccacaaccccttatccaaaacccttggaaaaccatttgtgtttcagaattcagactttttggctggatttacagataacacacaacatatgtagtgtggcaacattaacatctctagggtctccaagccagcactgtgtggtcaaatacattaattaataattctgtagtaaaacatatgaataatca

SEQ ID NO: 131470 - DNA, 2075 bp, Homo sapiens
tatatatacaaatatatatatatatttcttttttttagaacctcgtcaccagagaaagcccaacatattttatagtggcccagcttctcctgcaagaccaagataccgattatcttccgcaggaccaagaagtccttactgtaaacgaatgaacaggtttggttctgatatagtgattgatttatgacaacataattgtttttatgttagggctggactctagactttcaggattgggtgtattaggataaaattctagaattgtgtatttgggagagcttagtttctatacctttagtagtctaatccccagtaccactgactagtttttgcttttgcttccactaataggaggtgttagtaactaccgtagtaaggtagtttattccatttttccacactttaataatagagcaaccttagactcagggtttactgtagtcctggctctgtgttaagcattttacgtagattgtttcatttaatcttcacattaagttagaatataggtttagtcttttctttgcatactatcacagatgcattttcctaccatgtcagatgttctaagctacatggcctctagacctttcatgactctggttatctttttctggatctattttataatttattcctcttctgttgtaggaaacatttattttctttgactattcaatatttgtggatttcttttccttctacatcccaacagttgttcattggtcaaatttaagtccaaagagataattcttctatttttattttatttatttattttggggagggtgggggcggagcagagtcttgctgtgttccccaggccggagtgcagtggcacgatcttggcttactgcaacctctgcctcctgggttcaagcgattctcctgcttcagcctcccaagtagctgggactacaggtacctgccactacacccagctgatttttgtatttttagtagagacgggttttcaccatgttggccaggctggtctcaaactcttgacctcaagtgatccactcgcctcagcttcccaaagtgctgggattacaggtgtgtgccaccacacccggtcaaagagataattcttgatacttcctcatcaatgcattggaataatcattttggtagttcatgaatgagagagaagactaagaaaccaggaaaaaaattttatttgtatggggaatggtaatttttttcccttaatattagaattttctcagaagtaagaccgaagccttaggatatttcagttatttgaacagttcttggaagttttctcctagagacagaccatctgatcatgttttggtcatggaagcagcacctttgtaagtgctgaaggttaatttctttcaggaaaaataaaaaatactatttgtgtccctaggtcttttcatttcattgtaggaatcacaagtgtacatctagatttcttatttcatcatcctatttcacatgaccagggtccagaaggatggaggatcgggaagacaaactcagtctctcagggcttttcaagattaattgcacttgaaaggaggctgcacatcagtattctcacaggccccttagaatgtaaagacctctattttggtggtgaaatgtaatgatcttcagaaaaggagaggaaggtatagtgttccctagaatccccaccaccaccaggcacaggaccaaggcactgttatggttacctaactcaaggggtggatctctgtttgatccagcagtactaagagggtggcagctactttgggatcttatttcttctcccgttttgttttgtttaagaggaaatctcactctctcgcccaggctggagtgcagtggcgcgatctcggctcactgcaacctccgcttcctgggttcaagcgattcttctgcctcagccccccgagtagctgggatcacaggcgtctgccaccatgccccgctaatttttttgtatttttagtagagacggggttttcaccatataggccaggctggtctcaaattcctgacctcaggtgatccacccaccttggcctcccaagtggtgggattgcaggcatgagccactgcac

SEQ ID NO: 131471 - DNA, 2313 bp, Homo sapiens
ttagtgtgtattatctacagttttatataaatggaatcatacagtatttattctttgtttggcttcttgcaactcatcataattgctttgagaatccatgtggtcacttttttgttgatgagtagtattccattatatggatataccacaatttatctcttcaccttttgatggacttgggttgtttctggtttggggctatcacaaagctgctttgaacattcatgtacaagtctttgtattacatatctttcctcttctcctgggagtaggtgggctcaatcttatggtaggtgtatgttttaactttatttttgttttctgatgtttttaagaaagctaagtttaagatactgtaattttgttacatgaaagtatagcttttcaattgttcattttagaattgttttataaatactattatttcaaatgtttctatttatttttatgtatgcatttgtgaagacaaagtgattccagttactcggtcattgagggctagaaacatcgttcaaagtacagaacacttacatgaagataatggtgatgttgaagtgcgtcgaagttgtaggattagaagtcgttatagtggtgtaaaccagtccatgctgtttgacaaacttataactaagtaagtaaaaattccttagatcaagatgatttatctgtcagagactttttgttggggaggaatcatggatttcaaccagcccaaacatttaatgcattctactacgtaaagcgtacaggagaatgattatcagaggtctttgtgacaattctgtatatgtctctattcttggaaagaaattttaaaatatttttatacaagtaaatcaatgcttcttataaaaatatttaaaaccttagtgccaaaagtttgcaatggaagaaaaataaagtttttaaaattctgctactcttttacaattttcacttacatttatatcttttttttaaagcactgctgaagctgtacttcaaaaaatggatgacatgaagaagatgcgtagacagcgaatgagagaacttgaagacttgggagtgtttaatgaaacagaagaagtaaatatattcttccattaagggaatgatttaatatccagtttaatttttttatagtacctaatccatttttcattaaatatctactttttccagcatttatttgatcagtcattagttactgctggaaatgtaagagtttatggctgtaaatatcttaattttaaacaagattggaggatccaacttaatttttttaataaatagattccaaatgttaatggcttttatttaaacatttttagagcaatcttaatatgtacacaagaggaaaacagaaagatattcaaagaactgatgaagaaacaactgataatcaagaaggcagtgtgggttagtctcttctcttgttctgtcttctgggattgaatttaagaactttttatttagtagaaaatagcctttttagctagaaggtgtgacatttatggtagtttgtgagagatcagaggattggtaacttaaaagtggggaaaggggagagcttaagaggatagtatgttttgtttgggaaagtaactgaaatcaacaatctaaagccaataatattggtctgcttatgtaatacatccactatggacaacacactgtatatctcttttttagtttaaaggtgattaaagttatgttttgctattccatttaggacttaattaccataatctattagaacttatcttaagtgaaaatcagttttctgaaatgcattttaaatgtttggtgagcatgttttaccataatcataagtagattgagttatgcagcgtgtaactccatgacagccagatgggctgggtgaaatgtcaaacttaagtttagaaagcaaaagcttaatgaggaaatttgaaaacttgtcaaaaagttatgttaacttggaagcttaagtttagtcacctacattaatgaaattcatggaaagactataaattttagtttggtgcttgcttaacagtagccttcaaacttctttctctacttccttttttccttccttgtgtttttctgcagttttttaatgttggaaaagaattacaaatacttcccatgaacaatctaggagtagataagtttggtttttttttgttgtttttttttttttaggagtagataagttttaaaagggtggatctttctctcccaactcacctatgttaaaaattgttaacattttgctgagtatctttctggaagtaaggatctcttaattgtagagtcatctgaagagggtgaagaccaagaacatgaaga

SEQ ID NO: 131472 - DNA, 1109 bp, Homo sapiens
tgggcaaaatatacagtaataactctttttcattgtttaagccaaaattataattctgatggaccagttattttgaggttgctgctggtggttaggtgacagtattttggtgagtctgtatctttcttaggtctttctaacttctatagccttaaaataaatgagtacctactataataaactattgcaacttttcgtcagtggtggaaaacttcactctctagactactttttataaagtggttatgaactacttgttatgaactataaaccagtaaatcttatattagctgcttcatagacattgctgatatttgtttatcatgaaatggtttttctagatactaacttgtagtttcttggggagatacaaaatgattctgcacaaaaagcagtttttactaacttgtaatcagagaatactctttggaggaatttaaattggagttttgtaaagaaaaacttagatggctttcttaatttttcttaaaggatgggtcatcagttaaggaagttgaaacctaccaccggacacgtgctttaagatctttgagaaaagatgcacagaattcttcagattctagttttgagaagaatgtggaaataacggagcaacttgctaatggcaggcattttacaaggtaatacaaggtggttgaacactaattcaaaatagttttaaagcagtaatttaggatttgctttaatttttgaagtgtatttttgactggtcatcaaggttctagggctataaaatgtagtttatttgaaaataaatgatcacaagtgagtatgactaaattaaaaattaatacgtggccaggcacggtggctcacacctgtaatcccagcactttgggaggccgaggcagacagatcacctgaggtcaggagttcaagaccagcctgaccaacatggagaaaccccgtctctactaaaaatacaaataattagccgggtgtagtggcgggcgcctgtaatcccagctactcgggaggctgaggcaggagaatggcgtgaacccaggaggcggagcttgcagtgagctgagatcgcgccactgcacttcagcctgggcgacagagcgagactgtctcaaaaaaatata

SEQ ID NO: 131473 - DNA, 1060 bp, Homo sapiens
ttttttgagttggagtcttgctctgttgtccaggctagagtgcagtggtgtgatctttggctcactgcaacttctgtctctcaggttcgagcaattctcctgcctcagcctcccaagtagccgggattacaggcacccgccaccatgcctggctaattttagtatttttagtagagacggggtttcaccatattggtcaggctggtctctctgccaggctggtctcgaactcctgacctcgtgatccgcccgcctcggcctcccaaagtgctgggattactggcctgagccaccacgcctggcctttgtcaaaggttcttaccttgtaagtggctgagttagaatttcagctgtattacaagttgctgggcccaaaactcatagaatattgacatattttatcagttataaaatgcctccatgtacaagcactgctaggggaggtaattagctctgtgtggagaggggtttacacacagtataggttgaataccagcttgttgggatgttttagaggagattcagacattagccagttgttggatgacatggggtttaaggtcttttccaactttttgatgtcatcatcagtattttgttcaaatttaaaagacacatagaatgttctctaatcttgattaaacaattattttatttcagtgaagaaaatatttggaagctctgtgaatacatcaaaaaccatgaccagtatcctttagaagaatgttatgctgtcttcatatctaatgagaggaagatggtaagttggtgagtgattgcagaaagaaaacaagagatttaggatgacattagaagctaaattaaaaaaaaaaaagctaaatatagcatgggtgtagtactcttctgaagtgtgctttattaaatacagcaacatttaaaagcttgcttttgaatgagatttttttccttacaaggcacgattgagttagaagagttgagtcccttctgtcgcccaggctggagtgcagtggcgtgattcttggctcactgcaacctccacctcccgggttcaagcgattctcctgcctcagcctcccaa

SEQ ID NO: 131474 - DNA, 1035 bp, Homo sapiens
agcctcccgagtagctgggattacaggcatgcgccactatgcctggctatttttttttttgtatttttagtaaagacggggtttctccatgttggtcgggctggtctcaaatgcctgacctcaggtgatccgcccgcctaggcctcccaaagtgttgggattacaggcatgagccaccgtgcccagccttttaaaattttatttttgtgtgtggagaccgagtcttgctgtcacccaggctggagtgcaatggctcgatcttagctcactgcaacctctgcctcctgggttcaagagatcctcctgcctcagcctcccaagtagctgggattacaggcatctgccatcatgcccagctaattttcatatttttagtagagacagggtttcatcatgttggccaggctggtcttgaactcctgaccttaagtgatccaccggcgttggcctcccaaagtgctaggattacaggtgtgagccactgtgcctgaccaataaatggatgttattaaaagcctggcctgaacagatacctgctgtaaagctcagggccaaagccacattctccctggactgccagggtaaaagacatagttcattctctggtgctaggctgagtggtcagcttggagcaaaggggaaaagtatactgtgagctcctgctctcaatatcagacactagacatggtgctttccatatctgcgtttgtgacaagaggctggaatgaggtgcctgccaagaatgtgagagaactaattaaataaatccatggtgttctttgctctctgcaaaagtcattcataacgtgcttttcacaccaaaaggtggaagagtagggcttggagttaaggctgaagggactgcagacaaaaccggtttgaaaaaggacaagatcatctaaaaaaggaatagaatctagtcaacgggaataattcaaagcacaagactttagcagcagttttctagcattatcctgagatccagtggagtggcggacttgatgttccagacccctttggtgacaggagttgttc

SEQ ID NO: 131475 - DNA, 1003 bp, Homo sapiens
ttacttggtatgctatacccttgtagggctgttgtgaagattacaggacacaacgtaatgtatgtaacaaacttatcaaaggcccaggtccatgataagcatcacaattaattccaggtattatttacatgtgtaagcaaaataatgctggtttttcatataagtaggtgatgctactcatcctcttgacgtattaataagacacgcagcacttaatgctcttaagtatctaattatttgaaaagaattgaatagcagtagtgatgattggtgctaaatatatttatattatgcagcatttcagtgaggctgaagatacaataatggtgacagttgattgggttagagagtttgtaaacaagtaaaggaaactggtctacactgagataaagtctgcaatgttgaccgtattaaccattgcttcatagagtctataaaatgaccatataacgtatgtaacaaatattgcaccaaatgcctgctttctcagactcaaagcctgtagggacacaatattaggtaagacttaatccttttgctcatggaatttacagtctagtagagaattaaaaataaaaagaaatctttgcaaattatgataagtgccaccaagaaaataatcaaagagttaagatacagagtaatggagttgggacatggggaggagggtctggatcctactttgtatggggtagtaaagaaaggcttcctgtagtaggtgacatttaagaccagatgatgggaaagaacctaggaagagggaacaacacacacaaaagctctgaggtggggaagagcttgacaagttcgaggagctggaggattgttacccatataatggttgggttcagttgcttggtgggtgaacatctttacagatgaagaaatgaaagtacagacaaggaatttgcaagagtagcaactgacatttgaacctaaatcaatatgattccatataacatatgttcttagttggtatgctatacccttgtagggctattgt

SEQ ID NO: 131476 - DNA, 1033 bp, Homo sapiens
ttctggatctcttactcatcgtgaaaggcagacgctctaagtctaaagtctagggtaggagtttccattctttggaaaaccaaagatggttactcttcttaatgaaactgagaagaaggtatctacagaaaacactgaatttaaacaaattatgaccttgtttgttgaagccatcaaggacccaagatatatcaaagaacaacatctctgtattggcctacaggttcagagtgttttgaggtctgtttaagcactaataggattttaggccagcatccagtcagaagagatagttcacagactcagagttggaaacagattaaaaaaaaaaaaaagatgtcaacatagaaaatgatgatagagtttagttaaaaaaattcacacataaaattacagttaaaaaaattcacacataaaatagagtgtttgcatagcaagacattattgcccttcagcctggcagaaaaacataaactcaggtgtatattttataataaacattgtattgaatgctaagaatgatacactgttgaacatctcctgaatggtttgccttcttgtaaatcataccaattgtttagacaattgaaattccaagctctttctcttctcccatataaaaacaacagaaacaggaggctgttagtagcaagctcctcatgggaaagggtatgtgaatccacaaagacgagaactatggcaatagcataatacacacccgctaccttactgcccaagtgctagtagaacctgctctagtgttcagagttttgcagtacaaacccagtccctctgaaatacgtcttccaagccacttcaatgtaaacctgatcatcattaaacaaaaatcatctcacaactgatacattggggatgctttcacctaatagcttttgttcatttctgccatttgccctcccattcaactgatttgtctgctcaaagtaacagcattgagtgataatgcaatctagtttaaaatgccattggatttttttttttctggatcttgctctagtgtgagcactcctga

SEQ ID NO: 131477 - DNA, 1136 bp, Homo sapiens
acaggatgatagcagctcatacacacctgcattgtagtatatgtgagagcagagggagggagaaattatcctgggagagttggaaggatttttaaggcaggcacttaaattgggccttggaggacgaataagagttaaataagagggaataaagatttttccagggggagggaaagtcattttacaaagcttggatgagtgaaagaacatgtctcatgagtagcaagtgactgtatcaccagagtttggactgacatgtttggagttgaagttttttgagtgcgcggggctggtagcagatgagcctggaaaagtggtcagggccagattttgaaggtgcttgtgtgctttgttttgttggactttatcctccagacaagatgggtttatcagagatgtttcaacaagagtgacatgaggtttttgaaagttaattctcgatttttttagtctgttttactcaattgtttaatagatatttattgaccacctactaggtgctgtgcgttgctctaggtgcaggtaatttgcaacagtcaacaagacaaagactgccttcatggagcttacattttactaaagaaagacgtaaacaaataaatgaataaatacgtaacatagcagatggttttaagtcttacgaaagtagtgatatgggctacagataacgcactgctgctctggtcatagattgaccttcgcttcctcccattatacttggtcgagagtgaaattcagttttctgttggcactcggcagtggcatttttgggaagtttggaatggtggcggtgatggtatataaggattatttatttatttttatttttattttcatttctttgagacagagtctcctgttgcccaggctggagtgcagtggtgtgatctccgctcactgcaaactctgcttcttgggttcaagcgattctcctgcctcagcctcccgagtagctggtactacaggtgcgcgccaccacgcccagctaatttttgtatttttagtagagacggggtttcatcatgttggccaggctggtctcgatatcttgacctcatgatccgcccgtctcggccttccaaagtgctgggattacaggcgtgagccacagtgcccagccagtatgaggattgtta

SEQ ID NO: 131478 - DNA, 2018 bp, Homo sapiens
aatgccttctaatgaggccacaggagattgcatttttaagaaacaatcttacgtacatttaaatgtaaattttccagaaatcctaatctttaataattataaccctcagctacaattatcaaagagggatgtatctgtccttagttgccattcttaaatttaaataaatgtaggggcaggaaaccatctatccaaccacttaatatagcagtcaggaaggaaatctttataagcagaacttagttctttgttaaccaaagtgaagttacactcacctaccggtttttatttgatattaaatacttcggataattttagtaaactcttttagaaaggcagactgaaaatacatagaatttttgctctgaatactgtagcaggaaagttagtataataacatttaagaaaatattttttatttaattctgcaaattagagatgccaggataaaaatgggggtcgtggttttaaagtgtgttatgggaaaaaatagtactattgttcagtttggaagttgtttaaaatctttttgaaatttctcctagagtcttggaaattcacagagagaatatgaaaagcaggttgtcctgtacagtatccgcaatcagttacgatatagaaataacttaggtaagtagagccatgtttatattggggtggaactgaccactactctttcacattcgtaaatctttcttttcaatacatatttcatagtactgagattattccatgtacagactttaagaaactctacactgatccattccacctaacaacaatttgtattagcaagtagatttttcattctaattctgataaaaattatttttagagtactgtttatggactcattttatctataaaataatcttaattcaaatgtcctctttttgcctgaggtaagaaaatatgccataaaagaaaaagtatattagttcttagtaatttttgactttgggttgtctccataaattttccaaataatatgaaaaactttataataattgggacacattttaaacatagttcattccatgatttttttttcttctttctaaaaaaaaatttgtttatttatcagattattttggttagtctattctgttgccctggtagtctttcactcctgtttgttactcttattttaagcataatatttctgacattgtttttcttcatgaacattttccatgaaagtcagagggctttttacatttaaaaactaaaaaagcagcaaataatttttaaaaatagacttgacttcattgaaaacgagcattcagtttggctctcttgtaaggtagtagaatacaattcaataaagctctgttttgtacctttttggggggcatgctggtagttccatgcttgttttctcatttggcaagaattattctctactaatctgtcctattattcattttacttctatactctaaaatctatttcatgtgatatatttctttgttccaacttagaatattttatttgttctcttgtaatttacatacttttcttttaaattactgttggtttgtaaagtgttcatagttaatatataactataagaaacctgaaaaaaactggagaatttccctcttttgtgcagttaaacatgtcaagaaagatgaacgcagatactatgaggaactgctaaagtacagccgagatcatctcatgctgtacccttaccatctatcggatattatggtgaaaggcttgaggataacaccattttcatattatactgggattatggaggtgagtttacagtgtgggtgagccagtgggaatgggatgggactacatgtctgggactttttgcagatgttcaccagctcttcagctgtcgtctgcggtggacactctttcagaacttatagtgtaaaaaggactattggtggcttgttaactgtttgagccacactgtacaagtacttatccttattgatgtttttacattgggaagctgtctatttctcttctggtcttgaaggtgctattgaccctttgtg

SEQ ID NO: 131479 - DNA, 1739 bp, Homo sapiens
acatagaatttttattttttagtttattttacaatttttaattatagcttataattttttaaaaagtaacattgttttcctgaagaaaaggaaacttaaatttaaaatttaaaatgatcttagtagactagaatattggtgagtttttgagatactctttaatggtgagggagacttgacttggttcaagtacagttatctggggatgttaattagatagaagcttcgtgtaaagtaacatgatgccacagctacctacaacaataatactggctaacacttttgaatacctgctgtgtgctagatgtgccaagctctattacaagtgctttttatattgtcttacttaattctcataacagccccagaggtatgtattatttgtacccccatttcacagatgaggaaagtgagcacagaacaattaagtaacagctcatgtcttagtggtagtaaaggtccaggattttttggcagttcaccatgaaacttgtactcttaatcactgcaaagaactgttgtactgaagtgataggtgcttttatggggcgatagtgtcaagatcaagagagttgatattcccagtggtcagaccacatcttagaagggatattggtttagaggaaaggggtggagtaatgagggcacctagagaccaggttgtatttatgcgtagctgaagcaatggaaatgagtatgtgggcttctttttggtctgcatttaattttctccagggtacgtactaaatccattgagtggaaggcttagaaattttacttcagtctaaagtacctcttaatggaactctcaaactgtatcataataagctagtgaactttcctgttactgacaatattcatgtagagtttgactaaatttctggctagagagattctgaattggcagatggatctaattccaattcaatcacaaggaacaaatattactaactagcaaatgttggtacttacagtaagtttgttctctacattctgttggtatgttgcatattttggcaccttaattgatggctatgtgcacagttttttgtttgaattatagagtgataaatatgtagttcattgagctaatgacatgtaatcactggtttcaacataaataaatttcaggagacttgtgaattagttaatttggacagaacttaattaaaaatattttgcttttcttagatatgcactttgcctgagaaatgcgctgttgataagatcatcgattcaggccctcaactctctggatcactagattacaatgtagtacatagtaagtggttagtagaaatggtcttttgtcaacataaaaacttgttttaaaccatcaataattactagcaattacttatcaagtaggtacaaatagtactagtttctaaggcatgttattgtttgaaatgtgaccttagtcttttgttttccagtgtggctataattagtcacatacactagaaatttatgcaactgaatgataagaaaaattttgtacttcagagtatatgcaggaaaccgagatttaaaaactttaattctttttctcttctattttactttttctttcgtcacatagcattcatttgtaagaatctttacagaaagccaggaattagtttttttaaaaaaatcactgttgtgtagtgttccatctaaaacaaggtacttttgtttcttcaggtttgtataacaaaggatttatttatctggatgtaccaatatctgatgacagt

SEQ ID NO: 131480 - DNA, 2095 bp, Homo sapiens
ctagcactgtttcaaatttcttcatgtagagtcaccttactctttttgcttagatacaaattttggcctaggaaaatttctaatctcatagtgccttggtttctttatctctcaaaatagggggtaactggccaagcacagtggctcacacctgtaatcccagtactttgggaagccaaggtatgagaattgcttgagccctggagttcgagaccagcctgggcaatataaagggaccccttctctacaaaaataaaaatgaaaagaattagtcatgcgtgttggcatgtggctgtagtcccagctacttgggggactggggcaagaggattgcttgagcctgggaggtcgaagctgcagtaagccacaatccccaccctgcattccagcctaggtgacagagtgagaccctgtctcaataaataaataaataaatagatacatttaaaaataggggtaattatactactgtacaacccacggagttaggaggattaaatgaaaatgtatatataaagtacttggtaatagcctagcacttagtaagcattcaataaatgctattattatttacatagctgatagtgtagggaaataattaatgttgtcaaagacgggatttctaaaatatttctaaaaagaaaccattgatcattaaaagtacctagatgactagaaatataggtagtactaaattagaaaatgacatgagccagatctgtaaagtgaataacctatcctcagatgtatgtacattgtagtttttcagtgtctcagttttgaccatttgaattttgtcttatttttcactattaggaataatttaaatttttgggtacaattagatgatattagggccaggggacataaagatacccaaatgctactatggcctaggcattcctccttctcaggatattttcagggtgaatgtacccacaggggagaatggcaaaggaaagcatagagcttgttttttattggctgggcagagcactttggtaaatcagattagaacatttggaccaaagagatagaagtgagtatgaatgaacattcaggtggagagtgatggttgggctgcccactgtgctaaaggggatcttgaccctgttgccactgaggcccactggggaggataccagaaaagaaagccccaaagaacgagttagcccagtgacttctggtaaacatgatggtcatgcagatgaatttccatttttaggatggagtagggatgatggggagacagagccaatactttgcatccacctggttttcgtatagcgtagcaactctttcttgcagtcatttgcttttcagctttggcccactcacccctgctgcctatgaggcatcaaaaacacatgtatcagaaaccctttgcaggctcccccattctgaagcagcccctgttccctcacccttctaccaagtccatgtcatccagcatttctgagttacctgtctcagtaactctgagttccatggtgaattaaatgaactctgtggatttcgtgtctaccttcagagtcttctctgtgtacgtattgtagagtttcagaaaacttgctatggagtggataaataaatcaaaagctgcattcagtccctaagttagaggtttctttttttaattagatatgtaaattatactttcttgttttataaaatctgtaccactgagaaaaatctcttctgtttgttttagttccacctcttgaaggttttgtaatgaatcgagtgcaaggtgattattttgaaactctactctataagatatttgtttcaatagatgagcacacaaatgttgcagaggtaagtttgacaacgtctcatgaaaatataatctcaagattgtaagtttgtgtaaagtaagtaaagttatttaatatggtagtatctttttaaaatctccatgtggggagatcataccattattacacttaaatgtcattattcttaacgttcttataaatgtatattaaaatttaagttaataatttatagtttggttaactttttatatgactttttgtactaaagtattgtagactatattgatctatccaggaattttattttaaatgagacg

SEQ ID NO: 131481 - DNA, 1328 bp, Homo sapiens
ccaaacaaattacaacaacacgggcaccaattataatgcttgtagggtgcaaagaggaagagacccttaattggctagagaggtttgggaagccttcacagagaagatgttatttgagctaagaatgaagaagagcctgccagctggtcagggaaggaaagccatttcagcccgagagaatagtgaggctaagcccaaagggaaacacagcatagtggacaaggcctagggttaaatgctttttaatattctttgcgcttcaaaataggtatggctggaacttcttatggctataatagtgcctttttaaaattatgtactttctggttatcaaataaagctgaaatgaaatactttcactccaaatggtaagcaaagaataatttccatttacttgattttaaattatggtgtttttcagctgacacagccagtgtaagcagcctgagtctgtctacaggacacacgaagcgcatcgcattcctgtttgactccactcttactgccttcttaatgatgggaaatctttcaccagtaagcccaattcttgtttaaatatgaaggtgtttaaaataaatactagatataaaataatttaatgcttttatatcttttttaaagtactacatttattcccgaagcacaactgacttagaggagtataataactttcagggaaggtccttttgtaattggaagaattagcccctcaccccccaatccttaagtttaaatatatttgaaaggataatataaatatttgatagtatgcttagcataaaaagggagaagtagaactttaatattttgtttctttttttcagaacttgaaaagtcatgcagtcacaatgtttgaagtaggcaaactctcagatgagtctctggacagctttcttatagaactagaaaaggtaaatgtagattgcatgtaaggggatgttagggcatttggaatctgtccttgcttgacagaatgccaattatacagtctgttgatttggatgggctttcagtgtattcttgctcgttcctacctcattccccaaattagtactcttacagtcatttagacttaaacatattgagtgggtgaattgattttgtgatttttaaagtgatatgtctacctcatctaattcttaacataatttgagataatgaagaaatggggtatagaaattttagtctgtaatgttttaagttgaatttttgctaaaatagcctttcaattttttttctggtatgactctctaagatcacctcttaagcagtttgatttgaagtttttgttccatttaccttgaatctggaacaatatccctgggtat

SEQ ID NO: 131482 - DNA, 1034 bp, Homo sapiens
ttttcatcacaaagtcattcttgggaaagcctttcagtctgaggcttagtttttaaagtggattcttagctattttttaagtagtttgatcttaagattgatttcttaaatgtatgcaaatctgatttagttattttcccgttggtagacctatcattccattttctgtgttgtttctgggatatatgtctctacttattaaaaggtgacttattcagacttattcagaagagcatacattaaactataaggccagtgaaggcaggggttttgtccattactctatccttatctcctagggaggtcatagtccataggaggcactaagtaaatctttgttgagtgaatttaagctgtgtgttcagcaatggtgaacagctatgttgaatcacagactccagtgtctcttgtaactggtaatacagaattgtgaacaaagttatgagaattataggtaaaactggtgaccttggagtactttcctagatggagcagaatacgggttttagagttgtttaagcactctatttgaatcatttggaacatgtaacatataatgctataacttagcattattcaattgctaaaattgttagtcttagttgaagtaatttctatctccatagatgtagtaaaattgggaactcaaccaagactgaggttaataacttgtttcggtattgcctgggcaaatttttgatttactacttttgaataatgtcttatatctctattatatgattattagagtgaatggcataaaagtggtatttttgttgcaaaatctattttctcttggtttaggttcagagcactggtgaaggagaagcacagagatattttgatcatgcacttactctgagaaacacaatactgtttctgcgtcataacaaagatctagttgcgcaaactgcacagccagaccaacccaattatggtatgataaatatatttaattttgaagacatgatcatatgaaacttttttctaagaaattaaacagatcatgctcacttatataatcatcacttacg

SEQ ID NO: 131483 - DNA, 1730 bp, Homo sapiens
gtacatataacatataaaatatgtattaactgttcgtattattggtaaggcttcgagtcagcagtaggctattagtagttaagtcattgggaagtctgaagttatatacagatttttgactgtgcacggcgtcagcctctgtaacttctctgttcaagggtcaacggtatgccactgttgtagagtggctctggatggagagaggaagtacggtaaaacaagtacatcttgttgcagtaaaaagtaacctgaagtagatgattatctgtctagaccagagaataaaacattttagctttgcatctcaaagtgtcttggtggtctcctaggaaatttggtacttcttaatagagttactttaccttaaaaagaaaatttaaaatcttaagtcagttatcaatattgcatcttcaacatttttgtttcacactctcagtcttttattctgtgtgtgtgcttgatcataactcaggttttcctctggatctcttacgctgtgaaagccttcttggtttggaccctgcaacttgcagcagagttctaaacaaaaattacacgctgcttgtttccatggctcccctcaccaatgaaatccggcctgtcagcagctgcacccctcaggtaaagacctacttggaagatccacttggtagtgtcatgagtcccatcagttttgttttcttctctatctgcagataccaactattaaaatcactgaatcatagaaagcaattttgtattttatgcctttgtaagatgatatgttcaatttgtggagtgtaattggtatattttatataagtatcacctagtgacttgtgacacattagattaaaatttattcatgtacagaatattttaaagagaatgttttaggatgctccagaaaggaagctggcatcattttgagagataagataaatttaattaggaaaagttaaatgtcttcgaagtggggctgtgattctgaataagccgaaaagaaaagatggtgcttgaaagctagaactctggttaactgtataatttatatgtgaaaattccttctggacttttacttaaaaaatatatatatatcagttgtattcatttgtatacttaacaaggaagttgtggcctgtgccattttcagagtggggattatgttgctgttcttcagtgctgcatcttacctgggttcctagacaatgcagggtttaatgatgtagcagaaaggaagggattcttgtacgcaggtaatttgcctatgttctagctgcctcagtgagcatcctgtcttcacaccaattttgtccttagtattcaacaagagatttgcatctaactaacctttttaaaataattctctgtgcacaccaccgaacctctcctattctttaacacaacctccagacatggtaggaatccatgaactactgcataaatggtaaaatggatggaagggtgggcgattcctcttgtgaaaattgtatgtgattaatgataataatagctaatactttaatatcgagcttattatattccaagtactgttttaagctttttgaacaaccttacaacatcctcttgaggtagattctttattgctattttatagattgagcaaaatgaggcacagagagcttaagtaaccttcctgaggtgatatggctggaagggcaaaaccaagattccaaactaggcagtcttctccagagtgcattctcttaattgcagtgacaagacataat

SEQ ID NO: 131484 - DNA, 2390 bp, Homo sapiens
aacaaatctttcttgaataaagtaaaatgagagaggtggtttccaaggtcttttctgtaggtggtactctgtagatcaagctaagttaggttttttttttttttggatgggggctagtgcaaaatatggatagaaaaacaaatcagcagacagtacctgtttttatttatttattgttttgagacacggtctcactctgtcacccaggctgaagtccgtggcatgatcacagctcactgcagcctcgacttcccctgggcacaagagatcctcctgccttagcctccagagtagctgggactacaagctcacgccaccatgcctggctaattttttatagagacagggtttcaccatgttgcccaggctggtctcaaactcctgggctcaagtgatctgcccgccttgacctccaaaagtgctgggattacaggtgtgagccaccacaccaggctgacagtactgtttttaaagtgtttgttaaggagttttgcttttgctaaagaaaaatgcctttttaattaaatttgatggaaataaatttaccttattggaatttaaacgtgttacaaattaagatttttggttaaaaccataatttattttagccatcaggtttaggaaataaaagagagctctcagaaatatatttaaatagttatatgaaacaacaaaaagagtatgctttcctttggatatatcagggtttcttgaatttgaataatgtatgggtctctcttaaagggaagaatttggagatcctcagtattaaatttctattgtaacagttctaaatacatgtagacataatgttaagttcttcatgcttcttgttattacacaactacaaattcaaatcaaattttggaattaaatataagcaaagctttaaaacaaaactcaaatgaacaatattaattgaatgtgatagatgaaactgaattatcatttgtaacatgagagtgaagtgggtagactcagattttttaaatttaatttttgaactaatagtacattcacatgattcaaaaataaaacgttattaaaaggtgtagagcctgggcgcggtggctcacacctgtaatcccagtactttgggaggctgaggcaggtggatcacctgaggtcaggagttcaagatgagcctggccaacatggagaaatccagtctctactaaaaatacaaaaaaatagttagccgggtgtggtggcgggcgcctgtaatctcagctactcaggaggctgaggcaggagaattgcttgaacctgggaggtggagattgcagtgagccaaaattgtgtcattgcactccagtctgagtaacagagcaagactctgttttaaaaaaaaaaaaaaaaaaaaaaaaaaaaaaagaggtataggtcgaaaagtatcactcccctgctaaccctatcaagtttccactccccatctctcctccaaatcagataatttcatctgttcatttctcctatatccttccagagtgtctttatgcatatgcaagtacctgcacacagatgtgccccttaccttttccatttagcaattggagatctttccattgcaggtcatagctttctttcatttatgaacctccattgaagatatgtctcctaatttagttaaccagtcccctgttggtggacattttggttgtttccaattatatgtaattatttatcgtagcaagtaattctgaatatattttatttcagggcaggtttttgagttttgcattcttagcctgtggtatgctatgtgattatggggattcttccaccacttttccctctcagaactctagctaacctttgtgtgaataaacttggcctcctcattcactcttcacttggctaacacctgatttgcctgttaaattggcctcctttttttgcattggcctatacattcaatttgagaaacattgccttatagattattatacacataagattgtcactgcttgctgaagaaaaatagaaaattgttgaaagaattttgatgaggtattaatatggaatataccattacatgacacaatcttatttacttttgaatatcagtgattggaaatgaaggtttcttgtataccttttaacttttgtttatgtttaggggcatggtctgcatgggataggagaaactgtccatgtcccatttccatttgatgaaacagaactacaaggaggtaccttttgaattgtatctattgacttttttttttttttaattattactcatgtcaacagtttggtggaaaacatggcaggaaatgaattcttgaaatttttaagttctaggttctttgctactaaagagtgttggcaaaaggtagttttttgtcatgtgctttgccatccacaaagaactgttagaataagacccg

SEQ ID NO: 131485 - DNA, 1568 bp, Homo sapiens
agtataaaagtagttctaagagttgtttaataaagtatgtttaagctgttggcgttgtgttattagaaactgttcattaatgtgatgtccgttctgtttgtagagttcactcgtgtcaatatgggtgttcataaagcattgcagatactaaggaacagagtggacttacagcatctctgtggatatgtcaccatgttgaatgcttccagccaacttgcagatagaaaactcagtgatgcttctgatgagagaggttagccaatagttggattctttggattaagataattggttttgagtttgacacagtgttaatatatgaaaagcagcagacctttgtggggatgctgaattattgaatactcaatattctttcactgaagcacgaggaaatattttggaacatcatttggacaaatgtcagttgttcaaatgaagaaaataggattggggtacagaatggtttgggacttttgggtgctctactgtcatatctgtgtttattaggctttattaggttagctttatagggtgatggtttcaaaactcaagtctctttatacaagtgtttccaaaattgacttaatagtttttccctttcaactttttctgtcaaaaggtaccattgtcttaattatctaggtctaaaatcttacctttgtctcattctttcctttttccactatgttcagttagtttccaagttctgtgaattaggctttagataagtctctcatgtccatttcttcccctttctcttcattttaaattctctgtgactgctcttcttgtctgggtcttgaactttaaaccttaaacatgtgctgttgcaaccattccctgcttagcctttctggcctctcctttctatctccagtctgtcctacatattgacaatagctaattttccttagatatcacttactttttttttttttaatttgaaaatccattttcaaatcaccttctcatgcttactagttgtttctgctctggcataatattggcatatatgtggtttgggttgccgtggtgccagttcttatccattgactctgggagatctttcattatctcccattgattgacagtattccatgagcctcttagtttgaaattctgaggaaatgtgattgattacttgccatccagtagattgggttggctcccattgagataggtacttactcctatctcatttgtctttggccaaatagttgactgccaaatattgcaggagcattttctagagaagagggctatgacttaagcagtcatttcaaagcgtatctactacagctctccttttttatgtcattcattccacaaacatttatggaatacctgcttaggtgctggagcaatttaataagaccaggccaggcatggccaggtacaggctcatgcctgtaattccagtcctctgggaggctaaagcaggagtattgcttgaggctagcagtttgagaccagtccgggcaatagagcaagaccctgtctctacaaaaaaaaaaaaaaaaaaaaaagaaacaaaaaagacaatgttgttccaaggatgaaaaccctag

SEQ ID NO: 131486 - DNA, 1058 bp, Homo sapiens
tgatttattggcagcttctgctaactgctagaatcctaatattgtgtatgccctttaattataaggagaacctgatttggcttctggctcagatgtaaatgggagtacagagtcatttgaaatggtcattgaggaagcaactatagattcagcaacaaagcaaacctctggtatggtgctaaaactttttccaattttattagactaatttctgaggtttaacttttatgttaaggcatttgcatgccatttgtctattcttattattcatacgacttttaaataagagttttctaggaagcctttttacatacttagaaaaataattcaagtattataaaattatgacttgaaaataatcttattcctgtggtaaatgttttgattcattctctcatcttacagatatcttgcaatactcttttttgggcaaatgactactttgaacattggatgaaagctatgtaccttctcagacacatgtttataccctaaaaatgcctatcctgtttagagattaactgacccccttcaatttcttcctcccctgccaagcccactggtggatatcagtggggcaggaggaatctatgaacttcaggttaagaaacccttgtcagttatatataatatatacataagtagatatatatgataaaaaaataagtttatgtatcctttcttaggtgccacaacagaagcagattgggttcctctcgagctgtgctttggaattccactgttcagttccgaattaaaccggaaagtttgtaggaaaattgctgcacatggcctttgcagaaaagagaggtgagggtttatattcgctgtcatattttcatatcaatttttaagctgtcagcaaatagttaccatatcttacttttattccacacatgagcacagtaattgttctgtatatatttgttgattgaatagagatcgctagtttaagggttttgctgtatttttcaaaattaaatttcactagatcagaaattagtcacaggcaaacattttgggcacatgttttgattatatttatttagtaatctagg

SEQ ID NO: 131487 - DNA, 3504 bp, Homo sapiens
tttgcacatattaatacctgtcattgattgctttgggctcacagtgtagatctttgcatctcctgtactgctttgcaatccataaacacttctcaggtaatcaaggtctctctttctcattagttatattaagtggttttggtaaagtgttgaatatcatttctcttgtttcttgatcttttaggaaggtgcttcaatattggatattcacacagagcccagtttttcaagtttgctttcacagtcatcgtgtgctgacatgggtgttccacttcctgcaaaaaacttaatatttaaagatggtgtcttatcagaatggagtggacggtcaccttcctcacttcttattgctaatctccatttgcaataatttggttacaccatttgttgctcacactttctgccttttttctttcttaacgttagctttatagtgtcagccactaaaaagcatcctgctgctgcagtgcaattcttgcttaactaatattaaaagttggggaacatattcatgttttctgaagttttgctcattattgcacatcttattgcgacaaagtgctttttagcagccagcactgtattttttaccttgagacaatctgcatttcttttataaaactaagtatatactttataggctttatgatgactgttatgtttataagcagtcactatgaaaattgcaatggtaattttatatgttagtttatcaaacataaatcttgtttaattttatattttgttacctatactttgggggatcaagggaagagatggaactcttcctctgaaaaggcttcttggtacttaaagtagtaaaactataaaacaataaacatccagtattgagagatgatatgatagggcattatgaattcctatgggtgtctgtaaattatgtatgtcagttggacattgtagaaggtatgtaaatcagcatagttgtgtataacttaaccttgatttataaggtcttaagattatgactattcattgacatctcatgagaagctttagaagactttctatttttaaacaccatttatatgtggacttctgttgtcactgactttgggctttatattttcatagagtctttatggaaaaaatagaatttattttccactcttgtagctatagctgctgcacactttcaccctgatttatttttttgtttcttagctttgatgttttcaaaccaaggattgtgattttaggttagaattacatattagaagcattaagactatgtctttggatcagaatgctttagtgataaacctactttgaagacatactcttaagcaatctggatcttaaatttatgtgaatacttttttagaaaatgataaagaaaaatggaattacttcaaagtgtttcttgagtcattgattcttttagcatctcaaatgttaattagaataattggaatcactttttagacttttcaagttaccttccttgggaagtttgtgcagtgttatagtttagtttagctcctcttacagggtaatggtttgctagtttaaaactgtaaccaaacgaactggtcagacaacatatatctaaaacacttaaaatgttaggaagtttgggaatgttataacctaaacgtttttgctggtaactttttgttatttatagatatttgtgtatttaacatacatacttcaggaaatatatgcctttcctaaaacttaaccatgcattcaataccatggcctatctatagaattgaatattttggaccatgttatctgtggcacagtcagtgctgtgtttgaggtaaatgcagtaacggttagttttctactttgtcttatagaaggtagaaaccatgtgtatgttatgtttgtctataaaagaaaaaatactaatattaaataatttcttacgactctgagtcactcacttatttttccaataattgatattgtacattcctagtgccattaggtatgtatgtatgtaacttttacagtttttcagctgaaagttgtaagtattttttttttttgatcggggctctttaatctcattttaatttcctttgtttgaactgtagttattttatttattcctatattaaccatctaaaccaactgtaatgacatgtacactaatacagaattgaacatttgtagttgttggcagtgaacccagttgttggtgaatttaaagcttaaaatatgggaatgatttgctgctatatttcctttgagagagaaaggaggaagaaatagaacctaatagtgatcatgaattttagggaaagtaccgaagaaccatggggtcccctctggtttcttgtgttgaatgaggcaagggtaatcatctgattccgagctgaagacctctggtcctcttaaggagggagagtgcatttttagagcttttagcaaaatgtgaaaagctgatgtttgcgccttgctttgtgaatttggctttgttttacttatacattaactcatgtaatctcttaaatcttacaagcattgatccatttcaacaaaaaggtaaatttaaaatgcagactttgttatttgccaaagaagattcatgaaaaatttacgtccaattattttgcaaatagttaatttcatttggctttttaccatgttccttcctttctttttcccgcttccttaatgtaatttaaaccctggcaaacattctttagaaaccaagaggaaagaaagaacaaatatcaaaaaagacatagaatttaatattgatacaatttcacctctaaaatggatttgaagaaatgcaactttatatcaaaaaatgtcatctgatttcctttgtttcttttttaaattatgtaatcagatgattttatgtttttttttcaggggagcggaatattggtttcttttacttgttgttttcagttttctctgccattcatgtttcttttttgtgttcagtgtttcaaatacaatttgtatttaaggattttaaaataccaaactgtaactgagtacagtggatcgttttctgttaggatgttaatattatacaatgaaatctataaagtgttgtcaatttgattattgacacatataacatgtttacaaataaactgtggtattgatcaagttactatgaaaatgtgtttaattttctgaaagttcctgtcttaattttaaatacaaccatggtttggtgctgtggctttcctgtacttaaaaaaaaaaaaaacccacaaaaaacttaattattttgtagtaatttcagatttacagaaactggcaaagatagtcagatgttccctgtacccttcactgagcttcccctagcgtggacaccttctgtaaactatggcaggtctatgaaaactcagaagttaaccctggtactagtattttctaaactgcacacttgattaggcttttaccagttttcccactaatgtctttttgttgtcaagatccagtccaggataccacatcgcatgtatttagttatcagtgtctcattagtctcctccaatataa

SEQ ID NO: 131488 - DNA, 1011 bp, Homo sapiens
ggggctcaggatggtcactatatttgtagcttgtaacagtcctaactggaaggttgactaagttgaaaccatataatctcattcataaaatggggatacttaagctgaataatttctgagatccttttagtttgacttagtttaaattgtttgattttaagaggagaatgagaaattcaaattttacacaggtatttctgatccatttggtcttatatccacaagatagacatatggacttcgaagaacttcaaaaaaagaacaggtttctacattatctagttgataaggataatctaatatagtcccataatgcacaacctcaattattatataaacacttaatgagaaaatatatggctaccagtgtctagacagggtcctgctcttttcctgtttgcaataaagctgagaagaattcatatacataagaaaaagaacacatggaaaattgattaaatgccaaagcagaagtaaaaaatggtatgagactctagaggaatgaacggaagcatttgacttgcaagaatgaggaagctgactcagaagatgggccttagagaatgaaaattatttctgttctattagagagaatggaggaagtgattccaggcagagggagcatgcgagcaaaaacagggaggcctggaaacacatgacttattcaggtcccagtgaggcataagcagaatgaaggggttgggtgatgaaaatactggcaaggagttaaatattaatcagattatggagaccttgaaggtcaggtaaatacagacacataggcactaggggaattacttgtttatatctgtatttaattatacatgattattaccaagtggcattattagcaagaggaattgatttgggtgagactggaggcagaggccagtcagagagatctgttgttttgggagagttatactgtgggcccaagctgggggaggcttgagcatgtgtagagggcttcagagtctgttacgccttcctgtacagctgttactatcataa

SEQ ID NO: 131489 - DNA, 1638 bp, Homo sapiens
tgtgtaatccccttcccatgaatctggtctgggtttatgacttgctttaactcatcaaatgcagcagaagtgacactgtgccagttctgagccttaagaagtactgtcagcttctgctttggtgcttccggatgctgtgatctgccatataaaaagtctaattaccttgctagaggggctatataaaaaggccttagaaaaaccctgccatctcagcatctcagcggagcccagcccccatccaactcacactgaattcagccaattagtgatcatcatcaagatcagcagaaaccttatccaactaagcccagtctgaatatcagagagtgagcaaatacaaaggttgttgttttaagccattaaatgttgggatggtttgttacacagtaatagataagtgaaatagacccaattaaaatagttgatccataagcatataacaaaactcattataacaatatctcaaaagcataagaagaaaattctttatggaaaataaacctttggtttcactgaagttaattgactaaattaactcaaccacaatttgagcataaatcacaattgaaaagactgactcggcagagtaaatggaaaaggctcaaagagccgactatatttagcatctacttgggtttggtgtgggatgcaagtgagttttaaaatcaggaaaaggaaaaaaccatcaagtcagagtagagcctagagatttgtttatgctttctcatgccagaaacttgagatcgctttccttctttgaggaagaaaagtatgatttgtaattttgcacagctgagaagaaatgtttccgctatccctccaaacctcactccctgccttccagccacatacagaaccaatgcagctcctcaaatgagcctctctgctttgttcatgttattcttcctgcttgtgttctgtttccccatccatccattaactgctaaacttcacccacttcacccacttggaaaatgaggtgaagcttccacttggggaaaatctttctgacaactgtccctctgtgccctcaagtaggctaatcacccctgccttgggacaccactgtactttgttttcacctgtattctttggctgtacaattattaggatggtttgtttgcttgtcctttactcctccttgaccataaatttctactagagacaggaagaaatcctactgagataagtatacgtggcatttattacatgcttataatgtggcctaacatcagtggttttcaaagttttggttgtatcaagggtgcctattaaaaatgcgtatttttagctgggtgtggggactcacgcctgtcatcccagcactttgggaggccaaggggggcggatcacctgaggtcaggagttcgagatcatcctggccaaccaggtgaaaccctatctccaccaaaaatacaaaaattagccaggcgtggtggtgggcacctgtaatcccagctacttgggagactgaggcaggagaatggcttgaacctgggaggtggaggttgcagtgagctgagattgcgccattgcagtccagcctgggcgacagagtgagtctccgtctcaaaaaaaaaaaaaaaaaaaaaaagcatattttcaacaaccagccccagatagcctcattcattt

SEQ ID NO: 131490 - DNA, 1829 bp, Homo sapiens
accttgcctgtgactttagaaagggcttttgattattgttttttcttcttgctcttgaaagtaatctggtcccagggaattactggtttaactgaacatctccagaattatttaaggtgtcaaaatatataaccttcacattgaaagataattttaatttatgggcataataaaaatttgaatcattcaggtaattttcaaaaaatggagaccatttgtctttaactgaaggtatatgtttaagatcatagtctaccctagtatggtgctttgccacaaagtgatttctgaagaatggttctttttaagataatgacttcatatgatcattgtttcatgttacttgccacaaataactttaatttaggttgaaactggaactgtttgtttctcatattagctacttctctattaggagcacaagaaccatagttaaatgcaacatgagctactttagtcctgtttgtttaaatttgtgttgtccatgtattatgatttattaacttgttgatgcatgtaaattgggtgcattttgttgccatgtatgttaaatggtgaccaatgtttttacaaaggaattgaacaaaaaaagtatcttttaagaaatttggaatgtggttttgattttgaaatttgatttcttactaatctcagagggccttggtatattctgttactaaagcaaacaggattaatgaatacggatttgttacaaggtggcagcaatgtcactgagatagtgaatggaacaatttaccacctccctggaatctgcacctgagatacaacatcagcgtatgagtgaagagtgagcccatagaaaagctttagatagactcacataagtcacactgatgggtatttacagcagatatatccaagctgtttatgtaatagtctcatttactttattctttttctctagaacataaattttgaaggtaatggaagtttatcttttataccaaaagtttgtatgagccattttgaagtaaatctttctaattttagaattatattttctcgccatcttaagacagtatattaaatataatataacctttttcttagtggctaagcattatctttatgtatattattattgtgtggtaatgcagtaccttgagaatctagtttttatagttttcatttttttttctgatcttgcttctggcaacttttatctctctaatctgctttttttctcagttgtctggacttagaaactggttagcctatcttaccataaattatttgggaaatactaaaaaattggctttggatcctgactgagatgatgatgatgatagtagtagtagtaataataatagttcccttttattaaacacttatttggtcctttatgcactagtaatttacacacattattgcatttaatcaccttaatgacaacattaagttggggctattatcattatcatctctattttctcatagctaaattgaggcatgaagaggttagtttgccactacgaataagtggactggaatcctattttgtccaagtatgaagcctgtcttcttaactgctaggcagtagggacatcagttgcatgggctttgcaatgtctgctctctgcctaggttcctttttacctccagattcatggagtcattttcttatctataatttaagaatattgtgcttacaatccaagattcatttaagaaatcttgtgttctttattacatactatgtgctaggatgttcaaggcactgagtgaacaaccagaacatctgtaccctcatgaagcttattcttttggggtgggtagtaataggggaagagaacacagaaaagcaaata

SEQ ID NO: 131491 - DNA, 1050 bp, Homo sapiens
atgaaaagaataaagtttatttaaaactacgtgaagaaggaccttattacaatgctgctagtgttctttcttttctctattatgataggaataaatattcaagaatataccaaaataatgtaaaacaagttgggatgttattataaagatggaagaagtgaattatttaacagtatagtgaattagagtaggttgtaaattaaagctaaatatgaaacgtgatttgctaacaactggcaagttatagaatagtgtttctgagagtaaattgaagaagccacaaattagtaggagatcattatatactagagagcaaatttatataatttttaaaaaaacctaatggccagttattttttctctgacaggtagaatgtaatttatattagagattagtaactttcctcaaataccaaaacaatttaaaaattctttaacacttgtgttcccaagtaatttatgattctcccaccttagattcatacaatctatagttcataatactgtatactattatcattttttgtaggtggtattgaaatttactgtttgtatggctgtgttatcatacctaaacccctttagggctgggaaccaagtcttatttatctttgtatctcaggtgcccagtggagtgctctgtacatgtttatttaactttttgaaaaactatattttttccttttagttaaaataaattataatttttaggacatatttatataggtataaacactaaaaacatacatcgtatagttcaaagtgattgtttgtaacagagtgccttggttttactgaccaagtttttactaagatagcaattagtgtaatcttaacttaatgggcttatcacctaattttaagatatttgtaactggccagttttagagatgctattaaaagaatcccaaaatgctaattaatcctaaccagtttcatcattatttttcagtacttaagtagctttctcttcactgtaaatgttttatttagtgattttttagaatttcattatactcttctaacctgttaaatttgtaatgtgtattg

SEQ ID NO: 131492 - DNA, 1143 bp, Homo sapiens
aggtatatgttgcagtaattacttttaaatgctaaataaaattacaagattacgctcaaatgcctttatgggttttacgtaagacatatatatttagaaataattaaaaagtccttttacaattaaaatttctgtttaaaaagacaggttaattaaaatctactaaattaaaagttaagctctgctgtttctaaagagcttaactttagaaagcttaacattcatttttcaattttgaatgtcaggttttgtaagtatataacttggccatattaatttgtttctttttaaaaaaaacactgctgtgttgctttataaaccacttttggtgcacgttagactttttggcatttgatttgcttaaattattttacttataacatggtttgcattttaagtttgtattctttaatatgttgtatatttattgtaaattttaccttactcatttgaacttttggttctattaaaggactaagcagttattcataatgttcagaattgtgggtaactgagacccttggtccccaaattgttgctgaaactcactagtttaatatctattattttcataaattttctaattaggccagactgtgatttgtgttgtcatgtctacttcctgcacttttgtgggaaagatattagggtgagtttggaataaatattaggtggtcaaaggtcagcaactgcataattagacacttaaagaatactgagttatttgtaataaaggaatagtatatgcattaagctgttccttttctgtcatctcagggtgaagctgctttggtacttttcttattaagtttattataaataatttggatttttaccttcatttgtgatttttatattgctttttacatccatgataataggctgaaatatcacgttaagagtcattatttccatgaaagcataataaaaaaaatagactaggaaataagactctttctttttcagattttcttttatttcaagtatggatttacacaccctgtaaagtgtgtgctatagtttcactctgtgtccccactcaaatctcatctcaaattgtaatccccacctgtcgagggagggacctggtaggaagtgattggatcatgggggtggtttcccctatggtgttctcatgatagg

SEQ ID NO: 131493 - DNA, 1169 bp, Homo sapiens
tttgattttctcctctttattttaacttcaatttttttttaaaaaaaatgtatctgaaggggaattacattttatgaggggaaaaaaagcaatttgaaaaggatattagtattttagctaattgcagttttatttcaatttcaaatactaatgaataaccagtgttttgacaatgttttatatatgcacatacaattgattcttggttcttccatatttttctattgagaatttattaactgaatgagaagtagaatgggaaaatgagaatctgagttctggacctagctgtgtgtctttgagtaagtcacttaacatctgtgggcctaagtggctacatcttcaaagtggagaatgaagtcagtatttcacagtgagtgtgcttctggtatttgggctggataattctttgttatgaagtactctgttgtgcattgtaggaagtttagattccttaatgctggtggtagcatttcccagtcattatcatatcccagacgaccctgcatatccaaacctcttctagtggggagggaccacttcatattgagaactactggcaaatggtctctaagaattctttcagcttcaacattctgtgaaagaattcttatttggggcatgattgaaaaagaaggtaatatatcatacaccgaaaaacctctgctgcttcctggatacgaaacaattttattttaaaatgaataacttttacgaatctgtgtagccctactcacagatctaccatttatgatgttccaagataaattattttattctagcttgccttaggctttttctctacagtattatccatagctatatgattttttaaactaaaaattatatagtaccatctctatatctaataagtaaaagcaacaagatttttttttaagttgtactattgttttaatatcttagcctttaaaaaaggaatatcattgtatatagtaattattttctttatcttccataggcataaaagaagggaaggaatataattttctgtgtttagaagtatatatagttgttgaagcacacaagttatatgtgtgaaactacaggtcagtagtatatctgattatccttaaaaaaaaaaactaccatgaaatgcaataagaaaaataaattattggccaggcacggtggctcacgcctgtaatccc

SEQ ID NO: 131494 - DNA, 1094 bp, Homo sapiens
ttatgcatctttgacaggagtatcacaggattgatgttatattctttttcatcctatcatttggcccatgatttcaatttgtccttggtgatgttaactttggacgtttgattaacatggtatctatctgacttatgcactctaaagttactgttttcctttttataatttataagtcttttgtgaagtgatactttgagtctatgaaatatcccattcattttagcaatttatatcaatatattctattcagtagattataattcattactatcatttttgatcttccagctaccctatatgtggccagtgggaaccccttcaagctggtttctgtgtctttttgacgtgtcttcattactctttgaataattcctggcttgaatactccacaagatgttccagactcatcttgcacttttgctgccctagccttagaatcagccatttatacaagagactctttttttttctcagtgtagattagtatttagaaaccaagatctgggtgttaggtgtgctcataactattaggatgttgccctaagagtggacagagctagtaaataaatgaatatatgtatttatatataaaagctatattatttatagttctatgtgtctttatgtattataaagattcattacagtttcttcaatactaagctaataacacagggcatgttctagttttctcactttccgtatttctaactccattctctgatggagaaattcctagctcctattatttttaatatatttatttatttttcaccactgctcctgtcaccaaaatcccatcaccactactgcccacatattcctatacagatgccctccttgcaccaacttgggcactgacaccctgagccacaatcccttccccttagtgtgtggaagcctgtctcaaccaactggttcttttttttgtttttttttgagacagagtctccctctgtcacctaggctggagtgcagtggtgcgacctcagctcaccacaacttctgccccctgggttcaagcaactttcctgcctcatcctccctagtagctgggattacaggcgtgcactaccatgcccggctaattt

SEQ ID NO: 131495 - DNA, 1118 bp, Homo sapiens
caagtcactaaaaccagttcagattcaagggaagggaaattaaaaggaggacagaaaggtgattccttatcagactcttcacctctctattaaataaacttttgggtaattgttttccttgattgtgttgtctcttcacttctaaattcttgactaaattgtaaatattagaaatttgggaaatatggcttccaggtaagtcaaacacttatatgtatagtttaatttatcagtaattaatttgctgtttttcaccttaatagtcatttattgcctattttttatttgtgacaaattgttatgatcaaatttgtggataggaaaattgaagtaatataaagtcagcaatttatagggtcatccagagggtcaggtggaactacagatcacgatcttgaaagtttgagatgatgtgatattttgccattattagtggagattgttttcatttttctaaaaatagtgatgagtttgcataaccacactcttgtctggtttcctttggtgtgtctgggtataaaataacttgaacaaatagggactaaatccttgagtgtagattttattagcatcttgcccaagtcatctgaattagttagtatgtagctttacaggactgtagccttgtctttgactcacaggtttatgtctgctttaagtaaaggaaaacacataaaaacaagtagttatatattaaaattacctcagacagacaataagaggtaagagtaaataagaggttcttgtagataaaagactgtaggtaacaaaatcatttctcctaagctctgagacatttactttgattgcttttgatgataaaatatttgaacatattgcattttttatctgccttagtaaaaatataatgagcataatttagcttctaccagatgtcggagtccttatatactatattttaatacaataagtttctttgaggttacttctatttgtagacatgctaatcattacaccaaatgcctccagaacactgctgtttcagttggcatgctttttagactctgtcatagtggtagtgaaatgtgctgggcttagtctgcccctccctcctcctcagtgctctcagacttttctactctattctcattcattcc

SEQ ID NO: 131496 - DNA, 1052 bp, Homo sapiens
tgaggttggcttccacattatttaaggtggtgtaattaatgctcatcagagagtttacacagagagacaagaactggctattggagaggtacaatgagagatatgttttgaaaaagggagcctcttagggaatatttttgttataatatgtatacttaagatatttaaaaaatgagattgtttttacatatagcaaataaaagatgtattgaggtgaacagagcagtttttctatcaatgttaggtctcaattagcttgcattttttgattactctatgtgagtggtaattgtgtgcttttgacattttttaccatttatctacgtctgtatacattaaccaaataattctaaactttaatcttgtagtcccccattttttgtgattgtttaaggtagggtgaagagctttgttttgagaacttgccatatagtataagaggacgttgacaaaatgaaagactgaaagataaagagcttatactaaattgagtatctaaaacacttaaaaataaattaggctttcttatggaatccctgttcactagagatcttggacctttaacaagattatccttattttttttcagcccattgctcaggattatgtgagaaaatagaaattcttttcttaaattttttttattttttgagacagagtctcactctgttgcccagggtggagtgcagtggtgcgatctcagctcagtgcaactccatctcccaggttcaagcgattctcctgcctcagcctcctgagaagctgggattacagacatgcaccactgtgattggctaagttttgtatttttagtagaggtggggtttcaccatgttggccaggttcatctcgaactcctgacctcaggtgatccaccgagcttagccttccaaagtgccgggattacagctgtgagcaccgtgcctagcctaaatataaattattttaagctatgagcctctggaatggattgggaatagtttgcttttgtccaataagaaaaagggcaagaaaaacattttatactgcaaataaagatacgtgaataaaga

SEQ ID NO: 131497 - DNA, 1049 bp, Homo sapiens
ccccacgcctgggacggctgggggcggggagactttccgccgcccgagtttcccccaggcaggtaggacgggcgcgggtcgtgccaggcagccgaggccagcgctagctacttcctccccagcctccgaatccggagcttcggcctaaaatgccagttaacgctgttgggattgagttttgatttgccccgtgcctcccctccccagccctcctgtcccttagcccttgctgctttcttgcgagcgtgcacccgtgcaggtggcatgctgtgcctgctccgagaaagtgctgcaaacccgcctggcaggaagaaactttttgaacggttatcaaatgaagacgtatgggtgggtagccaaaagaaggggtgtagcttcgaaagtcagggatgctcatagctgcttgtttccacacatgtctgattgcgttaatttcagcagccaaaggaaacattttctccagaaatggaaagacagattcaagttaaactccagttttggtttttcccagaggttgaaagaatgaaataaataaggaggtatattttttggaaatctgtggctctgtagtaaaagtcagactgatgctcaaaagtaattgggaatgatgaaagcaaaacgatttttaaactagcatgttaaaataggatatttctaaaaggagtccagaatggggtagggcagaatttgagtctaggtgaaaaagctaaaagttcagaaaataaaaaggatgaaaggagcaaacgactaaaatggatgtcttaaaatatttctgccacttaaatacagttatgtaaacaaaacacattgcttcagtttgtattacattctgatgtgtttgaaagttttaaaaaagtttactctcctctctaaacttggtaggtacataaacatctcatagattccaaagtgtagagcacattgattcggatcatgccatttgatttgccagacttgaaagtatatctttagctgatgtgcaggaatggaggaaagaattatctacctcatgtaagcaggacgttatctgtactacttcagaaacttgt

SEQ ID NO: 131498 - DNA, 1049 bp, Homo sapiens
agtgtaaaaccatttggcagtatcaactgtcatttacaactgacttctcagtgttttgttttgtttttgagacagtctcactctgtcaccaaggctggagtgcagtggcgtgatctcagcacactgcaacctccacctcccaggttcaagcgattctcctgcctcagcctcccaagtagctgggatgcctggctcgtacaacttttgactcacaatttcaattctagggaattggcctagagagatagtttgcttaaggactatgggcaagcattactggaaataacaaagcaacaaacttaatctaaatatgtattgatacaaatctgttcattgtattaggtctagccatgcaataaagttcttgaaagaaatgagatagctatttttggtgccgaaaaagacttcagaaaacctctgaagtgaaaaaacaaagccgaagtaattatcactggcagaggaatagacagagatttctcaacagtggcagtattgacattttggacaggataattctttgtttgcggatgggagctctcctgtgcactgtaagatttttagcagcatcactatcccctgcccattagatgccagtagcaccttgcacccccacaccccagtgtgacagccaaaactgtccctggatattgccaaatcatggttgagaaccattgggatagacaaatagattagtacttagccttatttataattacatagcccagaaacagacaccaatgtatatatagaaataatgtgtttcagagatagaattgaagtacattgaggtaaatatggactgttgaattaatgatcattttgttacacctttggaaataaattatactagatgtctaccttatgtcaatatatagacagtcacttctaggttgagcagtgtagtgagaccctgtctctgcaaaaataaatatttaaaataatagccatacttggtggtgggtgcctgtagtcctatcttactcaggaggctggggtgagaagatcgcttgggcctaggagttcaaggctgcaagtgagctatgattgca

SEQ ID NO: 131499 - DNA, 5133 bp, Homo sapiens
actacaaattcatcttgaaaataatttagtaatttggtgccttggacagctacagtgttacttgaaatactttggaaattagaaagtaaggaatgaaattttaaagaataatttagtatgtttggtctgttctcctgaactctgactttacaaaacctttattaccctttaagccttagttgtcttgaggcttaatgttcataactgaaaatattcatatttcctaattaaaggaagaatatcataactcttagtggggaaacattcttacaaatacttcattcaaatgactttttctttctttcttttaggtgtatttgcatccagtattgttctgatcttgtcacaacgatcacttttcaagttttacacgtacagctcagcctttctgttagctgcaacttcagtgttggtgaattattatgcttctttgcacattgacttctatggtgcctacaacacgtcagcttttggaattgagctgcttcctcgaaaaggtccctcgctgtggatggcacttatcgttctacagctaacatttggaattggatacgttacactactccagattcattccatctattcacaattaattattttggatctcttggttcctgtaataggcttaatcacagagctaccattacacatcagagagactttactgtttacttcttccttgattctcacattaaatacagtgtttgtcctggcagtgaaactgaagtggttttattattccacacgatatgtttatcttttggtgaggcacatgtatcgaatttacggattacagttattgatggaggacacatggaagaggattcgtttcccagacatactacgagtcttttggctaacaagagttacagctcaggctacagtgttaatgtacatcttaaggatggcaaatgaaactgattccttctttatttcttgggatgatttttgggacctcatttgcaatcttataattagtgggtgcgattctacactaactgtactgggcatgagtgctgtaatttcctcagtagcccattatttggggcttggaatattggcctttattggatcaactgaggaagatgacaggcgtcttggctttgttgcacctgttttattttttattttggctcttcagactgggttaagtgggctaagaccagaagagagacttattcgcttaagtagaaacatgtgccttttattaactgcagtcctgcattttatccatggaatgacagaccctgtattaatgtctctcagtgcctctcatgtgtcatcttttcgtagacattttcctgtgctgtttgtctctgcttgcctgtttattcttcctgtcttactcagttatgttctttggcatcactatgcactaaatacatggttgtttgcagttacagcattttgtgtggaactgtgcttaaaagtaattgtttctctcactgtttatacgttattcatgattgatggctactataatgtcctctgggaaaagcttgacgattatgtctactacgttcgttcaacaggcagtattattgaatttatatttggagttgtaatgtttggaaatggggcttacactatgatgtttgagtcgggaagtaaaattcgggcttttatgatgtgcctacatgcatattttaacatctacttacaagccaaaaatggctggaagacatttatgaatcgtaggactgctgtgaagaaaattaattcacttcctgaaataaaagggagccgcttacaagaaataaatgatgtatgtgcaatctgctatcatgagtttacaacatctgctcgtattacaccgtgtaatcattatttccatgcactttgccttcggaaatggctgtacattcaagatacttgtccaatgtgccatcagaaagtatacatcgaagatgatatcaaggataattcaaatgtatctaacaacaatggatttattccacccaatgaaactccagaggaagctgtaagagaagctgctgctgaatctgacagggaattgaacgaagatgacagtacagattgtgatgatgatgttcaaagagaaagaaatggagtgattcagcacacaggcgcagcagctgaagaatttaatgatgatactgactgatgaaaatagcatttattaatgattgaggtatttgtttaaaattcagttcatccaaaatggagtaatatccttcaccttcagtgtgtaaccaagcacaaaaacagtatcaatgttgaatctgtgaatggttttccgtttactgtgatgtgctactgtaaatatacctctttaattacttctggtctctttggtgacctgtttaaatttgtgtacattattgtacatagaataaaatgttttcacatttttatgacaaaatttgaacaaatagctttttaatagatgtaatgatcatatggtgcgtcacctgtgccaaatattcttcaatgaaattatataatgtaactttggacctcagtttttctttagaaatgggtgggagaatgaaaatgcaaatcaggaaaccacattaaagtcaaggaaataaaataatttgaccagaggataaaggacatgagagagtattttaaaactaaagaaaaaattagctgccagaagcaactgaggaccttttttgaaacttgagtagcagtgtaattgagctgagtttgaaagtcctgattcagagagagactgagggttgacaaataaactgtatcaactaaactttgatataaaccagaatgtgctaaatgttttttatgtaaaattgtatatttgttagccattctgtgtctgcagtattgtcataaaattgtcctttcattcttttgaagatattacaaaacaaaaatagttttttttaaattgttttaaactaagatactcaatgatataaaaacatcctgatctgattttacgagaaaaagaaggggaatggtggggaatggtgtgtaccgatatatagtatttctttagacaacttgcagataatttctttattgaaactatcaggaagttttactatgaaattttacatacatgatggaaagtggaagacatataccaattatattccaggaaaaaatactttaatagtattgttatatagtgtattggctaattccagtggatcctcatctctcactgctgacattatctccaatatttgactaaaacaaaacaaaaacaaaaatggttaaatctccaagtatacatttagttctaaagctatataatatttttccacacaaaggaaaatattggcacacctttaatataataaagcttaacagttattaagtttttcagcaatatcaatagaaaaacttactgccagtaactggaaacagatttatggactgtcttgcatataactagagctaagaaccaggttcaagtaaattattaaagcagccatctgtattatgttcaccaattatagcattaactgagtggaaatgaagagtccttttcaattgtgagtcatagcatgttcattagtgggtcatgatgagcattttaaacattgacaagtacattgtactcaataagggtaagtactgttccattttttgttaggttttattatgtatgtgtgtcctaagtcacaacgtaatttgtactgtgggacagcagccacagttggaaatctactgctagagaactagtccttgagagacagcaaatgaaggtattaggttgctgcaaaagtaatatttacttggaaaaatgtgtggttattgagggcgagggctttctgtacctctacccttgcgagagaaataagcccaggtgtccatccttcagtttctttctttctctgtctctctcttccttcccttccctcccttcctttcctttctttttctttcctttcttttttttttcttttttctttcttttttgagacggcgtcttactctgttgctcaggctggagtgcagtggcacgatctcggctcactgcaacctctgccgcctgggttcaagtgattctcctgcctcagcctcctgagtagctgggattacaggcacctgccatcacacccagctaatttttgtatttttagtagagacggggtttcactatgttggctggccgtggtcttgaactcctgaccttgtgatccaccccacctgggcctcccaaagtgctgggattacaggtgtgagccaccgcgcctggccgcatctttcagtttctgtgcttacagtaatgatgatccgtagtgtctccatacttattatatataagtggaagatttttaatacatgaattagaaagttccaaagtccaaattgaacatttaaatattctttgcctaagctttttgttcccttagtatcttaaatgttaacacctaaaggaattaaggatggagatctaagattaatgggaatttaaaaaattgttttgtaatgtgacacaaaagccttgcttgatgtttatactaagcaaacactacactaaaattttatctgacagtcaagatacactaaaagcaaatctattaacatttaaattaagacagtgaaaatccatttttcttaggaaactactgaatgtccctctgtatgcacttctcagaattggaactcttgattaatgctgctgatgacacagttttgaaggtcacagcagctttgctaagattatattgcatagcaaattcattttattgaaatcgcttataagaaatctattgggctgggcccagtggctcatgcctgtaatcacagcactttgggaggctgaggcaggcagattgaactcaagagttcgagaccagtgtgggcaatatggtgaaaccctatttctagtaaaacaaaaaaaattagccaggcatggtggtggacgcctgtagtcccagctactcgggaggctgaggcaggagaattgcttgaacctgggaggtggaggttgcagtgagctgagattgtgccactgcgctccagcctgggcaacagagcgagactctctctccaaaaaaaagaaaaaagaaaaaaaaatctattggagcttaggacatcctattttactgtttgataatgcagtttatggaaatctttcttcgaataacccttctgtagccaagccatgctatttccatacatcttcagtggtca

SEQ ID NO: 131500 - DNA, 1068 bp, Homo sapiens
ttgtcataaaaatgtgaaaacattttattctatgtacaataatgtacacaaatttaaacaggtcaccaaagagaccagaagtaattaaagaggtatatttacagtagcacatcacagtaaacggaaaaccattcacagattcaacattgatactgtttttgtgcttggttacacactgaaggtgaaggatattactccattttggatgaactgaattttaaacaaatacctcaatcattaataaatgctattttcatcagtcagtatcatcattaaattcttcagctgctgcgcctgtgtgctgaatcactccatttctttctctttgaacatcatcatcacaatctgtactgtcatcttcgttcaattccctgtcagattcagcagcagcttctcttacagcttcctctggagtttcattgggtggaataaatccattgttgttagatacatttgaattatccttgatatcatcttcgatgtatactttctgatggcacattggacaagtatcttgaatgtacagccatttccgaaggcaaagtgcatggaaataatgattacacggtgtaatacgagcagatgttgtaaactcatgatagcagattgcacatacatcatttatttcttgtaagcggctcccttttatttcaggaagtgaattaattttcttcacagcagtcctacgattcataaatgtcttccagccatttttggcttgtaagtagatgttaaaatatgcatgtaggcacatcataaaagcccgaattttacttcccgactcaaacatcatagtgtaagccccatttccaaacattacaactccaaatataaattcaataatactgcctgttgaacgaacgtagtagacataatcgtcaagcttttcccagaggacattatagtagccatcaatcatgaataacgtataaacagtgagagaaacaattacttttaagcacagttccacacaaaatgctgtaactgcaaacaaccatgtatttagtgcatagtgatgccaaagaacataactgagtaagacaggaagaataaacaggcaagcagaga

SEQ ID NO: 131501 - DNA, 1444 bp, Homo sapiens
aggcatgagccactgggcccagcccaatagatttcttataagcgatttcaataaaatgaatttgctatgcaatataatcttagcaaagctgctgtgaccttcaaaactgtgtcatcagcagcattaatcaagagttccaattctgagaagtgcatacagagggacattcagtagtttcctaagaaaaatggattttcactgtcttaatttaaatgttaatagatttgcttttagtgtatcttgactgtcagataaaattttagtgtagtgtttgcttagtataaacatcaagcaaggcttttgtgtcacattacaaaacaattttttaaattcccattaatcttagatctccatccttaattcctttaggtgttaacatttaagatactaagggaacaaaaagcttaggcaaagaatatttaaatgttcaatttggactttggaactttctaattcatgtattaaaaatcttccacttatatataataagtatggagacactacggatcatcattactgtaagcacagaaactgaaagatgcggccaggcgcggtggctcacacctgtaatcccagcactttgggaggcccaggtggggtggatcacaaggtcaggagttcaagaccacggccagccaacatagtgaaaccccgtctctactaaaaatacaaaaattagctgggtgtgatggcaggtgcctgtaatcccagctactcaggaggctgaggcaggagaatcacttgaacccaggcggcagaggttgcagtgagccgagatcgtgccactgcactccagcctgagcaacagagtaagacgccgtctcaaaaaagaaagaaaaaagaaaaaaaaaagaaaggaaagaaaaagaaaggaaaggaagggagggaagggaaggaagagagagacagagaaagaaagaaactgaaggatggacacctgggcttatttctctcgcaagggtagaggtacagaaagccctcgccctcaataaccacacatttttccaagtaaatattacttttgcagcaacctaataccttcatttgctgtctctcaaggactagttctctagcagtagatttccaactgtggctgctgtcccacagtacaaattacgttgtgacttaggacacacatacataataaaacctaacaaaaaatggaacagtacttacccttattgagtacaatgtacttgtcaatgtttaaaatgctcatcatgacccactaatgaacatgctatgactcacaattgaaaaggactcttcatttccactcagttaatgctataattggtgaacataatacagatggctgctttaataatttacttgaacctggttcttagctctagttatatgcaagacagtccataaatctgtttccagttactggcagtaagtttttctattgatattgctgaaaaacttaataactgttaag

SEQ ID NO: 131502 - DNA, 1058 bp, Homo sapiens
tcttaaaacaaggtgaggccgggcgcggtggctcacgcctgtattcccagcactttgggaggccgaggtgggcggatcacctgaggtcagaagttcaagaccaacctgaccaacatggagaaaccacatctctactaaaaatacaaagttatctgggcatggtggcacatgcctgtaatcctagctacttaggaggctgtggcaggagaattgcttgaacccaggaggcagaggttgctgtgagccaagatcacgccattgcactccagcctgggcaacaagggcgaaactcagtctcaaaaaaaaaaaaaaaatacaaaaaattagctgggtgtggtggtggcacttgcctgtagtcccagctactcaggagcctgaggcacgagaattgtttgaacccgggaggcagaggttgcagtgagccgagattgtgctactgtactccagccttggagacagagtgagactccgtctcaaaaaaataataaggtgaaaagctaaaacttttatctaaaccctgtcaaggctctccttataccatggactttaggaaagtcaagactgagccattctggagaaatcacattcatttccttgggcagtcaggaaaacaaaatatttgattaaaagtacgatgtttgcaaaatgtgtaattctttattaaaaaatattcaaaaccagtttcacattcagtagagatagaaatttgtttaacttatgcaaacctcactacatgcatagcgaaaaagattttgaaaactgaaaaaaaaactgtttaacttaaatgttttcatgttgttatacaattgtatttaaggtttaggtcttttttttaaagcatgctgcacaccaacaatgttagcagaaaaaaggaatagaagtgagtcttagaaggtatttaagatgcaattcaagattttatcttgtgcttttcttagaactgttttctgttgaaataactgtgccattttggaagctgaatcacggtttatcatttagaggttatatattagataatggtcataaaaaatttttaaaaatgtaaaccccttacgaga

SEQ ID NO: 131503 - DNA, 1051 bp, Homo sapiens
aatttaactttttaaaagaattcatctgcttctgagtaatttgcgtaacttagaggtgcttctaaggctgtaaacgttcatttcctgaattttccatttttagcccaagacagattcttcactctactttagcagaattatgtatctgcacccttgccatggtttctttgtaggatgaactctattccttgaatctggcgttggcctcaagacttgctatggctgcctgtggcagcctctatcagccaaaacccagctgactcaaagatccatgaatgcaaacataaatgcttcctgtaatgtggcagtgaggtttgggatggtgtagcatataatgtgatgacaactaatactgttcttatattactttaaaaacacaatttctctaatcacaaatttattttaaattactttttagagcagttttaggtttacagcaataaaaagtacagagattccccaaccatatgctcccactctcaaaattctacaccatagtggtaggtacgtttatcattgatgaacctaccttgacacaaaactgtcacccaaaacccacagtttacatcagggttcacttggtttcatgtgttctgtgggtctggacaaatatgcaatgacacgtatctaccattgtggtatcatactgaatagtttcacggtcttaaaaatctatggtccgcctattcatccctccttccctctaaccccttatcttttgacagtctccatagttttgccttttccagactgtcacatagtttgaattacacagtatgtagtctttttcaggctgccttctttcacttgcaaatacacattaaaatcccatgtttttcatgcttgatagttcatttcttttggcactgaataatattccactggacataccacagtttatccattcacctactgaggaacatcttggttgcttccttatgtagcatttttaatttcagcatttgttattacaaagaatttaagatacacattaaattaggtaatatggacctctcatatagttatcacccagccccatcaatcaacacat

SEQ ID NO: 131504 - DNA, 1074 bp, Homo sapiens
cggcagctaacgttttgcatcatgtcactggagatgatgacaggttgtaattgtgaaaaataatatgaaaataaaaattatagcgactaccacctttgaaaccctgaggtccaaaaacttacagggatctatatttttgcctacaaagtcttattaatgtcacttagaattttaaagagtaattattataataataaacttatacctgtatgtccccaggtgcattcatttgatggtaccaaggaagcagcagctgctttgattgacttggatctttatataggatttaatggttggtacgttcttaggttgctttggtttttaacttttatttaagcagatttcttaaattgtcttacagtgaattgctgatgaagatttattttcattaaagtttgtgtgtgtttgcattgatctttgctgggaatttcagtaattatttattaagaaattaaacagtacattactattaaaagttaaagctcgaaagttatagactactacattatgttctaataatggaaaacaattttgtgttgagatctgcagctggctttctctggtaatccaatttattctcaggtcatttgatcccttgaaaacatgtgttcacagcattatgtatacatatacacgtcatatctgactatggacgaacggtttattctgtgacagtcatacatctctgcagtcaaagaaaccgaggctcaaagaaattaggaaacaggtatagagtttctccaagtatgagaacccatgtcctctggcttctcactctgtgatctttctgctgttgtaccacactaaacttcacacactcagtacagtcagctagcacagctaggtctctgggttggttttgtcacatatgtaagagcttctaccagtgacttttcacaggatgtcagtgtagcctattaaatcagttgcaaaatagtataggagtttctgtccttcttcattgtctcatacccttaaaattattatgtttccaattgcattatttttgactaaaatctagggaaatagaatcatggaattatgtatttgctctagagttcagagtttaaatgt

SEQ ID NO: 131505 - DNA, 1066 bp, Homo sapiens
tgcaatagcacgatcttggctcaccacaacttctgtcttccaagttcaagcaattcttttgcctcagcctcccgagtagctggggctacaggcacgcaccaccacgcctggctaatttttgtattttcagtagagacagggtttcatcatgttggccaggtgggtcttgaactcctgacctcaagcgatccacctgcctcggcctcccaaagtgctgggattacagatgggagccactgtgcccagcctatttctaaataagaatttacttgggttctattaatagtttttaaaattaacaaaagcaacaacaaatccaacctaaatgtttgacttttaccaaaaaagaaattgccaaataattaataactagttttctgaaatggtttatgaggagtcacttttaaaatgatttcgatattaatggagggcatcttttctagtcagctggaaatggtgaaggaaagaataatgcaggcagctgtgtaatgcaggcttctttattgttgagaaatatgttatccatagtgtattcaggctctctggactcagtagtaatgtgatgtcacttgtttaggtgaacctactttttaaaggagggctgttgttatatgttgtttttgattatataaatacatccaaactatgaaaactatgtcttgacccctatatctttgaaggagagaaatagcatctcaatcccttctgcttgctaagctgatattattgattatataatggtttatgcttttttttttttttttgagacagtttcgctgatctcctgaccttgtgatctgcctacctcggcctcccaaattgctgagattacagtttatgctttttaagcaacagtctcacccatttataagaatttcttcagccttgtctctttttttgttttgtttttgtttttgagacagagttttactcttgttgcccaggctggagtgtaatgatgtgatctcagctcaacgcaacctccgccttccaggttcaagcaattctcctgcctcagcctcccgagtagttgggattacaagcatgcgccaccatgcccagctaa

SEQ ID NO: 131506 - DNA, 1047 bp, Homo sapiens
ggaccaaaagtgtttcatatttcagattttttcagattttggaatatctgcatatacataaaaagaaatctttgggaagggactcaagtctaaacatgaaattcatttatgtttcacatacaccttataccacaccctgaaggtaaatattttaaataattttgtgcgtgaaacaaaatttgtgtacaatgaataatcagaaagcaaaggtgtcattatctcatgccagtgcttaaaaaggttcagattttggagcattttgtacttgggagtattttggatttttggattagagatgttcaacctgtattaaaaatgactattttatacttaccactccccctacacaccgatctctatttcttttcattatgtctgtgaattaaaaacaaagaacttttagcaaatagcttgatttctacaaaattcttaagttctgaatgagactttggttttaactcacccaaaaattcagcatgtgagtttcgacaatgaagaaacattggtaattttgtttgttctgacagttcaaactgtttttcaaaatatctgcataatgcaaaaaaaaaaaattctcattacaaattgtattttagcatgaggaaggtaatgatgtcaaaagagcttttaaattaaaggtatttaattctctagaaattacaggacaaaaatcatgaatatttaaagcacatcaggcttatcaaagggcttttataacttacaacttctggaaagaaatacttcattttctgggcttacaaaattatctgggccctttaattttcagaaagtaacaccactggccccttgccactgggagcaccatcagtgggagtcaactcaccaagcgagaagcccaggagagcttcatactgcatgctaatctattccattttgcaaccagttttttatgtgctgttataaaagaagttattgccactgggcaaaatgaacaaggtttccctcaaaaatgaaatctaagtatttgctaaacagcaaataactcaattatgctattaaaaaaagaaaattacatgataaagtggt

SEQ ID NO: 131507 - DNA, 1553 bp, Homo sapiens
tttaaaacaatcctttggggatttaggggaccctagagatgagcaattgaggccatgttgccatcaagcagcttacagaggagggattactacttgtgttgaggtatacccatgaaactcactgggctttttggatttgccttgatcctaattaataacaactgctcctgaagctgaacttttccagctcttgtcgttagatagttaaacctcaactgtaagaagcagtaataaaatcagaagcttcactaagatgagcaaataactcaagtggaaaattattttcatttatgaactttaaaaaaataataagtgagtaaaacaggcagagaagtctcttaatagatgccaattcctaccctgtaacttatacagttatttctagttaccatggcgggtttttcttctctaaagataatagtcgtttgatgttcagtactagttatcctcaatttgtatcattaggaataattttttttaccacatggcttctttatgatacgtagctagcatgacttcagggacctttcttttcttgaattatgtaaaattctgtgggcccattgcttgggcttctgttattttctttttcttttttctttgagacagggtctcactctgtcatccaagctggagtgcagtggtgtgatcatggctcaccgcagccttgacctcgccaggctcaagcaatcctcccacctcagcctcccaagaactgagactgtaggcatatgctaccacacctggctaattcttgtattttttgtagagatggggtttcaccatgttgcccaggttggtctcgaactcctgagctcaagcaatccacccacctcagcctcccaaagtgctgggattacaggcctgaaccacacacccagctggcctctgttattttcataaactgtacttttgcctacattcctataggaagctaattttccatccgaccattagatactgtgaatttgtagcttggtcatgtggtttggtccatggaattgtgtgtggaaaaaataaccagtacagcgtggagcagtgcacacaatgaagagtaccgcctgctgtgtgtagtcagagccaaatatattagtaaagttgacataatgactagtgcacacttaactgctgacatttggtttactttagaggttatggaaatagtgactggttatattatcaaaatctctttttgtccaagttgtcgttaatatttcctacactgcaaaatttcagcactttgttaatgaaaggaaaatatttttgcttattctaacccagcagaatctgaaaaggagattttaaaacccaaacatttggtaatacagacatagacgacctattttaggaagactatttctatttttttaatttttaatttttttttttttttttgagacagaatgttgctctctcacccaggctggagtgcagtggtacaatctcagctcactgcaacctctgaccctgggttcaagagattctcatgcctgccgaatagctgggattacaggcatgtgccaacatgccggctaatttttgtatatttagta

SEQ ID NO: 131508 - DNA, 1039 bp, Homo sapiens
agagacttctctgcctgttttactcacttattatttttttaaagttcataaatgaaaataattttccacttgagttatttgctcatcttagtgaagcttctgattttattactgcttcttacagttgaggtttaactatctaacgacaagagctggaaaagttcagcttcaggagcagttgttattaattaggatcaaggcaaatccaaaaagcccagtgagtttcatgggtatacctcaacacaagtagtaatccctcctctgtaagctgcttgatggcaacatggcctcaattgctcatctctagggtcccctaaatccccaaaggattgttttaaaatcttcttgttgtagtttttaagacctgcacagtgttaacattttaaagccccaagaaaaatgcccaaagcaaattcctcctacccaagagaacagagctctaaattgcaacaaggaaaggagtgtagcataaggccaggaaattgaaaatacagggtatggcttaaaggataaactttccataagtagatcaggcctttccttgttttcactctttgcttctctttcttagtctttaaaaaatactttttccagaaaaggtctaggtactaaaacaagaaaaaagtattaaaaaaaaaaacttttaaaagttccaaacaaaaacaatagctagcatcttcctttagggtggtaattatttctagtatgaggaatgtaacaacagccatgattgtgcacatactctgcatgactcatgtcactatgggctttatgtgccttatgttaagaaaggtaggcagcaatctccccattttaaaggggatgcacaaagggatgaagtgacaccaaaggcagttgtaaatctcacccaaagatctgctgattccaaagctcatccttttaacatggtcatacaccgccttcacttaccattatttttcagacactacatctattgtatattaatttttctgtcttgccccctaattttctatttttcttttctcatacatctcctttttcctgactacatatttac

SEQ ID NO: 131509 - DNA, 1057 bp, Homo sapiens
ctctactaaaaacaaaaactagccaggcgtggtggcgagcacctgtaatcccagctacttgggaggctgaggcaggagaattgcttgaactggggaggaggaggttgcagtgagccaagatcgtgacattggactccagcccgggcaacagagaaagattccgctcaaaagaaaaaaaaaagacacactagtaacaatcacattttgattattgttaaggaaacaaatacccacattctctgcccctcactccttttcccctcgcatatactcacagcatgcaatctgttttgtatacacagcactctacttgtttcagcacttaccatgttgtacagaaatgggttttcattatcccttcctccccgcaacagacaggtgtctttgagttcctcaaaggcacacaccaagtcttactcatgtgacagttccatagcacttagcacagtactctcagcacatggtaggcacttagtaaatgtctgttgaatatttaatacagagggaaggttcttttcttttttattccctttgagcagcatggataaaaagcctataattcagctttcactattgggtttatttttggaagacttcagattttggtctgcacttttctaccatctggaacaaccagtgtatgattgtgtttgtttgtttgtttgtttgttttttgagatggagtctcactctgtcccccaggctggagtgcagtggtgcaatctcagatcactgcaacctccacctcccaggttcaagcaattctcctgcctcagcctcccaagtagctgggattacaggtgcccatcagcatgcctggctaatttttttgtatttttagtagagacagagtttcaccatgttggccaggctggtttcgaactccagacctcaagtgatccgcccaccacggcctcccaaagtgctagggttacaggcatgagccactgcacccggccatgatttgtttttaagtaaatatgtagtcaggaaaaaggagatgtatgagaaaagaaaaatagaaaattagggggcaagacagaaaaattaatataca

SEQ ID NO: 131510 - DNA, 1053 bp, Homo sapiens
attctctcttaagataccatccagctatatcataatgtttaacaattaataattttgtcatatggtgatatgatcatatgattaagccagtgacttgatggcctgaagggatttttttaaattacgcatgaggaaagtgtacttcctcccgcttccctccctgctccccacaaatgggattctgatatgtaccccctggttgaaaatcactttggggaggagcagatctgctagtggagtctgtcataccctagacctcaagctccaaagttctgaagtgtgaagatctataaccaagtagaataggatgggttaacgtaatgctctgtggatacctactctctcttttaggtcgctcatttgtacatcccttgtagaactgtttagtttgtggtatattatttgctgatttgctgtgcctttcagggacattcatgtggttactagcagggttactgaagccctatacctctgtcgaatattatgtaggccagctcacttaaccttaaaagttctcgtgttcacattgaaatagaaaaacagttctctttaatagttctttaggttaagcccagatatcatattcctcaactttcatgtctggttttggtcaggataagccttgtaagtctaatagactgtgttatgacaagcaagggcaatggcagagtccccgtgtttttttgcccatatgacttttcatccaaaatgagttagaactgattctaaaatgcaacctcaatactttaaactcacttttgggattaatcgaaaacattgacagtatcagtttaatttaactgttctgaagattcttcaccatcatcagaatagcgtctgatcttagaatatgcatatcacagcttgtgcttgaactcacatgccaagcgttaattgctaatagagaggttcaaactacattcagtaaatgattaccaagtgcctcctcagcatgatacaaagaagaataagactttttccaagagaggacataaataattaaaataggttggaagtgcttactaaagtatgtgaacagcagagggaaggact

SEQ ID NO: 131511 - DNA, 1559 bp, Homo sapiens
caggcctgagccaccatgaccagcactgattttatcttttatattcaccattcatgtgactatcttgattggtatatttttgtttgtttaacacctattcctccattattgattcatgtatttaatatagcaataaaaatgtattcccttaaacaggttaatagtgggggcgatttaaagtggtggaaagggggatttgtttttctagcaagtaaatgaggttcacttattcggaggagactctgacagcttgacttgcatagaatacaaatgagaagtcaaaaacactttttgaatggcttagctgagcccgaaccatgggaaaggtatcaagctttcctcaggctctcatgtagatgtttagaaaaaaaggaagcagcacttttaaagctgtaagaacagaagttacatggagaggagtggaagagggctggtaatggaggtgggagaactttaaaaagcatagctgtttggggatgaaaagtaaggataaaatgttcttatatatttcaaaaactccctggaagatagtctatctttaatcactaacaaaaagtgtcaatggggtgggtgaggtggcttacgcctgtaatcccagcactttgggagggcaagccgggcagatcacgaggtcaggagttcaagaccagcctgaccaacatggtgaaaccccgtctctactaaagatacaaaaattagctgggtgtggtggcacacgcctgtaatcccagctactcaggaggctgaggcaggagaatcacttgtacccaggaggcagaggttgccgtgagccgagatcgtgccattgcactccagcctgggtgatagaacaagactgtctcaaaaaaaaaaaaaaaaagaaaaagtgtgaatggatcctaaaagacaagtgtggattttagagagatttccataaaaatatagcttttagtaagttttcatacataaaggaaacacatcagtattttaaaatacaaaatttaaaaattatgtggaatgtttaattcctcagtgtctagcacgtaagataatgcaaaaaaaagtgaaattcgtgaatgccagataaatgaggttttacctaactaggattcctttaataatcagtcttaaaacttttaagattttaaacaaatgcaaaatgtatgaacataaagcaaggatatgagagattatatagtgttattatttgcattcctggtaccttgcacagtatctggtccatctagtaaaaatttaataaaatggcccttcacagcttaagttaaaaaagagtaaataaaaagcaactcgtatcttaaacacgttaaaacacacacatgaattccacatcaaaaacacctgaggttggctgggcacggtggctcacgcctgtaatcccagcgctttgggaggccgaggcaggcggatcacgaggtcaggagatcaagacccatcttggctaacacagtgaaaccccttctctactaaaaatacaaaaaattagctgggcatggtggcaggcacctgtagtcccagctacatgggaggctgaggcaggagaatggcatgaaccagggagg

SEQ ID NO: 131512 - DNA, 2166 bp, Homo sapiens
actgggagaggagatgatgccctcttgtcttgccgtttttttcaactatttagtaaagttgtaggtaaaataaaaagtatacttggttagtattttacgtaatttaaatactggatgtaggcatctgttctagtattaaagttttaggtatgttagtaacaagaaagttttcccaatatttttattagtctttttttttttttctggaggcgagtctcgctctgtcccccaggctggagtgcagtggcacgatctcggctcactgcaacctctgcctcccgggttcaagtgattctcctgcctcagcctcccaagtagctgggactacaggggcctgccaccacgcctggctaatttttgtattttcagtagagacggggtttcgccatgttggccaggatggtctcaaactcctgaccacgggtgatccatctgcctcagcctcccaaagtgctgggattataggcgtgagccactgcgccctgccttacatcttctgctttacagatagtcaaggatttaattatggctatgtttccggaatggatatgcaatagctaatcatattaaagatttaaatagctatatgaaaatatctatttatcatttgcaattctaccttcgttttgtgttttctccctaagttgtacctagaatgaattcattttagtgagacttttgaagtatgctttacaaaaatatacatcattatacttgaatcacgtcttcagaagaaggcgccccttacgcagcactgcttcagtgctctcactatcaacacataactctttagtgacattttcattttaacagattaggaaagatggcattctaattactgagcggactctaatgggtctatgcagaagtatgcttatttgccaaaagccatacgttttcctacagagaattcattagcatgcattaactcactgattctcaaaccttttgctctcaaaaccacttcacattctttattattgaggacccccaaagagcttttgtttgtgtgagtcttacctactgatacatactatattaaaaattaaaacaaaatattttaaatattccttttaaaataagaaactactggataacataaatagcatatttttatgaaaaataagtatattccagaacaaaaaaattagcaacatgagtacagttgtatgttttttcaaatctctaatgactgtgttactagaagcctgctgaattttcatatctttttctgtagtcagtctctggtggtgtcaaacatcgtgtagcttcttgaataccttgtggacacttgcagtagagtgagagtgaaaaagacagaaagtgtcttattattgttaggaaaatagttttgacttcacatacctactgggagttaccagactacacctggagaactgttgaatcaatcaacactattgaatcattgatttcgttattcacgctttcataacacctgatctctgtcctcaaggaatgcattgtctaataggaaaggtgggtatataaatacattttaacagagtctagtgatgaattctgcacctctacatgcacacacacatacatacatccctgaggtgtagtcaggcactactctgcataggaggtaatctcccagctgaattttaaagggtaggtgtgtggcagtcacagaggaaagagcattctggaataaggaagtggtaggaaggcatgtttaggaaactgttattgctgccctattaaagtcagcttattttattttctttctatttcagtttatgattacaggtggaaatctacaagacagtaaagatgcactgcatttggcacaaacaaatggtatcctcatatttcttttaccaaaaaaaaaatgaattaagtaattttgaagaagtctttctgaaaactgcttcaggtacaatacaatggatcatgactggaaacaataggaaaatggactgatttaaatgggacatgattaagatgacaaaattcaaagtactcattggtatatcagatgtttataaaactgtttcatactgctcaatgaagattattttaagatttcagctaatgagaataaagttctccaggtacacagtttaacctcaggtgtgttttttttttttttttgagacggagtctcactctgttacccaggctgaagtgcagtggtgcgat

SEQ ID NO: 131513 - DNA, 1064 bp, Homo sapiens
tcaaaaatacatgtacctgacaccaagtgtagctatttatagtttgggcataccatttaaataatggagtaaaactttcatttttacagtaataaaatgcctacggctttttagagagttctactaagcaaatgaatagatatttctttaaattagctttaaaacagagagctagcccacacatacactaagaaataaggttaaattccatactatgctaccaggacacttggtagctgctacctccaagatgaataacttgttttggaaagtgacactgctgactaaatgagtttgcagactccaactctaaacttttatttgttattattcacaaataatatgaaaagataaaagttacattaatttctcattatagtcactctgcttggtaaatcactttaaacaatgcttttctgcagactctgaaatactaggctcctaaattttcatgtgttagccatgagtaatcttaatgtttattcacacacacacacttaggaatgacagaactgaagtgatttttacttggacatggttccaaactgaaatttaattcaataccttgcatttatagtgtagtagttaaaagcatagttagggcataacaaacgtggtatccagcccctacttcatttttcatagctttataacctggagtcttttatctcactagacttcagttttctcatctgtaaaatgagaatgataatagtacttaattaatagagttgttatgaaggctaaataaaatattgagtgtaaagcatttggtattatacctggcataaacaaccttcattatgtgtatgatggaagccaccaccatgagatcatcatcatcgttatcttttttttttttttttttttttgagacggagtctcgctctgtcacccagactggagtgcagtggcatgatctcggctcactgcaagctctgcctcccgggttcacgccattctcctgcctcagcctcccgagtagctgggactacaggcgcccgccaccacacccggctaatttttttgtatttttagtagagacggggtttcaccacgttggc

SEQ ID NO: 131514 - DNA, 1053 bp, Homo sapiens
ggggaagggccgggaggtgcacgtgggatgaatggaaacatagtgattggcctttttggagttttcttcttaaaaaactgaatacattacagatgttgaaaacagcacaaaaatcataactgtacggcttgttaatttttacaaataaatacaccctcgtgaatccagaacctagatcaagaaccagagcattaccagcacccagaaacctccccgcgccctcctccactgagcggccctttcaacccttacaatgccggagggcgcaattcctgggtcctgtgaccttggtgaccgacgcccgggacaagtcagaaagacccaagggcgtggaaaacgctcctcttaccgataaacttgaagcgactcatgactgcgcatggaggacctccccagcggaagcggaagtggccgccggcaactccgcccttccggctggccccgctcagtcacccgcagcaggcgtgcagtttcccggctctccgcgcggccggggaaggtcagcgccgtaatggcgttcttggcgtcgggaccctacctgacccatcagcaaaaggtgttgcggctttataagcgggcgctacgccacctcgagtcgtggtgcgtccagaggtaagggatggggacccaggactcggggaggtgaccctcggggccccatggaggtggagaggcccctgggtacctggaggttcaaggacttcgggaacggaattggaaggtggcctctcgcttcacagaatcctatggtagacccgggttcaaatccaggcttcgccacttatggccgggagaccttgtagagttgcttgtcgggtctgggcgtcagctttttgtttagtaaaacggacgcacgaccagcgcagagggtcgcaggaaaattaagtgaaataaaggaaagtgcctaaaattgtaattgtcatgggtccagcgctcgctcaatcgttttcttcacgatcttctcctttccaatattaacagcaataaactatgcattattttcttcagtctgcaaaactctaggagttaggaattatcttaagcttattttac

SEQ ID NO: 131515 - DNA, 1105 bp, Homo sapiens
tatgcagctagtgtcagagtcaggatacaaacctagctctgtatgagctaagcaatactgtttctgccaagtaacacctttcttattcatctttgtatctccagaatttagcatagtgactagcacaagatagaaggaaatggaagttgtcattcaatgaatgttgaatgatcctgcagaggttatagcttttctcttgcgaatgctcttttctttttttttttttttttttttgtttaaatcctcattccattgttggatgtaagaggagaaaaatggttagggtatatatttaatacagtatttttttgctgctgctgtttggtgggctgtagaggaagcagccatgatgatacggctgctccattgggagggttggggtaggtccactgcccatccagaaggtatcagaagtgcagcctcctgtcagacagcaacactgaccacgtgagtaggtaacatttctaatcttcaaaatcattttggtttaagagacaaataccgatactttgcttgtttgatgagagcccggtttgaagaacataagaatgaaaaggatatggcgaaggccacccagctgctgaaggaggccgaggaagaattctggtaccgtcagcatccacagccatacatcttccctgactctcctgggggcacctcctatgagagatacgattgctacaaggtaggtgagaattatgatgactgccttctgagaaatagactttgtttcttcagtcccacacctcagcctcagaaatcacttgcccttcaaggggtagctaggagacttatttcctgacagttgtcagatgcaggcctacctcattttattgcattttgttttattgtgcttggcagatattgtattttcacagattgaaagtttgtggcaaccccgtgctgagcaagtctgtgggcaccatttttccaacagcatgtgctcactccctgtctctgtttctcagtttggcaattcttgcaatatttcaaacttttttttattattactctatctacacacagttgtggtgaactgtgatcagtcacctttgatgttactattgtcattgttttggggcacaaaaaaaccatgcccacataa

SEQ ID NO: 131516 - DNA, 1046 bp, Homo sapiens
cgtcattaagacttttctttctacattcagatttaaggtcgtacagtatactttttgctataacaaagttcattttggactttaaagttaaccaacttggattggtgcttaatatttctgagatactctaattaagagttccaagtaagataagactactctggatatttagagaaggcaggtaggggaggaatgaagccagttctccttggactgatgatggtgctatttttcagcacagtctttgactctaaggtgttttcctttatctttgcttcctacttatcctctgctgttccttgcttagagttagaaacagtctggtagttgcagtggttataaaaatatatcttgatctttgtcttacatctcctgagcaggccctgtcagggataggtaaatgtgtcctgtggattgataccatgatttcctctcctgacaggtcccagaatggtgcttagatgactggcatccttctgagaaggcaatgtatcctgattactttgccaagagagaacagtggaagaaactgcggagggaaagctgggaacgagaggtgcgttctacttgtacttcgttattccttagctatgtagatggagtgaagttttgctccccacaagcagaggtccagattccagccatgacagttactctgggcccttgcttctcagatatactttagtatctaagtgtatcaatttaacatttataatcaccttacaagtaagttaaagtgcattccctggtcgttttggctttgtctttgattttgcttcagatctccttctctttagtcctttgtctgacttttttgccttcttgctatactttccctcaacctgcctctccactattttcttaggcatttttcagtcatgttaggatggtcagttatatttttaaaagctcaatcttgctgtagtgtgaagaatatattggagaggggaagaggagaagcagagagacccttctaggattattgcagaagtttagtcaaaaggttgtcatgactaacactagggtggatgaagtggatatggaag

SEQ ID NO: 131517 - DNA, 1063 bp, Homo sapiens
ttgctaggaagggggcttagaattaacatccccagcatattatgaactgaggtttcttaatggtgcttttggagaacacttagctgagacacaacaataaatgtttttctggtcagtgggtgggggctgtgacaaggagaattggaatgatagttgtcatttttctgtctgcagaataagaggaggtccagataatgaggtgatgaaaaggggtagggggaagaataggaagggtaggctttgctatttaaaagaatgggaaaacccttaaggagacttttctaaaagtgtggatatgaaaataaagcaggtatatgtaaaaaacacttttcaatattgtgatcagatagtgtgtaatgtcagtgacacaccatagacataaagctgacccttcactgcagcagacagatttttatagtcaattagattcctttggtaatgattccttccttgcctccttctaggttaagcagctgcaggaggaaacgccacctggtggtcctttaactgaagctttgccccctgcccgaaaggaaggtgatttgcccccactgtggtggtatattgtgaccagaccccgggagcggcccatgtagaaagagagagacctcatctttcatgcttgcaagtgaaatatgttacagaacatgcacttgccctaataaaaaatcagtgaaatggtctctggtatgactgacgttcttctaagaattactgtgatgccaagtgactgtgccactgtcattgttttatcaatcgtgcatgtaaagaaaatgacaggacatgtagtcagtcagctgtgttctctgcaataaatcactgatagcatatgttaccagtaaggaaaaactgaggcagaaccagattgaggcgaacaaactctcaagtcaaaggcctaattagctgtggtaactagaaggaataaacaaagccaagaacagaaatactgaggatttaaaaataacctttttggttttctaaagatttcactaatggaacttagtttttattagaagaacaactctccctaagaagtacatagtcaacaaataagcatggaatt

SEQ ID NO: 131518 - DNA, 3159 bp, Homo sapiens
aactgctggcctccccaccaccctgggacctgctatggtcactccaggggttgcaactatccgacggaccccttccaccaagccttctgtccgccggggaaccattggagctggtcccatccccatcaagacacccgtgatccctgtcaagaccccaaccgtcccagacctcccaggggtgttgccagcccctccagatgggccagaagagcggggggagcacagccctgagtcgccatctgtgggtgagggcccccaaggtgtcaccagcatgccctcctcaatgtggagcggccaagcttccgttaaccctccacttccaggcccgaagcccagtatccctgaggagcacagacaggcaattccagaaagtgaagctgaagaccaggaacgggaacccccaagtgccactgtctccccaggccagattccagagagtgaccctgcagacctgagcccaagggatactccacaaggagaagacatgctgaacgccatccgaaggggcgtgaaactgaagaagaccacgacaaacgatcgctcagcccctcgcttttcttaggttcacaagaaatgcgccggtggggaatgaactgtttcattaataaaacctaatttgtcttgatccattccactctataataaaacaaaagattttgtaggcaactcggaatatagctcttttgaaagtactcgacacctttagataagaattaaaaccaacctatgtaactgacataatcttgatcttttaatttgtaaatattgacaattttctttctgcacattttaatcttagtttcccttttgatttttctgaaggtgccaaattccatttaacttttttacaagtctttgtaaaattttaaatgcataaagggggttggggcaggggaaccacgaagtagttaattttagaaaaggatttactatacttcactcttctttttttttccccacaagcttttgtagatgcattgtagtagtctagcttagaagcaaatgcaagttattttaatgtacaaactaaatgggtaagaggtaaaatcttcatttaaatatactatgttctggatgaaaagagcaggagtaacaattgatgagcaatattcagagtgaagtaaatctggaaatggtagactgtgttgggattggggggagggccatgggaggggtacatcgtcaacatagccgatcctgttacatttaagagtagcctcgtaggttgaatttcttctggtagcttcatggtaaatgcatccgaataagccatactggattgcagtgtttgtttctgtagggtgtttaaggacttgacttcctttctcccatgattcctctggactgcacacagcacccacaaccagccccatgcatgctgctgcctctgggcagtcgtagaatctcccacttcagtttctcgttgattgtactcacctttatggaatccaaatacatccaaaagggtaaggcagttttaaaaatgtgaaaacatttaaaaatgataatagcagggaattcttagattatagtaaatgccttttacttaactgtgcccagcaggctgggtgcgttaaaaagcccaagtattttgaaaaaactcgaacagatttgacaagggtagccagcttggagtctagcaacttgccaatgtgtttaccaatctgggggcttgtttttcttttcttctttcaaataaatggcagttaactggctttacagtaaacattgaagagaggaggatttgtttattgtcactgggaatctgaccactatactgtcctttttttgtattctgggtaaatgttttttggaaaagatttgtcttttctaagtggaagttaaatttgttatactgcccatcccctaaagccaacagagatttgtagatttaaagggatcacatttgaagacaatagtgtttaagaaagcaagcaagtcccttagcagtcaggtcataacagggcacatttctgaccgaaccctctcaaggcagaggaggagtttggtgggtttcatacaccctgcagattcctgttggctctaaccctcaattacctaatcttatgctttaacacataactgcattggatgtgagagtaacgtaccgtatggtcattgttctatatattaacattgaacactgctgcgattgctcaaggacattttatgttacggctttaaagcaaaggcatgattattagaaactatttaagcttttttctttgaaaaacaagctccttttacagaatataaacaacagtagtgcctgtggtttagcccaccaatcttgatgactaaaagtagctgatgcattgtgcatatgatgcttgagatggtttttgcaaaagcagaaatcgctgcaaggtaatcacaatagataaaagtggtattttaaacctttgaaataaatggatgtaactgtaccttggtacagcttttcacttgtttagtttttaaacgttagtataatctgaataaataaaatgttgccaaattcaatgtagaaagaatgtgacaacacaccttgggtagttctgcttgtgtttttgcatattgtaaaagcagtgtcacagctaaaaagaaagaaatcgtttctaacagtaaattattgtgctttagttgctagtttgtactgagagttgacctctccctgtgcagttttttgttctaaacttgtataaataacaattgtgtaatgtgtctccctcctacattgtaacaattgcttcagcctacgttataaataaagaaccactagattaaaaaagtcctgtatttcaagtcttgttacaattcagtttgaggtcttagtcaaatgttagaagatggactgggactcaaattgagcttacgtagaaaagtgacaaaatatttttgtgatggctataagatcattagttgcctgaaactatttgaaaacagttctagctaatgagggatcaagaactaaaagcagctgttttgggttgaaagttttaaaaactgctttatctttaaaaaacaaaaacaaagcttctgaaacatttaaggagttctgttattcccttacctttgagtccgcagacaatccaagctacggtagcagaagcaaagctggaaaactgcttctaaaataagcgccacaaagttttatcccagattggaccatttaacccc

SEQ ID NO: 131519 - DNA, 1078 bp, Homo sapiens
gagctgcagaagttcgagaccagtctgggaaacatggcaaaactcttgtctctacagaaaatacaaaaattagccaggtgtagcagcacacacctgtggtcccagctactctggaggctgaggtgggaggactgcttgagcctgggaagtcgaggctgcagtgatccatgactgcatcactgcactccagcctgggcaacaaaatgagaccctgtctcaaaggaatagcttcatttttgttttagcactttgcactacacactttatggttattttctcatttaatctttacagccacttatggggtaggtattttcacccctattttacagaagtggaaattaaggctcaataactcgctcatattcacacaaccaataagtagaactggagtttgaacctaagtgtgttagagtgtaatgcccaagttcttaacctattccagccaaatcctctatcaaacctgcctccttcatcctcaagtccactgcacacacaagtcaggcaagatgaaaatctaacagctagaatatatctatgataattgaccaaaagctatgccattcatcattcaaaacctctaagacagtgagtcttattggagggtgattttattccccaggggacatctggcaatgtctgtagacatttctggttgtcacaactggaggggtactattggcatctagtgggcacagggcagggatattgcttaaacatcccagaatacacagcacggcccctccccaccacgtcctccataacaaagaactatccagcccaaattatcaatagtacggtggttcagaatcagggctgtgagctgtttaatctgtaagctcccacatcatcctgagattggtcttacaaggaagtgagcacatgacactgatggaaactgtctttgtcccttattgtcagggactcactgtcagtagctttgttctttgtctagcccttgcctctccagttaattatcagggagatgttatagcctaggctagtctatttgaggtttgatcttcacgttgagttctggactggagaatttgtcttctttcatcccccttattcctcc

SEQ ID NO: 131520 - DNA, 1973 bp, Homo sapiens
tggtaacagaaccataacccaaagcaggtttggggtgatcatgttgaacttaacagtacacgcagactttagttttagtcttgagtgttcaaacatgtttgctttaatataaagacgaactttgaaaatgatcccctagcaagtccgatcaatgctcctccaggaggataatctgctctcttttgagaggaggaccctaatttgaaaagtaggccccttggctgccagcgttttaagcaggttttgactttagccctcacaggcggtgtgggcctctcaaggcttctcggaatctttctactgcccctgggcgccttcctttccttctgagggcttgagagggcagggagcctgccatgccctttgaggctggtttcctgggaatggagggagaagggctgatgttgctttagtgctcgctggtggccattcccctaacgggaagccatctgggttgttaaggagcgctggtcccttcagacaggagaagcacgatgtactgcccactggtgggtccccttagcttacaccggtcacctgttaggtggctgccgggtctcctgctgccacctggtgggtgagggtttttaatctttgggcagagacgaggaaaagggaggtacacagggggctcccaaagggtttccattccttgccctttagagcctggagagggcatgcagagggcctgtggcttgtcccagccggaggttccccttaaggggaccagctgccttctctggggagctgtctatggggtccccgcagccctccagtggaggcagaggccctggctcctgaccgcacttgttttgcataggactgggctaagcctgggccctatgaccagcctctggtgaacaccctgcagcgccgcaaagagaagcgagaaccggaccccaacgggggaggacccactaccgccagcggcccacctgcagcagctgaggaggctcagagaccacggagcatgactgtatcggctgccaccagggtgatgctcttgttctcagtagctggttggggccacctcagcctggctggggatcacattctggccagcaactggggggccaaggcagccttgcagctggagggacctgggctccattccctgacttcctgctctacagcaaagtccctgggaaaaaaaccttgtgtgggaatgagagaggcagaactttctagggtcagagtgggacccaagcaagtcaatagccccctggccccacagacatgtagtgctcacgggggcagaacaggagtgctgttgagccccccccctaaagcaacctgtgtatttctctcctccaacctgcagcctggtgaggagatggaggcttgtgaggagctggccctggccctgtctcggggcctgcagctggacacccagaggagcagccgggactcgcttcagtgctccagcggctacagcacccagacaaccaccccctgctgctctgaggacaccatcccttcccaaggtacgaggcagcctggggtgtgcacttaggctttctgagcagcaccaggtgaggagatagaaaactgctggtccattttaaccacaacccaccactcgctaactaacaggtgtcaggattgttttcgtcatctgggaatgctttggggagctcatctgtagttgtcaggtagctgccatataagaaagggatctggggtcgggcgcagtggctcacgcctgtaatcccagcactttgggaggccaaggcaggtggatcacgaggtcaggagatcgagactatcctggctaacatggtgaaaccccatctctactaaaaatacaaaaaaattagccgggcgtggtggcaggcgcctgtagtcccagctactcaggaggctgaggcaggagaatggcgtgaacccaggaggcagagcttgcagtgagctgagatcgcgccactgcactccagcccgggtgacagagcaagactctgtctcaaaaaaaaata

SEQ ID NO: 131521 - DNA, 1003 bp, Homo sapiens
tggaatttttaaatttgcataatgaaatgagcaaatcactatcaccattaaatgaggcttcattagttacattatcaaaaaccattgacaaggccacaaattgagggcactgatcaatttccaaacttctaaaacgtaggtcaaacatagatgcttatttgctgtcaaactcatgtgcattctttgcaccccggctcttttctcttgcatcacagatcatccgtgagcagcagagccccaatgtttgttttatttataaatattcaggtttcccctcccttgaatgtcaatgccattttgtatctccgcactcatcctgttatattaattttttttccttccccccccctttttttgtttgtttccagttgtctaacgggttttctcactatagtttatcaagtgagtcccacgtggggcccacgggtgcaggccttttccctcattgcctgcctgcctcccgcctgctccctcgggtcacctctgtccaccttccagactacgctcattattacaccattgggcccggcatgttcccgtcatctcagatccctagctggaaggtttgtgtctctccccctcctcctctccccgtcattgcctctgtgctcacccctcttctgttccaaccccctcaccccgactatcccctcatccccttcctttcacactctgccttcttccccataatgcctctccctcaggaaactcccattgggggagaagcagaaagcagccggcagctctaagacagcaatttccacaggtagctggggctgagggtcttccttcaggggactttggtcaatccctgatggacggcagtgcagtgtgcaccgcaggcagcggcaattccaagtccaaaggcccagttttgcatcaagttgaaatctatgggttggtccctcccgggggccacctgagggtgtcagcatgatcagagcttctagggggtttaggggggactttccttctggccatgtttcccattttccctaatgag

SEQ ID NO: 131522 - DNA, 1168 bp, Homo sapiens
caattttccctgaccctttctttcttcagaccaaatggttcattgcatttaatgttctctacatcactaagagggatagatggaaactgcagggcccttcctgcgaggcggtggggcagagaataggttcagtgttaagggaattaggcagtgtggctcaaccctgcctctgtaccattctttctgtgaccttaggtgagtcccttgacttctctaggacttggtctccattgaaacatgagcagattggcccaattggataaccccttccagctctaacattttgtgttgaaactattaaacagacatttatcaagcacctgctgtatacacacatgacattgtactaggggctgtgctgggaaagaccaaaatcctgccctgaagaagtttaggaagtatctctctggtttgagtgataggtaaggcccctgcataggcagcccaaggtggaagctcatgagctggtgtcccctgctgtcaccctgctgtccccacctacagatcagatttgtagtagctgctcctttggacacagtgcctcttggtccatgtttatcttttagggcagcaggcttcttttgcaagaggccatggtctgggggccatactctgtgtcacactactctgccattgtagggagaactggtacaggcaatatggtaaataaatggatttggctgtgttctaataaaactttatttgcaaagatggtttgctgaccatgtgttagtcattcaaaagactaacaccctgtcttaaactccagaagtggttgcctgcacctaactggggtctgtggacctggccagataattcctaaacatgggccaggctccgcatagaccccactttcagtttttcatcatcagagacctgtctggaggtcttgttattactgggcttgttctacagcaagagcattcaagactctccactagagagtcaaaggaactgccaaggattcccatgggcccccagagccaggagagcggatgcttgccacctttgtctttaggagcagatccttctatccagacagaggctctttgattgagattgacccaacaaagccagcccgtgcccgtttttggaaacacccacaggctcttaccttgtttccacatctcttagcctcttcagaatgttctgcaaggaaagaatgctg

SEQ ID NO: 131523 - DNA, 1031 bp, Homo sapiens
tggcccacaaaggctgaggctatgaggtagacaggcaatgacctttcatgccttgcagggcaggccatgttaaggatattgttcttttcttgcgagcaatgggagctgttgaaaagcagtgagaatatttgcattttgaaagtaatccacagccgggtgtggtggctcatgcctgtaatcccagcactttgggaggccgaggcaggtggatcacttgaggtcaggggttcaagaccagcctggccaacatggtgaaatcctgtctctactaaaaatacaaaaattagctgggcatggtggtacatgcctgtaatcccagctacttgggtggctaaggcaagagaatctcttgaacctggcaggcggaggttgcagtgagctgagatcacgccactgcactccatccagcctgggcaacagagcgagactctgtctcaaaaaaaaaaaaaaaaagaaaagaaaagaaagaaagtagcccagggctgctctgggcgagctagtccaagtgcagtctggggtgagacattaggggctgttggcatctgttcaggtgagagatcgtgatggcccagtgagggtagaggtagcagaggtgagacgaggatggagtcaagtccgtgggagctggaatagccaggaccagcgctcaaggagtcagtggtgactctcctaacactgccgatgggagtgaagagaatgggcttttgtatatattaaatcagtaccaacacaactctctgaatttgtggacctcaaaagatcactctatcttaaaaccagtatatccaactgggacatgaaataatttctttcacagtttttttttataaatataattacatgttgtattagtgaatttaataaataaacattgtagttttagcttatcatctatcctgaatggaaatgtcttgactataattatagcaatctttacagagtatacttattttagaatgctacaatttgagagtcctttaattataatacacatttaaaataactttgctataatcataggataacttaaa

SEQ ID NO: 131524 - DNA, 2203 bp, Homo sapiens
aaaataaaaaaattctggtaaagccttctgtttccatctgtaactacaaaaagtttataagggatttttaaaaataataatggccagcattcattaggtacttattatggtcactgttccacttattaccatgacatcattaaatctaagaagtcttgattttttttttttttttttttgagtcagcatctcactaggtggcctaggctgacctcaaactcctgggcttcagggatcttcccgcctcagcctccctagtagctgggattacaggcacacaccactgcgcccagcagggacttttcttgagagagagagaactggaacattataatatgttaactgcacagctgacatgtaaatagttgactctctcactttccactagaggctgcaaagccaatgttataaatgtaataaacagactcacagagttctatacgagcatagtatttgctgttatactacaattttaaactctttaattttttttttccattttcatcccaccctaagctttgtttcctaggaatttcctagatatttttcaagtgatggtaaatgacactcgaaaggttttcttgccaaagcttggcttcttctgggtatatattcttcatctctctttttaaaaatccttgctgtcttctctaggggtggtcattactaactgggaaggttttgtttagatgagaaggaaggaagatattagtaaggcagagaaggggaatgtggatgtgggtttaatcagccctaatagaaaatttggtggcgagccatggactgtttaacacatgaaacaaaggtaagactgctgctgcttgaataccagtttgactttattattttcctttttgtgtcaattgtgtatcctgcactttctcaccgtgtgcccccccgccagtggacactcttggtaagtctaccatcccaaatctctggtggctgctcacggtgtggtccttgctgtgggctttccgtggttgtccagacctctgctagctgcccaggtttttctaccagctcaaaacaatcaactgtgcctacctaattttccacaactttaagaaaattgtgtgtgcgttgtgttttaattgttttcttttttggatgtttagccatttacgatgttagcacaacactctgagagcctttgaatcatcgtaattcaatattagactcatggaaaaaagaaatacagagtgacttaaactgtcatttccacagtcaataagcatttttgcatacatatatacctgcgtatgtatgtatgtatatatttatgccacaaacagagctgcaagcctcaaaataattctcaaatcagatttggttgtgttaagcttgcaaaacatctttaactttgtcctgtctgcaagaccatatagttctttccataaccaatgattcattttttaaaaaataaatcaaaagtatttcttatttcagtagagtttgtgaaatgtttcatttcagaagtatcagatcttccaattaagtaatcagaatgattcttcttgactgaatgttgaacttcactctgtggatgatcatgctgccaaaacttcaagttgcttttggagtcttgttgctgtccctctgtcctgggaggtctgtctgcgaggtgtctgtgtggtttatcttgcctgagtgtgcccaggtgttccctgagcattttactgaacagctccaaagaggcttttgaagtggcttctgtcatttacagcaaacccagtgcacaaaggtctcctttgatggttggggctgacacggcctctatttcccctcatggcgatgttgggctagtggttccccaactttaaaaaggatcatcctttccagttctcaacattgtgattatgaaacagcttgcacagtttctagtaaacctttggaaggaaggtaagacacagtcactgttttgcttattgcagtaaaattcacatcacagaatttatcattttagccgttctgaagtataagtttcagtggcttttagtacattcatggtgttatgcaaccatcgccactatctaatttcacaacattttcattatccccgaaagacacctcatgcccattaagcagtccctccctgtttcacagtctccccacccacgctgaccctgacaaccactcatctgccttctgtctctggatttgcctattctggacattttatacaaatggaatcatgtagtac

SEQ ID NO: 131525 - DNA, 1033 bp, Homo sapiens
actcacttaagggctggaagaaatctggtcatttgaggctttcagttgtttaggggtctggttagctgacatttccctttctactagaacacctcgagggatctgtttcatctccttcaagtggcagattcccggaccctcggtttgtaaaagtgttagcagttccttctgacgcaccacgcgttcggatggatgaaggttttggatacatttttttttttgtcctgatagacggaatctgatgtatgcagccagataatcacttcctttttaatatgtttccaggagattctcaagcagcttcctgccatgcctttttcaaaaactctgatctttgatctaaaaattctctggactctccttttagcatttcaagtgcctttgtgcatgtaagcatggttttaccaccatccttgacgtgggcagacacacacggatgtgatttttgtgagcggctcactttccttcttactctgcagataccaccttttatcacattcttcgactctttcttactatatagagaggtggtttgtaatctaaaggtgtttaaatatttccttcaagaaactttcaatggtttgcctttggtaggttttatctcaaaatcattttttagcagcttgggatatgctatggctgtggatgagtgtgcctgtttttcttgaaggcaagcttgtcagatgcctactagaagtaaacacgaggcaaggagttagccagtcctcaccctcagagaaattctgggctcgtgcacagggtcaagagcacggggcagagccagcattgccgacaggtggagggacggaggcggcaggatgctggggagatggtgtggagcggacccagtaaccccaggctctgaacagtgtctcttgagccctcttcctgctccatgataatcagcttattgccttggaggtcttggagttgaccacgacccaatggggaaaagtaagagagagcatcagaaatgagaggcgttttacattgtatttacctacgtgtgccacccaaccgtatgaactcagca

SEQ ID NO: 131526 - DNA, 1018 bp, Homo sapiens
agaccagcctggccaacatggtgaaaccccatctctactaaaagtacaaaaattagctgggcgtggtggtgggcgcctgtaatcccagctactcaggaggctgaggtgggagaatcgcttgaactcgggaggtggaggtggcagtgagccgagatcatgccactgcactccagcctgggccacagaacaagactctgtcttaaaaaaaaaaaaagtattcccaaacggagcctcccttcaaagctggtatgagtgaatatgacagggcaagaccactgtgcattttgttttcgtgtctctagcccctttgttgtaaatgtcatcatgagattatcatattgtattctgataaagccattgacggcatgtcacagtttatgctttctgtgataaatgtaatggctgtttcctacctaacatattttctgttaagcaaagtggtaaaattgttccatattctgctttctcttagaatataagaaagcccgccaagagataaaaaagaagtcctcggatacgctgaaactgcagaagaaagcaaaaaaaggtaactcctaaaattctgccactgatgttacttcctgatggagtacttgatttgtttttgaagtgaaaggtgttcacttcagagacttccttaagtatgacggccctggaaaacaggtgggagcaaataggacctatctgagttcacattctcaaagtgcagaataggtattaatttgaggcctttgccaagtggtacttgacgtgttccttcccccacctttgtcttccaagtttgacagtttccatgcctattgtgcttcgtaatgatacctataaatttcttagaagccttgggataatgcagaaaggcctttatgcaaatgttctctagtaattattacagaaattatgtcattttctcctgcagctttcacagcctataatcttcaaaaccctttattaagtcttgtgagaatgctaggaatgggtgcaggggaagctgggagtcatggccatacaggggattttc

SEQ ID NO: 131527 - DNA, 1015 bp, Homo sapiens
gcatgccagggactcgttgaggccctggggatgcatagacaaccatccggccaggcccctgccctcagggaacctgctctcctgcgcaggtctctcctcaccctctgtctgtgtgaggagccggtgcagacttctgaggccttttgggccccaccaccctgcaggagcctccttctactctgttaaatgttcccctttgctggtacagcaaagctgagacttcaaataggatgtgtaaggccttttataagagtagttgtgctgagcccattaggagaaggcagcaggtcttgcagagaggtctactcatccaataaaacacaggttccttgattttcttggaatatttccccctccttcccattcccactgcatacagagaagcacgtctcaattttcttctttggggtcacatacagagatgaagagcctaggcctgaatgtgaattgagacccattgtccggcctgcatacctgctaagtggcctgtctgcacaggggccaagaggttgtggggtacaaagctcctaacccccagcctcggtgacacagcacttccttcatcttttcgattcagcctttaactcagggagcgcgacccgagtagcagccacacgcaacccactctgctagcccaagatgctcagacatgacccaggcactgctgcgtcccctggggagcttgtagggggagggaggagagactgtagggcagagcacaggatgttgggggagagagatacagggagccccagaggttggagaggtttggttgaggaattagaaaatgaggcaccatttggagggatcccagtaggtgtacatggtttcatcacgctgacgttagagcagtgaaggggccctagccagatagaaaactgtgcagataggcagggaagatgggggagtggccagaaaagagtggagagctgccacgctgcacagtgattccaggtgtgtataaataggcttagggccagtagaagggaaacctcagagctggctgcaagggagc

SEQ ID NO: 131528 - DNA, 1198 bp, Homo sapiens
gggaagccaaaagattggacacacctggtcgaaatctttgggtaaagcattgtcttagctagggcatcatgattgaacttttccaggcctaagaattgagcttcctcttctcttattagaattcaggttcacactctgatgccatttggaaacactcttactttcctttgaagactgtgttctgtcacttcaccttataaaataaaaaaatcctgaaacatgccagtgcgattgcagaagaggagtgcccagcttcatggtcaagtctgacgctcgtgtgtgcgtgtgtgcagagctgtgtagccgtggctagtgctggcctccaggcatcccccggggcagcagatggtgtacccagccttgccctgctcggtccagccagagtggcagtgatgcacgctgaggcaacttctgtgatgcaacacccgggcagtcctccagcccgccgtcaaggtgaaaagacccctgccaatttaggacttctgggctctctgagagcaggggcttgagaggaaggagagactattttctcatatagtgaaactaaaatattacaacctgccatgagccattgcagcagtgtccctaagtggccctgagcgtcccatgacacagtcccgagccctggattttgtaggagctttccttttcattcttggctggaaggaagctggtgatgcaactgttgtgagctctgaaatataaaaattaacagtcaagggggctgggcacagtggctcatgcctataatcccagcactttgggaggtcaaggcgggtggatcaccagaggtcaggagttcgagaccagcttggccaacatggtgaaaccccgtctctactaaaaatacaaaaaattagtcaggcatggtggtgggcgcctataatctcaggtactcgggtggctgaggcaggagaattgcttgaacccgggaggtggaggttgcagtgagcggaggtcacgccactgcactccagcctaggcaacagagtgagactcaaaaaaaaaaaaaaaaaaaaaattacagtcaagggaaacctagggtcaaggtcactttaaaaagctgttcagccaagggcaacggccttcctgttttgaaggggtgggggcagaggatggaggctcactggagttggttttcatgagcctcccggtcccccagctttcacttcccattaaataaccacgttgtggatgc

SEQ ID NO: 131529 - DNA, 1034 bp, Homo sapiens
aagccgccagatggtggtaggattgtgtgtgggttttgtttcctctgctttttgaaaagtcgtgaagtgggagagactgagaagtgggagattggctggaagattatcatctgataacagtttgcagtgtcttccaccctgtgtgtgggcacaatggtgtcttccaaaaatgtgatgctgaccctacctagcatttgctgaatgtgcagtattagctgtcccgtaaacaccagctgggttattcattacatactcagctgtatacagtagctgaataaaacaggttttttaaaaaaaaaaccacacaggaaattttctgcatgtttttctcttccttgaagattaaaatgagttgttaggattgccattgtagcaaaagggaagttgtacttccttttttgggggctttatgggtttatttttgaatatcttttcaagttcttttacctttgtcctaaggaacctattttcacagcttaaaggactaatgtttctcttctcttagtttccttgaaatcagattgtgtgtttgttgtaagaacatttagatcaagcttgtccaacccatggcctgttggccccatgcgccccaggatggttttgaatgtggcccaacacaaattcatcaactttcttgaaacggtttttttttgcttttattttattttattttatttatttttaagatggagtctcactctgttgcccagactggagtgcaatggcttgatttcggctcactgcaacctccgcctcccgggtccaagcgattttcctgcctcagcttcctgagtagctgggattacaggcgcctgcctccacgcccagctaattttttgtatttttagtagagatggggtttcaccacgctggccaggctggtcttgaactctcaaccttaggtgagccaccatgcccagcctgtttgtttttttagctcatcagctatcattagtgtattttaagtgtggcccaagacaattcttccatgtggcccagagaagccaaaagattggacacacccgactgagatg

SEQ ID NO: 131530 - DNA, 1077 bp, Homo sapiens
ccccgcctgcctgaaaatcatttttcttgccgctggtattctgggaatgattctggaaaaaacattaggcatggactcgaagtctgacacactcatgtgtggtagcggtagacactgccctcgttctctgaccagacagcatttccatctgttggtttaccacttatggacagcatttccatctgttggtttaccacttatgtaatcctaatgagaaaaacagtgggatttgtggcaggccaaagttcaggtgaattgctagtctctagatgaaatgccagttaatctgattgttaatcgatccctatttttgtaaacttgaaatgaaaggttcaaatttgaaatgaaaaagcaatcaagatttcagcaactcagttgcctccttagcgcagtaggtagcacgtcagtctcataatctgaagatttcaacaagtgagtgcctcgttgctcaaggagtgaattgagaagggcttagttctgtccctgatactgtcagtctaggttctaagttgtagcaacagaaatcactgcagaatcagacagggaagttgctgaagaatgtgggggagtccaaaggatccctttctctcctatgttttgtgttcctctactctaatacctgggaactatccgtttccgtctgcttatgtgtctcactctctggtgagacctggactgacagcagggacagtcttgtttgcttttatttttcctctgcccagcactgacatatgggggttgggtcacataatctagccatgggcaggatgtcggaacatactgaagcatattggtgggctgagctcaagtaataaagctgattttttttttttttttttttttttactgcctgaaacaggcacacttaacaacagccgcagcaatgacaaaaacctcatgagaagatgcctgggtcaagggtcttacttccagcagcttccctgcaaatccagtgcaaataaacataggctctcctttgcagtttgttgcagtggaatcttgtctgttgcatgctgaagcgtaggatgttaggcctcttctgacatcacagcagagcgtttgcatgttcatgttgaa

SEQ ID NO: 131531 - DNA, 1025 bp, Homo sapiens
ttcctctttaacgtcattcagcggtattttttgagtgctgctctgtgccatgcaccgtgcaagagaggggagccccacctgcaagaagcttagtcttggcagaggagacaaaaagtaaagagacaatggcaggacgggtgtgacggggcacaggggtctggtttaggcagagaggcgggtcccttggaggcagagcatgggaaatgctgctcagtctaggtgatacccaggcgaggtcttagaggtgcacagaatcctgtgagaagggcaccatcccagcagtggagtgtacagaagctgggaggtaagcagctgaacggtgtgtacagaagctgggaggtaagcaggagcaagaacagagcatttgggagctgccgggacgcctgtcacctgaagtgcgtgtgttggcaggttgtgatgatcttgtttcctgcaaagactctcagatgccagtttaaaagaacacttacagttctgcctttttgtctgttaactttaatagatgtcaactccatgaaattctggtgaaaacctccttgcatgaatattaatcacctgccgttaaccacgtacaagaaaattttagaaaggcaaacttagtaaacatctgtccaaatcatttggagcaaagcactagctccttagatcttccagccatgacactgttgtgttagtgtaaaatgacactgaggatgtgcaaaagttactgaatctaagattgctttgcatctgttttcctgtgttccttggaacctgctttttgtatttgttttcttctccttttttccaagtatctgggaaaagcccctcttctggtctggtgtttgttgtactgtggatgagcagacagctacattatggagagctgccagctaccagagtcattgcagagccagtgtgaaggcaaatgcaggaaacctcatacttggtgtctcctttggattggaaagaatgactctgagctcctgttcctagttgctgtccttcaacctggtcccaggtcataaagagcaagtgtggtttca

SEQ ID NO: 131532 - DNA, 1084 bp, Homo sapiens
ctaagaccattaaatatttaattgaattatttcactgcagggatattgtgactcatgttgaaaactaatcacctgcttttttatctggcccttaatagatctctggttcaacatttaaaggtcagagtcatggcgatcgcagtattgtcattgttttctttcctttgtgggtttgggtggaggaaaggggaagagtgggatgcgtgggaaggaagaggagtcattggaagttgcctttatcagtggagggattccaggggatcataggagctatgcttcttcttttctggccttccctggtcttgattccccagagggataccaggaaggggctggaatgtgggtgcggatgacctctgaactaggcgatcctgtttaatgcaagaaactgtattccctgtccagccattcacgatactgtttcattcgctctatcagagctcagtgaggcgttgaaattccattgttcttctttttaatttaattttttatgcaggaagatgaaaagatgttttaaaatcctcatggttttttcttcctcttctcagtgttattactatgttaacaagatagccattcctgccactaacatctgtgctcagcctgtggtcaggtcctgacttgagtattctagcaataaaatcggtgtacttaattagctttttaggtgactccagcctgtgctgctgcttgtaccatttgatgggaatttcaggaggaaggaattaaggcctgtggacgtgaagacatgtggctgacacagggtttatgttggtaaaagatcaactgtgaaatatttggagtgtccaatgcatgccgtgaccttgctagacacccttgggagttgtagagccagtccgatgccctccacaaataccttggattttctagagaggagcaaaagctatttctcttagaagattttagtgtagcattttcccacagacaaaaatgcccaagtttgggtatgaagccccaactgctaactttctttgcatctgttgaagatgatgaacaggagaaagttaaagcagtggatagaaaaacagttgtgctggctgggcgcagtggctcattcctgtaa

SEQ ID NO: 131533 - DNA, 1046 bp, Homo sapiens
agggagaggtcagatctcgggcttcagagttaggtaccgctatagctaagtatccagctccagaatttcttttttctttttcttttctttttttttttttttttttttgagacggagtcattcaggctggagtgcagtggcgtgatcttggctcactgcaagctccacctctgggttaacgccattttcctgcctcagcctcccaagtagctgggactacaggtgcccgccaccacacctggctaattttttgtattttttttagtagagactgggtttcaccgtgttagccagcatggtctccatctcctgaccttgtgatccgcccgcctcagcctcccaaagtgctgggattacaggtgtgagccaccgcgcctggccatctagctccagaatttcttagctgtgtaactttaagtggcttaatctccttaattcgagccttagttttctcatctataaaatgggggtgatgatagtgcttatgcacagggctgttgaaagaatgaagatgaatgaatgaatgaatgtgtacacagagcttaggcctaggcctggctcatgagtgcccagcacttgtgagctctcatgattaactcatttccctcctgccccaaggaccctcttgggaaataaaacctccctgaagatactttgggatcctgtaaaatccgtgtgtgttactttcagggtctgctgtggtgtaatggaagaagtgcagacttcggagctagacaccacctggctttgagtcctaggtctacccacctatggcaggtttctcttagcctcagtttccccatctttaaaatgaggatgggcaatgaagaattgcctcagagggttgttgcgaggattagatgaaattacacaaggtacttcttggagttcctggctcactgtaggcatttaatccatgcaacttattatttagctgacaaaatgcctataattagatgttagggaaattgctgtcatcgatggggaaagttccccaatggagttggaactgttgactctgctgtcctggcttctccaagtcctgc

SEQ ID NO: 131534 - DNA, 1155 bp, Homo sapiens
agggagattggtgggtcaaggtagtgacctttgtctgtgctgtcctcgggagcacccagctgtggcagcgtgcctggaatccgagtccaggagacctggcctgtccccgtgccccaccttcccaaagctgctgattccttactctttgcctttgacctctgtgctgcgtgtatgtttcaggctcaagggcgaatcctcagggtgcaggccaatgaaatgctcaagtgctctcagtcctccttattttccctttcttatacacatgtttctggctccaggtgtagttggtaactttttatctcagtgatgatgctgccttaaatacatgtgtatttaggaacatgctggtaggtggcacagcattgcaatataccaagcaggttcagaatgccatggccaaaggcctccaaaggtttccataatgatgagaagtaatgagaggcagaatctggtgacttgggttctaagctttatgtgttgatagcagagccagctggtcattttttttgtattagattttgtgctaagtactttatttgcattattttaatttcctcttaaaaccaccttgtaagtaggtactgccctacaaatgagacagtggaggcaggttggggctatgtagctcattgtaggtcacatagaaagtgagtagtgtggctggggctggtacccggatgtttctgactccaaagcctgtgctgtagaccagtgcttctcaaactgtccagtgcctgtgaatggcctggagccttgttaaaaatgtgggcggtgatgcagtgggtcaggcagtgctggggctccatgatcttgctgctggcccataggccccctgagtcacaagtggcctttttcatcctcttcttcctcccagcctttctccacctcctctttcaggtcctcccctctgttcctgctcccaccccacccccacctttcctcccatgtggctgacagtctgctcgggtagcccaggctgcttgcctgttggtgactctgttgatggatggcttgccaaaagatgtggtggcccccattcagcccagtggcatggggtgggcttagactggggccctttagggtccacaacctctttgggctcagggaggaaataggtcacttctgaaggtgacctcttccaggggaggtagaggg

SEQ ID NO: 131535 - DNA, 1368 bp, Homo sapiens
aaaactacaaaacaacaacaacaacaaaaaaaaactagccaggtatgatggtgtgcgcctgtagtcccagctacttgcaaggttcaggtgggaggattgcttgcgcccaggaggttgtggctgcagtgacagccatgattacatcactgtcctccagctggggcaacagagtgagaccctgtctcaaaaaaaaaaaaaattaaaaataaataaataaataaggactggtctatattttatccttcctactggtctcaaaggaagccacctagagtgggtcattgtttgacattttgatgaatttatactttgatacataaattttgaaccagaccatatcttgaagtgtgagagaagtaattatatgaattgcctttggaggctaattctacctgttctctcagtgtggccattactcaaacattttgggaaagcacttctagaaccaccgtcagaaatttaggcggtactaggatcaacaaacattacttcagaaggcactgaagggtttttttgttgttgttggtttttttttttttgagacaggatcttgctctgtcgcccaggctggagtgtgcagtggtgtgatctcagctcactgcaacctccgcctcctgggttcaagtgattctcctccctcagcccctcgagtagctgggattacaggcgtgtgccaccacacccagataattttgtatttttagtagtgacggggtttcaccatgttggccaggctggtctcgaactcctgacctcaagtgacccacccgcctcgacctcccaaagtgcggggattacaagcgtaaacccactgtgcccggcctatgataggttttcacctactgagaatggacttaatttttccttttaggaataagagtcagagctaaggcccaagactaaggcaagtgacaaagccactcaatactatatgtgatcaggagagtttgtgaaggacaaggactccttttattgagtcacttagaaacctaattctgaatgctgttcttaaagatgagttcccaagaggttttgaccaaacataaaattattaaggcctttgatgcctaaaatgacaacaaccctttggctggagaaatttccaggttgtggcaaaatccatctttaaaaatttttttttaattttgtaattttaatttcttatacagatggggtctcactatgttgcccaggctggtctcgaacctctggcctcaagcattcctcctgctttggcctcccaaaacactggaattgtagatgtgagctaccatgccccgcgccaccttattttttactgaccttatgtatgatatgtatgggttagtgaaaggcaggattgaggccgggtgtggtggctcatgcctg

SEQ ID NO: 131536 - DNA, 1066 bp, Homo sapiens
gctcaggacactcacacaaccagtgattgagctcccgttgtctactagatcttgcagtgctatggagagtgtaaagatgattaagctactctccttagcctcaagcaacttagcatggcagatgggagataacctgaaagctgctgattagaatagaccaagagtgataaggaccttctgtgctctgggtagggaggcatgggagatcttataggaacagaggcgttccggcatttgcctgggatgtgtcaagcattacagatgtctctgttgacatagatttctctgctgagctttgcagtgaagaagtcctgagtcttctcagaattagataaccacatccatgtttctacaactaactgttgcacctgctacctgaaggatgaccaaaccagagcttctctgtgtacagactgctgactttaagagtttattctctaaggtgatctagagtttcctgtcatttgactctgttccctgtatttattgctttcttccttttctctgaaatgctattcctttaccttctcttacctttttaaaccctaaaagcaagaaagaactttacttataggaagaaagagctagaggaaggaagtgatgtttggagggtaaataaatggaagtttgggcagctttaacgttccaggctttgagctaggcattgagcgttaactcttacaataacctggggagaatagacagtcatttctttttgtagataagaacagagaatcagaggacagttcattatttcgtacaaaacaaaaagtgcattaagactagtaatgttttaaaaaatcatttgctgtcttttaaactcacagcatagaacggcacttcccaaactccaatgtgcatgggaattgcttgggatcctgtcaaatgtaggttctgattcagcaagtccagcacagatgggtccccaggacactgcatttccgtcacactcccaggtgattctgctgctgctgattcagggagcacactttgaataccaaggacatggactgtgcatttgctagcattttttttttttgaagctacaagagggaaaaatatttag

SEQ ID NO: 131537 - DNA, 1070 bp, Homo sapiens
ataaattccaccccttctagggtgtgaacggaggaggtgaccacctgtttcctgtaggccccagcatgaaacagcagctgggccaaggccaaggttttgcgagtgatctaaccccctccctcctgctttctgcaagtgttcagcacccatcttcccaacaccagatacccagcttaccaccagcctgcccatgttggagccgtgggtctggcttcccctttcctgtgggagaagggccttctggggtctcagcccccaccccatgctgctcaggtttctctcctgtatattcctcactctagattggccatgagtgtgcatcactttaatgtcaccatcccaaaactcccctgactctgtctccctctctagttaccactccattttcctggtccctttcaccgaataaggttgaatgaataaataagttcactttaaagtctagccatcttatttgagctcttcatattgagggagtaggatggctctagaaaagcatgaaccaacacggatgcttcaggatctgacagttctggagccaggtgcttcttttgtggtcttaggcagggctgcgtttcctcatcttttagggtacacgtccaactccctgggtgatcatgctattaaataagggaacatgtaagatatagggcacacagcaaaagattgaaaattaattccttccgtagccatctttatggatgccagaggaaaatcccctcttagttcagagctggacacttctgaatttaataagtaagacctgggagaggataatttcggcagagtcagttgctattggctccttgcccgcagcaaatgctgactgttggttcctctgcagaggatcaaaggtcatcgtgcaaggtcccgatggggccaagaagtccttgtgccaaatgtaaagtggttacccttcaagggcaccctctccaatggcgatgggtgcttaggtactttcggattgtcaaggaagactttgagactcttggtcagctgtacctctaagtggacagctgggtacatttcctgagcaggagtatgaggcctcagtgatcatagataaatgg

SEQ ID NO: 131538 - DNA, 1655 bp, Homo sapiens
ctaagtctgttattgttagttctcacaatggctggctcaagtaggtttcattgctcctgtttcacagatgagaaaactgaggtttaacaccgtgcttaagaacccagaagagccgggcgcagtggctcatgcctgtaatcccagcactttgggaggctgaggcaggcacgtcacctgaggtcaggagttcgagaccagactgaccaatatgactaaaccctgtctctactaaaaacacaaaaattagccaggcgtggtggcatgcacctgtaatctcagctacttgagagtctgagccctgagaatcacttgaacccgggaggcagaggttgcagtgagccgagatcatgccattgcaatgcagactgggcaacaagagtgaaactcatctccaaaaaaaagaaaaaagaaaaaagaaaaaacccagaagaaacatggggctgtcttaacaactcatatttccaacttaggtggatcaatataaatatgttactagctaaggagatgcctagagatctaatagttgtaaagcctccttggacttaaggtgggtgattggcaggaagatgggagctaactgaaacttcaaagggtaggctgactttgggctccttctgttgaaaatggagatgtttttctttccacagtatagtgtcccctccctagtctttgggtgtgtcatcctagcatgtggagcttttgtaaacagaaaatttacagtgagtgaaagctttatctgctgattgattcgttaaattaaaaaaagccttcaatttctgcctactttccattcctatcacatccacaattgaaagcatgtattctgcacctgcctcgtttcagagtttaaatatcttctcagtgaactgcgcctgttatgaaatgctaagtacttgaaaccaaaaccacatggtggttattctggaactgttttcctttcaacttttggagactttctatttactgaaaactaagggtaaatgatttatctttttgctggatttagctgtctataaatttctctgtgccttgaaaaaaaatcacacttattctaatgtgtcctcattcttaataaccacaattggcgggaagaggggaaaaaagatttatctgccagtgagccagttttttgtttaacatctgggtctgatactttttaaattctcttctgtttatctcttccttttattcctactctggtctctccatgcttattggtaaaattagaatttattttcaggtggggaacactctgactccagctacagatacttgatttgttttaggggggccatttgagccaagcaaggtgataaactgaaggatttttacagttctgacatcagaccatctgtccgtctttctgtccagccatcagagcttcttacttcacagcatgttgctaggcactgtgggagagagataccacgataaatcaggtaaagagcccgtttattgagtaatttctgtgttccaaggcctgggctgggcactttccatatgttcttatttaattcctgcagcaactgcacaaggaatcttgttttaactgtacgtttcaaacaaaggaattgaggctcagagagaccctgggactagaaaagacttgtggttatttgaacccatcttaattgtgtctcaatccttttattctt

SEQ ID NO: 131539 - DNA, 1096 bp, Homo sapiens
tccagtttgacatttgcaggttagatttaggcctggaaaccccaccacgtcctgctcaagggacctgaagtggagagagcaggtaaatatttagacaccagtactatttagcaaaattggaggcttaaatgtaatttccttgtttcattcacttggtgaaaagattaattatgtttacgtgatgctaaaattaaattgtggtaatatgaaaatcagacagctcagaactcaaatggtaaatgcatcaagaatctgttctctaaaatccattgtggaatgagcttggtgtgaagaaactcattaattagaaattctttcttagagaatgagcattctaccatgttctgctactgtctagctggcaattgatctcagggactttggagaaccaagactttttcatctgtggttgagatcaaagaagacagagataaggttgccaaggaaaccaaaatgctacagaattatgtgctgctcatgcatttcaatgtggtttgaggtttgggaggctttcttttttttcttttggcacaaataatagtacatgaaaatgagcaatgcccatgttcccaggtcttaaaggaaatgaccacaggcttaatgtaactcaaaccgtgggcctaaagggaatcctattctttctcttctttctgtactcaagcatcagcaattaatggcgtgcttccagttggcttctctttagtgtgctttgtccctctccatcacagacacatacccacacccacaaactttttaataactttttcctgactttaaataaattacttgcacagaatttcaaaaatacaaacaattctctgacaacatataaaagttacctgtaattttgccatttggaaatacctaatgtagtattttgttgtacttttctcctaatatttatagacacaatgggtacatactattttaaatatatttataacatgaaatcccaaagttttgagtacagattttcgtggttttttttttttttttttttttttgagacggaatttcgctcttgttgcccagggtggagtgcaatggtgcgatcttggctcaccacagcctctgcctccccagttcaagcgattct

SEQ ID NO: 131540 - DNA, 2060 bp, Homo sapiens
ataggcacctgccaccatgcccagataatttttatatttttagtagagacggggtttcaccaggtcggccaggctggtctccaaatcttcacctgtttctttttacgtgactgtggcctttagaaatttttaaacgactcatgtggcttacattgtggcttgttttgtatttctgttgggtattgttaatgtatagaagacattcctcggctgggcatggtggctcattcctgtaatcctagcactttgggaggctgaggcagatggctcacctgaggtcaggagtttgagaccagcctggccaacatggtgaaaccctgtctctacaaaaaattagccaggcatggtggcatgcacctgtagtcccagctactcgggaggctgaggcaggagaatcacttgaacctgggaggcagaggttgcagtgagccaagattgtgccattgcactccagcctgggcaacagagcaagactccctctcaaaataaataaagaagacatttctctactggctaagaagttggaataaatgtttaccgagtcccatccaattattaaacagcttatgattcttactaaacagggaggattaggagaagggaacccctggggtggttgaaatgggtgaatctagccaggagaaggtttccgaggggagaggtggccttggaactgagttttgaagttggagactgaaaatcctttagggagaagaaaattgacacaaccgggctttctgacagacaaggactggcccacccctgcctctaaggaaccctggggtctgggagaggacccaaaagccttcttctaggggagcacgcctggcagctctgagatatgaaagagagaacccagcaaaaacaggatgtcactgggtcctcgagtctggggatcagggtaacccaggctcagtgaatttttctgtctctgagcccctcagatgaattagcgagttcttcagggagggtctttttctccatggctggtactgtctgactgggtggagacttatgtcccaggaaaaccgaaataactgcttttcttgcaaatgctttcacatagctctttatctggtctgtggtttcagggaagggcccttctgcagtcaggaattgtccccagcctttatttagagggctaagctagggaaatggttctgaatgtaacatgtttctaactgtagtaatctatgcccctccccccccaccaaaaaaaaaaagaccatgtggactgtatttggtagccataggtaggtagagcagtaaaatacaatttatatgattgtgctgtgtgtgctgtgtatgtcaaagcatgctcttcacacggcatgtcacgctcaagttcttgaactgccacacgtgactgcctggtgctatcagcatactttgtggtatgttatcagctgaaaccagaagtctttttgaaaaatgtcattgttgcatggggctttaatactgaaatcctaggaggtggcctttcttaggtcataattttttaaattgctgtaatgcatgtttaaagaacgacagtacacacgagaagacaaaaagtggcctgaagctttgggtggaagtcaggtagatttgattcagcaagtaatagaagtcaacatttaatgaacacttgctttgtgccaagcacactgttgtaagcactttaaatatattaagttatttaggtctcacaactttgtatgatagtttattatttccatttcacagataaatgagcttgggcacagagaggtaaactgatgtcctcaaggtcaacagctactaggtggaggagttgaaatttgaatccgggccatacaccattgttaatcgagcatttgtgttaactaccaagtacttactgggccctggggatggctctggagcagtggataagtcagatagctccgatccttgcttgccaagccataccatcattctcagcttcagtttccccaaccgtaaaaccagcacccaaaccctgccctgcgcacctgctaagatttgtttgttaggatcagttgcattaatgcaggaaaatgtgatgttcgtgcatggcagaa

SEQ ID NO: 131541 - DNA, 1027 bp, Homo sapiens
cgtggttgagacctggaaatgtacgcagctggccaaggtcaccttctagtagcaattacgctgggttaggatcagtgttggtgacttcctggtgttcttggcataaggatatacatcatacttcatgtggtctagtatgaacctttcaatgtttatacttcatgaaactcttgtttttcttaaaattctccagaattttgattgatcatttctcctgatctttgaggagggaggaagaacttctctgctatagaactcgttaatatgcctcacattttcagaaagtcctctcaccgtggaaagtgacagaggtggagagagtggatgggaacatgtgcttctgtgatgctttgcgtgccagggaattgtttctttgctaatgatctgtgtcattaaaatgaacactggatgagcgaagacggtgaaacatttaactgtaggttaataattcatttagcaaatattctaaccttcaggattgtatcagcagctaccatcaggagcgcttcaggcctgtccctcctttctttggagtcgaggcttgaggaacttgctcctcccacagctacaggtcagcgacgatgatacacctcattaccctcgtgtggggtagcagtaagacgtttccagaagcatccgtctagcaggagctctggaatgtaagtaacccaagaagtggctgttctgtaacttctctgtgatggaagtctgtgataggaaggaggccttttcctgcaaccaggatgtctaaccgcttcctgatgggcatggaggggatcagtgagttaaagtttccggcatctgttgaatgcgatttgtgtctagtagttctgtcgattataggcatctcccagcagcctcaaggaaagtcacacatgcttgtatatcctagggggaaaagggagatatttttatgcaaagtaaatgttatgaatccctgttttatttttttgtgtttgttttgttttgttttgttttgagatggagtcttgctctgttgcccaggctggagcgcactggcgcgatc

SEQ ID NO: 131542 - DNA, 1048 bp, Homo sapiens
ctcactgcctgaagtaattgcttcttagaaatagccactgcatttgttgctatcttcatgttacccaggtgggagcggagcggcccaggtgttgtcccatcaatgcacttgagtagagaatccaggatgaatgctaggcacattacatggtccccttggatgtgacaacaatcatatctggtctgtttcctcctaagaatttctgaggactttaaaatttaaccagtgggaccagtacagtttaaatgtattagctgcttgccagtaggagccaaatcataattcttagcctttaatctcctgagaaatgagctgagcagcgccatgtgatttttaggtagcttttctggaattagactagagtggccattcatgtgtttcaatctaagtgtttcactttaaagggcgaccttcctaaatattatcagctaaaggcataccctatatacacatgattcccgagatgcaagtcacagaaatagattgagtgtcatggagaaaaacttaataaactataaattctcagatacacagaatgtgaactgttaaattactatggtaattgataccatttagctattattatttaattatttaaagtcccctcattcttctaaacagggcagaagggtactttaataatgcactttttattgtgcattattcatttcatcgaatcatccatgattctggttatatctcaggttcttaactagtgttgagttcttgtaaaggaattgcttactgagttcagttggcaggttaatattaagaggtatcctctaaaacaaagttcaaaattgctggggtttgttcagattcatttgaaataatgcaaagattacagcaagctttataaaatgaaaattagttgaggctcctaaaagaaaagcccgtagcctggatggtgcaaacaacagaaatttacttctcacaactttggaggctgggaagtccaagatcgaggtgctggctaatatgatctggatctgtgtccctgcccaaatctcatgttgaattgtaatccccagtgttggagatggggcct

SEQ ID NO: 131543 - DNA, 1881 bp, Homo sapiens
tgacaggtcctgaatgtatgctgagcaaactgtgaacaggctgtcgcagctatggtgagttgtgggaaagaggggaatcctttatgggacagtgctgattggacttcccaggttcctccctagccccggcctttgaggggtggtgtttgtagcgggtggctgaccaggaaggaagccttaccacccctcacctgggctgaggaggctctgcttcgtgcctctcccagcagtgtctgcacctttggcgtggctaggactccactacctgaccctgtggcctgtccagttttcaagctgatggtcacacgtatcttcccagctgcggggctccttttgtgttcacctgagacaatcgtagcttctgtttctaagagctagtgctttgatcatgttttcatcagaaaaacatggttcatgaacttgctctttgtctagatcctgtaataatcaggttgtgcaggcatgaattgttagtaaaaattcatcagtttacagaaaaaaaaaaaacctagaagaaaataaagggacacgtctaacattggtgttgtttctgggtagtgcgtgtatggggaccattttcctaaggtttttacttttcaggttatcctttcattttggaaaaagacgataaatattatttcttaaaacctacatgtgttggtgagctgttgttactgaaaccctttcctccaaggatgaaggttctgaatgataaactttttaatgatcacactcatcccactgccctctggcatcttattggtggctgggtctggttttacttttcactgaatgttccattttctctgttgattgacgatggcctcagggccaagaggtgactactgtcagaggatacagtgtgaaccaaattgtgcgtgtgtgtacgtgtgcgtgggagggtgtgtatgtgtgttccactcggaccttggggcacaagtccctcatcctttgctcttgtgggaagacactggaccaggctgcttagtatagaggagaaccagagtatcacagggcacccaggaggaagagaggcatgggagagttgaggggcatttccatactgcactagcatgaaagctgtaccacattcagaattttagaacactgatatcatgtgcatttagaacaagcttcgtagaaatattgtggctgctctgattcctccactaagccagagcctcatatttggtgtgtagtgggaggcatctcagccccagcaagtgggagggagggttaatgctctaaacaaggaacttcctcttctgttggaggcgtgggttagtgatctgtgctgttgtgtgggaagccttgttgatttatccccttgatcttgcctccacccttcagcttgagggtgtgtgtgtgtgtgtgtgtgtgtgtgtgtgtgtgtgtgtgcatgcgcatgggcaactttctaaataccaaaatatacattctaattataaactagtgccattcgttccttgcccccaccctcccttgtttactttcttttggataaagtgctgcttctttcgaagggcccctgtttctgtggcacagcctattccagatcactcaaacgggtgtttgtgcttttctgattcctaactctgggctgccgaatgctttttcatctcctacaattgagctcagagccagagaagggcttttgaaggttcatttctgaaatgtacacatgtgtactgtcttgaagtccaagcatatcctcgggacagctgtgtggctttgagatctactcagagtggccatcctacctgccatgtttctggggggtggtacttttcagtatgtgaaaagagactgcttctaatactctatggctcttattcaagttcaagttccatgggaactgaatcacaaggtctggttttagga

SEQ ID NO: 131544 - DNA, 2738 bp, Homo sapiens
tgagactgagcgagtgggtgaactgtggatgaaatgttacgaactcaggtctgcggagatggaaaaaggagagaaggcagtgcccacggaatgaatcgaagagaaaaatagaattagtcactgaacagattatcgaattgagcaaatctttaaagaattccaaagatagaaatgtcttggacacagcaggactaatttttgtttcaacattggaaggcagccctgcttcttattatagacatgttcaaatagtttaagtgctggttactgaccagattatctggtacaaacatttatattacagcaagttacttaccctctccaagcttagtgttcatatgaataagatggggataaaaaaaatgcttatttcctcaaatccaagaactatcaatttagttgtacctttagtttatgtagcactaaggaaaaaaaaaatcctgccaactaaaatatgaaatgcctttcagagttgttaacatgtcggggggaaagaatgaactgtaaaatggattctaggattggtcttagaaacaatgaaatagaatagtctacttcctagtgttactgtgaacagtgccagatgtgtagcagttgctcactgtatttgatgatgaggatggtggtggtgacggtggtagtgtttgtgtagaaggaaacaggcctggaggctgaagcaactatgacttgatgtaagcaaaagctactagtcaagtgctctcgttgcggattttgctattttagagtagaggggtctcctgacacacaagagccctgttgcctgcaattctatgttaccagaggctgtgagtgtgtatgcttttaggtataatatgaccaagtggtcatatgcctatttaaaacctaaggggaaatgaagggctcaattttagagtgtggcttctaatcttgtgtgctcctaaactctggtctacatactcccaacgattaaagagacattttgcaacctgaaatggttgggttcagactagaatgcttgggtgctaccaaattaaaggccagtaggaagctacttggagaagcagcctctggcactgtggtagaggagcatttatctagagacgggcctcgctggaaggagatagccacgcctgtgtctcaggagactttaattagggccattggcttggctgccccatgatgacaggttgaacttacgcctgtggttctaagtcatgaaaccacccctgggaacagcccagcagaaccatgggtggcacctccaaggactggagagggggtagccctgcaggcgctggcttctgcctgctggcttccagctgctccctcctggggttccccacctggacctcacctgcttctcctgctgaagtgtcttctcaccgacctgggcacaggttacttctgtgctgtgctttgctttatttctcctttgtctgcagacaccactgggccagcaccagtccatcccgggtttttagactcgaactgaggtgtcatctcctgaggagcccctgtgatctgcgctcctctctgtgctccgtgatgccctaggcttctctctgtcatggcgtttcctgtcctaactttctgtctatgtgtgtgtctctgccctccttgaggaatgggaccacgtcttactcatctttgtattcactgtgcttttcctgtaggaggccatttacaaaaggacacgggaatggacagaggggcaaaatatcgaaagctgatatttggagggtctgcagaggaggtgggaggaggatggcttttctaagtatcctcaggaataaggagccacatatgcaggggagccaagaaagggaaaaggaaaatttacagaatctattgctttaaagagtgtggggagaaaggggaggtgggacggttctactcttgaccttggtgggagcatggattgggcgggtgggggttctgggctgatgatgcatgccaaagctgggtttcctaactggcctcagaggcttccgatttgaggaagggggatgggagggccgagtgagcacaggggttggtggttttcctccccttcagaggacacgtgtccttggcttcatttgtaggtctttgccaaggtgtctatgggaagcctccttgagcaaaggggctccaaggctgtggacgtgtgtgtctgtcagtctgtctgtctgtctgtcttagcatgaggtttagcaggcagcctcaggaaaaacttacagcccgaaagggagtgtctggccatgctgctggcactccctcttttcctagagacacgtgtgcaggtgtctgagtgcaggctaagtacaagttgcccatttcggctccagaacccagccaggcagctgttggcatagcatccctgagggaggtttcagcgttgggtggggagtggggcccagatactgatatccagtgttctcacctggctaaaggagagcagctgccccttggttacctggagaaaacaatcaggaaaggctcgtggtcacgtctcggtcccttggatcattaggtagttgcccttgatttccgtgagctttatctgactgcaagggtacattacacggtccccttggataccacgacaattgtacctggtctgtttcctcccaagaattttggaggactttaaaatttaacccgtgggagggcagggagggaagtcttggtacttacaaataaaaaagcattactgccttattctcccaccccctcccccaatatttacaaatataataaataatagctttcgttta

SEQ ID NO: 131545 - DNA, 1135 bp, Homo sapiens
ctttccttagttcagatctgatcacccctcttccctctttgaaaactccccaggacccccattaatggtcacatgataaagctcactatctgccaactggtatgctaaccctcggccagctgggctcactctgcgctgatgacccctcctcattctccctccaccctccctatcccatgaccaacaccctatcacaggggcccttcatctttttggacctcagaccccttcaaggaacagacagctatggactgcctccctagaaaggtacatagtcactcagttttccattcagtttcaaggggtctgtggatcccggtggcgaacttagccggatgcccatgctagaccatgcattctaagcctctttgtcgtggcttgtgccattttctcttatatctttgttcctttgtctttgttcctgtgtttccatcagtatttttcttcagtgcactttcctgtcagagttaatttttccctctatcgtgcttgtacagcacattaccagaacatctatttagcatttgtattagagttgatagtttgcatggctgccttgcccttgtgttcctgagcacagtgccttgcatgtgttatacacacagtcatgtgtccatttattcattgattcaacagtttcttaagctcttgtgagctagccacagtgcttgtcctggggctgtgctaggaaatatgatccagtccccaccccagggagatcagtttaatggagactgtaaacagataagcagaatgttatcatgcagtgagactattgaacatttactgtgtgctgggtgctaatgagcacattgtattaatatgtgtgttgtctctgaattctcacaacagctttgtgaaatagggtctaatattttatggatgaaacaatggagaccacagctaggttaagtaacttgcccaaaatcgtgagactcatcagcagtagagtggaacttcaacactgtagactgtctctgggggccagatttttttttttttttttttgagaaggagtttcactcgtattgcccaggctggagtgcaatggcacaatctcagctcaccacaacctccgcctccggggttcaagtgattctcctgcctcagcctcctgagtagcttggattacagg

SEQ ID NO: 131546 - DNA, 3025 bp, Homo sapiens
aactttgggggttgctgtgcacgccatgcaattttagagtagaaggcagccaggagggcgagactagtgaagggggcttcgtgagaaagtcgtgactttcctggcccttgaggacttggcaagtgggtggaaagagggaggacagtctagcaagaggggccccatcattcgaggtatggtgtccagcttggtacccatgcatgactgtgaggagacaggtctctggagtggagaacgggggtagaagcaatgggagaaagaaggttggtgcgggtcatgaggtcaggtgaggatttgattctggaggagggctcagtgggaaaattttggaggtcagaaatcttatggggagaaaagtatttgagggagcctagcctgtcatggtggatgtggaagggaggtcagtttagaaaggcagtggttggagcaatctaccccaatgagcttattggcattggcatgcaaaggcttttcaggaaaaaaagaaaaagaaaaaagaaaaatgttctagaagatcatagccatgatcttgatggcttcatcaggactaatcactatggaaaattaaggatgcccatttcttatatttaatgcggtagctgtgttttcttttggttgacctggccttttggcactcctgggctctgtatcttaagccattttagagaaattatttgatgtcctcagagggaggagaatgctaaaaccacctcttttaatctgcggtctctggacttttcctctttaaccactttggagacgggatgaattggtttcttagtaattaagagccaggagctctttttattgcttgtccttaacctctgacttcactgccccagtctaaacatccaaatgagatgatgttatgaaagctcttggtaagccctagggtgctgtacaaatggtgtttatctgaagctcacttccttgcttttagtcatgttgctgaaatgatcaatcctaagtgtatcatgtttgctgagctcatacatacatttgtatttaaatttgtagctttttattgattttcgagactcctttgcaagtacgacgacgtcaggagtccctaaccatacctgccaggctgtgtggggtgccgccaggctgtgtggggtgccgccaggctgtgtggggtgccgccaggctgtgtggggtgccgcccgcctgagtgtaatctcctttgccaccactagtcccttttgtttgttcaaccatattggccaaattcctttccatcccaggatcacaatatttgctgttccctctgtttggttgctcttctgcagatctttgtgtggtttcagctcaaatataacctcaggagggccttttctgaccgcccagcaaaaataccccatcctcctcccactgcacaccccatttatcctttctgttccttggcagtgttttatggcacttagaattctatgaaattcttatttgttttcatgacctgttttgcctgtttccaccctcccactagcatgtaggctccatgagggcagcactttgtcttgtgttctctgtatccacagtacctggcgctcagtaaatatttattgagtgaatgaaatgaataagaagtttacatgaatgaatgttaaaatagcctgtgcttgcagacacatcctactgcagagatatttggatgctattagtagagcaggagcaagacgcgcgtaccatctgcctttatctagtgtagggagattcctctagtgttctgtagctatccactttcttttaccagtactaaactcaaaagagtaaacattaactttgcttagccaaatgaaaccagcagattttagcacatgatctataaaggtcattgctttgctttgtgtccctgaatgtatatagacaaagacactgaatgttagtagaaagcagccagaaatatgtaggtcactgtctttgactcatttttggctggaaccttctgcagtggtcctacaaaacaaaccccaaaataaacaaaactaccttcaatatattcactagccagctctcttgtttgccccaagtccaagaaatctggccttcatctaaaggaactgttttcttacttaggatgtcaatcattaaaagtgttcatttcatgtttggagtgagctgtactgtaaatgctgggctgtgtggttgtatcagtttgtgcaaacagtaggagccaaggacgttttattcacccctgagttagcatcatttgtcacactatctcagcggagcgagacggtggacacctacacagtttctcaggctgtgctttctactaattgtttgtttaattagaaaatgagtaattatttatccagaaaatagaatccaaaaccgtggggctgaaatcttctctaattgcaccatgtgatcatgcttttctgaggattgtatttttggtgtgtgtaggtggtaggggagtcttattttgtggctggtgtttactgagagatccatcttttgctcagcacctcaagtggaacaaaatgaagtcagtggcaatcaacctgctttgtaaaaaagtttaaaagccaggtacaatcagaatatctgtctaaacagtgaggtttgtattcattcaatagctttggggacctgctacatgtaggacatcattgaaggtaaactaatgtgtgggaaagggcccctgtgtacaagaaggtggtaatggtggtttgcacttcacgggaacaaagggagtcaaaccttgacaagctttgtggaatttgctgggcaaaagcttgtttggggtgagatcctgtcgatatagctaagaatggagtttgggttctgggtataggtcagctttttgatgggtgaccaaacacactgaggtcttcattgtggctaactgctgatgccgtttcatctttcttttctggtcccgttcagaggtatgaattttcccttcctaatagccgagtctggcatgctgtcgaagagtgtcacgggtaggtgctaagttgaccttgtaggtctgttttccatcctgacacaaaggggctactgggaagtttttagccag

SEQ ID NO: 131547 - DNA, 1022 bp, Homo sapiens
tgaggctccatctcaaaaaataaaaaaataaaataatatattctgtacctgccccttagacagtctggttcattaagtttcttggaaaggttcagggaagagccttgtgccctccgaggtgaccgggtgagatgtggtttggagccccttccaccctggatcatgctgcagcttggatcattgaccctgtctcctgctctctgaggaagaggacccttcctgtgtctggagcaagggccatggatttcacagttgggtggcactgacaaagctgcaaaggctcgatggctttattagcaactcaccttgtgccatttttcaggtagatctggctgttggttccatgaaatatgggcacgttggtgaaatactcttaggcttctaaaaaagagaaaggaaaaaaaagaaatagtgctttcctctgctcgacacaccacagttccagcttcaggatgccctaacacaaggcaagagaaacgtgcagctttgaatctgggtctccttctcttcttgtagtaacataaattgacgcggcccatctgtgctgcttcagaacaaacaagaatgaagtcatggtgcttaaaatagcacagggtggagtggctgagagcaactctcactcttccacctcccctggggactttcacgcagggttttggaatggtggctgtgggttcggttcccttggcaccacatctgggtcatgcatgtgcttgtgaccagcttttactccacgtgcaggcagtactcttaaagagtgatttttttttttttttttgtgagacagagtcttgctctgtcacccaggctggagtacagtggtgcgatctaggctcactgcaacctccacctcccgggttcaagcgattctcctgccttagcctcccgagtagctgggattacaggcgcctgctaccattcccagctaaggagtgattttctctgagagggacatttgctgtgaaagtgagtgtggtctcttatttaatgttatgtggctttcccttcttcatatctcctgt

SEQ ID NO: 131548 - DNA, 1486 bp, Homo sapiens
gcctggctcctaaggtgagattgcattttgccccttcaagtaacctactgtgattgcactcgctttatactgaatttgaagccccaaaccttggattaaaaaagaattcaagggaacggagaccttttcacttgatacttgaagattcttaacacctagagggagttgagactctttgttttgctgagaagttgtcttggaagcagtgacaatattgatgttgacaacattagcctctccattacctgagtttagatttgagcacgttctttcatttgcccagacctgtagcagagcagcagaaggctggccaggttgcctcacatttgcgtctgtccacatgaggttttgagctcagagtctttggatggtcgtgagatcttgacttgataaaaatggctctgttcaaagaaaggtctgagtgttctggtcactaaattagatggcaaagatttggagatgaagagctttgctttggtctttcctgtatcatttttctttccatgtccctgcagtgtctttactttttaaagaatttaatctttaataccatctttgcattttccatgcatgttaggaataatgtccagttttgagacagtcctgttacacattctgagttatgattaatttttaaaaatcaaattattaatcaatacctttttattccttcacaaacgcttcatgtgcccgacttagccttagaagttcttcattgtttttcttattataaaagtggggtgggattagaaagtgatggcttaatgaggaaggaagcacagctcaaatgccattcatatgaccagggtctacctcacatacttgttagaatgaaatgtgaaagtgccttaaaagacgtcacctgctacatgaatgtctaccgcaacattattcgtgataaccaaaaggcggaaacatctcagctgcccattactggatgaatggataaacaaattgcggtatgtacataatggaatattattcaaccgtaaaaagggacgaagtgcagatgctacaacttggatgaacctcaaacgtgttagtgaaagtcaagagacaagaggtctcatatcatataattccacttatggggaatgctcaggataggtaaatccatagagataggaagcagtttccaggttgccagaggttggtgagagtagggaatggggaatgactgcttagtggccatgggggtttattttggggcactgaaaatgtttttgaactaggtagaggtggtcattactcacattgtgaatgcactgaacgcttctgaatcgttcacttcaaagtgattttgtcttatgtcaatttcacttcaaaatataaaacacacacatgcataatctgcatcaatgtcactatatatggtacaccctattcatcaccaggacctgtcagcctggatgtacttggtccccaaccctgtgtcagagggagaaccaaacacacctttacacataggggacccgaacagagctca

SEQ ID NO: 131549 - DNA, 1048 bp, Homo sapiens
aacgttaaaacatttgtgtataagaaactttttttcttttttttttgcttactttaaatggaagtgctgtcacattaaacatcaggtttaaatcacatggaaataaaatggggccagatagttgaatgtactgtcatttcactactttaggaaacatcaggagaggaaccaagatggtctgaaaaggtcatagactggggaaggaagggctgggatgaccatttgtcagctttcaaaaagcaagacaaaatggttatgcctggttcagatcccagccatttttgttttcttcaagaaagtggttagaaatgtgttttggtttcagaaaagccctggttttctttgatgtttagtataaatttggcttgaaatgccatattccatcattgtcatatgtaggcatgtgctttttgtgtgtgctgtaaggacaatgtctacactgggtcatttccctccccacccagttccccttcgttgaagtaggagctgctgtttcagttagctgccctgagctggccttgcagttagccactggcccattcagcagcctggtctccccttgctgactccaggcttccttctgcatcacgagagccaaaccggccactttagcctcctgtctactgtattcttaccctgcaggaatggaggctgtaggctagagcctgcctgttccgtgaggctcagatccaaaggcttactctcctggaatggggcctctctcctgtctctgtgccgcccctcacacctgtggccttgtgcactgatggattatttgcccgaggtgaagaggaagcgttgaagggatagccgtgttagttttggattccagctactttgctgctgatggttgtgcaacctccagggacctgctatttagcaaatagggccgagcacagcctgggggaggctgccgaagatgggggtgggcacaagttgatgactagtgtccccacccctgctctgacttcacttaaagacaacccccaaaatggctttagcgtaaaatggaaaagatggtaaattattctggcgtgagggctaccct

SEQ ID NO: 131550 - DNA, 1023 bp, Homo sapiens
tccatagacatacctcttaaaccaaacctaactttgtagcttatctgcccccacttcattatctttagttgacatttggggccagtgatggaacccggtggtatctgtctggcacactcacaaagaaagtgttattaaatctctcaaatacatgtagcaggtcaaatatatgccttttcttatgatgttgaagttttcaattactgctgcttttatgagggagaaggaaaatctacccatccttttagaaatgaatgttcctaatctcattgcttccttgaaacatggccgccttgtcattcgttcttttctttatgcttgcaactcacaaaatcttgttcttttctgttgctctataatttataaaaccgtgttgcagttggcttggttagaatttacttaggcatagttgagcctttagattttccttctggcatggacaaaagcgtcattaattatgaatatgaattcctttgcaaaatgacaagattgaacatttcctcatgccagtaacccagctgtctcattctgatgtgcaacaaagactttttagagattgtttttaatggccgtggtatcagacactaaaaaataagaagcttaaaaggaatgcaaagtagcttacagttcattcgtctagaaaaaaagaaataaagaaaggtttttgctatcctgtggctgtctttactctgattgtacatttgcaatctccaagttttggccgtggctgcaaaccaaatggttgtgctgctctgctgttgtcagatacaagattctatttgttcagatgatcagtatttgagaatcctatggcccaggtcactttttcggtctccttggtttgataatggaaatgggagtggtgtcagagcccccaccgcatgtgggtaccggcttgttatggcctcaccaccatccacttggtaacttctcttattgacactggaagaggctgcaactgggctctgattccagagcctggaggcttttaactgctgtattatggggtcttggtcctgagtg

SEQ ID NO: 131551 - DNA, 1070 bp, Homo sapiens
aacatctttttaaaaatggcccgggcatgtgaagtttgtcttacgattccccattttttttaaagctgtcattgtttggggtgtgctttctatgaaacttcagactttgtgttgagcccaggacagtagggtgtcatgcatttttagcatttttacaactcatactatacataagaactagaaataacaaatgaatctgtatatttttaaagagtgtttttattttataaatttaaaaaaataccttgtttttgatgtttttcagttgatggagttatggttgcttatgtgtttgattattttgacgggcaagtacgtatatttaggagatttgtaaccatgagcctagcattactgctgataaaacgaatccctcctttctaatcccattgctcttttcttgatgtaaaaactgatgcctggcgacagcactgttccccatttgacaagtggccttttattattgatctttggttgggtagcagcagttgccagagagaattgttcattgtggtcaaccagtgctcctgcctcagtcgtgttttgcttttaaccatgtcttcctggaatgacacttgaaagggcagtcatcatgtgttagcccagaatgaactcaccggaatcccacatttaccaaaacatatcctggatcctcagggcaggatgtcaccagaattctataatcctccagcagggacagtgagggatatcagaattccacacccaagcatgtgtgtctgtcctgctcaggattgtcttacccctaacagagagaaagtcttgctccattcaatggggtttccccattaggctttagtgtatttccccagatgatacttgaattacatctggatgtgtgtgtgctgttccctgtctaacctcggcagccttcatcaatgccggtgaattatgcgatggtggtggcggcggcgggagcagcagcagtggggaggaaggtccaagcttggagaggatgtgtgtttttatgggtgactgagttgatttgtgtgcagcgtggttatttgtgttgttaggcagtttacataataaagtggtttactcagcagttg

SEQ ID NO: 131552 - DNA, 2581 bp, Homo sapiens
atgcctactttttagggtaacaaatttaagattctggacattaaagatgatctagtctgcctgggatccatttccttccttctgagaatctgaaatgccttcctcaggcattggatgtattaccatctaaacttccctgagatggttgttcaaaaccatgaaagtaattacagaggcagatgaaaatgagagtcacacaacactgctcttcaaaggcccttgctgacacaagcagatggcacagtggccgggatgggccagtgctgactaagagggagtgtgtcgtccgctctgtactccgcgcaagtccctgatgtgtaagggcacaggcttacaggcgtacgaattttattccccattttgatcccattttgattctgaatgcattaaaaaaaatctgtgtagcacaaaaaataatctatgttgttgaaataacaaaagtctatatgcggtagttagaataacaactagcttgggatctgggatacgtaggtttgacttcgtgcctttgcagctatgtgaccttgagtaaatatttcccttctctgggcttccattttcccacctataaagggcctaggagcctagatcatcacaagtaatttttttttggctctaatattctatgatttaaaatcttgccttggttcttattagctatgaatgaagtgtaaatttccttttctatattatctttagagcttccaatttttgctctgagtacaaaggaagtggaggaagcaagattaagccaaagataatggagagagaaggttagaagagaaaagggaaaattacagatgggcatttgggttgaggtcccctctcagacttggagtgtgtgtaggaggaaggcaggtggacgccggaccttctaggacaggcatcgaaggctggtccatcagacatgcgctttaatcagtgagtctggatcgccgaggttggtgaagcatgttggtgaagaaaattgctgatggcttagttcttacaaatgtgttacacatttgcagtacagattttggtaaatgccatggtctccagatctggcattaggcatcacagtcactcaagaagttcactttaagggacagatttcaaggccctgccactcccatggaatcagaataactgggtgagacccaggaatctccaattttgaaaagctttccaggagatgttgctctccattgaggtatgtttgtgctgtcctgtaaagcctcttgccatcttgccataacccacctgtccgatgacatctccccacccatggccggcaactgcacccacaaagaactgctcactgttttctgaaacccttaaaacccttgatccctatctgctggcacatgtgcattccaggcccagaatgtcctttccagccctccccttcttcaccctgtttgtatgcttgaggatctgctgcttgtctcccaggagtttaagagctgtatcacttgtgagacctttgtcttccctcaggaagtaaactgggtccttgctcagggcctcgggggacatgctggggtcagaggattcccctagctgtgctgtcactatcttccccaccagattggagacacctctaacaggacctgctccttcctgaggaactcactttcccagatgctgagtatctggccttcagcagggtgcagacccatctgctgaatgaacgactgcgtgcaaacagtagcttccacttttatgcagccctcatggatcctggtgggaagcccgtcagttctcgagcaaggggctgttgggatggggtcttggcaggattcctccctggagttcagaatttgaatcttggtgacccctccctgaggtcaagtctctggtgcaaaggacaactgggtagaaggcactcaccctgcttcatggatggagtggaggaggggagggaatctttcctctgaggggagaaggtgctgggttgtttgggttcccagctgggttgtttcctggctccagccagactgctcttgtttgctcctgagttttattttaaccagattgtttaattgagacttcactagcctttaacttctggattgcctttggtgttcaagcccagaactctttcgtgtaattagagtcttactatttctacctagcaaactttttttttttctttttaaaaagattgatgcatccacatgttatgggggcacatatgatactttgataaattgatataatgtgtaaagttcgaatcatttgagaggccgaggtgggtggatcacttgatgtcaggagttagagaccagcctggtcaacatggcgagatcctggctctactaaaaatacaaaaaaattagctgagcttggtggcgggcctctaattccagctactcgggaggctgaggcatgacaatcacttgaactcaggaggcggaggttgcaatgagccaagatcatgccactgcactccagcctgggtaatggagtgagactctgtctcaaaaaaaaaaaaaaaaaatcagggtaattgggatatctatcacctgaaatatttgtcttcttattactacttaccaaactctttagcctcaaactgaaaacaattttttttcaaatt

SEQ ID NO: 131553 - DNA, 2754 bp, Homo sapiens
ttgtatttttagtagagatggggtttcaccatgttagccaggctagtctccaactccttacctcaggtgatctgcccgcctcagcctcccatagtgctgggattacaggcgtgagccaccgtgcctggcccagaatatgtctttttttttttttaagctgctctactgttttaaggaacttagatatctggcattgcatgtttgaggctctgtgataataatgtttttatattttaatgtttaattcttggatggatcctgtagatggactggaaagagattcccagattgtccataagttcctgtagtgggaacctgggattctgaagatgctgctcccagaatggttcttggcgggacactgcagggcctggaaattgtcatctttgaagggaagaaaaacagccattatttgtgcaaaaagaaaccaaagagcctcactgcagaagtgatgggggtagagtaggagtttggaggtgatgtatttcaccaaaggcaaataatctcatagtgaacaaactcctgctttgacatttttttttctttttttttttttgagacggactcttgctcttgtcacccaggctggaatgcagtggcacaatctcagctcactgcaaccttcccctctagggttcaagtgattctcctgcctcagcctcccaagtagctgggattacaggcgcccaccatcacgcccagctaatttttgtatttttagtagagacagggtttcgtcatgttggccagactggtctcgaactcctgacctcatgatctacctgcctcggccttccaaagtactgggattacaggcgggagccaccgcatctggctgctttgacatatttttagaccatgggatttcagatcatttttagtgatgccaggatactttctgtttaaaatccatacgtgctactattttcattgaatgtgggagtgtgagaactctcaaataacctaaaagtatatgggtgatagaaagaaggtatattttacagagataagagaaactcgaatgtccttcttagtaagtgtcagaagtgacttttattaatttttacttaaaaatttaaaaaataggacatgctctttagtttaaaaaattgaaataagtaggctgggcgcagtggctcacacctgtaatcccagcatttgggaggccgaggcaggtggattacctgagatcagaagttcaagactaccctgaccaacatgttgaaatcctgtctctactaaaagtataaaaattagccaggcagaggagtgggcacctgtaatcccagctacttgggaggctgaggcaggagaatcgcttgaactcgggaggtggaggttgcagtgagctgagattgcgccactgcactccagcctgggtgacagagcaagactctgtgtccaaaaaaaaaattgaaataaatatataaactaaaatttatcctccccacttccccgcccctcccgggaattgggtttagtgtcatttacagatgtttttgcatatataaacaaacatgctgggaggaaaaaaaaaaaacaacactagttttccacaatatgtggaatgacacatggaataaaatatacctgtgtgacctttttcagaaggtagcccctaagaaacattgttctgtgctttttactgcatagtatattatagttatctttccagtacctataagtccaccttattctttctagcggccaaatggaatttctgaatgtagcactgtctgaatatagcacaactgagtcattattctcttgatagatatttaggttatctccaggtatttgctactacaagctctgctgcaattaatgcccatgtatatatccttttggagtcctacaagtgatctatttttaatgatgtatggatcaccaaggaaatgataatctgtaaaaagtgcttcaagctgttttggtcagcagcaaatagatttgggcttagggttggtgtaggccgtgactctaacagagtttgtggtttgatatctaccttctccagaaagaatatccttggttactcccttgcttacagcctttacatgtatttttttttttttatccctcttgatggaagtggtaggagggaattgcagttatcattaagtgcatctcttctgggcaagtgcccagcatttcaagctagcaggtcgctctggtttccaaaatattagcatctcatattgtttccaaaagggaacagctctgagtggtctttgtcctttataggaaatcttttgcactagctattaataaaatttacttaggaaaaactttgaatactagtcactataagagcaaaatcaatctagttgttatgtacctattgttaaacagaatgtggaaatatgttagaacttaattgctttcattttttttaaatgaaagtgtataagtggatattataatgtgtatatttgggttaataattaaactataatggaatttcagtttattagcactaggcgcagttccatattttgttgattttagactctggatgaatatacaatttgttttaaatatgaaagtacgattttctgtattattgaacacaaagaattggtttctaggtatctggtagacttggaacccgaggctttgtggagcagggtctctgcttccttcacatccataatggaccagcacgtggctattacaggagctgagaaatatttgaactgagtggcatgcatttgtctgggctacttaaaaaaataagaaaaggaaaattaaggaaat

SEQ ID NO: 131554 - DNA, 1213 bp, Homo sapiens
ccacctgtcctggggaagagccccagtcactctggttccctgcttggtgttgtttggggcaagtgggagaacagccagggccatgtttcatgaacaagtggttcagggtggagctttaaatgttctgtacaccttaaatttggacccaccatctaccaactcaaaagtgtatgtgtcagattctgccaaactagttcagttgatgtttgtagtatttacaagattataggaactgagcacattctaaactgattcctgagccaatacatgtatatagaatccgggaaacgtattgcagacctgcaaaggaagagaacatacacagattgttccctgcatgattggaattgggtgctctgttaatgtagtaatcagatgtctatcgcagtgtgacttactgatgtctttgatgtgttgcaggggagctatccagtttgggaagatttcataaacaaagcaggaaagctgcagtcccagcttcggtaagtagaagcacatgttctacaggaaaaggacaacatcctcagacaaggatggagtgggacagaccaaaatgcagattgattagggttgattcaggaagtgctgcagatagggaagcctgtgctgggttctgattggagcatgatcacctatagccatatatcctgggccctgattgccatatgtaaaatgggactcattcatgtctgctttcctccttccataggaattttgagagtcaaatgaggtaggtactgtatgtaaggtagcaacgggtaacatttatgtattgctcactatgtgccaggcatttgttaacttgtttaaatctcataaccccacaaggtacataccattattatccccattttactgatgaggaaactgaggcacagcgaagttaaataacttatccatagtcacatcactactaaatggcagagcaaggatttgaacttaggctctctggctccagagtccatgttctcctccattctgcttactgcctctccacaaatagagtttaaaacctcctgttggctgggtgtggtggctcacacctgtaatcccagtactttgggaggcccaggcaggcagatcacaaggtcaggagttcaagaccagtctggccaacatggcgaaatcccatctctactaaaaatacaaaaattagctgggcatggtgacgagtgcctgtaatcccagctacttgggaggctgagacaggaga

SEQ ID NO: 131555 - DNA, 1032 bp, Homo sapiens
tacaggcgtgagctaccgtgcctggcctggtgttttttttttgtttgtttgtttgtttgtttttttttttgtatttttagtagaaatggggtctcgccatgttgtctgggctggtcttgaactcctgggctcaagtgatcctcctgcctcagcttcccaaagtgctaggattacaggtgtgagccactgcccctggcccacctttttcttaagaaatactttgatcgtcttaataatatttctccagggctccctggatgggagtgtttggtgtttgggagaggagggtctggctctttggtccttcttccttgtgtagccgagagatggtggcacctttgcctagaagtaggtgagcagtgtttctgaatgctcagatttctcagaaagcttttcatcgtgtcttgtggctcagaaagagaaggaatggtcggacgaagctgctattggttggttgagcctttgtgttcttagaggtgccaactgctgtccctctggacagagatctccagtggccatcctgaggactctgatcttggccctcatctctttaattggatgtaggtgtacaaggggtgttcttatctggactggattaaaaaaatggtatgtatgttgggtgtcataattggagtccccactatgtcttgatgggccttgaatgatagcctgagctctcacaagttttcatttgacataaattaatatacagttctgctcttgggtggaagtaacccccagggcacacacttgggatggaggtcatgtcgtgacaagaccctcacacaggtgttggttgacagtagctcaggtgtagctgccaaagggcctctgccaggagccagccagacacgattcttgcccggctgttgcttagtttcccataggggcaaattgccacttagaggaataaatccagaaacctgtgcttgagccaagcaggtctccaatgcatgaaggcagaactgatgaatgtggtgtagcagcatgcgtgaaacagactttagagttcgggtggattgtaaattcatg

SEQ ID NO: 131556 - DNA, 1833 bp, Homo sapiens
ctcagccagatccactggtgagccagcctctgtctggcaccttttgggcagaacaaaggcctttgagctggaaccccactctctagagcctctgccctcctggttcctacttgattctcccctgaactgaattcttcctcctcacgtaagtcctccccagctctgtggctcctcccaagttgccctttctctggcagttcccggcccctgtgttccttgtgtggcagcgtggtgttgaattccctcagctgtcccagtggcgctgggctgggagaggcagttgctgcattatttatggagcaccggtcaccagccgtgctgatgagctacacacagttattctctgcaccatgtgtgggatgccgtcctgggcctctgttcaataggaaacaaaacgaagccaaacaaccctaagccagaatggctgttggccgattgctgtgccttgctttgtgttaggcaaatggcctgccatgggtcctggctctagggaaagtggaggaagaggaggaagatgaggagaggcactcggcggtgtctcctaagctccactttgagggtggggtgggggagaccaacttgtggatttgtttaggtggccaccaaactcttcagttgaaggagatttaggaggcctttttcctaaaaactaagaaaatgacttcattattttcctctctctcccaggaactagagtgatgccaggtatgtgaccattagccaggttctcccatcacctgtctggtctggaatttatgtcactcactgtctgaatgaaggccaccccggtcttcctcacctgtcccaagtccccaccctgggtcttgccctggaaggctgcccttgcccacctgggccacttcgcccatgtcctgcctggaggagtggccagcataaatgtgtcactccagtgtcccttggagagagctggtcagtgttccctgcctccttttgtgtcagctgcaccccctaccagaagtacttttccttcctcccttcatttctcagtccttgttccacagtccaaaggggaagccctcaggcttatagacagcaaactgtatgatgtgataagttggggagtaggtgcagctaaaccagagggtaggtgggaagggggtgtgtcagagaatgttccagaagaagtgtcacagctgggtagtgacagctgaataggagttttcaatattgctgaatccccctggagatttgaagagaagcagccacagggtgtggtgtgtgtggggagtgtgggtgagatcacgtgttcagggaagccccatctctcacccaaggaagtgatggagggagtcctctttacacgcttgtaaacaaactggctttctcttcccgtttctttaatagggaccttttcctttcttagaacccagtgtaatctgagttgtattttcaacgaacgcactgccaagggctccagaaactcctggctctcctctctgaagaaattcagggggctcctggaggaggtgcgccttctcattttgccttgtgactttggacttggcagaagccggggcgtggcgggagttttgttttctttgatttgggtctgtctggaacgttgtgaagcctttatgtgttctcaggtgaaatccacagtggggtctgtgttgaattgttttcacggctctgggagtgcattccgagggatttcctcaaatggggacagagctcagccagcaacctcaggaatgaactttctggggacttcttggtgggtggatgcagatgcaaaaaccaaggacagttggggaattgctttctaaagggctctaagagcttccagtgtcttgggttgcgggtttcttttga

SEQ ID NO: 131557 - DNA, 2022 bp, Homo sapiens
gggtgggagttgaggtcacagaggaggtgctatctgtctccgttccaaaggggaaatctgcttcgtggaagatggcagagcacactaagcgtgtatagcgcagcaaggccagtgcttgccccagggtggatgtgacaagttcatcatgctgcccttggctgcggagaggtctcagtttaaaagggaatatggattaaaaaaagtaaggaaaagaaaacaaattaaacaacaaaaattaaaaaaaaagaagaaagagaaaaagaaaagaacataaaaaagggaatatggaatgaatacagaggtatgtgtgtatttaggggagcaaaacctcaaacatgatcctctctagggtagagggtgtttgtgtgtctgttcagggtattggagagattggccccaagaggaactaatccctaaaatgcagaagcagttttggagttgggtagaggcaggtcagagcggacacttccagggaaaagaaatgggtgagtgtaaatggaccaacgtgaagtcacgcttagaaggtctaacatttcatagggtgtgcaagccactaggtgttttgctcaggttcaatatctaatgtggacatttatagacaggaataaacacatggagcaatagctttggcctctggataggaggacaaaggttagagggtagatatgtattattctggggaggattaagcttatacaaatgctaggtaaaagcagccagcccctgtattaggtggttaaatattgagttcccaggtttccagatgtggagaatcagtcagtcttaggtgaacccattatacaattttattttaaaaagaactgggcaggctgggagtggtggctcatgcctgtaatcaatcccagcactttaggaggctgaggtaggtggatcacttgaggtcaggagttcaaggccagcctgtccaacatagtgaaaccccatctctactaaaaatacaaaaaattagctgaacatgatggcacactcctgtagtcccagctacacagaggctggggcaggaagatcacttgaaccctggaggcggaggttgcagtgagccaagacagcaccactgcactccagcctgggcaacacggcaagactccatctcaaaacaaaaacaaaaacaaaaacaactgagcaaactcaggagcaattaaccattgcttaggagcaaataacagttaatgcagttaaccgggcgtgagggcaagcccttccctgactttgggcaaattacttactctttctgtgcccgattttcctatggttagtagggaagtgttaaatgcctgttctaccagctgccctttcagtggtgttttgaaagacctctgtactctcgaatacagcatacatgtgaggcggtgccttcagtgcccatcatgacgtcagtttagattcccacatggcaggttttcacctttgaaaacttggccatacaaatgtcaggtggctgctgatgcaggcagtgactaaccataaacctcttcctctctcttttgatgggaggaactatctgaaatcataaaggaaatgtcatggccgtaatggccatggctcttgcttgtaatcccagcacattgggaggccaaggcaggcagatgacttgaatccaggagttcgagaccagcctgggcaacatggcaaaacccatctctactaaaaatacaaaaattagtcgggtgtggtagtgtttccctgttgtcccagctacttgggggactgaggcaggaggatcgcttgggcctgggaagtcgaggcagcaatgaggggcctgggaagtcgaggctgcagtgagctgatattgtgccactgcactccagccttggtgacaaagtgagaccctgtctcaaaacaagaaaacaggcagggcgcagtggctcatacctgtaatcccagctctttgggaggctgaggcgggcagatcatctgaggtcaggagttcgaaaccagcctggccaacatggcaaaaccctgtctctactaaaaatacaaaaattagccagacgtggtggt

SEQ ID NO: 131558 - DNA, 1013 bp, Homo sapiens
ggagtttctatccaagctctgggaagggagggctccatgtctcaaacagcagctttgtgcctttgcttttgagtcattgaaccggcatcgattttggtgatgtctggggagttcttaagaccaggagactttgctggccaaaattgaggacagctcactctgcggatgtctttcttcttttaataattaacttgggttaaaaaaacaaagttggatgtctgaaatcaaatattttcttcacccttgttgctcaagaatcagcatgtcgagagctgaactgggcctgctgcggggagaactttgtacgaggttaggagtatagaatgtgactggcgcaagacaaccccaaccacacctggttcctccaccccatgtgtcactttagacaggggtgtcctgttaccagcacctgtgctgagcagaatagaggccttgttcagttcctccccaccgccccccacctgtgtttgccatcactatcctctttcctaagttctgcctaaaattagaactgctaaagggacttcttgaattccatggaaatctttttgtggttcgaagccatgtcgtgatattttccctcccatatcataggatggagaatgtgggtagtgggtccaacactggatagtgatttcaggattttttttttacccctcactgctttgttttggggttcccatcagaagagagatacacttccttgctgtttatggagggcaattgtgtagaaggccttttgctaggctctgcccttggagagctccttgtcctgtgggctgtaaacaggtaatatgaatccaatatggtggtcatgaaggaagggctgtggttcagcctagagaagagcatcagtctctgcaggagttcccttggaggcctcaaaaaaaaagttttctccaggacagcactgaaaacccaaccaaggcctcagccaggtgctctgagggaggtgggctgctccctataaacggtgacagccaccaaaggcaggacaagcagagcacttgtaa

SEQ ID NO: 131559 - DNA, 3838 bp, Homo sapiens
cgcagccattgtaggggtgggcgctcgccaggcagggtgccgacacgccctctccgcgctgcgacgggcggccgggggaggagagggtgcgctgtgcgcaccggagggagaggctccggcccagcgccgcctgcccgccagcagaccagcaggctcctctttgcggcgggtgccccacgcgcctctcgggcgcgcgctcccagccccgcccgcgtgcggcggccgcacggccgcgagagcgcgcctccgcttggcgggcacggccgcgagcgcgcgtgcgcccctccgaacgtccccgggagcccagccagagcgagcgccggggccgggcgcgcaggagtgaaaaggaggcggcggccgcagctgcgagcaacagatccggacgccgcgagctgacccgctctgctgttgggcgatttttttttaattgcagaaaaatttattaaattggaaaatcttgcgtttttcaatggcgctggccccgggtcagcgggcgattttctctgcatcaagatgggctttgccgtttccgtagtgggcaccagtggtggcctgattgtcagtcttctcccggcatttttaaggccaggagccgagcgctgcttgtaggcgaataccctacagagcggtttggctttttaaattactgttattattttgggcagagaacagtcggtctggtgcaccccgtcctcgctgcagaagaggctgcgagtccgaggtgggtctctcggaaggtgaaattccttctggggtgagcgagccccggccccgcgcgcagtccagcggccccgcgtgtgtgccctcgccctgccggagccgggaaaatggaggctgtgattgagaaggaatgcagcgcgctcggaggcctcttccagaccatcatcagcgacatgaaggtaggacgccgggggtgcggctgcggcgccggccgccgcgctctgacctcgccgccgcgcttcgcctccaccccgggccgggcacccggcccttccctgcagtgtggccaccggccacctgcgggagctcccggccggagtgtcacctgctcacccggggcgctgctccgggctctgcggggtcactgggcgggtggcttctctggggggtgtctgctgtcccacgccatctcccccgctcattgtcccagggggcggcaccatttctttccctcgggggctcaaggcactggctgcaagttttcccattgtctgtccctgaagtaagtgtctgggacccgcgggggctggatgcccgggaggacacctgattcctccgggcacggggtgggggcgcctggcgcggtggtggggaggaagtgggggctctgcccgctcgcaggaaggagtcccctagcctaggagactgagagggaaagccagtccctccttggctgtcaggtctacttggagtggggtatctgagcaaattagttattaattgggccgttccgaagctggtaaaggtgtgcgtgccctctcttagccctcccgcggggcgcggggccgaagttcccgggcagccttgcaggggccccgccttctcccagctgagcctaaaggcaagattggggcccccgaaataactgtatcctgccctcccagacccaaacggacacacactctaggttttctcttggaagggttgtgaagatggtgtgtgtgtgcgcgcgtgcatgtgtgtgtgcgcgcgcgcgcgtgggggcggggaacaacaccctggttttttcctgcaaagggtgggactggggataacctgatcctcggatgtggattttctggtgcctagagatagaccagggccccgtgttattcatccagaggaaataaaaccagccgcgcgagctggctggaggtgggaattgggagcggtgggggaaattatttttttaatgtgtatttagggagcttctctttggctctggcccagccccagtttgcctcaacagatccagatccggggaggtggtgtttaattaaaagctcgcttccaaaacgagtgggcaggtttggaaagctgtgcaccgagtgggtgtggacagcccctcttcagccgctgcctgggcgcctggaggagcttttgtctgatgaagtgtaaggtttagagaggcttcgtgcctcggagatggtctttgggaaggaatgctcagctgtcatggcctgcttccacctttcagaaccaactgccacctcacccagggtgaactttatcaagctgcctctgtcctggttttgtccattttgaaatctttctacagctctcgtgccttttgtcacaaattgtccttagcatagcataatctgcagccagactctgcttgcccaggaatgcttatagtccaggcacttggaattagatggattattccctgttgaaagacagcccctttcattctgttgcccccagtgcacactgacggatctgtccactgtagtcctggagtgatcacatctggagttttttctctttgttctttaatccagaatccaggctcggttcttcccattcactgtttgaatcgaaagccgttcagaaggtgacctgcccaaagggtgggctgtcctgctttccacctgccatcctgtggctgcgtggcactatgccctggctggggactcacgggtgccaaggtggtgttttttcccctgcatggttccagttaaaaataaagacattttctttaatgcccagtcacggcggaatctagagtttgtgtatcctgacttctttcggtttgagtttagtaggtttgttcagtatcctatgggaaatcatttattttaaagttttttttttttggtttgtttgttttggcagtaaaattttaaaagcaaggtggaatggaagactaaaacatgccttgggttctgcagagttttagacttttggagactcgagagatgaagagagagggaatgtctgatttccaagattgtttatgcataagacaattcttgaatattttcttggactttgcttcttaaaagacttcatcatggattagatgacagtgacattttaaatggaaattaaaaatttttaaatttgaacagatctgataagcagtatatagtgtgcagatgcatgaagtcaccagcaacaaaagtcagtttttaatatctgaaatcaactgactttctaatgacctgcttatcctcttgttctcttctttaaactcccataatgggtttataatgcctttggtctcctatctgtttgctctgagggaaaagcgtaaatgtcggaaacccatttggaatgccatcttgataaaaatttttaggttattttctcagaagtgatgttaggctgggtgagaaaaggataaggaaaatggttttattagtagcatttgattcttcaaaatgtacagcagcacaggaagggagtcaatttcctctttggagaaaaaaagaaaacaataaaaggaataatttcaaggcctggcaccctccatcttctgaaaccagagaacctcaagacatggaaaagcaagagagagaggattctttgtgctttcctctaaagatgcttcatctaagtcctcggctggctgtcagggcatgggttttatccttttcaggcagtaaggtgtggaagaaatcctgactttttctccactggggaacagcaccatgtaaagcaagcagcagctagtaaacaacatatcgattccttgacgagaggaagcctggtggtttgtttcccgtttattctaccctgctgtggtggtggtcgctaatgaacggtgttgtgcaaaatcacctactggctgcctttcctcccatccatgcaaattagtaaatcgctgatcaaattggctggtgtgagttggttc

SEQ ID NO: 131560 - DNA, 1056 bp, Homo sapiens
ctatgtatctgggactccaggcaagtgccaccatgtccagctaattttttccatattttgtagggacggggttttcaccacattgcccaggctggtcttgaacaccagggctctagcgatcctcccacctcggcctcccaaagtgctgggattacaggtatgagccactgtaccctgtgtaaatgtttcttttcattcaacagggcatccaaacctcacaagagaaacaattagacatcaggaatatacgaacaaaagcttgatggggcagagtaaatgaatgactgtttgtgtatagtgaaggctttctctttggttgttgacaataaccatggcctagggagaaaacagtaaatgaatcagggagactacatagtattaacttccagtgtgtatgggaggttatgttagaccctgtgcagattagatagaagccattcattcgttcattcagtcattccataatacctgttaggcctgtgtcatgtagtaggccttgaggtaggtaattgctggggattcagtggtgaccaggcagccatacctctgcccatatacagttgacattgcaggaggtagagtgatagccatgagcctccacattctggacctggcatcaaattgcctctgtagaattctggttccatcatactatctgcatgatgatgttggccaagttacttacccctgtcatacctcggtttccccactgcaaaaagcgaatactaatagcatcccccttgtggggtcagagtgaggcttgcatgagataatgcacatgaaacactcagaacagagtgccattctgtgagttctagttgtggtggctgttgtcattattatcagcacaggccagaggggctgagaaggccagcctggagcaagtaatgacaaatgcgctgagaatgagcagagctgtgtattatggcaacacttaagaggagctcatctgagagctagatgtgcatttggtggcagaatctgggctgggacccagcctcctgggttctgacctagcttctttcctcaggctgctggagacctcctcaaaacaca

SEQ ID NO: 131561 - DNA, 1699 bp, Homo sapiens
gaatggaaacgttccgacccgaggcagcggatcactccaggcttctcctcaaagcgagcacacctcagtccagggagggcgcaggagctggggctgctgcggtgaaccaaccccaaccccgaccccgacgccgatcccggccccagagcgcctcctaggcgacccctggccccacccacgccggagccggcccgcgcccatccccacgccccaacccgcaccacgcaacatcgccctagcgcctttcggggcgtcgccgcgcaggttgcgccgcctccgattggccaaacgcggcatagcgccatctcggcctaccgcgcggtgcgcgccctcattggccggcggcggcaggagcaggggtagggggcggggcagcacgcggggcgcgcggtatgggcggactcgcgcctgagccccgcccccggtccctcgtctgggccgagcccgcccagctggctgagacgcgtggagcctggcggcgagtgggggcgtgcgacggttactctggttactggggccgcgccgcgctggcgagagccgccgcccgcgagggatgctggtgaggaagccgtcgggagccgccgccgccatctgagggaggtaccctggaaaccaccttttatcggtggggaagtgcagtcgcggtgggcggctctgggggccagcgaaacgggaggcctctaaatctttaggttggggctgcattgccctggagccgcactcttgagtccgaggccatcttttgttggagaaggcgtcggcgttggcgttttcccgaggttgggctgtacagtgtctccgtccgcggaaaaagaagcctctgaacccgcgccggcccgcagcccccgtgccttccggccgctgctcgccgtcgccagaggctaggccacgtttcccccagtgccgaggtgtttctgtgaccctccctccactcccattcccttctgaaagggcacctgctcttggtgagaaaagaaattatagcacgaagagccagtatcagaagagtatccatcacccgcagcaaccgctcagggaacaccatcaaaaaagaaaaaaagggaatatctggatttcctgggcgaggaggagcgagtctgctcgggagctgttccagcaggcgatttttaaatactgctttctacgccctatacaacttggcttcacatacttttacactaactttatatgatttttaaaaactggtctgatcggacttctcgtcctgggacactgtttactggagtctggccggctctccgtgctcctcttggtacctcattttggggagaaccttaaacccactcgagcagataatctccgccttgaccggtgccaccaaagaagccttggaaccatgtggacttttctgggcattgccactttcacctatttttataagaagttcggggacttcatcactttggccaacagggaggtcctgttgtgcgtgctggtgttcctctcgctgggcctggtgctctcctaccgctgtcgccaccgaaacgggggtctcctcgggcgccagcagagcggctcccagttcgccctcttctcggatattctctcaggcctgcctttcattggcttcttctgggccaaatccccccctgaatcagaaaataaggagcagctcgaggccaggagggtaggttgatttcaaagcgggcagatgaatgtcttatttaggagtaggatt

SEQ ID NO: 131562 - DNA, 1100 bp, Homo sapiens
agaaaatgtctaaaaggtgccgaatagtttgtaacatgaactcaaatcagaagttgtaagtgatttgcatcttgtcgattcccaggatatatttgaagaatttagttattaatgatacagtttgccctataataagtctttgaagccccttataaacatttattatattcggcccagtgtggatttctaaatatgtctgtataacattttccaaatatcatgtttagaaaacaataaatatttaattttattgggataatatgacacacttttatttaacgaatattttgatatcattgatttttatatattatctagattttaaaatgtaacaatttgtttggtttgataatatttagtatctagctttagcctaggatgcaaaagtccagtgtgtccacatagcggtagcatgatttgaatctaacaaatttggatacctagtttacctttttttttttaaacagcgcagaaaaggaaccaatatttcagaaacaagcttaataggaacagctgcctgtacatcaacatcttctcagaatgacccagaagttatcatcgtgggagctggcgtgcttggctctgctttggcagctgtgctttccagagatggaagaaaggtgacagtcattgagagagacttaaaagagcctgacagaatagttggagaattcctgcagccgggtggttatcatgttctcaaagaccttggtcttggaggtaggttcatattgattttcaggagagttacgtggtatgaacaagcactcttcacttagaccatcctatgaccagtaagaaggtattccattttattttcatttataaaattttctatactcatttaccaacaaatttgcatgaaagtgagagcaaaggataaaataagcatttaatagtatgattagatgtgaattagacttaatgagatataataaaatggccaaaagattgtaatggtcaaaattaaggactggaaaatcctagaatgagggcattaaattttgtgaaaggcgaagggaactgtcatttgtagagggtatgttgtatacttgttacagtgttattacttagaatcttttatttaagcaccattcatc

SEQ ID NO: 131563 - DNA, 1057 bp, Homo sapiens
tctgtataatatggaaacagtaacaaaagcaccaaaataatccaaataagtaaagggtgaatgcattgttacttgtgcttttcaacagggacaagattaacagcttgtattcattttataaaatactactttaaaaagaaattgaaactagtgttaggaagaaaaagactacattgccttttaatacatggccaaaaacaccttccatcacagtcttgtgtgtgtgaggacaagcatgatctagtctgcaccagaggaattcaaaataatgaatatgttactgaggcattgctattaatgttgtctaaggaaattccactaccttccaaactaaaactaaaactacaactattgctcaaaatggaattttaaaaaactaccaacttgggagttagcaaactcaggtaacatttttatttctggacaaatcactaacttgtttattcctttcctacgctaaaaatctgcaattgagtaatattcactaaaaagtgtctacacttaccatctgtggcagaaaataattcataaagagcctgagcaaggatattcacgacaaaggaatgagatgtttttcttgcccagtaaaatgattttttggcctaaaaaagaaatagctcatttattatatggtaaggataaaaaagcacaaactgatgtttataatcccctcaaactgatacttatccttctaaggactatctgcaagtaatattgccttatgtttatcatttacaaaaaaaataaaaaatcaccttcagagcaatgggttatatgacactgaagctaaatttacaaccactatgagctaagtggcccatagcaatcaagtgttacataatattcaaatttagaaattctctaagattcacaggttgcaagtcaggttctttaagcctaagcaagatgcctaagagctattataaagcatcaggttccttagtacagatctccccatcagagccccactgctcttaacccccagaaataaatccattttgagacatttttgtcaaaataattgatcttacctcgaaaatagctgcatcatcataaa

SEQ ID NO: 131564 - DNA, 1018 bp, Homo sapiens
agctatttcttttttaggccaaaaaatcattttactgggcaagaaaaacatctcattcctttgtcgtgaatatccttgctcaggctctttatgaattattttctgccacagatggtaagtgtagacactttttagtgaatattactcaattgcagatttttagcgtaggaaaggaataaacaagttagtgatttgtccagaaataaaaatgttacctgagtttgctaactcccaagttggtagttttttaaaattccattttgagcaatagttgtagttttagttttagtttggaaggtagtggaatttccttagacaacattaatagcaatgcctcagtaacatattcattattttgaattcctctggtgcagactagatcatgcttgtcctcacacacacaagactgtgatggaaggtgtttttggccatgtattaaaaggcaatgtagtctttttcttcctaacactagtttcaatttctttttaaagtagtattttataaaatgaatacaagctgttaatcttgtccctgttgaaaagcacaagtaacaatgcattcaccctttacttatttggattattttggtgcttttgttactgtttccatattatacagaggtcacggtcaatgtatatattagagaaaacacaacttagcagaagcagtgttagaaatggaggaaaagaggccaggcgaaatgattcatgcctgtaatcccagcacttcaggaggccaaggcaggaggatcgcttaaagccaggagtttcacaccaacctggacaataaagcaagaccccatctctacaaaaaattaaaagatcagcaaggcatggtggcgtgtgcctgtagtcccagctatttgggactatatagctcactacagtgagctatatatagtgagctatatgaagtgccactgcactcagcctgggcaacagagtgagacttcatcttctaaaacaaacaaacaaaaaattaaaagaaatggaggagaaaaggcaactgtgccacctcc

SEQ ID NO: 131565 - DNA, 2306 bp, Homo sapiens
ttgaaaggtattaaaaactttatagatataaggaattattatttatcgctactcacagctctcttcacttgataatttactgcttagttagagatactggttggacatcttagagactgggaatttggtttctagaattgtgttaaaaagagcttccaaagtattttgcatcacttaatgaattaacagcaaaatcaaggaagtaccttttaaacaactcttccaagacctaaatattagtagttatttactaacagaaaaaagtttattcatatttatattactctccataatgctgattatggaattcagaagaaatcctggttgttgaaattctaggactagatatttaaaaattatctgcaagatgtagcgtttgttatttctcattttttctgatatatcattagcatcctacataagtgtgtacacatatttgattattttacaattttattttagattccctgcatcaactaagaaaagcctgttttctttatttcaaacttggtggcgaatgtgttgcgggtcctgttgggctgctttctgtgtaagttgtgatggcacagaggatacaaacctgccagattttcttaggactgttcagttgatgaattactgcaaatctttcttccttacacattttgatattttattatctgttagtatcccaatgagaaggtggcccaaagaaatgaagaaacgcaatatttagtactgttttctttctagggaacagcagttaaaggtggtggtagaggaagctataacccttgattaaaatagaagcttgttttttgcctatggatttatccatatgttctggtctgtgggagccaggaataattgagaaattttaatttaagaattagtttcattgaagtacggggacttatacaacccagtattagttttgagcgtacagacatatgtggaactattcttggaaagtctacaaagtgaaatctatcgagttatttctcatttgcaaagtgatcctttgagtcatttctcataatctataatctgaatgttaatactgatatttttaaaagccctacatcccaacagaccaggccatctagatatttcagcgtggtgtctcaggatgagtaaacaaacagctaaaaatatatgacttatgtaaactagagttacaggagttactagcttttctgaaagggatatattctaagtattttttcttaaaaaaaaaaaaaggggggtggggggtttgctcctgccatcaaacttaacatgcagacatatttgtgacgtcctctaaaatgtagaatgtttcatacagaattatgatgcttgggtaaaaaaaagtaggatgtttgttgagcttcgtagattatatgtaattggaacctttggagtaaattttagtttctgagtcttaccaatatgtatttttttctattacagattgtctcctaaccctctagttttaattggacacttctttgctgttgcaatctatgccgtgtatttttgctttaagtcagaaccttggattacaaaacctcgagcccttctcagtagtggtgctgtattgtacaaagcgtgttctgtaatatttcctctaatttactcagaaatgaagtatatggttcattaagcttaaaggggaaccatttgtgaatgaatatttggaacttaccaagtcctaagagacttttggaagaggatatatatagcatagtaccataccacttataaagtggaaactcttggaccaagatttggattaatttgtttttgaagttttttgtatataaatatgtaaatacatgctttaatttgcaatttaaaatgaaggggttaaataagttagacatttaaaagaaatgattgttaccataaattagtgctaatgctgaggagaactacagtttttcttttgaatttagtatttgagatgagttgttgggacatgcaaataaaatgaagaatgaactttcgtgtctttttgtttcttgttgtgggctcgtttacatagcttcatgataatgaaaaagaaaaccaaagtgggatgaaaagtgcagagggaaacctgttctattaaataactggggaagttgccttaatgtcttgaccttgatttcctcatctatccagtgaagcaatttgataaggttattttctttaaaaaaaattacttatttatttatttattttattttggggctgtgactcagatttgaaccgaaaggttctttgctgagttctctgaaaatatcagattctgacaggaaaggcaatcaagggctttataagttccactgtatagcaacatttat

SEQ ID NO: 131566 - DNA, 1213 bp, Homo sapiens
tcaggaatgcatgcctctgaaggccttcctgctcttccccttctggccttggtatctcattctcattcctgccctcccctacctctccaaccccatcacttgccagccatcctgttcttccttgttggtcatcagttaatgaagtgtattaggtgacctgagtacttgtcagtacttcccagaggcaagaacattcctcgcagatcaaggtacctttaagagccaagaagctcagatttggaggcgggagagctgtactgcatcccctcaaatgttagcagtgccaagaaatgagacgctagtctagggggcaccacaagcagaaaggggctgtttcaaggagtcgtccgcccatgggagtctcctcttctattattcaccttgctccaaggatatcttttcttttacgtatgaaaattttgtaattgttcaactataacaccatgaataatttaattctttaatttttcaggttgctgaagcacatgtgcctaatttcatttttgatgagttcagaacagtgctgtaactgtttttcctacttcttcaatggaaggattgtccttagatcttcccaccatcacaaatgaatttgaagatgaaaagaaactcagttgctcatacaactgcattttttctgtctattatgggaaacatcagacgttctgagtaagatatatctcatggcattagttaatataactgatattgtttaaatcatggtattacatgcaatttatatcagataaaagcagaacacatttttgtactgcctctcttaaatgctgaatgtaactgttatgtataaatccatttagttttatgttctaaagaactatttgtgcaactccagattttcagtaaaatagtattactagtacccaaagtcgtctcgcttatgattcaaaaactgtgtattcaccctgtaaaaaaccctgtttggaataagagatgactctgctaggtataatagctcacccccaacaagctggcaggcacgtggtgatagccagactagtagcaaatgtagtggccacacaatctgtgtcatgtgccattgaagtttcttggtgtctcatcatcctcttccaatcccacatgccctagggggtccacagcattccttctgtaggactccttaacaaagctgctccttccggtatcttcctcagcaacctgagtcctgccccaagtccccacaaccgtatcatta

SEQ ID NO: 131567 - DNA, 1027 bp, Homo sapiens
acttcaatggcacatgacacagattgtgtggccactacatttgctactagtctggctatcaccacgtgcctgccagcttgttgggggtgagctattatacctagcagagtcatctcttattccaaacagggttttttacagggtgaatacacagtttttgaatcataagcgagacgactttgggtactagtaatactattttactgaaaatctggagttgcacaaatagttctttagaacataaaactaaatggatttatacataacagttacattcagcatttaagagaggcagtacaaaaatgtgttctgcttttatctgatataaattgcatgtaataccatgatttaaacaatatcagttatattaactaatgccatgagatatatcttactcagaacgtctgatgtttcccataatagacagaaaaaatgcagttgtatgagcaactgagtttcttttcatcttcaaattcatttgtgatggtgggaagatctaaggacaatccttccattgaagaagtaggaaaaacagttacagcactgttctgaactcatcaaaaatgaaattaggcacatgtgcttcagcaacctgaaaaattaaagaattaaattattcatggtgttatagttgaacaattacaaaattttcatacgtaaaagaaaagatatccttggagcaaggtgaataatagaagaggagactcccatgggcggacgactccttgaaacagcccctttctgcttgtggtgccccctagactagcgtctcatttcttggcactgctaacatttgaggggatgcagtacagctctcccgcctccaaatctgagcttcttggctcttaaaggtaccttgatctgcgaggaatgttcttgcctctgggaagtactgacaagtactcaggtcacctaatacacttcattaactgatgaccaacaaggaagaacaggatggctggcaagtgatggggttggagaggtaggggagggcaggaatgagaatgagataccaaggccagaaggg

SEQ ID NO: 131568 - DNA, 1056 bp, Homo sapiens
tgtggcatgaacttaactgtgcttgctgtgggaaccaggtcagtggagagagaaagaacaaaccaccatgattatttctttcctctggccacttaaggaatccctcctggcttgcctatttcacttaactcctgaaccagatgagttgctgacaggagtacatggtggagaggaagaagaggcgggaggggcattgtgttaaactctgcaaggcaattcccatggtggaaaaggcaaggacatttcagagctgggggtagagcagtggcgagaggcgcagaggcatctactgtgaacgacctattgggcttcactcctgatgaatccagggccactattattagcatctttttacaactattaatattgttctttactatctatcacttaccctcctgggtagctttgtgtaccgaacataatcctccaggaacagaagggcacccacaacatctgcaggaatttcaggtatcttctggctgtgatagagaacagtttagatcaattaactgctttgcacatcataagcccttttggtcagaatcctgaaagactaaattaccaacagattacctaatgaagtcaaagatgaacaaaaacattgagcatgctcttaattcctgtcaagttgttaccttgctcatgtattttcaggagcccaccccatagggtaaatgtgagcttctctatacggtttccatgggcgtttacaacacgatccctgctatctatccagactcatctccctctgtttacatgattcaatacctagcaggtcccatactttcccatccctgcacacttttttttttttttttttgcgacagacttttcactcttgtagccaggctggagtgcagtggtatgatctcggctcactgcaacctccgcctcccgggttcaagtgattctccagcctcagcctcccgactggctgggattacagatgcacgccagcatgcctggctaattttttgtatttttagtagagacggggtttcaccatgttggccaggctggtcttgaactcctgacctcaggtgatccacccgccct

SEQ ID NO: 131569 - DNA, 1053 bp, Homo sapiens
ttcccggtacaccgagcagttcctggcgctgattggccagtttatctgctccacggtggagcagtgtacaaggtacagaagaccaaccaggactacgtgggacttcttgtcacaaaacctaacttaaacctcacattaccaaattcctcttatcgccctaatagagatgggaaatggttgctcacccttctctgtaaagcaagtcagggcatacctccttgtttagagcaattacaggtgtgtccatccttagtcaccctgccaggggaactccatccggtctactcacattgattttccaggagtgactcaggaccatgaatagtaactaccatggggaagaaagtgcagccctgttcctctgcactcttggatgcagctcttcaatctcagcgagcccctgcactcctgctgggccactgccaagagatgattccactcacttcagtgggagtcagagaacatatcagtgtgtcaaagcctgggcagtgtctgcatgtagagaagcaaatttcacaagagttgctatttgatacaatgcttataaaactttaattcctgccagttcttttcccctgcccctaaatgtggcttttctgggataaagaaaaaaaagttatttccatgagatgctgggtcctgtgcctccttctctgctatcctaaagggtcagcctggctacataacctttgctgtcatgtttgcttggtcatttttgccactataatgtaaaaaacgaatcaaagcggctgggcacagtggctcaagcctgtaatcccaacactttgggtagattacttgaggtcaggagttcaggaccagcctggccaacatggtgaaaccccatctctactaaaaaaacacaaaaattaaccacatgtagtggtggccacctgtaatcccagctactcaggaggctgaggcaggaggattgcttgaacccaggaggcctcagaggtgcagtgagctgagatcatgccactgcactccagcctgggtgacagagcgagactccatctcaaaaaaaataaaacgaaccaaagtgatcttcta

SEQ ID NO: 131570 - DNA, 2583 bp, Homo sapiens
acacatcagagtgtacttggtggcagaaggagtctttgaagcaagcagatggaagttgtaagcagtttgggaatcctcttgttttgttctccctatttacttcctgatttaaaacctcccttgcttctaggctctttcaaccccttctcacgcctccttctggtaaaggtatgtggtggctttggacaataggatatgtcatctgtggagcttgctgaaaatgcaaaggccagagctctcccccagaactattaaatcagattcgtcaggaatggaagctgggcatctgtatttcagacaagctctaccagggactcagggtccctctctcagtgtttgaaaaccattgaaatggtggttaagggtggtggtcagacctatgagagcctcaattatctataaaatgaggatgaaatggtttgtattccacagagctattatgaggatgaaatagcacatggaaaggtcttagcacacacagcacctggtgcacaataagtgcccagtaaatatggttggttgttgtcactgtcatcatcacacttctgagtctaaaaagaatcatttggagaggaccagaagatggcatctacaagtttaaggaactgggaggaaaaagcaaattgctttgtcgtcatagtctcaaatgttaggtagcatatggagattctaggttccttttttatcaaatggaaatgacacaaggccttgttttgtctccaaactggaaatttaaaggaaggctgcatagagagacaaatgggctctaaagtcttccagcctgacagctgaacctaaccttgtcttctcagcatgattccaagtcaacaccctaactcaatggaaataaatgactgaaaccaatgatatggcatagggcaggaaaagggggtcagactgaattttaccttcctgttccattgggtgtcactgggaagacgcattgggtgcctgaatacagaggttagaaaacacagatcatgtaactcctgttcttcatatttggtgccgcatgtcctgttgagtcctaacatctctttaaggatgaattctgagccattctggggtttttgcattgttttcattttagaatgacatgtcacatagaccagctgaacacttggtatgatatgaaaactcatcaggaagtgaccagcagccgcctcttctcagaaatccagaccaccttgggaacctttggtctaaatggcttagacaggcttctgtgctttatgattgtaaaagagttacaggtgagccttttgactttcatgcctgttttctgccaccctgggggagaggcaagaacatattttagtgggcagtttgaactcacttaacctttcttccatgatttcttacactgactttaggcatatgatacctactgggtagatcagagctgggaataaactagaatttgtttggccagcatagtacttttaggattagactgtttttgtaagtttcaacttgggaagataagactttttaatccttgaagccagtgacttttcctagcaagggatgtttctaacaggaacctgaagttgcttctttttgctgtcatcctgtttagaggttttgtgtgacttaggcccagcctctgttctgcatagcattttaggtaactggagaatttgcttgtttaattcattatgtttggttctttgaccgtgccttcttgtttttagaatttcctcagtatgtttcagaaaattatcctgagagacagaactgttcaggacactttaaaaaccctcatgaatgctgtcagtcccctaaaaagtattgtcggtgagtgtcctgaaactacctgaggcggggatgacactgtagcctttacgaatgtactaaagagaaaattatgttttaacttttcagcaaattcaaataaaatttatttttccgccattgccaaaacacagaagatttggactgcgtatctcgaggctataatgaaggtatgttgtagaagagagggtgtacagtcaatacttacatttttaaattttttattttcttgtaactttgttgcccaaaaaaagctactcttctttcttttgtcattaaatcaaaaatattttaatacttcagtttatcattttaaaattcattttgtttatctccgtttctggatctgttcttgattaggctttttaggagcctagcgttttccttttgttcaagaaaactggctctttgtaaaatgccttttggctagaggtgcttttatatatgaaaattgaacttttccttgcacagtaatactccctttttacataacaaagttcatttatacacacctcatctgctccaagctgctgttagaacagaacattgtctctctgccctcttgtgtctgcatagatgttaggaagccaggttctttggggcataaattatccttatactctgcagaaagcagtcttactttggaaatgaataagaaagacgaagagattaatttgctggatggaagtctaacttattttagaatccagctgcctagtttcctgcctttactcggcagtaggagctcccagggacccctgcatcttctgcgagtcttctttcatcatc

SEQ ID NO: 131571 - DNA, 1064 bp, Homo sapiens
cagtatagctagcacctgcctaccttatcaatgtctgctgctattgcttgcaaataatggggaggccagggaaggggaggttaccttctcagtctcatagtcttttctagccaaaagggcccatctagatcattgaattctgccccaaattttagacatgagaaaatgaagcctaaaggagaaatgctttgtcaaacatgaaagaataaactgttgtcttctgactctgttacccaatatgtctaacagtgggctttcagttgtaccacagagcctcatttctgtccagaatatgtggacacaggtgtcctaaagctacaagttcttttcctgttatctttgttcattccaggactattagacagtgatttttcatacctctttttctttgttataggttgccaagcttactcatgctatttccatttttactgaaggcatcttaatgatgaaaacgactttggttggcatcatcaaggtaacagttttgttagtctgcgtggcctcgcaccatgactcttagctgtttgggtttttgtggtaattatcatgtgtgcaaaagggagtgacatcatctggctgtttgacattccaatttcggtcttcattttactcatttattttattttagttgagttttttgagacagagtctctctctctctgttgcccaggctggagtgcagtggtgcaatcttggctcactgcaacctccacctcccgggttcaagtgattctcatgcctcagccccccaagtagttggtactacaggcatacaacaccacacccagctaatttttgtatttttaatagagacgagtttcaccatgttggccaggctggtctcaaactcctgacctcaagtgatccatctgtcgtggcctttcaaagtgctgggattataggcatgagccacggtgcccagcccgttttactcacttattgatggaggaagagaaagcattgtaatctttatttctcttagtacttgaaggtagtgggaatttctttatcttgtagttctgcagaaaatgtgtggtgctagtactgttttatcaaagagt

SEQ ID NO: 131572 - DNA, 1085 bp, Homo sapiens
ggtaaaaagaaaaaaaaaatacccaatacaaattgctcaaagaaatgatacatttgaatttctgacatttcagctgggttctttaacctgtgcttcctctgtcctacttcccatcctgcacagttcatagagtcactttctgactatcctatagacacagtaattggacctgtgttttttctaatctttatatgacagcacatttcctaattcagggaccatcccctatcccaaattccatcctgtgagatgtgaaacctgtgagttcatgtgaatgagtgtttgaagggcttgacgccatgtagtctcttacgaaggcttcagggtgctcttatgttgttgctttgccattatcaaatggcattgattgatccgagggactcagaaagttagggtagactctataaataatttcattattcctcatcctctccgtcatcattttattggttagtcattctgccagatcactaagattcttcctctacaggccccgcaaaattccacagagccctgattctccacctgcagatggagtctccctatcccattgctcagcttttcaagatttattatgatgctggcaagtgaggaatttcttaagcgagaaatcagagttcatgcctgtttacctcctaagagcccggtgtaaaagaccatctacccttgtctgagatggcgtgtcctttagtgagaaataagtatgttttttaagtttgtttcagaaaaaaaaaaaacccaaccctgagttacacccgtttcttctctgcccaagactttgtagaatttaaatgttatgaaggagtgaattaataaacagaattaaggcggtacagtggctcatgcctataatcccaacagtgtgggagaccaaggagggaggatcacttgacaccaagagtttgagacaccagcctgggcaacatagcaaggcccccatctctgcaaaaaaaaaaaaaataaataaataagaaaattaaccaggtgtagtggcgcatgcccatagccctagctacttgagaggctgaggcaggaggatcacttgaacccaggagttcaaggttgtagtgagccatgatcacccc

SEQ ID NO: 131573 - DNA, 1151 bp, Homo sapiens
agaagtgtcagaaccagagagatagcattgtgacaaaaacctgactggccattgctggctttaaagatggagggggccacaagccaaggaatacaggcagcctttagctgctgaaaacaagaaaacagacttttcccctagaatgtccagaaggagcccagcgcagccatcaccttgattttagcccagtgagccccatctcagatttgtcacttctgggatggtgagagaataaatttgtgttgttttaagccactgagtttgtggtaattgttaaagcagcagcgggaaactaattcaaggtccaaggcagtaaacagacaccaggtgtgtcaaacagacagttggtgtgatttgagttcagagtagagagggaaacattgcttgggataggggagcagaggaggtcaggaaaccccatacaggaatcaggagccaaccaggcgtgtgatgaggttttgaagcaaaaagcagaagaaattctagactacagaaatgatggaataagtgatacgattttgaaagtacagaaaaacatatgggcccactgagttgatgacctggctggaccagagtgcttatttaaggtagattggatcttagctttttatgagtcatggtctcctccgagaccttctgttcacacagtttgaccatcaagttcagattgtgagaaatgcttcaacctctggtttaatggtagaaaaataagtaagttgaattaacatctctgagcttgttcagggctggcacagtttcttattcttcgtaaatgctggatcaacactaattaaccaatgcattccctcatccaggactgtatacccctacccctaagaggtgtgtcattcagcaggcctgtgaagccctctgctttttgtttttcactcaacaaactttccttgaggaccaactctgagacaggcactgtgtgcagcacttctttgttcttccagataagactgtgtctctttaaaaaactgtgcacacaagacttctctgtagccttcctttgtaacatggtagcccctgtctcacagctcttccagccaagatgacttcacagtccttctagctaccgtctgcttccacttcctatgggtggtccacagtgaaaacagcagttggacttcctcatccttcgtatcttt

SEQ ID NO: 131574 - DNA, 1040 bp, Homo sapiens
gtaatttaaaattttctgctgtccttattacaaaaagtaagaagaaagaggaaagattacttttagaaatgttttatttaaacaaatatgtctaaaatattttaacatataatcaatatgaaagttactaatattattttgacttttttgatactaaaattagaatcttacagtacatgtcaacctggactagccatatttcatatatttagtagccacatgtgaaaagtgggtactgtattagataacagcacagatataggttatttcatttgtcagtgactgtgtcagagaagggcaagaaagcataaggatatttaaatcaatcatcatgtaacattttagaagttttggagagtactcaaatcaaaccagtcggtaaaacgagttattatctgttgatttcttttgtatttgtcacttttctaccctaggtgtgattggtattttaatacataaaatgccaattttaaaaatagtttagtcagcctaaaatgacttacttctgaggatcctgctagtatttgcttctgtttgaaatgtcatgataatttgaatccacatctacagtactttcatattttgtggctgatgtggtaaactagtttcttacgatattgggcaagccagaggttaagcctgttaacttcagcagccagaatactgtactctagttgctataaacaattaggcctgtcagcaattgaccttggaaatgctaatttgcttgtccctgggtgctgcctcaggcactggctttctctctgtgggtgggagttatgaacctagtttggaggagaacttgaggcatttggggcaagctccaaacagatgtgcttcttgcttcatttttgcatgtgaccaagtcgcaagaggcgcattccttgcatgaatttctttgaaggccttgtagaatcagacatgtatgccttgactaaagttgagaggaagctttattacttttgaatttacccttccctcttcattctactgcacatctgccataacgaaggttgattgaaaaatgctacacagtgatt

SEQ ID NO: 131575 - DNA, 1034 bp, Homo sapiens
acatgaccagtaatgtcaaccttgatcacctggccctagtagtgtttgtcaagtttctttactggaaaggtacttttttctttcttttccctctacatactgttttttggaagcaagtagctcgctgtatccacactcaaggggacataattaaactctacctcctggaggagtaattatctacataaattatttgaaattctgtaaagagttttgttttctctgcttctgcccctgccttaggatcagctatttttccaagggccctggttctttttgattggaaagtggtattgagaaaccaagatctgggctccagatgtgcttgctgctaccagaaagtgactgcctctaagccctttcagcagacagagctaggaaatatgtgtatgtaggctaatgtatgtgtacatacatacctgtcacttgtatgtgtattcatctgtatctatattaaggggaacatgtgttcacaccattatcttcaacgctaatctagtgctgcgtggttaaattcttttctttttccctgctgatttgtaatttccctcaccaacattaagaaactggactcccaccgtccactgtacatttgcttctgtgtgtgcctccagtatacatgtaaagcattttcagaattattagcctgtgcttctgtgacaaacaagttcatcagctagcttagggtttacggacagttcttttgcctttagtgttatggttttcagtcagaacaccatttccaaggttacttaggtcatttccctttgttctccacttccttcagtgacatttgtcatgcatttgcaatacagttacattgttgtcatagtctggattctattacaggatcccctcattcctgattgttggcattgtggtagtttattattattatttttggatacattataattctttgtgagtgaaatttacatgggtcttgacatactgcaatctctttttgaaaatatatacgtacttggaaaatatacgcactgaagacatactagaatgtttgctggcagcagtgt

SEQ ID NO: 131576 - DNA, 1045 bp, Homo sapiens
tactaaaaatacacaaaattagtgaggcatggtggctcgcacctgtaatccccccagctactctggaggctaaggcaggagaattgcttgaacctgggaggcagaggttgcagtgagccgagatcacgactgggcaacagagcgagactccatctcaaaaaaacaaagcaacagagcaagactccatctcaaaaaacaaaaaccaaaacaaaaaaaaagaaaaagaaaaaagaaattctgtgaaatcagaaagagtctcagagaaaacgccgtttatgatttttaactttgtatcatacattagaaccgtggatctcaaattttatcactaatcagaatcacttggaggacttgttaaactgcagattgctgggctccaacccccaaggcttcagattcaggcctctggggcaggactcgagaatttgcatttctaacaagttcccagttgatggtgatggtgctgttagtccagcccaaccacactttgagaatgactagattagagaaagcaaattatagtacaaagcaatcatattctggtgaggggattatacattaaaagctggtttctttcatatttgttatgtaaaaaatctgtattgatgaatgttttcatacttaacagaaaaactgtaacgaggacacccagacattatgttatgaagacttctgagtcattatgatgagatttcattatattaaatgtggtttaaattatatagttaaatgtacttttttagtaatagagttactattagaagtggaagtattatggcaagtctgaaaatatgggatctatgtgtggagtatattaagggaactctatagtcgctccccatccttgtcaacacttgctacaggcagtcttcttacttttagccattctaatagatatgcaatggtatcttatagtggttttaatttgatttttctaatgatcattaaaattgagtaccttttaatgtgcttatttggcatttacctctttggtgaagtatcttcaaatcttgtgttgccatttgttattggaccagttttttaa

SEQ ID NO: 131577 - DNA, 1064 bp, Homo sapiens
aggattacagttgtaacctgctgtgcctggcctaaaaaagattttttgggggacaagctctctctatattgcccaggttggtctcaaattcctggccttaggtgatcctcccacctcaacttctcaagtagctggaattacaagctcgagcctctgtgcttggctcaaacagattcttttgaagaacagaagtttttaatttctgtgacatccagtttaccaattttttctcttgtggattgtgctttgctcttgtatctaagaaatctttatctaacccaagttcccaaagattttcttctgtatttttctagaaattttgtagttttaggttttgtatttaagtctgtgattctttctgactgaagttttgtatatggaataaggtacgaggtatagatcaaagttcagtattttccttcttttttttttctttgcatgtggatagccaattgtcctagcaccatttgttgctgaagactgttttttctcagctgaattgcctttgcacttttgtctgtttagttgtccatgtaggtatatatccatttctggacacaattcaatgctgttgatctctttttccatcttcatgccaatagcacactatcttgattactgatgctttatgataaatcttgaaataagctagtgttagtcctccattgttgtctttttcaaggttgttttggctattctaggtcctttgcatttccatgtgaattttagacttggcttgtcaatttctacagagaagtcggccaaggttttgattgatattgcatgccttgcagcctggaggctctctcaggatactaaggtgggcatttatatggcttaccttgtatgcttctagtcactcttgttctttcctccttgcatgatgatgtccagtatcttataaaccttttttaaaacattttttaatttttatttttttggttgtttgagacagcagacaaatctagcccctgttaatggccagtggaagtattatggcaggtttttgataaacaggagagtaacaccagacttgtacttgagaaagagaattggcaacatca

SEQ ID NO: 131578 - DNA, 1007 bp, Homo sapiens
cagtaaatatttgttgaatgagtgaatggaagttcctccactaacactcatattctaatctttgtttagcatcactctttttttgtttttaatatagtatgtgttgtcttctgtattagtctgttctcacactgctaataaagacataccggagactggtaatttataaaggaaagaggtttaattgactcacagttccacatggctggggaggcctcacaatcatggcagaaggcaaaggagtagcagagtcatgtcttgcatggtgtcaggtaagagaacctgtgcagggcaactctcctttataaaatcatcagatctcatgagatttattcactatcacaagaacagcacaggaaagacctgcccccaggattcaattacctcccactgggtctttcacatgatacatgggaattgtgggagctaaaattcaagatgagatttgggtgaggacacagccaaactatatcatcttcccacatatatttgtttgcccttatgttgtcattttatagtggaaattttgtcattaaactgaaccagacattcacttttccttctgttcacctacacttactgaaaagtagagcacagagatacaattttcatcgtgaaacttcctgggagtagtttctcctcaggtgtagatgtttttaatttatttctgctgtttctataagtatttgaatttctgtagtcctttttaaaagggatgccttacacatggaatatttgcatgggattactgtcccaagaacctcacagcaatggttgcctctaaggagagcatttgggaattggagataccacatgattgtactgttagaatttttcaaccgtatgcttgattacttttttagtcatatgctttattaattttaaaaacattttttaagtagttggggaaaccccatgattcagtagatactagcttaagtgaagaagaagatttgtattgggaatattgcaaagtacagttaatacagcaaaatacccccatttgt

SEQ ID NO: 131579 - DNA, 1530 bp, Homo sapiens
taactttaatgcctattcaatacctcaaaaagagagaatagtaatgtagttataatattgctgttagtgggttttgacactgagtaacagatgacatgtctaatgaatagtgtgactgcttagattgcataattataggtttgtttgactttaggaaaatcatacgcaggccaacttcacccatttagagactttttgtattatgtaaatattagagcacttcactctaaaaagaaaccccctccttcagtgataatcattctttgtttttccagggtttgccactcagtaggaaaaagcaaaatgaaatagaaaccatctttaaaggatggatttaattcagtagcccttcctggtttgaataacacttcagtccacaatggtttggcattgtgcttgtgactggggtcattgggtacagacatgcaggtttataggatgacagccctggcactggcatacttacagaaacagctagaattttataatgtaaatcagggattatctgtgccctttggacttgattttgtggggtggcagtgcgggggggatagctagttattgtactaacttcttgcaacagtttcttaattgacgtatcaggtgacaggtctcacagagtcaccaaggccccactgtgatacttctccatgtatttattggcttgtaaatgaatgttcaaatatatcacttaggttcatttgattaacgaaagcaagggctggctgtaataaataaacgctcacagaatggcttagtgaaggaatttgaatattcctagcctcccagacttcgcttggcagggctgggggtcgggggagtcaaatgtgtggctaataaaagtgacttttgactttgagctctattcagaagtaattctgcaacatgaagccttccagtattctcccttcaccttgaacatttctctcctgctgctcttcatttgctgcctggtagtcagtctggagctgctttcatctctgttgctgccggtgctcttggcctagtacaagcttgacctcttagcagctggagttgacttagttattctcctagcattctctgagtgacttggttgctcttacagcacttcagattagctttgctgatgtgaaaggtcacttttcaccaatattaaaacttattaatcttcaaaaaggggaaaaataattttctttttgttatcagatttcttaaggaatttggaaagagctttccagaaccatgtctgatagcctctgagtggcattgtctagtgtcctccttggaagtgttgttttatgctaacagattgccaacggagctgagctgaggctctgggtctttgactttctcctacctgaaggtttgttccctggatattcatggaggagtcggaggtgcttgtcctccttgtgtttaaatacctttttgcacaggtgggcaagtgtacagacttggcagttagaaagccagagtgggaggcctggcgctgctgctaactacctttgtggccttgagcaagttacttcagttttctcatatgtaaaa

SEQ ID NO: 131580 - DNA, 1080 bp, Homo sapiens
tggggagagtggggaaggatagccttaggagatatacctaatgttaaatgacgagttaatgggtgcagcacaccaacatggcacatgtatacatatgtaacagacctgcatgttgtgcacatgtaccctaaaacttaaagtataaaaaaaacaaaacaaaaaaaaacaaactacctaactcttatgttgccctgagatttgatgtaagtttgatgtgctggcacataacagtgttccctaattgttagctacagctattatatatacatatataatcattgtcattactttccatgttttatcatctgcactgaacttccctaatgccagacttgcagaagtgttgtacagcaatgcttttctctctggagtcatcattctgtgaatttgaacatcgttgtgtgatttctacccaccactccagtgctggtgccatctcttttcctatagaaaagtcacactgaaaatataaaataggcaagtgaagttatatcatatgtcctcttttatgttctaattcagttgaatctctttgataggacaatttatattttagtgaaagtttaattttcagatttatgaaatataatggccttagaagaatattgaaggaagagttgctataattctttgttggatcctaagaacactaaggcatcattcttgtcctcaaatggattaaaatctctttggtgaaaggaaacaaatgcagataagaaaggaaagattggtggtggtcccaagatatcaagagtgtatgtgttaaggcaaattaggtgaagaaggaaatccttctaggctggtataatttaaaagcaggtagggcctgagctcagcccttgatggatatgtaggatttaatttggtatatattctcaaaaagggctttcagtgaaagagtgggagaattttgatggtgggaagatatactgtggaatcaagtagcagggagcctctgcctgatcagtacctccacaaccaccccaacccccagcaactttttagtcagtaactctgtgtttctgtgtttatccctttttccccctccaaagtcaagaggtttttactgcagtcgggaaa

SEQ ID NO: 131581 - DNA, 1014 bp, Homo sapiens
aggttgcagtgagctgagatcacgccagtgcactccagcctgggcgacagagcgagactccgtctcaaaaaaaaaaaaaaaaaaaaaaaaagaattgaacttttcccccttcaggacattgagtcactcatttaaaaaaaagtttaaaacttctcactctttctcacattcagtagttaacaacatttctttcatcttgaggtttcatctcattatcctcgaacagggaagatagattttatctcacttttcagccctaacctcacactagaatagactggaacaacttggatttagtgattccgatgcttatcaggaaggtctctgttcttttataggaagaaaaaacatagttatttttcttttatgatacaaaggtatgctttctatgcaagctggataccagaccaagaataataaatcacaatttcataaggtttctaagacttgatattatatggggatatgaccattttgagggaaatgttttacatcactttatgtacttgaagctaaggatactgctatcttattgcttgttttagtgagcgataagaatgaacagcagcttgggaggggccgggataatatacttgtttagaaatagcaatggtctagggatctgaagcttttccagccctggttcttctactttctaagttatgatccctggtcaagaaacctaacctcttgaaaactcatgttttttgtctgtgaaattcctgccctgtgtatttcacagaatgattatgtgaatcagattagataatgtatatcaaaatgctttggcattcatcaaatttgatggggctgtaagataatatattattgcaaactcagatttccaaacagaaccccttagagagatggaacaaaatcttctaaaaagcaagtattttgttttgctcactttatttcagggtatttttttggctttgacctgtcctattctggaattcaagagtcatataggattaagtataggctacttaaattattgcacaaggtgttcat

SEQ ID NO: 131582 - DNA, 1122 bp, Homo sapiens
caactctttaaaaactgcatttagatcctcagagagttctatatgaacttttttgatattttcagtcataagaccaacatgtcataaaagtgtttttagagctataagacagtacacagatacacacttttttttaatcactattactgccacggaaaaactgttttctcagtttcatattgagaacagaatgatgttctgaacactagacttctgatgacctgatgtttcctcccttgctttctacgcttttattaagtacattgaagagacactattggctggctttttgtttttcagttttcataaataaatgaataaatttatgaacatttgaataaatactcaaataaatctttgaataaatatttactgaacagccatgtgccaggcacttctagttgcaagaaataggaagtcaatcagcaaagtccatgtgaccttcacctcaggatatgcgaagtccagaacagaagacaaatattttacaaatgttatttaattactgctgtggtgtgtgctacaaattaaaaataaagcattcagggagagttaataacccaggggcaataatgtcttcagggcagggaagaatttggagactccttctggaggaaatgatatttaagattcaagtcaaatgagtctcaacatgggaaatatatattctgtgtaacttttgcatgaaatggaagcatcttatttctgattgtcttgatgtcagcttcagagtgccttaatcaatccaaagacttattgtgaaaattaggccagagaaggcctacctttatatatagaaagttaatgtttatagaatagttgagtaacctaagattggtcagtgattcatttagtaatagatttttgagtgcctactatgtgccaggaactatgcttagtaatgcaagtcatggcagtagttgatttaagaattattttattatcaatatcctacttcttaaacaggggttatctctcttaaaatgagactttttattgactattaaataaacccagtggtagtactgtgtgtttctgattatatgtttatgattgttttaaactaaacctatagttccaaactgtgggcttcaaattgctcagggtaggtttggagagtga

SEQ ID NO: 131583 - DNA, 1629 bp, Homo sapiens
cctgagagcagttctaggccacaggatgtaacctattatatatgaccacttactgactgaatataagaatataccccactctattaggcattgtgaatcattgacaaaagaagaaggagggggaaattcgttcggtggctataaaatttgaggacaggagattcctgagcatgagataaattactcttgtcagcagaatagcaaaaaggcaggaggtgacaggagagtgaaattagtgaaaagctcttcgagccagaggggaaagtactaggagactcacctcttctctactcgctgcatatggcattctacagtgatagacaactcttaacatgtttcttatcaaaagttttcaaatgagttatatgtgagcttttcatctgtaggaacattgctcaggtgtggaaattaaccagagaaagaaagttgactttaggtattcactcttcagacacttggaatgtgtctatttctgtgattactggtaattaacttctatttcggtggtttagaactccctgtacagttattctcaaattaaggttgtgttcggtaacattttgcctaataaacagagacagagacaattagttctgaatatagtatcccactaattgaattacctctataagaaataatctagatataaaatttcttaggtttcgaagtaacatagctgctaataggtgaagatatgttatattgagactgattttcaccgttacctcatagaaatccatcatagtattttggagttattaaatgttgggttttaatcagacttataaaactgttactgggccttaatgtgcctctagtgcagcattttcaagagtttgccccataatactaattaatcaggatgtgaataagtataataggaaaataggattttgtggtcaaataagtttggggaatgcttgattaaaagaatttccttaaagactccaaagcctttaatgtgcttttatgcaatgtgattctccaaaggaagaggatattcagaaatgttgtaaacttagttaactagaacatctctctggaggagggactgatattcttcagaacccactttgggaagtgctgctgtggtttcaaccccctaattttacgaaggaggctgtgagataggtccagcactttgtggcagagtttcttgtggcatccagaaaactgggaagtatgtcgaactcccttccaaaatgagccttaaagatgtttccatgttgaaggtcaggaaagggccaggccctttctccattgcattactccaacagtgaggaagggacagtttttaaaaacatgcggtgaatgcttagtctgtgtttgaagcaaagaagacccctctgtgcagtgatgatatgagaaaaaggagagaaggaaatgtttgagaggaaaagaagagaggggcttacagaagaggcaggagacacacaggagcagcagaatgggcaggaaacgcatatggacctttgaagggccaggctgaccacagcactccaggtaggtactgaggcgcccagtgtgattattaaacaccttggcctcagtggcaccaggccatcctagcagctaattctttgaattacccaaatgatatgaatgttccttaacacagcaaactcctga

SEQ ID NO: 131584 - DNA, 1081 bp, Homo sapiens
aaattggtgaactcctctaaaccacctaaacttggaataaatggcgataaactttccttatatttattttcccaactcacagcttaaactggaaggaaaaagtgtataagattcacatttaccttttgactttagtcatctttttcataaaggtttattcctgtctaccatcctgccccctcagaattttgcataaatctcatataacagttcaacaagtgactggtgtagactgggcctgctttgtcactgagtcactttattatgaaatacttaaagttgaatatctgtatatagcaatgaagaaagaatgttaaacagtttatactttctaaggccaggcttggtggctcacacttgtaatcccaacactttgggaggccgaggtgggaggatcgcttgagcccaggaggttgagaccagcctgggcaacacggaaaaaccctgactctacaaaaaaattaaaaaatgaaagtaaataaacaattcaaaaatttatactttctgatctgatggttttcatgactaactcatcagacagcaatgaaaagtgaaattaataaaaattcacaaagccagatataattagttaaaaataaagtctgaataagccgtaatcatctttacttccctcttcccattttgtaagcagttggtatttgattgataagcatgtccagctgggaaataaagatctggcttctaatccatgttctaccaggctgtgaccttggacaagtcacgtaacttctgtatttcagcttcctcatttctaaaatggggtaataatagtacttggcctacatacctcattgggcaattgtagataaaacgagattgtagataggaatgttttgactacccccctgccccacaaaattgaaaggtggttatatagttaccacatacagtcctcatctgacaacccatatctgaatggccacaagactgaagagtgaaagaaacttcctgattctaccaacaagaatgggaagggagtccctgttagctcttagaggaggaaagatacattcccagtgcttagatctctgaatcaaattctggaacacagtttcccaca

SEQ ID NO: 131585 - DNA, 1019 bp, Homo sapiens
actctgagcctcaagaaggttaagggacttgcgcagatcacttggttagtctcaagaggtgagacttgaacctcagtgttttgacatgtaattcaaggctgttttcatgacagttctgtttcaagatggatgctattcattgaattcactttgagttgtagttttcagttgagagtaagaatgtttttagggagtcttggttataaagtatatttatgattttgtacatctcttattgtaaattttccaaaggtaaagttttgggaaatttagtcaaaacaaaaagtgactccccacactgatgtggcgtgtgttagagagggattctattagaattaaggaactatttgaagcaaagaatactgttatatgtaacggttatattaaaaataagaaaaacttttgaagagccagtattatttacttctttaaaactttgtgttatatttttgaagtggtagtggtgtgaatatgaaggaattttaggaatttaaagtaaaataaaaatgaaataaacttttttctagttttaatgatatggtttatgtttatatttattaaaatattcagttcttaccataataatagcaagcctagctaacatgtctccagtgcttgttatgagccaggcagtattcagttatctccggttgaataattgttttcttcttgccaggttagcctacagatttgttcatgatcaattcttagaagtagtgagggataagtctccatgatagaagacagtgataaggtctgtatgtggcattacatgggacatgtaaaaatgtttcactgaatagtgaaaaggatactgcaattggagtcagaagacctagcctcctccttgttcctccctggcctaacagtgtgacactgggttagtgacttgtcttcataaaccttcgatttccttatctgtaaaaagagaacagtgatacctcatagggctgtggcaaggattaaatgagataacttaggtaaagtacttaatttatgccttcaaaagatgaggcctc

SEQ ID NO: 131586 - DNA, 1384 bp, Homo sapiens
ccagctgttcctcctgacttccccatcttagaaaatggcagtattactattccatttttaattagaccaaaatccagagttgtcctttgttccttaattttttcacagcccatatccagtccatcaataaaccttactctttatttctttttttttttttttttttttttttttttttttttttttaagacagagtctcgctctcttggcctcttgggcaggctggagtgcaaatggcgctgtctcggctcactgcaaactccacctcccgggttcaggagattctcctgcctcagcctcctgagtagctgggatttacaggcatgtgccaccatgcccgactaacttttgtgtttttagaagtgatggggtttcaccatgttggccaggctggtctcgaactcctgacctcaggtgatccacccggcttggcctcccaaagtgctgggattacaggcgtgagccaccgcacccagccaaccttattatttctacctacaacatgtatttagagtctaaccacctctcactgtttctcctactgtcaccctaatccatgccatcatcactttttacctggatgcctgcagcagcctactgactgctctcctgcttctgctcctcctcccctaaagtggttctcatcctcacagccagaatgacccttttaaaaagaaaatcagaggtttttactactctgtgcaaaaccttcacacatctctctcagaataaaagctaaagccctccgtcatctgtcccacttcgcaccctgctttgattaatactactgacctcatcccctgttacttcccaaaccctttttactgtgactccaactatatggctcaccccctcattttctttaggtctctggttcagatgtcgtcttttcattgaagcctgccttgaccgtccatcacagaagagctcactcatttccactctgctcaattgttctccatggcacttataccatttagctagttacgtattttcttattattcttctactcaagtagaatacaaactccacaagggcaggaactggttctcttgactgctgtgttcccagctcctggagcagtgtgtggcctctaataggctctaagtaaatagttgaagtctagggttagtagtatgtcatggacttagcgatataacagacctgctaatgcagtcagtcctagctccaatactgagctcttcaaccccttgtaattagaccgctcctcagcttcagttcctaatcaatagcataggatgtattcattcttacctataatgttatttgtttgggggagggttaaataaaataaacagtatgaagtgcttacctcagtaccttgccaataataaatagttgagagcagctgctgctactaat

SEQ ID NO: 131587 - DNA, 1233 bp, Homo sapiens
gagagaatttctggttcttactgcagtgcaatatcactcctaaagtgagaaattcccagatttaggataaatgttcaaacagttctagacaggtaagcttggctactcaacctctgtgtacacttttttccaagacttaaatttacaaatatagtggcagcaacaacaaaatgtttcctcctaaggtgttgcagctatttttctaaaagcgaaaaatatgctctccccctccccaaaagggggaatgatacatcttaccaggtaccgtttccagcttgaagtccaagatatctgagctgagcttattccttttgttaaggttgccttatgtcgctctacaactagtgagccagcaacttatttttataaaacattaggagaaaaagagaaggggaaattggttaaaaacataaatatgtttatgtcagaccaaaaaataaatatgaatagatactttagtcttagcttttgctattggttctgaatccaaagttggtatttttaattcccttcctccactactcattccatgttctttttgccctcagccagctctcagctaattgtagatttttatctgtagatttttatctgactgacgtttatctgacaacactttagactgtcattcacaggggtgaggaaggaggctttgagttgttggtggtcctgcctatatggagttatttctatcttccattatctttcaccgctagatgtggtcaaaccaacaggtgttccaggttccagacacacacctcccttctctcatcctgttgcaacaatcttctttacccttgataatcaagattcattaacacaaccaattctgtcacctccctttttgtccctgttctgtgtcatgaggagttcagaattgctaggttgcagtttaagcttccaaatcagtggaggtattgttgagtcccttggtgaaatcattcttcacttgggtgctgagactgttaaaccagcagaaccagagtcgcagtgatgggggaattgcaagttggtcattaggtgtgatgagggggaggagaagatgtgtaactaattctgcttctgtcccttggttactgggccctgtattatggctgtgggagaaacaatgttttgtattattcactggttctgagcatcttgggagacaccaccctatctaattttatttggaactgaatcttcagaagatgatttcagcattctgaaagatgatcttctagatgatagggt

SEQ ID NO: 131588 - DNA, 1055 bp, Homo sapiens
tcacatgattcaaaaagtgtgtgaatgactcagctcattaatatccttagctcctgtgatctcccctcccagtgaaacgatggttataaggcaataatgataattggaagaggaggagactttgactttgccccgtggcaataaaatgacacactttaagtaattacatgtgcatacaatattgtttgaaagaaatgagttatattatcatcatataaatacatttaatatttgtgttaaaatatggtgaaaataatatgtagtttcagcgtggatgaggactgagttctgctttttgtttctaccattatcttttttcctgaaacaacaagcctctatatggacagagccatttggagccctaacttagttcctaacagtcaactcattgattaccttctccttgctgacatagagaaatgttgcagtcacaggggtgttgggttctaattacatgtagctaagtattcacaagtgattttgagctaaaatgagcaattcgttgaagagtctgtggaatttctggggatttgcgtgtttcttcctgttactgtttctttctttttgcagcaatttattaaacaaagacctggatatttggagtcagcctttgcgcatatgtctgctcttgctagagtctctagtgactcaaaaatctaatgcacacttttcacttcttatttagtttcacttctctgcagcatttgacagatctcgaaattccttcctaaactttgtggatattttcttttggttgtttcttaactcttacactttttctttttaaactcttctagccgcccttaaaatgtgatatcctccagagtttggtcttggtccttttttttgtttctatttatccagtctccttggtgatcccattcatttccatggtttccattaaaatccatacactggttgctccaagtgggtgtctttatgtcagtcttgatgagctatagacctgtgtattcagcaacactggagatatgtatagatagataataatagtaacaacaatactaacagctactcattattgaatattttctgca

SEQ ID NO: 131589 - DNA, 1882 bp, Homo sapiens
ataagattaacttatttgaaatacatgttgagtactacctactgtgtgctgggcactggtaataccgtgataaatcagacatctttcaaggagtttattaggggaaagaggcataaaaataagcaattgaatattcctggagtggtggtagaagtccgtctaaagtgtatggggcacaatagagagtttggtgagttttgcttggcagcaggagcatcaggaaagggccagtgatgaaagggagcgattatgaaggcctgatggagagcagctgcagcaaagtgataaggcagcagcttgactatagtggctaaagctggaggatgagaaggtggaaagagtggctccttttttcccccaaggaggtggaatatgaacagaaaataactgggggcagggagttgggattataagaggttgtttgttttaaaaaatgggtgtgaagagcctgtgtaaaggttcttgagaaaagagcccgttgagaggaaagtttgttgtgaaggagatgaagatgtaataaagaacagggttgagaatggatagcgagatagatagatgaatagatatgtgataacatacacagagcagaatgttaattgtggcacctaggaagtagatgaatgagtgttcataatatacttccttcaacctttctgcatatttgaaaatttataatattgggaaataattttataatattggggatggaggagaacatgggttgagaatttagccttgaacagaaccagggggcacttattccttggcatggcaggacattatggaaggtcaaggctaaagccccagccacttttgtaaagcagaagtgactctgacctgctagggtggagggccaaaaaaaaaaaaatgttgagcatgaaggatggaataaccacttgtgagtgtgagagaggactgagcagacttgggtggtgatgctcaggtctggtgaagttgccacatttgtgattttccctggcagttatcagaagacaacaagttagtaggatcattgaagggccactagcttacggaagccaaaatagaatgagtagttggcatgaatgagtcccttcagtatttgccagcagtctgtcctagaacatgtcccaacctctctggtgctttgttcaagagattgttttcaacctcactatcttttgctttgaattatctgagataaaaacaatgttgcaaaactttgttaacactattattattaacatttaactcaggtaattttgttgtctcccttaggtgaaagaagaacgtccagaaaaaataccagatttaaaattattggtagagaagaaatttttggctttacagagcaagaattctgatgcagactttcaaaataatgaaaaatttgtacagtttaaacaacagctgaaagaactaaagaagcaatgtaagtcaacatgctttgctttggttcggctttttgaaattagggaactgacttgatgaacagccccagttaactgattttataaagtttgcttatctgcttggcttgatcctcattctaagttgcgttttattgttgttgcaattctgtattttgtctaatttttggttcaaatcagcctgctcatttctgaaagccaacagtttccacaaagtgctcagaaaatttcccagcagctagttatgtgtattgtcccattgctggggagggaaattgggaaaacaaaataaaagtgaaaactattttatttaaataacaatggtatcgttcaagttttaaactgctgtgccatgctttaaaataaccatactttgattctggttttgcctctttggagtaatattagctatgttttctctcagaagaccactttatcttctcaactatagaccaaaatctccttgatccatt

SEQ ID NO: 131590 - DNA, 2090 bp, Homo sapiens
ggtagtataaattccatgtggtttttaaattgttgccttcttaataaactattacattcaagttttttagtggacataattttgacttaagaattggagcaggcaatgtaattttttataccaaaaaaattttttagacagtatttaccagaaataatatatcatttctgcacagtaaagtatatatgccctttcttttcccattcttccatatggtccacataccaattttatataaattgattttttcacattagcatctatttagtcctgtagtctttgcttcttttaggattgagacgcttgtatttcttaaagaagtgaatagtgaagcaaataaccttttctaactttagtctcccaacaccttcatttacacacacatggagcaggagtgttgtatgatatgagacataaatttacctcgtgtccttatatgtgcttaatgtagggattcgtattttgaaataggctttcttttaaatataagcattttctttaaattgatgctgagatctcaaaaaatgactgaggaagctgcctcacttttgtctattttacaaataacttaagtttcacaatttggaatgttttgcaatcatgatgagacttttgtttttactgtagacttaaccagtaagcattttccccatattttaagtttatttttgttcttttttttaacatcacagctcccaacattcttctaatgtatttttcactcttccctcaaatgattaataatttcccaaagagataataatttgccaatggctttctgatcttaaagatgctagtgaattaattgtatagccatgagaattagacattattccccttaaatatacatgggccatatagtctttaccttttatccatgatatttattactcagtggtgtgtgtgtgtgtgtgtgtgtgtgtgtatagtatctggcacatggacctgtgattaccagcctgaggccaacaaacccctcagttgggatgtagagattaaacaaagcttttaaaagctcacattatatgacctcaagtttgtttacctggtcatctcatggtaattagaaactctgattggcagctttcgatttcttgattaaaaacctaaataaactgattgttataggcattttttcaaaggcattctcagtgaaaagaccgagaactattctatttggtgcttagtgaaaatattttgaactaatatatgtaccagttattaacatctctttattaaatgcaatagttttttgtcaaataaatagcaatttttcaatcttgaaaaaaaaaagatgctaatgaatttcagttttggtgttggtctaagtagccaaatgtattttatttgactatttggagccagtactcataaactgtggcagacttagcatccaatcacaattcctgagttttaagtaattttataatacaggttgaaggacaaatattcaaaaatataaattgttccttcttttgttattgtttacaaagttattattccacaaggtaaaggatgaagacttttagaatcatactcatggagaaacactttctaattaagaacatataattcaaaaaaatgataaatgttgaaatcatggctattacttcttaaatctctctaaaatggagttggaaaaagaaagaaaatgtttcctcaggccaccagtacacattatttggatagacagtcaaaccttatgtatatttatattgaaagaaatacttccttataaagtttccctgtatattgtaacactggaattaaaataactttcccctaaaataattaaaataaaaatttcccctagaattttattttaaaaagtttttagatttcaaatgacagaacaagcaaaatattaatacttttgaaaaatactctataagatctgtataccttacttgcaaaatgtaattttagtgcagtattattaatataatacttgtattatactaatacaagttgatacaagtataaacttgtaccatgtctagtggattttctttctttagatttaacactgttgtgagggttctaattaggatcaggctcccacagtatttgtgtagccaggtcaaaggtac

SEQ ID NO: 131591 - DNA, 1097 bp, Homo sapiens
gatctaaattatattcagaagtaacggcagtttttatttttttaattttatattttttccctgaataccatccatttgtctcaagtacattcagaacactttgaggattcactgtgtatgaattactacagttgaggctctgaaataaataaaaagcaaaaagcaggaatctgtacatgcagaagacagtgtatacaaacatgatataatatgacaaccattaataacaaatatcaactcaaaagcaaagaaaacatcagaaacaaatgttatacaatgtgggacctaagtgaggagagtcaaaacaggaatgccatgccagtcaactgatatggggctctctggagcagtaggtacagaaagattttgaggctgggttcagccccagtaggaaagaatgtgctaaaagataacagtgggaaaggagagggcagtacagatgtctagtatttaccatccccagaatacaaacctaacagatatactacactcatttagagatactgttactctaaagataatatatttcagttacacacaatgattttcccaatagttatgtcttatagatattactaggcattagatataacatctttgaacaaagaattttatcctttagatacccagtgtcctgtatgttagaaataattaggtctgcctcagcttacatctcagggtcattaccaagattaaatgagatactgactctgctagctctaaaagctttagatttaagttattgaggaagagctagtacagcataatggaaagaatgtggcttagcagacggaagacttggatttgagtcacttaatagcagcctactctcccttcagataccgcctatcttagatacttctaattcttggagtcatagaatcaagattgatcgaagataacttctacacttctagacaagatgactaggatagtgatggtggtgataactgagttagggaacaatttcacagagaagaatttcttaaacagtaatcatattctcactagcccaagttgtgaaatgaaacaatatgattcggtttaaggcagacataaccagactttcttgggtgaaataattttaatttagctag

SEQ ID NO: 131592 - DNA, 1062 bp, Homo sapiens
ctctgcctcccaggttcaagtgattctcctgcctcagcctcccgagtagctgggattacaggcacccgccacgccacctagctaattttttgtatttttagtagagacggggtttcaccatgttggccaggctggtcttgaactcctgacctcaggtgatccacccgcctcggcctcccaaagcactgggattacaggtgtgagccaccatgcccagccattatgtgcattattatttctttctttcagctctattagatggctgtatccattttatagatgagaaaataagcaaagagatgtaatataagttgcctaaaatcctgatgctgaaattcatacccaggtttaggtgataccacagcccatgttctttcccacataccacaccaattcttgaaaacacttttgtgtgttttttctttctctcaattcaagcataccattcatttcttggaaaaaaaaaattgacttttaataggactcttgaagagtgaatcatctgtttggatcttccagatcatagaactgccttgatgtactttgatgacgctggaggaatctgcttcatctagctgagagagaatctttttcggtcacttgcatttagagattagggagtagtaatgataccagacattacatagcagttcttcttttccagatctccatggttttggcaattcatttagaatacagtgcctaagaattatgtttctggtggaatagttggtgtgttatggcagagaggaggaggatatttatggcatcccaagtttagaacaaattccatgaaatttatttcaaacataacaacagtaatctcttgcacatacatcatctcgcgtaatctttacaacatccacacgcaggaaaggaatgcatgaaaagtacaagttctgtttttagcagactgaacaccatataataagaatcttggaggtgacatatttacccagtgtctcacagtcaagaggccacaaggatagcaaatacgttcacaaggaaaggggaagttttaaaatgacagatagctataattaaagttagtgaagaaaggtt

SEQ ID NO: 131593 - DNA, 1136 bp, Homo sapiens
tatagtaatataataataatgctaactagcccacagagttgtttatgggttaaatcaaatattatatgtgaaaagtgttttataaactgtcatatactccccaaatattagttacctgatatttttgaacttattagaggcatttactttaataattttcatttatacatatacttaaattgtataaggataaacattttaaagttattatcaattggcatgaattcttaagcataagcaatgttttaataattttgttaatgtgttaaagatcttaatgaaggataaaatattgctggactttcaagtagttaaggaatgttctgtaattggcaagggtgggaacaaaaaaatgttgacaaggtaacacatcatttttcagtacagtattggttttgacaaccttttcttgataggaagacagaaactgaagtgtcaggaattgctgtattcaccatgaaccttcctatgctctgatgaaaacatgaatatttgttataagcaaatgaaatggagctgcagctatcactatgtactctgtgggcctttaatacagtagggattcctttatagatatacatagatttaaattgaaaaaaatggtctttgctgtttgagctcagttgtttagttagcctttaaaaaaaaaaaaaatcaccagataacttatcgtaaatgttgtgtgtgtgtgtgtgtctgtatgtatatatataatttttttagtaccctcatctcctgtcaacctgtttgccagattatagactgtatcatacccatggaccttgcataactaatatctagaaagaggaagggaaggaggcagaaatggcttcctagggagaagcttttactgagaaataagccacatggctccacagccagcccataggtctttgagatatatacagcccatgcttcatcctacccctaccttgtaaatgttaatagactttattcttaaataattattgttaacagactcttttttaagaacagttttaagttcatagcaaaattgagcataagatacagagatttcccatataccccacatgtgcatagattcccccattatcaatattttagtgagtaggcccctactatattcagagcactgctagtcactaggaatgtaa

SEQ ID NO: 131594 - DNA, 1271 bp, Homo sapiens
tgctgtagagcacaggggttttactttacatttaccaaaagcagaaaattcctactgcagagatgggtaagaattatgccattcaataagatacgctgtctagtcccattcctaaaagtctagtcccattcctaaaaatccctaccagtcccctctccattactttctgcccccactactattgctgctctacttctgatcttgctgtcagcctcctatatgctcccagctctaactagatccggccagtttctaccagaatgatcattctgcagcatatacctggtcatgcttgctcacaggaaactggcaagagtcaagtagggcatgggctttccatggctcccttcagcccttctggctccaggctcctatttcactttctcaccgctctcctctctagcccttggaatccaaacacttaacattcctagaaagtactgtgttctctttacctgtagactttcactcttgctgatctcttcatggactattctacccctctttctcttcccttggttaaggcaagtccctccttctgcctcaatgcagaaatcactgacttcagggagtcttccctaaggtagagcaagtgcatgtctacaatgtgagacctttaaagaagctttcatctggagaagagtatctaattacaaagattaggaaaaagtatgtgcttggcaggaagagggatttgaggcaaattttatggtggctttgaaatatcctaattatttcatttaaatagtgtactaaatggaaccccaaactgaaatattcaactcataatctaatatttgacatgcattatactgtcccttatccatcagtaaaatgttctgtatctgctgcttttggtgatggtgcatcccaggagacacactgactgaaacacattaaccttctctcttgactggctcatttgattcaaataacaagttcccccataaccctacttcaaaaactagaaagtatcttactccattttcagaataccaagttgtgagaagcagcgagctattctttgtttttgttactctttgtttaccattaacctagtaatcacctcggctggaggctggagattgaagcaggggagtgggggaggaggacctgaaggagcagagggttgagaaaaaatggttagaattataggttgtaaataccagtatcgtacttaataaaatatgctatctctgatggtcaagcttaagcttttataatacaatgatttaagataattataatcaattgaattttaaagatataaa

SEQ ID NO: 131595 - DNA, 1749 bp, Homo sapiens
tacgagtttttaactgctgaaacatcattgactgtatgtgtgtgtgtgtttcattcatcctcttttctcagtacattacccctgcaaaacaaggaggtatttgaagtaatctcactcttctgattcatctgtttgatgaaagacatgtttgtttattcagatattaaaacaacttgaaaagagagtgtaacataaataaaataaaactacagctggtttacctatacagtatttgttaagtatctttaactgtctgtttttgcctggcactggactagatgtataggaatagagaaaaagaaacatgggacatagtctttactttcaagaagtttatatgcttatagcatgggtaaaatttatacccaacaaataatttattaatgtaccaaggactatgctttaatcaaaggtagtacatagatggatatgacctagtccttttagtggaaatagatatttaaaatagttataattcaaagcatgagagaaatataaactgagtgctgttgaattagaaaaagaataggaggagacaaatgattgagtgccagcgtaagtgtttcatacaattaacacctgagaagggagacatctttgaaaccagagggtgatggcttcatacagaaaatgagtcttgaacaagactttgaagaagaggtagaatttgaataagtggagaggtaggaatcctactcaatttagaattgagttgttttcccaagaaggtaattatctaattagagtcttttcaagtggcaagtattaaagagcatgcaataacatgactatagaaagactgtagaaaacattatgctgggaagattgctgtcaatgtttttttcctctccaatggtgccaaggcttaattttgttttctttttctcttaaaacttttttagagatggggtcttgctgtgttgcccaggctggtcttgaactcctgggcacagatgatcccctcgtctcagtctcctgagtggctgggactacagccatgcaccactgtgaccaatttgattttctatcgtcagctatttgtgtactttaattggaagactgagtaaagaatggttattttataagggaaatgcacattttgtttttattgaatagtactctgtagccatgtattgattgaaaaaaaatagaaacaaataatgtgtatctctgctgacgaagaagtacaacatagacaaaagtaaggaaacccccattgagtgatgtcaactgggtactttctacaagtatatctggctttatttagggactaaaccggtagaaataattgggggaatttcctttcctaaatttgacaggtaaatttgcttttcatactttctgttttagttgcttatatttaaactattttgagaaggagaaggatcaattaaaatgtattttatttagtgctaattgaatagtaccatatttaaacttataccaatttccaaagtacttgatgtaactatatataattagtaatagaatataggaatcatgatttttattttggtaaattaaaggtagtttttctctgttaaaatgggatttaaaacacctttatgaatgaatccctttatctagtttatcattgcctttcctatgaaagtagtgatacttgactaatactgtctaacttaattgctaccatgtggtgaattctagagaattctttaggggaaatttttctactacatttattttcaatgacaagaaattgggagaatttataatagctcttatcat

SEQ ID NO: 131596 - DNA, 1649 bp, Homo sapiens
gccacttgtatatcccagatcaacttctaattctgcttcatattgtttgctatcctttagaatatttctgtcccacctcccttcattacagtagctctttgcaatcttagataatcttatattttcattgactttatattccttaacttccaggagagttctagtttctgatattctgttccattggcatgtacttgtcagaccaggtatcctcatttacttacatgtcatagtgctctgtaaacgtttatggattgattagcctaagtgggcaaagtccatctgtctctataattttgaataagagagagccattgcttcctaaatattttttattagtttctgcctttgtgttaattagtgtaattaacattgtcagtatctgttgctacacgtgtgaatctcagtgttcaaactcaggctctttgctaccgacttttaccttgttagcaaggcgaacacatattcatttaaaggtatcaataagattttatgacctgttttctggtagcccaggatagagtctttctgggttcactctgcagagctgggtgagttaggtgggaagaatctcaaaaaagatgccattctggggtaataggggaagctcagggacttggttgagtttaaagtatgacctcctagagctgaggcagtgagagcccggtatgtgcaggaggctttgttcatggccagactattgtgggagcctcttgaacaacaaggtgaaaagagcaaaatgggcaaggaagttgtgagccaggctgaggtttgagtggagggttcaggtacgtgttcagtaccaaaccgttggaagtcattgccagagtattaattaaattgacactttaaatagtttctaaattagggatggttgatcagatgaagagacatggtgggccagaaagcactgacttggataatctaaataatttattaagataacattttttaaatgtaggataggatcagttcactgtatacagttgcacagtttgttatgtactacataaaagcacctcactaaggaggcagagggtgactagatttcagcccgggttctaatcaccgaggcatgtacctggtatgcctggaggaaagtgtacctttttctgattcatctgctaattcaaatatttggggtaggcaagtagaggccttgttctctttgtcttatatgttgtagacttaatgtgaagaatatcctctaatctgttaaaaaaatcaatatgtaataatattttctgatccaaaaattatattgagcagtaaatgatgattggctaccatttaattctcttttataaaatgagaatagggaaaaagaaaaaaagaaattaagtatttggctttgaaagagtcgacctgtatgaaaaagaaatgttgaacatttgtacccttttttctttttaagcttttattctctgttgtgagattttcccctttgaggacactgaaagcaaaatgaatcgtgccattggaaaatgccctgtagatcttcatggggttatctgtagccagcagcgtacaggaaactagtcacattattaattgcattctctcttggccaaaggtttagctgttttaaaatgtgatttcactgcccatattgctcatatgcctaagcttctttgttactttagtaaata

SEQ ID NO: 131597 - DNA, 1976 bp, Homo sapiens
ctcctctcctctcctctcctctcctctcctctcctctcctctcctctcccctccactcccctccccctttcccctccccctcccctctttcctttcttctcctctttcctttcctttcctcttctcttattttctctttctctttttatttctctctttctctgtttctctctctttctctctttctctctctctttctttctctttccctccctcccttccttccttccttatttccttccttccttccttccttcaactgtacagagacctggaggtcgccaggctacccattctgaaatgtgagttttgtttggctcacacagtgttgggatttgttgggtttcaaatgtgtttaggtaagagttgtgcctttctattagtcactattctgaccattcccttttgttttatatctgatccacttcaactgtctttcctgctggcattccagtttgtaattcttactttatatctggatactctgtgaacacagaattaaggcaggaaattagaaggtagaataaaatctgcttttaagaagcagtttacattaaacaaataacttttatttatagtgttaataaatgttttcaaatattataattgtatcccaatatcattcccctaagtactcttcccatttaattgctattaggctgggctgtgccttccagcaagataaataccaggttggtaggcaaaattagggaactgtatcaaggtttagaataccaagggtcaatagcaggccagtcgttggaaggcagaatatacacaaacagtaaggtcaagacaagtcataagtcagagcaagctggacagactagggaatagcagtagcatccaaggcccatgggagtaggaacatcaggtccaagcctctaagaccaggaaatccatgagcattaaaggaatgagatcagaattggcaggcaaggaggctgagtcatgggggctcacggtctcaacaaggaaatgggtcactggcggggtcagtacaggaccctacgtgaaagaaaggagtttgccacagaccaaccccttttgcctctgcttagaattttttaaaattaatagactttattttttagaccgtttttaggttaacagaatggaacagatagtgcagagagttcccagataccaccttctcccccaatcccctacacaccagtttcccctattttcctatttttaatattgtacatttgaatgatatatttgttgcaattgatgaaccaatattgatacactattattgagttaagcccattttttacattaggtttatgctgtgtatatttttatggggtgggtgttcgtgtattaacatttatattacataaaacttactattttgaccattttaggtgtgctgctcagtgagattaggtacgttcacactgatgtgcaaccatcaccattagccacctccagaactttttcagtaaccctgatggaaactgtacccattaaacagtaattccccatgtccctaccctcacctttggtaaccactttattttattttattttattttattttatttattattattattatactttaagttttagggaacatgtgcacaatgtgcaggttagttacatatgtatacatgtgccatgctggtgcgctgcacccactaactcgtcatctagcattagttatatctcccagtgctatccctcccccctccccctaccccacaacagtccccagagtgtgatgttccccttcctgtgtccatgtgttctcattgttcaattcccacctatgagtgagaatatgcggtgtttggttttttgttcttgcgatagtttactgagaatgatgatttccaatttcatccatgtccctacaaaggacatgaactcatcattttttatggctgcatagtattccatggtgtatatatgccacattttcttaatccagtctatcattgttggacatttgggttggttccaag

SEQ ID NO: 131598 - DNA, 1597 bp, Homo sapiens
tcaatggacatttgcgttttcaccttttggatataatgctgctgtgagcatcagtgtacatgtatctgtttgagtttctgctttcagttcttttttgtgtatatatcagaagtggaatagctgaatcaaatgatctgtgggtccgggcgcgatggctcatgcctgtaatcccagcactttggaaggccgaggcaggcagattacctgaggtcaggagttcaagaccagcctgaccaacatggagaaacccgctttctactaaaaatacaaacttagctgggtgtggtggcacatgcctgtaatcccagctacgtactgaggcaggagaattgcttgaacctgggaggcggaggttgcggtgatccgagattgcaccattgcactccagcctgggcaacaagagcgaggctgtgtgtcaaaaaaaaaaaaaaaatggtctatgggttttgggcaaatgcacaatgtcatgtgtccactatacagaatagtttcactgtctgaaaaatctcctgcttcaaccattcttcactctctcacctttgcctctgcttaggttttaatgttctttttgtagacatttaaatactgtttatactccaacctggaattttcgggtaaagacgagttagtgaaatcagtgatcaagggaaagtaagatgttctggtaaattatttatagtcccttaggctttgagattttgaaagttacttacacagttagcgtacaggtaacaaacagagctttagaatgcattggcttcaaataggatgatttgtgtggatgcagttatatattgcatccatttattccacaaagatttattaagcacctatactatatgccaagccctgtgctagatgctttcaataggaaataaagattccataagataagttagactattttaggagtttccacctttttaccaccaagctacccctttgatagttgttccctaggaggcatgtgttttgaaagatcctgtctattacatattatgcttgtgctaggctttctcagaatattgaaaatagcttttgaatctccactgtaattttcagggagtcctagaggtctagagatcttcataagaaaactgatcacttttttaaaaaattttatttatttatttatttatttattttttatttatttattttgagatggagtcttgctgtgtcacccaggctgaagtgcagtggcatgatctcagctcactgcaagctctgcctcccaggttcatgccattctcctgtctcagcctcccgagtagctgggactacgggcacctaccgccacacatggctaattttgtttttttgtatttttaatagagacagggtttcactgtgttagccaggatggtctgtatctcctgacctcgtgatccacctgccttggcctcccaaagtgctgggattacaggcgtgagccaccgcgcctggccctgatcactttttaaattcagagcatgagtcttcgattaggctggtttgtgtgactgtcactgtgctcagtcctgttattacagctgtgctgaggtacttagtgtggctgttttccagacttgacttgctcaaattaccatttctctat

SEQ ID NO: 131599 - DNA, 1071 bp, Homo sapiens
tattgctacattttttctaggaactctgaacacatttcattcttgtgaattcgcttgtgcaacgatattaaatagagtaatatgtttattttgtttcaaagtcaaatgaatttgagaatggtgaaactgaattatttttcttgggctttctggaaaagctagattctcagaattctcccgtggttataagacttactctattttataaagaattaataaaatgtcactgaagttttgttttagacactttgggcttcgctgattgaaaacaccacaccaactgaaaaatcactgtgaaaaagaacctggtagtactgtcaatatcaagtaggattcattaattttctgacattactggacaagatggttcgtgccattcagaaagctctttttctttcttcttctttcctaatacagtgaggcatacaacgtagcctgccttatggttaagttgggtgtatgacttgtaaacttccctcttgctattaaagattatataatgggaagttcattggttttgaaaggcagaccaaacccacccatgggatttctattggctttttagatgtattgcatttctctgagtaaacccatgtggctgagaaatagtgagtagcttgttggctgactgtgggaaaacctatgaaggatcagttgatctcatttgggcaggagtcagaaatggctgagaatctaaaactatatatatgaggatggttttctcttgatgttgcaatctttattttaacatgtttttgtgtttagcttctggagttgcctaacagtataatttcaaatgaggtttagtttcagctgtttaattttaaactgtagggaacatgattaaaaaaaaattaaggcattatcatttgccttagaattttaatggtttgtatagaaagagttttcctgtgacaacctaaaacaaaaatgagcctaacctaattcttgatattatttgttttaccataaaattcttacattagaacatgtaactctgtcagagaatttcaacatagttgcataaattgtgtttcatattacaacttgttctctgcttgacttcattga

SEQ ID NO: 131600 - DNA, 2107 bp, Homo sapiens
tgggacattcgcgtgggtcgtttgtaattgaagacagtgcatcctttgtaactgaagctagtgcaaatgaggacaggagtggagggacagaaagcggagaggtgtacagctgctcttcttgcactgtacccctcatatctgcagccgggatcagtcaagatctcattcgtgatgcttgggtgccttgggggcttgggaagccagctcaggccttgtgatccactcggattagtgttgtctggggttctcactttctgactcctggaggacgaaacgccacttgtctgagagggagtgggagtgattcttgagaatgaaaacatgatttgggtagtgaagaggtggagaggagaggcagaggggatgtggaaaagaggtagaagcagggaagtaagcatgaataaagagtaaattgggcagggagaacaaggaggaagacactttcttccccttactcctccctgtttgacagtctggctatttctgctttctcccttagtttcctcttttctctccccgtttcatggcactgctctccaaaacttgttctggcaaccctctgcctcatctttttgtgtccttccccaacccctatctccacccaccagcccagttcacttcctttagttgccccagccccctttgcctagggactcaccagtgagtgccacattcacagccatgtctggtgcagtctgaaacacctgaggccactcagggtctgtattagaattaacctttactaacaggtttaaccagacttttcaggttccttttaagtcagaatgaacccctgccttgaccttgcccatcctcaaattggggggcagcctccagatccacaagacatgagaagcaggagcaggcctgccacgtccctgacatggcagtagagattttatgaatggtagctcggtgtctccatcagtggtagctgatggtagcttagtgtctccatcagtccttcagatagcagtgagaagatgtgggcaacagcagtgtccctgacttgtcagtagcgtgactgcagctcagagagcaagtcatgccaaccagggccttcccctccagagccactgctttgctgccttaccgaataacgaatcaaatgtttctttcctttactttctgtttagaattaaggacaacttttattagcatctttgtctaagctatagcattaactcccagtttttaattacatcatcttaattgcaaatgtattgcaattcatattaaaaatcaggaagccttgtactttgctaataaactctggtgtttgcaaatctgattaagctctaattagaattcctttatattcaatctgtttcgaattacttttctgactataaaaatgtgtatattgtaaaagattcaggtaatatagagggcaaaataaaaatcacctgtaatcccgttacccagagataaccacataataacattttgtggtttcttttagtcttttttttctgtaaactatatattcgcaaaactgagatcagtttagtgtcatttttttagtcagtatagtgtgagctcattaaatatttgaaaaacatgattttaaattgatttctaatatttcatgttatgcatgtgccattgatttattcctctttgaatcattaccctctattactgttacatgcactggttgtctttcagtggatagcagttgatattgtcaatttttaaagtcagtttgatagttaaaaaatagtatcttatactatgtattgagtcttaactatcaaaattgcctaatttttagatcatttcttgttacttttatttatgaattataaagattaaataaaattatggtatatttttcaggtaaaaattatttcaaaagttgaaataagtggtgtttgttttggtaaaattttacttctttctaaagtgttttgatgcatttattcattcagtcagcagatatttattcaattccttccagtacaaggtgttaattggttagaataaaagaagaaaagtatgctttctgccttctagaagcttacaattcagtgatggtaacatatgtaaatatgtgataatgtaacacaaagaaataaatattaaaataaagctgcaagctgggtgc

SEQ ID NO: 131601 - DNA, 1237 bp, Homo sapiens
gagaaacagctgtagttcctctgtatctcatgaaatccaattaactttcttccttttgtctcttttctgttcagtttcaacactgttcagtatcttcagtgaatttttactcaacaccagatgaatagtagtactattgtaagctaatcgtatgccaatgaggaaaaacaccttttcttttttattacttaatggataaaaggtacaaagaaattaccagtctaggtcaagttcacaaactgggcaaaatagatttgcaaaacaaatacctaaaaatggaaaacattcctaatggaggaaatggcaaagaaaaatcatcttcaagattttgcccctgtctttcttagacagcagggggcagcagcatgagatactagtacaggtggacaggtcagggtttgcttactcttcactgaactctacgtagtaggtacaactgccttggatcaaaaacaatttttagagaccctgatagaggattaatgcattaaacaaaatcacaatatagattggtggttgattaaaaattctagtatctgattttctatctaatatatattattctggtttcttactggcaagcctttattttacagaatttttgagagaagaaatacttaggactgttaactgtagaataaaccttacagtcctagaaagaagcattaattatatgatatattagtaaaagatgcttatagttgttttacaggtagcagtagggtgacctaatacacagaaagtgctgtgccacataatgaggattcagtagatgtgattaaatggttgctgacatcccttcaagacaatgacttgtcttcatagctcatcagtgagttcacagtctattgttcctttttatttggccagtgtaaaatagcagttattgcaagaacaaagggattaaagcatctgaagacctttgtttgagttctgccactttagtagtgatacatctcagagatcaacctctttaatgcctgtctttgttccctggaacagagtttgtgtttccttttgtgttacaacagaactctggtcattcctaccatagcacttttgcacactatagattgcaacccacagtattttacttaaaagattctgaaaaagtggattagaaaacaccagtgtgtatcatgcataggaagaatactgtttcatgaaattttttttcacttaaacatacagttgtatatactgggttatgataaaaatatatatatatttcttgctg

SEQ ID NO: 131602 - DNA, 1110 bp, Homo sapiens
tagaatatcacccactgtatctcacagtatcatcttgaacatcagttgagatgatgaacatgaaagtgctgatgccgggcgcagtggctcatgcctataatcccagcactttgggaggctgaggccggtggatcacctgagttgggagttcgaggctagcctgaccaacatggagaaatcccgtctgtactaaaaatacaaaaaaatcagccggatgtggtggtgcatgcctgtaatcgcagctactcgggaggctgaggcaggagaatcgcttgaacccaggaggcggaggttgtggtgagccgagatcgtgccattgcattccagcctgggcaacaagagtgaaactccgtctcaaaaaaaaaaagaaagaaagaaagtactttctgtaagcactgtgcacatgataagaattattgtctggcatagtttttgttattgttgagcaaataagcttcaggtgcttttagaatcttaactcagtattttaaaggtgacacatttattaccatactattaatagtactgtaatgtttctttttaggtgtagagttaggagacaatcttgaaaaattaggtaagaaggaaattatgatggaaaatttcaaacatatataaagtaggcccagtagaatgttctgcgtactcatccccaccttcaacattgggcaactcatagccaattttgtttcatttctacactctcacctcccctttcttatgttatcgtaaagccaacatgtatttattttcttcttcttgtttttttaacctttttggatatgtagaaatacttttaatattcttttaaaaatctaattataagtactaaaaaagataggttggtagttgagactaaaggactgttatgtgaatgagttattctctgacaggaactagcaggtaaacaggatattttatttctcaagattttcatatgatggtgaccaactgcattgcaaaagaatggtcacattccagggttgtaactagttctggaggcttagttacgcaattgccggctctgtcatcttctacagggatgtgaccttacggaaaagtaaggaatctgaagcgtggcagatcactttgaagcttgcccagtttttg

SEQ ID NO: 131603 - DNA, 2608 bp, Homo sapiens
actccagcctgagcaacagagtgagactccatctcaattaaaaaaaaaaaaaaggaaacctaaaagcttttcccaagagtttatatattcctgcatttttttcttcttgatttccattatcatatctatttgcccttgagcatatatttcttaatatgttttcttcctaactacaaaagttatatatgcttgtggcaaaaatattatataggatatttgaaagtgaaaagataactcctctgaccccaatcccagtttgtagcatatgtgtcatttttctgtgcataagcaagaatatgcatagccatgcatacacccacacctgtgtacacgagaggttatatatagatgtatatatagatacatggagttatattttatacacatatacaattctatgtcatttgtttttacttcaaagtatattggaaatctttccatgtcagtgaatacaaagaattgtgtttaaatatacctttttatttcctcaaattgtttcatgtcaaattgttttattcatacacatcttatcttcctttggaaaagaaaatggaaagtcctcaagagcaggaatggttacatactcattctcttttccattccattattctctactcttggtgcatttattgcatatttcactatttttgctgtgggaaataaaagatgcttgccttctaatccctaaggagttatgacctagtaggtaagagtccacattttacatataatgttaacgcaggaagaaattgagaggcaacacagatttctattcctggaaatatggcagttaggttatttgaacaatcttcttgctgaaaaataattgaaactgttgagtatgtataagaaaacatcctcagagcagcaaagggctgaaaagagaaggaattaaaggctaaagtctgaaggcaagtgaaaattcagaaagaagtggagaactgaaactttttgcgcttaacgtagaattcagcacaatgatttggaggtggtgaggtcagggagtttctagggtgctcagaagtttctagttatagacctggtggtagctgtacgggataattattttctaaatttaaagtatgtattttgtgcacttttctatgtacatgttataatttacaacaaaggattaaatgtaaaaggacgagttgcaaaactatatatatatatatcatatgatcccatacatgtgtatttcatgtaaatgagtatgtgtgtgtgtgttatgtaaataggggtcttaatatatacattttacataataagtatataaatttatgtgtatatataaatgtgtttatgttgggaatggaaatgtttgcatatgtgtgtttcatatacttagaaaaagacctggaggtactcactaaactactgactgaggccatctctgagagacaggaagggcatggggaaggaacgagaaaggaacttagactttttgctttataccactcaaattaaatttttaaacaattgtcatcatttaatgtgttttaaaatcagatttctaaaaagatttgactaacatctctgcccactgatagaaaagtactccctctaccatgctctataccacttggtacactatctttcttttctttctttcttttttttttttctgatcttgctcctttgctagactcttaaaaggaacaagacctgtcacgtttatttttcttgtacctactaaatactggtacatagtagagggtctataaatactagtgaaaactgaatgagtaaatgtaccttaagtagaacaaagggctgtaggcactcagtagttatacatttcctctgaggctcttgttacattttttaatattcttctgtacctggcacagcagtgaacataaagttggcacagtaaatacaggttgatttgaatttaaacaacactttgtggaactgtaggcaaatgtggagtccaccatgtggtgcccctcttgatcccaggcagcagggacatgaaattaccccctgaaaagtaaactgagaagtgaacacctaatagattaaggtcaagagaggcaacataatcttaagagacataaagactctttggggagtaaggtttttactataacctaatcgagggcattgacatcttaaacacactcacacagtctccatcagaatagcagtttttctgtctctaaaacagagaaaaagtaaagctattaatgtcactgttacggttcctaacaaagcactgtcagatcaacaacacctgccagattgaggcaagcattcagtccacctggcagatgtctaacccctgtggcactggaatcctacataattaactccacttgctgtgcttccacacacaccaagcttccctctggaaactgccttttcaaggagataattcactatcaggctgatagagtaattcagttatgccctattctgttgttcactgtgaattaataaagtcacattctttttttctcagtacatcagtgtcttgtgagttttgttagcataaatctgcattcctgagtccagtcagtgagaccgggtatcagagtctgcaaggcttatcagggtaaatactaccttgtggccatctgttggcacagactgctggattccccag

SEQ ID NO: 131604 - DNA, 1211 bp, Homo sapiens
cctaataatgtgcacattccagttagagagtactaagctatgttaccccatgacagttgacctcttctgggtgaatattatctgattgattttgcaaattccacacctgtatggatgaagagaatatatattgtagatgctagatcatgaggactcccaacacctcatttctagtcctggcttcacagcctcttctggtcctcatctcactatcagcattgatcctggcatcatattcaagtcccctcctaacccgggtctctcttgagacagtgagaactaaagaagatggaagacacaatgatttcaacaagattaaggataaggatgcaagtagagcaggcagggaacgaggttatagaaactttttattccatttccatctgtctctctttcctcacaacagtcccaatagcatttcaaagggtttcaagttccatgtaagttatagaaaaaaataaagcacaagttctctgtgacatgttcagcttatctatgaatataacggaactgaaaccatatttcaataaattattaacagcaatcccttgccaagaaggatatcagcacagataacagggcaaatccattataactcttaagcaaatcctggaattttaaaaaaattgaatagtgtatcaaataagtgcactgttagctgggacttcattaaacagcattttttttcctttctttcctgttcctccccctttcccaccagcttccagccagaataattgataactaaatctcaccatgaatttgttgggaatttacccacaatagttctcaatttattttaagatttaaaataatatatttttaaatagtagattaagactttacagaaatttcagataggataatacagaaccttgaaaagacttattttttacaaacttccttaaaaattcttaattgttctaacagtcacagttttgtttatgtatacaattggagttctgcagtaagacactgtggggttattagtacatatatcaaattcatgaggctcctattcctgtatattgttacagagctgttcttgtatattgatgtttaatgatatggggccgaattgttattcaaataattacagcccattcctgattatttagatgctgattaactagtcaatgacttattccctttgacaaaatttcccaccctctggctttcctttgatgttaatgaggaagaggatccagttt

SEQ ID NO: 131605 - DNA, 1894 bp, Homo sapiens
atttgagaagaaactcacagtatttgatataccttagtggatttgaaacaacatcttatgttacaaaaaaatagcattttaaaaattgggtggggcactgtggatcactcctgtaatcccaacacttggggaggccagggtgggcagatcacttgaggccaggatttcgagactagcctggccaacatgataaagccccatctctattaaaactacaaaaattagctgggcatggtggtgcacgcctgtagtaccagccactcgggtggttgagacatgagaattgctttaacccgggaggcagaggttgcagtgaaccaagatcatgccactgcactctagcctgggcgacagagcaagactctgtctcaaaaaaaaaaaaaaaaaaaaattcaaaccaggcactattaaatgttatgtgctgatacaaaaaattacaaatttaaaaagaaaaatcataccacttccttcaataaataattaattagaggctgaacataacatttgtaaaaatatacccagaatttgcaaaactacctggatttttcagaacttacatacattttaccaaagtgcatgagatagtatcaagattcctgctaatagaaaagtatataacctgtgctgtaaataaagataaaagagtagagtgagtcagagaaagatggtcacctgagaagtaagtaagtgtgtcgcccactctgatccctgccccttcttgctcattgctgaggccactgtcagcctttgttttctctttcctactgttgagggtcagggtctaaacagagattcactggactgaactgaaaagacaactagattatagaacagaattctcctgaagttgggcagcattagggcaagctgaagtgtgcagtttttctttttctttttttttttttgagacggagtcttgctctgtctcccaggctggagtgcagtggcagatcttggctcacttcaacctcctcctcccgggttcaagccattcttctgcctcagcctcccgagtagctgggactacaggcacaagcctccacccctggctaatttttgtgtttttagtagagatggggtttcaccatattggccaggctggtcttgaactcctgacctcgtgatcagcccgccttggcctcccaaagtgttgggattccaggcttgagccaccacgcctggcttacagctttcagaattacattactgtcttcagacactgacatactttataatgaagccaatctttcacatactggcagcacagggaccttgtataaatggctgagtaaacagaggtaacttttctccttctattctgcctttctgaattctttttctgcatcacctgttcttcaatcttcctgcagccctttaactcttcttatttttgtccctttgggcaattttaccataaggcttgatagcattaagtaaatccctgcatgtgtgtctgtgtcttgtgtgtaatggttattttttttttgttagtttgtaatgcacttagcatattcctgtctaatcaagtaaacaccaacagtaatatttcttaaatttgtagaattattggtttttgacagcctgaaaatcatcctcaaaaaaaaggtatataaacacaaaatgttaggaacaactgcatggtattcatgcacccctggtatctatttatggatcccagctgggttcagatccctttcccattttgtagtttcaaaattagcagcttccatggtcactggtggtacaggttgagtatcccttatccaaaatacctgggaccagaagtgttttggatttcagacttttttgaattttggaatattggcactattcttacgggttgaatatccctaatctgaaaatctgaagtccaaaatgctccaatgagcatttc

SEQ ID NO: 131606 - DNA, 2441 bp, Homo sapiens
ttactttgtatccaattacctaatagtcccgcatgctaaaaataatggagcatccgtcaccttaggcattagaggggaaaagcctcaaattttacagcttgctgaggcatcttttcttcaaagagcaacaggaagatcatctttgtcactgaaagactcacaacatatcccacttctgtataaatcccccaaaaagcaaaatttataaagacattctggagccacataagtaattagtcagaataaagaactcaagaaagggaagatattgtaagagttttttttttaagtagcatagaattaattgtgactagcagttgttaacagagtggtgtgccataaagctaatgataaatgattcctcaaaaaagaataatgtaacagactaatagcagggatctacaattatagaatgtttctcaacaattaggcaggaggaagacaaaagagtccaaggagagtaaaaaatggctgttttataattagcattgattaaaaaaatacaggataaagaaagttcaaagttgagcagtagcagagtaaaaataggatgaataatttcctaagttactcattctgttcattaaagagaggaggggaaaaaacttaatcaatatggctaaggggagagggaacttcttaacctatatggctaagggagggggaaagaaaccattctggaagcataaaaaaacaaaatgtagctttaaattaaaaccaaacatttattaccatgcagtgactaccctatgttgttaaaagacaaggattcgaattggcttttaaaaaaaattcagccactatatgatccaaaggtacatctttaaaaatatcataatggagaggttgaaaacacataccagacaacaaactaaaaaatttggggtgctactgttgaattagaggcaaaagtattatactgtgcaactttattattttttgctgttaaaaattcagtaaacactgtcaaagcaatcctcataaaactttcgtcctatcagaagacatttagaagtacaaggattggaagaaacacaactgctgctgcaatttggacttttttttcagagtaaatgaacattcgcacacaaaaaaagatatagaggagcgactgctcaaagcttaaactaataactacacactgtactttgtatgctacagaaagtaatttacaagatcaattaaatatttataagatttatactggccacaaagtgaattttaagggattttaaacattgaaattggccaagctctgtggctcacacctgtaatcccaacacttcaggaggccaaggcagcagatcacctgaggtcaggagttcaagaccagcccgaccaacatggtaaaaccctatctctactaaaaatacaaaaaattagcccggcgtggtggtggacacctgtaagcccagctactggggaggatgaggcaggagaatcacttgaacctgggaggcagaggttgcagtgagcagatattgcaccactgcactccagcctgggcgacagagtgagactctgtctcaataaataaataaataaaggtaagcattgaaattggacttgccacattctctcaccataatgctgacaaatacacatttacatcaaatattaactgaaataataatttgaaatttaaaaaagaaacttatctataacacaagtcaaaggctacgtcaaaactatagttaaaaatgattcacaagttaatggcaagaacatacataacttaccaaaatgtgtaggtgggaagagggtttatcaaaattagaggaaaattgttgccttattaagctcgatagcataaacataagtgagttacacagcaatgcaaggaaaaatctaaaaaaaatactaaggatagaaaaatgaaagaataatgacaatagcagcaattaatgaattagaaaagcagaaaaacaataaaatgatcaatctaagagctggattactgaaaattgaaacaaaattaagatcaaaagaaaatatgaaggccagctctgtggctcacgcatgtaatcccagcactttgggaggcccaggcagtggatcaccagaggtcaggaatcagcctggccaacatggtgaaacctcgtctctactaaaaatacaacaactaactaggtgtggtgaggcacctgtaatcccagctactcgggaggctgaggcaggagaatggcttgaacccaggaggcagaggttgcagtgagccgagattgcgccactgcactccagcctgggcaacagagcaagactccatctcaaagaaaatatgaaattaggaataaaaagaggtatataaccatagacgtgttgggaatttttaaaaaacatatttgaaaagtaatatttttaactctgtgacaattcagttttaactctgtgacaattcaatctgcaaaatgaatcttttcttttttctttttctttttttt

SEQ ID NO: 131607 - DNA, 1116 bp, Homo sapiens
aaacctgacattgacttttccaagtttccagcatatattcctgggcagaagatctcaataatagcaaaaatagcaaccacttattggatgcccgttatgtcttagacaatggaatagttattttcataattagctgacttcatctttaccaccttctgcaagctatcttcattaactccactttttaaataaagaagcaggcttttaaagcaaagttaaatcatttgctcaaggtcttacaggagctaaatgtcagagctgggatttgaacctagacctgtaatctaacatcttttttccctacagtatactgcattatactgccaccataagacctggacctcagaaggggaagcaggcttagggttagactttttaacatgctggatctaagagatttacacaatatcactttggtgataaaccattgaaatatggtctggagtctgaggaaagaatcagctgaaaatatacttacagatgtcatctggagatggttgaatccttgtaatcctagctgagattgcccaggagagtatagtcagcaaaaagaggatagcaccaattctgggaacacgaacttttaagagactagtaaagagaagctaatgtatgagactggaaagggatgacagaaagaagagaagcaaatgtgtaaaataacacacccctaccggccgggcacagtggctcacgcctataatcccagcactttgagaggccaaggggggcagatcacaaggtaaggagattgagaccaacctggctaacacggtgaaaccctgtctctactaaaaatacaaaaattagctggatgtggtggtgggtgcctgtagtcccagctactcgggaggcgagacaggagaatggcgtgaacccaggaggcggagctcgcagtgagctgagatcccgccactgcactccagcctgggcgacagagcgagactctgtctcaaaaaaaagagaaaaaccctgtttcatcagtattaagatttatattttcttgcatttgactatctcaaaaattggcatgtgtcttattatcaatgaggtcttgtaattggcagtacacaaattagtagtacataaatgggacatcttataactgaaggaata

SEQ ID NO: 131608 - DNA, 3320 bp, Homo sapiens
tctctatttcttaagattgttgtaaggattaaatgatatagtacatgtaaagtacttagcactgtgcctggcaaatggtaagctctcagtcaatgataggcattctcatgatttccgattggaaagaaattggtgcccttcccatcctaccccagggtactgccatttctctttaagtaaagctagattatatctgaaataggcaaatatggaagtttatatacacttaagggagctacctgttcccttctcttgaaggatattaaactgtggtatttgctagagaatttgaattagcaggtgtatgtagattctgagccttttttgtgctcagctcaaagccttgaccatgctgaatacataacaaagtactgattgataatgtttaacccctaggggcaggctttcttttcgccctgagcaaaaaagatgcaatctttgtggatgggtgtttggggaattcctgcaatataccttagatgcagagtttcgggtggagttttgtttttatgtttgtttgttttgttttgttttgactttccattttccactttaactgtgatccattccaggggattttgtagtttctcagatgttatactggatgaaaagtagtaactgcataaacattagtttgagaatacagataatgttataaatcttcatcttggtttgtattgtaaaggcagcatctcatgtgacttatctttatatggaattgctaaattagtattgtgcctttcctccagaaagcttaaaatgaagtcgtataggcagcctgatttaaaagataattactattccatttcctaaatgttctaccatgcaagaagaatttggaggaaaaagaaaaagtttattcctttggggaaaattaattttactttgtcttggtaaaatgctaccacatatgcagttaaatgacaattccccctccaaaaaaaattttttggcagtcatagtcatcatgacttctcctataagattatcctagtgttcaggatgcttctcaaaaggcctagaagataacaaatatttgtctaagtgtgtttctaagggctgtaactaagcatctctcttaattcagcaaactacctttttttattcagtcaaaatttaccttttaaattaggcttgtaatttgattttcattggtatcaaagaattctcttttgactccaatattacatttaataattcaaactctaatatctctattgaaacactctgtgtttcagtcgtgtttgaagatgtctaaaaacaaaagtcttttgcatttttcatattctatttaatggctggatgcatgtcagtgcataggatttgagtcattagtgtgccacaaaacattttaccaagaaatggtgcgtcatcaaatagttgaattacaatggtagctgtaaacgggacccaatttacaaaagtaaatagtgtccccttttacaagaaagaaaattaaccatgctcattcagattctgaagtttaattagctttaacttgctaaaagaaagaaattgaacaagtaaatagcatgtacttcaccatatatagcaaatcctgaatcactgccattttttatataactgacccacatgggttctttgctttttcttttatctgtttacctcagattttttttttttaataaaggactataatttgattggcttgtaaattcttcccatttctaacatgctataagactttaagcctaatttcctttgagccttaatcctcttgctaattgatgtgactgagttgtctggaatcaacctccttggtgcaaatgactgagactgtgacgttctatggaagcagtttggtccgggaatgaatcctttcattcagcaaacaaatgccatgccagctgagtcctgaaagagctcatgggcacgtaaaggaatatagttgttttacaacatgtcccccaaaattatttgacactcttctcattagcaagtgggactctgccccttccacttggatctgagctctgtaactgcctgccaatagaatatggcagaaatgacgcattgtatcagtttctgggcccagaccttaagaacctagcagcgtccacttcctgtctccttgtatgctcactcttggaacccagctaccatgctgtgatgaagcctaaagacccaagcagagaggaaccaacttgtcagctgtatgaatgagccatcttggaggtggattctccagttccaggagagctgccccagttaatgctacatgaaacagagacaagtcatcagtcatccatccccactgtgccctttccaagtttgtgagcaaaataaatgactgttgagttaagccatagagtttaggaatgatttgttgctggaacaaggaggtagacacataaacaattttgaagcaatgtagattacaatgacagtgatatttactacgtatcacaggaacactgagtcgagacacctaatccttccttcatcatcaaggaagactccctcaatgaatgagatggcaactgaactgaatctcaggttaaccaggttggagaataaagggtggcgtgttctaggcagaggggacaacagtgtgatcacaagcagagaggaaggaaacaacatggtgtgcagaaggaattatgagcacttaggtgttgctggagcttaaagctggaataggaagtactaattatgtagccagagataattggcaaaggttgaatcatgaaggcccgtgtttgccaggtgaagacatattgtgtacacacagcttgttattttcattattgttgtattgcattttggattgaagctgtctgatcaggtttgtgttttagacaaatccttctatcagcagtggggaaggtggatttcagggtatgaattctgaagcatgaagaccagtcagatggccgttgcagcagttcaggcaaggacaatgaggcctaaattaagactgcgagggtgaggatggggaagagaaactagagtcaagaaataggtggttttaaaaagaagtatttagagggtaaaaagaatactaactggccggatgtggtggctcacgcctgtaatcccagcactttgggaggctgaggcaggtggatcacaaggtcaagagatcaagaccatcctggccaacatggtgaaatccctgtctctactaaaaatacaaaaattagctgggcatggtggcgtgcacctgtagtcccagctactcaggaggctgaggcaagagaatcacttgaacctgggaggcggaggttgcagtgagctgagattgcaccactgcactccagcttggggacagagtgagactccgtctcaaaaaaaaaaaa

SEQ ID NO: 131609 - DNA, 2308 bp, Homo sapiens
ctggcatccatgtagcgatgtcagtgaggcagttggaaatacatgtcaaaaattaaaggagatttaagctgtaagaaaagatttggcagccattgtcacaaaattgctagctgaaattatgcatagacaagctcacccaggggaagaatgttcagttaaaaaagaagaggactgttgggtgcggtggctcacgcctgtaatcccagcactttgggaggccgaggcgggtggatcatgaggtcaggagatcgggaccatcctggctaacatggtgaaaccctgtctctattaaaaatacaaaaaatcagctgggcgtggtggcacatgcctgtagtcccagctactaggggaggctgaggcaggcgaattgcttgaacctgggaagtggttgcagtgagtcgagattgtgccactgcactccagcctgggcgacaaagcaagactctgtgtcaaaaaaaaaaaaaaaaaaaaaaaaaaaaaaaaaaaaagagggctgaaggtgaaactctgggagcaccctgacatgtagaagttagttaaaggagtccgggcctgtaatcgcagcgctttgggaaacctaagcgggcagatcacttgaggtcaggagttcgaggccaggctggccaacatggtgaagccccatctctactaaaaatacaaaaattagtcaggcgtggtggcacgtgcctgtaatcccagctatttgggaggctgaggcaggagaatcacttgaacccagaaggcagaggttgcagtgagctgagattgtgtcactgcactccaacctaggcgacagagcaaggctccatctcaaaaaagaaaaaaaaaaaaagacatttaaaggaaaatgtgcccacaaaagagatgggaaaagaatgatccaagaagttccaggagaaccaagaaggaggagtcatctcagaaaccaaagtcagagagttgaaaaagggggtaatctcctgtgtcaaatgtaaacagtcagtccagtaagataaggattgaggaagggtcattggtaacttttgccaagctggacaaaaccaaatttctctttttttttttttttttttttttttttctgagacggagtctcgctctgtcgcccaggctggagtgcagtggcgcgatctcagctcactgcaagctccgcctcccgggttcacgccattctcctgcctcagcctcccgagtagctgggactacaggcgctcaccaccatgcctgtcgaatttttttgtatttttagtagaaacggggtttcattgtgttagccaggatggtctcgatctcctgacttcattatccgccctcttcggcctcccaaagtcctgggattacaggcgtgagccaccgtgcccggccagacaaaaccaaatgtcaatggataagtgcatggaaagtaagaaaatagacaccaatggtacagccaaggcaatgaagagtagctagagaagaacacaggagcatgagagggtggtggtggtggttttggagagatggaaaatacgtaaatacttttatgacccaaatagctcatgccattaaagggaggagattgaagagagaagaaaaagaagatgtgattcatgtagtagcatctattcagagatagaagggcagagagtcaagggcagtcttttgggatacagtaagtgtgggtatagatgtaaatagttttataagagtagggcaggagattgaagattaaagctgatggacttaatttttttctgtgaaacaggagataagtttgttcactgagggaatgagtatagcagggattgatagctgtgttaaagacagtggtgagtcttagagtagtcttttaagaaaatggaaacaagggctagctcacaagaggcaagaaggattgataggtgacccagaggtccagttgactttggagattatggtcttatactagtaatctgcacagtttagggcttttattcaagggaatgccccacccctatcccattcacccccgctccccccaccccactttcctggctcccctgagtgagggagaatgggcaagcctccataggaaagcagcctcagcctggacaaaagcaaagttttgtttaagacaacagatggagcattctgtgtgcaactggaggatggcttgttttgttttttataatggcatgagggttctagaaagtaaaataataggaaagattagaagggactcaagaatgagaaaagccacagataagaaaacacagaggagtaagaggatgagggtaatggagagaggtgggggggttatgggagtggcaatgtgatttgcttcttatttagt

SEQ ID NO: 131610 - DNA, 1076 bp, Homo sapiens
tcactggaacccaggaggtggaggttgcagtgaattgagattgcaccgctgcactccagcctgggtgacagggtgagactctgtctcaaaataaaataaaataaaataaaataaaatataaaataaattgtataggccgggtgcgatggctcacacctgtaatcccagcactttgggaggctgaggcaggtggatcgcaaggtcaggagattgagaccatcctggctaacatggtgaaaccccgtctctactaaaaatacaaaaaattagccgggcgtggtggcaggtgcctatagtcccagctacttgggagactgaggcaggaaatggcatggacctgggaggcagagcttgcagtgagcagagatcgcgccactgcattccagcctgggagacagagtgagactccctctcaaaaaataaataaataaatagtatacaattttgtgaaagtatatgagtcaaactttcctttagtttgccattcattcattcatccatttattagtattcatccatttattgttcattcattcatgcaccaaaaattgttctagacactagggtagcaagaataaataagacagtcagagcttactatgtgccaggcactttgaaatttggagctcaatgcttttagctccacaatctggtgtcatggtgtaagcattacactggaagtctagtttttttttctaaaaactcactggtaggctgtgtggctttaggtgagacccattctgtgttagtttcctcctctctgcagtggtattgctcactctgtttacttcgtagctttgatgtcagaatcaaatgaaatggtggttttgaaagagctttggaagtcccaggtgttatataaagcaagtagtattcttgtaaatgtggcagtggttttgaccatttcagtgcctccgcgaaaaaaggttgaagatgagtatctttatattgttctcttgaactagatctatatgtttatgctggtcagtcttaccatttcctccacttcctgtgcaggcgacagggacctcataatgaggtagctgggggaatgataactatagtgaatgaaactc

SEQ ID NO: 131611 - DNA, 1057 bp, Homo sapiens
agagatggggtgtttcaccatgttggccaggctggtctcaaactcctgacctcaggtgatcagggtgggctgttcttgaagctacttcagaaccgtgtaagagctgaaagacccagagaaaattatcacagggtaggagagaaaagtaggacaattcgccagactcattttctgggagttttcttataccatcttgcagcctcattaactcttccaactctttataaaataataatactgaaaaatggccttatatcttctagtaccttgacacatgcaaatatctcatttaatcttcacaacaaccctgggaatgtggcttttgttttgtttttattgttagtactatacaaatgagaaatctcaaaccaggagcaggctgaaactagggtgagagtcctcacctcaggcacaaaacttaaggggatgccaaaaactcagtaatcaagtaatattttatgtagtatcttaaaaattaaagtttatatacagttcaacagggccaggattaaggagaggcaagtgaagtgaattatgccagctgcaaggttggatcctggctttatttaatttttttttggtagttcatgaattttttgcattaactttgttattattattatcattacttttttttttttttctttttgaaacggagtttcactcttgttgcccaggctggagtacaacggcaagatcttggctcactgcaacctccacctcccaggttcaagcgattttcctacctcagcctcccaagtagctgggattacaggcatgcaccactgtgcccggctgattttatattttttgaagagacaggagttctccgtgttggtcaggctggtctcgaactcctgacctcaggtgatccacccatgtcggcctccaaaagtgctgggattacaagcatgagccactgcacctagtcttttgcattaactttggtttttaaattattgcgttaaaatgctgctatctttattcagttttttgttttttgtaccctcttaaattttgcctctcaggcaggtggccgccttactttaccctagtc

SEQ ID NO: 131612 - DNA, 1056 bp, Homo sapiens
ttgccttacttagaacaaaatcctgtgacccgaataaagaacacatgaatatagctaaccctgtgtgagcttgcggggcaggtcaaattttttctttttttttttttttttgagatggagttttgctcttgttgcccaggctggagtgcaatgcgcgatctccgctcaccgcaacctccgcctcccaggttcaagagattctcctgcctcggcctcccgagtagttgggattacaggcatgtgccaccacgcccggctaattttgtgtttttagtagagatggggtttctccatgttggtcaggctgaggtctattttttaaaccccatcaaactgtagaatgaaatagtggttagaaaagcaactatgaattcagtggcatgtcttataaagtcagaattcctacagactttactctttagtgaagtttcttgaataatgaaaatagttcataacaagaacaaacacaattaacactgtctgtattcaccttctggtgggggaagtgcatcagactatatgaaggcataaatcacctttttctgttaggattttgttttatacaatgtattatcaatttgtcctgctatatagttggagagaatagaatgctgtctccaactgatcattttccttatagttgaccttactcctgaataaggttcaggctttcatgagaatttcagatccagtatacctgttggggatgaatagcaaaagaaagtactaggagtttgggattagaaatagaagataaaagagcaataatagacttgtgtttccttgcaattcaggcttagtaaaggaagtcggaggcaaggaaacttagaccttcaaattgtactccagtgtctgttaaagaggaagaaggagagatgttcagaatcactatgtccttgggaatatcacaggacaaaaactttatttataaataaaggtaatctgaacatttggtttgagcatcaggcacagaagcagaaaagcataacttttcttttttctttctttttttttttttttttttgagacagagtcttgctctgtctcccaggcagt

SEQ ID NO: 131613 - DNA, 1050 bp, Homo sapiens
tctcaaaaaatagtaatcggtactttatctaataggtcatgttgaattatagaagacttctgagtgagagatggcctcatcaaactcatttttcaaaaagtttaatctggtggaattaggaaggaaagagaaagcagagagagtacttatccatgcgtaaaaacaagtattttttggctgggtgtggtggctcacaactataatcccagcactttgggaagctgaggtgggaggatccctggaggccaggagtttgagaccagcctgggcagcacagtgaaaccctcatctctatttaaaaaaaaaaaaaaaaattaactgggcatgatggtgccacctgtagtttcagctactccagaggctgaggtggaaggattttttgagcctgggaggtcgaggctgcggtgaaccatgatcacaccactgcactccagcctgggcaacaaagcaagatgctgtctcaaggaagaaaaaaaaaaagtattttttgagaaggtcaacatttggttagtgaaattagaaaggaaaggaaagttgtgacgtatgtggcaaaggaaattgacattgtcactggcacttctgttggtcgtttgaaggagaaagaagttaaaaaaaagagaaaaggatcccaaggttttatcatgggctgcctagagaatgatcactccattaacaacaacaacaacaagcaaaaagaactatttggagaataaaggaaaagatggtatatttcattttaaacatttctttgaagcagtggtgtgatgagtaattaaaatattccttaggttgttggggatgcagacctggaatcagagagaaaaatcagggctaaaaatgaaatatttagaaattgcatatccaaatttaatgttaatgtttcagcagaaacaaaagagagagctgagatgcacatacacccattgcctagaaagagaaagagatgccctgggaggaatggcctgagatggaggaggtgtaagatcccatagcagtgcatgagccaagagaggaagtaattttaggaagagtggtatggccagcagtgcc

SEQ ID NO: 131614 - DNA, 1282 bp, Homo sapiens
cagttactgcttcataaatggttgctgttacttttattctcattcagagacaaagtataatactgaaaaggccagtgacttccttgttgaaagtcaggaccaggtaaattcaactgttgaggtgttacagcctattaaagacgccagtgagacattttggtattgagtcaaccagatactgataccatcccttgttcactgacaaatatgggaaggtaatttcagtaggtcagccatcagtgtgtgccttccaaaacattatagtcatgttacagtaaactttttatatttgttgcatcacaaagatttattgaagtgataaaagttattatggaaaacagtgtgcggtaactatggtaacagttatttgatctcacagtaattagctaagcatttagttgcacaatactttcacaatgccttcctggttagttcattaaacaaaattagcttttgtttgaactgccttcctacagcgtcctaaatttgattttagttcaaaggaattggaaaatgtattttaaaactacctttccaacttacagtttatggacatatttgaggttgcaactggcttttatttaattctttatttatactacactatgataacgattcactggattatcatctgaatttctcttggaaatgacctaagaaatgaacagtaaagttggagaccagtgccttaattatggccctgttcctcactcatattgcagattggggtcaacaggtgtccttcttaagactttgtttttatacctgtgagtttggggtgctgtataaatgttagagtcccaggatcacacaagtggagtcatttcttgatcatctgcatacctcctgctgggacctggagctagcaggtgcccaggctttttctaaagcctccctcctccaggtgcctcctctgccctgctcagcatagcttgtgctgtgtttagcacctctttttgcaaggtggaatgtgctgcagatgattcacctaaatgatgatgtcatcctcagaggacttcagagctcttgagacaagggcctctcagactgtttctactctgcacccactctccactcactcccagcagacagggaagcttaacccgtactgcttggcagattggagatcccaagcacaaaagaaagcttcaagcattcaagattttgaaactgaaaaatacagaaaatgaaacaaaaaaaaactttttaacttatttactaaacatgaaggggttccaaagtaaattagtgaaacaggattttttaaaatccaatcaatgtt

SEQ ID NO: 131615 - DNA, 2290 bp, Homo sapiens
ggttgcagtgagccaagatcgcgccattgcactccagcctgggcttcagagggagactcagtctcaaaaaaaaaaaaaaaaagaacctatttgttcttgagtagtcttgcaatttttcaggacaatctgaagatgataataataataataataataataataataataataaatagaataatatcctaggtggcttcagcacctgacttctttttcccccatcttccctatccctgcttttatctggtatgatagtcatgtgtcagctgatatcaaggcccctaaaactcttcacaccccccttccatatccttttcctgtccataggagaatgtctttctctcactccatttggaaaacatttgatgtcctttgatgcaactctcatttcagcttctgtgaaactttctgaatttccctcacacttcatcccgtcttctagccctctcatgtcatttgtacctaattcttagccacacatcattattcattataatttgtggttaaaaactatcttgccgagtgggctatgaactccactagagaagtgccactctttattcttccctgtaccctcccatggtatccagcaggtaagaacgtgccctgtggatagccaaccaaaccactgagttctcttcctcttactgccctctaacttcctgaattctactcatttgtatttcctcgttggctgcccagcccagccacactggataatcaccctcccaactctcccaattttgattccttttctctagacctaatgttttatgtaggggcctctagccacttcagggaaagaggaaacgaagtactatttattgagtcacctaatgtgttttcgatgccgtatgaggtgttttgctgatttccacaatcctatgaataaatactaatatccagatttttttttgtcatgagaggctaaggttcagaatgattaagtgacataatgagctagtaattgtaagagctggaattcaaacccagaacgctccgcctgcaaaacccaagtgtcttcactttttccagtccaataactctgttatgtctttagcccgacctaaattccagccttagccaatgtcttagagtagtcactggcaccctatattcctttgatctcatggccttctgtgccatcagtcagccagaggtctgccccccgcactgggtcttctgtcctgctgtagtgctcaagatgtctgccaaagaaattcagagattcttccagaagtggctttttacaaagacaggatactcaattacatttagacaaagaatgcccagtccaccactcacatagcaccccagcccctgtactgcccagggccagcattgacaatcatgagtacattctcaatatagccttccaggaagcccttagccaatcaaacagaatggaaaccatagattaaatctgtttcccactctgatttgcttccaacttgctgttgctgtgtagttttcctgcccttctttgttggtcttaccatgcattcttcccaccctaaaacccctcttccttactccagactaactggaggactgattgtattttactttgcttactgataccttttgctttgctttttctcacactaatttttctacttggcctaccttcctcctatcactgattgtagaataattaataatggaatagcctcatttgagtataaacttcataaaggcagacgcatatggttattatatctgattgtatatacagtccctcatagagtgtctgacttatggtagaacctccatgaacctttgaataaagaaggaaggagaaagggaaggaatggtggatttggcacaggtattatactatatacagatgtatttttgtttgtttcatcctaataacccaatgaagttagtgttattcctgttacagacaagcaaatggaatctcatagaggtcactctgctagtaagtggaagagcttcctgtttttcactgacctgccaaatgccatctcttctggaaagccttttattattcccccaccttgaccactgcattgcacaactgtgggggacaccattcacatagatgacagtgtgaatggctccccctggagttgtgtggttggtggccttggtaataacttgttcactggtgttctgatggcgcatgagatctttcttacagcagtgttcatactctgccttgtatcctgtactcaagtcctatttcctctactaggttatgaattccttgaaggaaggaaaagtgctttcttcatctttgtgtcctctgccagtaacacacaaaggg

SEQ ID NO: 131616 - DNA, 2277 bp, Homo sapiens
tcaaggccatgatattcattaggcactagaggcacaatgactaaataatatggtacttttcaggacctaaacaattttagagatctcaaaagaaaatggctttaaaacacaaaaaggcacaggattgaatataagtgtttgcacaaaggtaaaaccaaataatttgtcatcttcttcttcttctttttttttttttcgagatgaagtctcgctttgtcgcccaggctggagtgcagtggcgcgatctcagctcactgcaagctccgcctcccaggttcacgccattctcctgcctcagcctcccgagtagctgggactacaggcacccgccaccacacctggctaatttttggtattttgtattttttagtagcgacggggtttcactgtgttagccaggatggtctcgatctcctgaccttgtgatccacctgcctcggcctcccagagtgctgggattacaggcgtgagccactgcgcccagcctgtcatcttctttaaatgttaaatttagcagtcattactgagaaatcatagaaaactgtaaattaaatgaataaccagctaccaaataatttttttaaaaagatgcaaaaattctttcaaaaatgttttgggcagaaagttatttttaattgggtataaatacaacttttaatatgttagatatggtatcagtgggagagcctccagaaaacgaacatacttgggatccttaaaataaactgtctgggtccaaaatgctgtgcacatagcccgtgaaatatttgctggattttaattgattatagttaaatgatgatggtcttttttgttgtggaaggaaggaagcatgggtattttacattattattttgttttgttttcttttatttataaaaagaaaaaggagttaagggaattttcccagcttaggtggaatgagtgccacattcctgcggagatattgagcaatctttggggcccttgaatggcaccagtaaggcccttcagagcactctgtcctggccctgctcttaggtttgcttgccacgctgtctggttccttcagaatgtaggaagttgggggtggcacagaagccccaagggcagtatgctagtgcagaggaagcgaaggcaagccattgccaggtgctgccagcagagcagagcgtgtgctttcgtgaggcatgagggaactgacctttccacttgcccttcacactcagggtgactcaaagtgctgacctattgttttaggtactgattatacagcgaacatgttgatgatatggtagaggtgtttcctcagcaatgagtgttgaatgtttaaagtcaagtagatttttggtatgcttttgctttggtcaagagggtcttcttttttctttctttttgtcttttggatattgttttggttttcattctgtagtataaattgcagtcccagaagctgaaattcacttccacctgttcaaaaattgctgtagactttagtgcttttactaactatgcataatattgatatgcccttgctgctgaaattttatatctaagattatcttcctattatctagccaggattcaactcaaaccgagaaccaggatgggattggaattaaggcacattcagctggaggttagagccatagtcaaatgtgaaaatataaagcatattaaatattttgtgtttgtataatcattatattagatcagctataaccaccacgaggggaagttttttaaataagtggatttatgttatctgccatctccaaaagtttagagttgccagttaaatacatatatatttttcaaaggaaatcatcaaaaaggacattccactcttattacaaagctatgtcggataaatattttgatagatgtggttccgtgcacctgggagctgagacgtggctgagcctggagcagttagcacagatggagcactgagatatagcaagggttgggttttttcttatatatattgcaaatggttgattgagatagcatgaacattacattttccatgccactcagaaaagtagcttccttatgagaaatgatcttcttatttaagaatgataatgataatgaccatactaagacttttctcacaagtaaatgtataatggggtatgttacaatatgagcgttttgttaaataagagtactaattagaagcaattcagtagactggggtaagtaaggtcaagtctgcttaactttgtgtcggatataatgtaagtgtttggggctaggatatttactggtcctaagtggcaaaatgcgaaagat

SEQ ID NO: 131617 - DNA, 1041 bp, Homo sapiens
gtctagctcgtagcttgcaaactctaactcctgcaggggccagggagggaaggaaatggataaaactggtcccattgaaattggtgagctagagagcaaataccctgtgtagtgttgcatcttccagtttttctagagaaatcggatgtttggattttttaatgtcatcccttaattttttttttttctttgagagggagtctcactctgtaacccaggctggagtgcagtggcatgatcttggctcattgcaacctcccccacccaggtttaagcgattctcctgcctcaacctcccaagtagctgggattacaggcgcatgccactacacccagcaaatttttgtatttttagtagagccggggtttcaccatgttggccaggctcgtctcgaactcctgacctcaagtgatctgcccaccttggcctcccaaaatgctgagattataggtgtgagccactgcacccggcaagatcccttaatttttaaatattagctattgattgaaatttgaaatgcaacgtttagctaaacaaaacctatttgcaggctacatatggttgatgcatcgcatatttacctctgctccacttactccttcgatttaagagttagaacttgtccttttggcttggggcttttgtcttttaattttcaaacggctgtaacctggagaaaggctgtacttcagactgtgtcaatgaagagttggtaatttccactgagttcaattcaggacagttactccccgttgtctgtgtataatatactgtgcttgggcaccagtaataatgctacacagcttatcccttcaaagtatctgttgactgtgcaagagcagtgttccctgacaccagtgacctgtgttatacacaatgccatgtgtaacacagtgtacagccctactgggcagttctggactccacttgaaaatatttttaccgaaattatggatggaaactatgagaatcgttctgatgagggcatctatgctaattgtaggaaggtagtctagcataattgttgaaagagcaagtca

SEQ ID NO: 131618 - DNA, 1604 bp, Homo sapiens
tcagttacaattccagtctcacagaaaagttggttgaggcaacataggtaggtcacaagtccagtgtggtccaggcaactgtgatcaaggagacagagccacatgacacaaatatggttgccatggcacatgtctgaatgcaaagagacagttctcagacaggatgggctatcatgagttagacagacaactcctaccaccaccaaaaacccaaggaagcataaagtaaaaaggataatgtagtagcactatctcagtataaattatttatagatttattgtctttttcctccaccaaattatgtgtaccatgaggtcaggcaccataattatgtttaattctctagtacctagcagtgcccgacaataggcattcagtaaatattcagtaaatattggatgaacagaaactaaggtaagctctgccttcatgggaattatagtctggtcatgaaagcaggcagaaaacaagcaaataaaaagatgtaattgtggtaaatattaagaaagttaaaagggggagaggggtaaaggaagggttaccaaactacagcagaaactttcagaggtaggtgatggtgttaaaacccaaagtagctgtactaactttgcttattcatccgaagagactggaggtggtaatcataaaagattccgtttacattttgttccattcatcattttaacacataaaaaactagtttacattagagcatgggttgctaaaaggttgctgtaaagaactatataaaattttaataaatttaattaatgtttgctgatatcttttcatttttatcttccatttttaaattggtaaactcttagcctggagctcgatgtaattatataacagttctatgagctggtcaatgattaatcaagtgcacaataggagatatacattggccaactctgcaagcagatttggattaagattacaaatcacacaatgggaaagacatgttctccaaaggagaatcaggcaggatcagatgatacaccgggatgtgttttcagtgtgatggaaagattgtttccagtgatcttagtgatggtaaagatagaggagaagacacctaagaaatgtgtttttctggagttatattagtatttttgttgccagtatctaatagtgtttccagaactattctggaagcaagccagatctcgtaaacaataattaacagagctttttacctagctttattcattagagtaactaacaggagtttctatataaacaactccaaaaccctagtggcttattaaactgtagatttttttcctatataaagttcagtgcagataaagggggtgtttgttccataaatttattcagggacccaggctctttccatcttgtggttctgtcctcccgcactcaattcattcaagctggtccatggggaaagaatgagattgggccaggactacaccaggaagtgcacatcacttccactctcatttcattagccaggattgagtcacaagtaccacacctacctacaaggagggctggacaaaggtatagttggggactcaggaagaagagagtattagtgactgttctcagtgtctgccacactagcaatatgtagatt

SEQ ID NO: 131619 - DNA, 1033 bp, Homo sapiens
ttccaggagtgacaaggaggttcccatggaatgagtgagggaaaggaaagtaggagatgagatcagagagctaacaaggggtggatgacacagggcttcccaggccattgaaggactttggcttttacttagaggttaatatggggtgagaattgagagaagaatgataactactgctgattattgagcttatagaagatagctggcactgtgctaagtgcttgacctgtgttatacttcttaatcagatagaacaagaagattagaacaatgatataaagcaaatggcctgtcccgagaaaggaccctgagacagaggggttggggagcgtgcaggggcagtattcaaacccagatctgagtgatttcatgatgtcatactgtcatttaatgaatatagacatgtgtttgccatcacattgctgtagcaagactaatcttagcctccacttgaccactctgcaagaccactgctcaggaactggataggaagttggtgcctgtgcctccaaacaactctgggaatccgggacaaagaatctgagcacacatcatgcaccacacacacattttccccagggcacggagcagggtaacgcagtgtccatgctgcagctccacactccccgcatcttctgtttcgcaagcggagagtcctcactcttgccatatttaaagactcagtgtttctgagtgccttttaagggcagggtagaatcaaaggccaaaataccaaaggttcagtttcctgttactgaccacagtagaccagaaaatgaggcagctttcagagtagctgcctccctctgtgaacctgcagttcagctttgactcaggagagcctgtgggaactgtcagactccttagtctgcaagatgttgttctcaactgaatggacacaccctaagtcaagttgtgtattcgagaccaaactgcagtgcagaacatgaagaacagacagaattctttggaattctgattcatttgcaggaccaaataaggacctacccaatgatcatcttaactcatgctg

SEQ ID NO: 131620 - DNA, 1725 bp, Homo sapiens
ccaggtttgggagctttaaaagtagaattgaggctgggtgcggtggctcacacctgtaatcctagcactttgggaggctgaggcaggcagatcatttgaggtcaagagttcaagaccaacctggccaacatggtgaaaccccatctctactaaaaatacaaaaattagccaggcatggtagcatgggcctgtaatcccagctgcttgggagactgaggcatcaagtctcatcactgattctcatcaagcgatgagaatcgcttgaaccctggaggcagaggttacagtgagctgagatcgtgccacctcatttcagcctgggcaacagagccagactctgaaaaaaaaaaaagagagagaaagaaaggaaagagagaaagaaagaaggaaagaaaggaaggaaggaaggaaggaagaaagaaagaaaaaggaaaggaaagagggagggagggaaggaaggaaggaaagaaagaaggaaggaaagaaagaactgatagaacttggggactatttgaagtaaaagggagtgggaagatcttcagaagtgaaggatgtctttatgttttccagcttcagaggttggataaatggagatattaaattaactggtacagagaataataaaaggtactgttttacttcagactgaaactatatacctggcattaagctaaggaatttaatacattatttgatttagtcatcatgataaccctacggagtaagtagtatcattgccattttactactgtgaaaacctaaactcagaggagcccagtgtcatatagctagctagtcagtgtctccctaggatctgaacatggatttgtatgacaccaaagcctcactttacaccacagcagtaaataagccctcactctggaagaggagaaatggagtagggacaagaggctgaagagaagtcttagttctggaagcgttaaactgtcaggcagagatatcttgaaggcagctggaaaatcagacctgtagctcaggggtgcatgtggggaaataagaaaatgtgggtgttgctggcttatggtgttggagagtgaatgaggttactcatcaaggagtatatggttaaagagaaacagaccctcagtaaatgaaggctagaagggggatgccaacctagtttagaaactcgtatacctgcatactcagtttaggagtttagaaacgctcatatacctatatgcagtgtaattttttctgaccaaagtatagccttgtgctttggtgtataaatttttagtcagctgggtattgagagttccctgttagagcttgagccttgccctcacagagcttatagtctagtggagaggcttagtaaaaaatccattaaacaataacaatcagttgtagtacaggctaaatgttattttagggtgctgttacaggatgctgcataagattggccccaaagccaggcttgagagtcaatagccaggcaattaggattacaggtcatagtattgaataagtttatacttggccagacgcagtggctcatgcctgtaattttagcactttgggaggctgagatgggaggattgcttgagcccaagagctcaagaccagcctgggcaatatagtgagacctcccatctctataaaaaattaaaaaattagccaggtgtcatggcatgtgcctgtaatcccagcttctcgggaggctgaggcgagaggatggcttgagcccaggaggttgaggct

SEQ ID NO: 131621 - DNA, 1968 bp, Homo sapiens
atggtatctttctattgggaaactaatcgtttgtgtaactggcaggatgaaacatcagaaaatacttgacacattttgctagagtcctaaagggcacctaggaagactgactccaaaatgtcaaaataaggaaaatacataactcagactagagtcagacagaagggagttccattcccagcccaccacctgtcagatttggggcaagttatttaaccttttttgctcctcagttttttttaatccctgaaatggggattggaattggaacattataggattgtcatggaaattcaaagaaagaatgagtggagaatgtttgaaagagtacctaccatatgatgagtgcccaatcaattgtagctattgcaattatgtaaaagagaaatgtgtaatagctttttgtttggtgtattcaatatggttttcaaaataaagaccaatatcataaagttttgttgctgtttctcataactacatttaaattcccggttactttaagccccctttttttttgtcttctgcatacctgcaagtacctcatccattcttccgtaatgtttttctcccttagccaataccattccaatgaataaatgctcaagaccaaatgtgaacagaggtttaggctgactttaggactgagtcactgtgatctgtttcagcctcctggagctcttttttcctccatgctcatttaccgaggagtataatgtttgcatcatacctgctgttgaattaccatgtaacgattaatgagatatgtttattaacaagatatgtttatgaaatgccttatgtttgtgatcacttgtaataaaacattaataaagaatatggtttattgatgaatatattagatcgcaagggggaaaacccagtgctaatgatgatctcacttttaatatgttagataattactccaactgaaaccgaattgatttttatcagataaattgggggtcaaagttacaccgcagtaattactgctttcaaactgtgtttgtgtaacctggggaaagattttgctctggggaccatattgaggcatttgcccttgccactagcagagaacttggatctgtgcacacacaactagaagcagaagcatgtatttcctttcttttaccaaagaatagaaaccatgaagaaaaccactctcctcaatactggatgaaattagacaccaaagaattccctttcactcagttctctgcttcatttaaaacctagaatctttgtagaaatctgtaaaaaaaaatgcgtaaattgtatagtttccttttcccataaaatctccaaagaaggaaatcttatttttaccttggactttcaaaaacatagataataaaaacatttcatttgctctaacacagtttatgatgtcactagaagttcttgataaaattgtcagcgtgagtatgccactgaattaataagccatgctttattcgtggtatgttgtgcaatatgtcagcatttcccctttctttcctgtaaattgtaacttttccgatgactagcatttaaagtcttttcctgattaaggaattgtcagctgaaatcatcagggatttccccttaactattttggaagaaatctgaagaatgtaatgtgttgcttggaaattaagaaatttggaataattcatgtgaacctaaatggtgaaatagaatcaagaaatgatagttttcttaaaaataagatggccaggcacggtggctcacgcctgtaatcccagcactttgggaggccaaggcgggtagattacctgaggttgagagttcgagaccagcctgaccaacatggtctctactaaaaatacaaaattagccaggcatggtggcgcatgcctgtaatcccagctactcaggaggctgaggcaggagaatcacttgaacctgggaggtggtggttgcagtgagcagagatcaggtcattattgcactccagcctgggcaacaaga

SEQ ID NO: 131622 - DNA, 1468 bp, Homo sapiens
gtagctttctttcttgatgtaaatactgtgtagggacttgcaggctttcattcaatctcttttcattcattcattgtgcaccatgcctgagcagtgtgccagctcttggtgatagagcaattaagtaaaatgctggatgaagccctatggggagatgggcaaagcatgagaagtactagaatagcagagaagtaaacaaagcgagatgttgggtggaatgggagcaactaattccagcaagggagggtggggatcaaggaggacctcagagatgtaactagactcacactgaagggtttaaaggaaggagatataattaggcacaaagaatcacataaggcgaaacagacacagaataaccctgcagagcatgttttcttcatcatgacttttctcattgactagaatcttttttttttcttttttcttttcatgtgtgtttgtgtgttaggaacagagagaggagttacagggatagagtggtagggacaggagaagtagataggtaaggaatgtcaggccccaagtaccaaacagagtagtgtatgagcttcagtgtcagaaagacctggttgggccttaggctgttcctttacctcaaagccccagcttccacatcagcaaagtgggaaagcttccatttgggttgctctgagagtgaaatgaggtgcactgtagcacagtgaggggctgagttttgagtcagacagacctgctttcaaatcacactgacttcttgtattagctgagtcatcttgcgtgtcaaaacctcagttttctcatttatgaaatgggaataataggatctccctcatgggcatgtaaggattcaactagctaattcatgaaaagtgtttattagtacaaggctgggtgcacggtcagcaatgttagctttccctctccttttaatagaaccttgctaaaggttagttcctttcccctaaggaaatgtaagagtttgccattttaagtccttcagtaatttattcactgtaactgtacagagaaagagtatgactttttagcaattatattttccatggaggagtcttccattcaggctcaccacattgattttcctttgttggtacccttttttttccctctcttttttaaagtcagggtttcactccgtcacccaggctgttgtgcagtggtgcagtcacagctcacggcagcttcaacctcctgggctcaagcaatcctcttaccttagcctcctgagtagctgtgaccataggcacacaccaccacatccagctaatgtattttttgttttttagcagagacgagctctcactgtgttgcccgggctggtctcaaattcctgggctcaggtgatcctcccatctcagcctcccaaagtggtgggattataggtatgagccactacacctggtctaaacctcattcttatcaatgcatgatgataacagatgccatcccagggcaaacaagtgaatag

SEQ ID NO: 131623 - DNA, 1018 bp, Homo sapiens
caattaaatggtgcaatgcctataaaatagttagcgtagaagctggtgcatagtaagctttcagtaaataatagtcctcatattacaaaacaaacaggttcttaggttagttctttccttgttaagattttcattgaatatttaagctctagtcaagctaatccagatatattacaagttttcttttaaacagaatgctttgtacactgctatagcaagcttgttccatttttctttcccctatccccttcagggttccattttggttacaagaagcttgctcagggagaggttcctgcactttagcttagatttctgtcaaaacaagattacctctttagttgaccctgtgagaagccgtttagtcttatgaaccaacctttgatttcaaaattctttgagttgtcctgaatgtggtaagctaccctgcaatgtgcttggaaatcatccagtttgggacctcaagagagagggataagatgatctaatcagttttggaacttggaagagacagagttgtctgagtggaacactgagctgtgaacccagtatcatagacattgattgttgccagtgagcttcgttccaaaatgggggacccatacagaaaataaaggtgtcttggtccccactccagacctgccgaatcagaatctccaacagtagacctaagaatctagatttctttttttttttctttttatctttttttagaaacagagtctcgctctgtcgccaaggctgaaatacagtggcacgatcacggctcactgcagctttgacctcctgggcccaagtaatcctccccattcagcctcccaagtagctgggactgcaggcacatgccaccatgcctgggtaattttttattttttattttagagacagggtgtcactaagttgcccaggttggtctcgaactcctggcctcaagtgatcctcctgcctcagcctccagagtcactgagattacaggtgcaagccaccacgccttgctagatttctttctaatgtagtt

SEQ ID NO: 131624 - DNA, 1362 bp, Homo sapiens
agccgggatggtctcgatctcctgacctcgtgatccgcccgcctcggcctcccaaagtgctgggattacaggcgtgagccaccgcgcccggccttcctggtggttctgataccaccaagtttggaaccactgcgaggccatttcccagatgaagaaaataaggcccaaggagaggagtacctccaccaagatcagtggcatgctgaactcatgaatggcagaggcctgctcagagctcaggtcaccctcacagtcagtgcaggtttttttccactactccttcatgctcctgggtctgccgtggactcaggataaacagacaaagttgtctgtgtctgtactttctcatctgtactgtagagataataactcctgaccttaaagggccattgtgaggttaaattagttaaagggtgttcagttcactttgtcctttactcagagtctgttctttagacaactgaaagggtgctaaattaagccattttgcagagaggtctgagtcatctagtggcagctgtctgtgcctcactggaggtgctttgatcattgtcatctaaatgcatgcgttaagtactatctgtagcacagcgctccaggctgtgctaagtgagttacccagataatggtctctgcccttgagaacagcgctgaggcaagggacataaaggttattcacacagcaacagaacaggggatccatgaacgttgaattcagagagcctagaaggagcatggggacacccattctgcgcccctggcttagaggaccgaagtgctgcagctcaggtcacatggcacgttgagagcgggatgtgtgacccaccaaggctgagtccttcccacctccccctgctggaggggaattgtttttctcacgggttggaatgtagcaagtgtccattatagtcaatctggaaaggctttagtttggagttagtttcaaggatgtcttgaaatgaggcggttagagctcagaggatgactttggggatggtgggcagactatgtgtacgaaggattgggccaaaaaagattatgaagtatcttttcttttttttttttttttttttttttttttgagacacagtctcgctctgtcacccaggctggagtgcagtgacctcccaggctcaagcaatcctcccacctcaacctcctgatagctgggactacaggatgtacaccaccacacccggctaatcttttatttttttgtagaggcggagtctcactatgttgcccacgctcatctcaaactcctggcctcaagcagtcctcccacctcagcctcccaaattgctgggattacaggcgtgagccgcagtacctgaccagattgcgaagtatcttgaagcaatc

SEQ ID NO: 131625 - DNA, 1122 bp, Homo sapiens
ctaggcattgctcaaccaaaggggaaagttcaaagtgaataggtaggttggtgtgtcatctaaagagacgatatagtgtcatcaagtgagatagagcctcagaaaacatcacttttggatctgtgtatatatgacattgtactaagacactgtagcatggaagtgaatagataagaattaggaaaatcacaagctaggagaggacagatgttatcacacagcaccttgtaataaagggagaagagtagggaaagttaagcctgacaggaccccactcctggtagaaaggaaccattgatatggctttgaagataggaaggacagagcattgaggcagaatgtaaaagcaaacacctctagtatcatggaatccagggaagaaggaaaggaaaggaagagaagacctgtgagcattttattatgtgctgggcatattaaataatcaattactcaattaaattcaattcaatactcagttaaatactcagtccttacagtagtcctgccagttaagtcttctcccattttacagatggggaaactaaggctctgagaggtggtcattttcccgagatcaaatagctaggggaggcaggattgtcccaggtctgactctgaatcccttgcttctgccacactgcttcagccagaagttggagaaggggaaggaggattggttatatgcagagtcagaagctatgagaggatgatgaggatcagagtggatttggagaagtgatgaggatatgggtggctttgttgggtgatactgctgcagagtagaaatgggagaagttggctacaaggaaattcacatggttgggttcacagtttcatctgccatgtgtggcattttactacctggtatatggaagattaaatattagctgcatttaattctctctttggagaactgcgagttcctttttgaacaaattctttgcaagcacttctagtctacatagttgggcttccaggttgatgcatcttcagattatagttccaagaaaaatactgactccagtgggtggtttttcacatttttaaactgatcagtcctattggcaacataggcattcatccattcactcccatctgggaactatgggaatcttctcctcc

SEQ ID NO: 131626 - DNA, 1084 bp, Homo sapiens
tttgtgaaattatgggtttgcatgaattgcaactaatggtagaggtctttgaaaaaataattataatttgagaaaatggggttagcctatattaggtttctgtagtcttgaggtacggaaagaatgggcaaacatttgccctttaaagtaggtaagagtccatagcacagtaagaagtctgtttcctctcactgggaaaacatattccagccactgatttaacttctcttattgttgctgacttgcaaccctacaccccctctaagtctatgacaggtctgaacataattcttctttgtagtccattgactcttataaaataatgctgtgattataaggtttcctgaatacaattttcagaatgttagtaataaccacattgcacctacctgccatacttgggcaattatctctgttgctcaatttacttaatattggtcatagtgaaacatgttttcatcacttgaaatcctaattttatttgccagattactaatggccacctatttctgtaacataaggtagaatgttatgcaagtttgacttgcaaatactgtatgttgactctagaaaacaacaggtttggccgggcgtggtggctcaagcctgtaatcccagcatgttgggaagccgaggctggcggatcacctgaggtcgggagtttgagaccagcctgaccaacatggagaaaccccgtctctactaaaaatacaaaaattagccgggcgtggtggcacatggctgtaatcccaactactcaggaggctgaggcaggagaattgcttgaacctgggaggtggaggttgcggtgagccaagatcgcaccattgcctgggcaagagcgaaactctatctcaaaaaaaaaaaaaaaaaaaaagaaagaaagaaaacaacaggtttgcctggagatggcagcataaggagtcatttttctgcttctttttaagatagtctgattcctctcaggataaaatgttgataatgattgaaaggataaagcatttaaagctggaatggatttttgatactagagagaccaccctccttctaattctcatcccttttcaggctggagaggaaacaa

SEQ ID NO: 131627 - DNA, 1044 bp, Homo sapiens
gggagactcctggggacccctgagtgagaagttttcctagaggaaggcagtggccttgataaaatgccctcctggactgcttctcagcactctatttctgtgtggcacagcctaggctcatagacatcacattctctgtggttctacttgtgctcactcgtaattgtcacctgccctggaatatgtgagctttcagtgagaaagaacatctgtccctcttgacacctttgggtgtgggtaaggaaaagagtaaatgttccatgctaagcatattgtcaagcactgtgaatgtcatgaaggaggaagtttgaaaagtgtgatttcttcatgtttacaaaatgaacaaatgactcagatctgttgtacacattcacaagagctgtgtcctaagctgatcctgattttgaagtcatgtgtcttcctttgcatgtggggaggattttaaagggatggaaagtggacaaggagggggtgggtgagaggaaggaaggcttagaggcaaggactttgttctacgatgctgactcagtgatgccttcccttgggctctgcagaaataaagattttcctcatcttttagctccttccttccctcctccctccctccctctttccctccctctctcttactttcattttatttcttccttccagtcagcaggtttttgtggggtatgttttctgttaggctaacttcagacaagaccctgaaaactaagtacagatgtcatcacagatgagtgttccttactcttggaagttcaggtagccctgcctcgattggctctgaccactttgtcaggccgtggagctgagctacattttggggatttcacccacattgttgttgacaggattgttaggcttcactagatttgcaccctcgggctttgatctttttaatatcttccggattgaatacccttttgggattgttctcctgactttttttttaaacgagtatattgtgccactagaaagaagaatgtttaaatggatcaaaaataaatcttgatactctctatcaaatgcatgtaaaaagga

SEQ ID NO: 131628 - DNA, 1035 bp, Homo sapiens
aactaaaaagtttgagaagccctgcactacctaattgtaatgactgtttattgattattgctttgtaccatgagctgtgcaaagcataccacattcttcatctcttttaatctttgccacaaggctgtaaagcagaggctttaaaaaagggcaccttgctagcccagcgtctcaccactggacaagaaagagatcaccaggtcggttctctgactctgaagccacacccttggtcactttctctataactttaaaaaagattctttttaactgctctgagcctcagtttccttatcaaaaatagtcagaatgaggtaccccgtagtgttctctgaaaagcagaagagtttctatgcatccagtccttacatgggggccaacagcaaatgctcccccagaaactcttcacctcccttccttccattccttccttttctttgacgttagaccagagaggcttatcaactctccattttcctctaggtggtcttcaagctgacagagaagctgacggaacagaaggagtggatgaagatataattgtgacccaaagtcagaccaacttcacctgccccattacaaaggtaccgcttcctcctacttcccctgaaagaaacacgattcacttcacagaggcagaaaggttcctgtttgctttctggtttgatttcacttagggagttaaggagggagtaaagaaaagtgctgggggttgaagagtatccacgggaggttcttgggctggagagagctgtcagtcaatcatgccctgaaggatccgggactaaagtcatggcctacaggccaagtgacagtactgccactggattccctgcatttccttatctaaagcctagtaattatgtaaagccatgagaatgggaagttaaacatagaaagctcaggactaggacgaaacagctactggaagttgatcattatcattcctgaaagcccaacatctccttgattacaggaggaaatgaagaagccagtgaaaaataaagtgtgtggccacacctatgaagaggacgc

SEQ ID NO: 131629 - DNA, 1092 bp, Homo sapiens
cggttggagtttttctggggaccccttcccacctagctgtttcaattctaattcatgccccatgtgagggtcctgtacctgatgcacctcgcatataaggaaaaacccaaatgaattaatgtttggttcataaagccaagcagaaaaacatatatacacactataattttagctatttaaaacagcatattcttaagcaaaaagctcaaaaaagaccatagttgtattttgtacaaaaatgtagagagttgtacatctttttctttcttttctttttaatattctgtctctatacccaagggcccattacatgatacaatcttgattatcacaaaccaacacacaaaaaaacctctcattccactttaccctaccaatctagatgtcatatgtgttggaagcttgggaatgggctaacgttgtatcagagagaggtctctaaccatctgctcagctagagcgaggctcagttgatatttttggcatgaatattggattctccaagaaagcagcatttcccaaactccaaatattcaaactccgctatcaaagtttcaccatatccacctgtggcctgtattattatttgctgaattttttggagttcagccttctcctaaataatagaatgcatacaatcatgagtttgatgtgctaagtatccttaaatacattgaaatcgatatggaacattaaacgaaaagaaactcgtgttttcttgttttgtttgttttgagataaagttgttttgaaacaactccgttgcccaggctggagtgcagtggcgccatcttagctctctgcaaccttccatctcagtcgcccgagtggctgggactacagatgcgcaccaccatgccagctaatttttgtatattttgtacagatggggtttctttcaccgtgttacccaggctggtcttgaactcgtgagctcaagagatctgcgtgccttggcctctcaaagtgctgggattacaggcatgagccactgcgcctggtcgaaactggtgttcttaaagccctaacagcatcccgggtgaccctttgggaggctgctgctggagcggggcggggggccctggccggtgc

SEQ ID NO: 131630 - DNA, 1054 bp, Homo sapiens
gggagggcgcgcgcgccgcctcctgcccagcccctcccagccctgggggcgtgtgcgcgcgtccaggccggcccgggacgcaccacctgcgcccgagcgcgcgctgcccggagcatccccagccctaagtccacccccattccccccacctcctactccctctccccttcccccagtctcctccctccgctccggagactgctcgctgggcggcggggccggagtcgtcgcagccacctcattgcacaacccggcttcccaactgtttacacagcccggcctgtgagtgtgtgtgtatacagcgtgagtcaccaggaggcggaggaggtggaggaaaaggagaaggaggagtgcactggccgggatcggtgcagcgctcacactcactcacagtcactctctctgagcgcgtctcgctcgctctcatacacgcccggagcccaggagcgctcaggatcccgagcgccgcgaaaaagttcccccggcttttgctggagactcatcgctttgggaagtgcatttgcttcgtggctccgccgagcctgctgaatcctgtcctcgcggctcgggaccccgggatcgctgaccgctgccgccgccgcctctgcctcccggactatcggcagcctcggcaacaatagtggcggccgcccccagcgaggctccgggagcccttgcctgcgggggtccggggactcgagccggcctccgcctcccggacgcacagccagcgtggtccccgcgtgcaacgcgagcgccggggagtggctcctgctttgcccctcgtgggggccgagccaagaccagtctgcaaactccatcccgccggctggaagaagtcgcggagccggcaccaaacccgcagcgtcttcccgcgcggatcccgggacttaaaaagccggggccaccccggcccaggacgggatgcgggtcggtccggtgcgctctgccatgagcggcgcctcgcagccccgcggcccggccctgctcttcccagccacccgaggcgtcccggccaaacgcctgctggacgccgacgacgcggcggctgtgg

SEQ ID NO: 131631 - DNA, 1050 bp, Homo sapiens
cattcctggagcctttgctgttagtgcctgtgggcgctgttattgggaaggctttgtttttcatagcagctggtgtggaaataatggcttggttcctctctcttgcagaacccagcttagactagaaagtctagaagacacacacataatgaagggggaagatgatgctttgtcagacaaacatggctgcccagcctacgtgagccctgagatcctcaacaccactgggacctactccggaaaggctgcggacgtttggagcctgggggtgatgctctacacccttctggttggacgataccccttccatgactcagaccccagtgcccttttctccaaaattcggcgtggacagttctgcattcctgagcacatttcccccaaagccaggtgcctcattcgcagcctcttgagacgggagccctccgagagactcactgcccccgagatcctactgcacccctggtttgagtccgtcttggaacccgggtacatcgactcagaaataggaacttcagaccagattgttccagagtaccaggaggacagtgacattagttccttcttctgctaatccccaaaacctcagaaacctcataattcttaacacctggcatttccatttctaaagatggacaggccctttggcgtggtaccaaccagataatgactgcatcaggatgaaagctgctgaactcggcatggcgcctcctcttctctgttgggatgagtgactttattgatttgagcagcatatgctgtgattggctgccctgcaaatttgtttcccttaaggaaccctcaccaactatctctgctggatttgggagttccgcatcttttgtggagggcagagtatggacatcttacacccggtggtcaagtgtgtaataaacttgagcattcgaatgggagaaaaagcaaatcgcacaatgacatattttgagtaataaccgtatttttcacagggtgacaaattgggccaataaatctgccatctttgaactcatctttggtggctagactgctacggcagcttctctgatggga

SEQ ID NO: 131632 - DNA, 1045 bp, Homo sapiens
ctcagggtggagcattctgtctaagagaagaaagataaggaggctcccacccacctctcccaagagcagacattaaacatctttgtgctttgaagagagtgaattttggatagtcttgtgattctcagactaacttccagaattatactttaacccctcccagatatggtccgcctttggcattgtgtgtacatctgcagttttgcatggtgggttgttaatatttcaaatgtgtggtttatgaatacgtctgtataatcggcttctggagtgaaacagcaaaccccaaatcttcaaagttggaaggaactttaaaaatcatccggtccaatctctttcctctttctgccacctcccaaggcagaaatcccctcttcagcttcttttgtaggtgggaatccagcctctgttagatatgtccagagatggaaactcactcccctacaaaagatggagcttaatggagaaattgcaactttcattaaaaaacaaattcagatgaaatatcagtaactgtcttggacagtgctgaaatcaggtggttaaacgggtaaacaaaatatactgtattttgagaaatggcacaaaaacaggcagtcatctttaagggctatgcctaggcaaactactaacatgcattgtgagaatgccgtgtatacctcacgtactgtgtactttgtacatatattttaccttttatacctatgttcgattttgttttgttttgttttgttctggctttgaggcttgttttgttgtctgtgtctgtctgaataacctgcgtgtctaaaaccacgtgaaatgtgaatgattattggcaatattaccttgacagaatcatgggactttgagaagagggaggacagaggcctctgtcgcactaacgctctcgtggttgctcgactgttgtatctgtgatacattatccgactaaggactctgggctggcagggccttctgccgggaaagctagaaacactaggttcttcctgtacatacgtgtatatatgtgaacagtgagatggccgtttctgacttgtagaga

SEQ ID NO: 131633 - DNA, 1449 bp, Homo sapiens
taaaaatcctgagacattagatgccacaaatacctagcacttcattagaatttactaaaaatatatcaaagttatcaagtaaatagagtcagtacatctgaagtagattctaaacattagagtattaataaaaatgcatagataagtgaagtgaatcctcaacgtaaaactaccagcctagcatatactggttccagataaaagaagtaaagttgcaaccaagttaaagtttgaaaatataattaattatgactgataacactatactgcttttatctaacaacaagcaaagcgaccccaggactctgataaatagaaatacatcatggacagtgaaaacattaacaattctggcgtttgtgttgtcatctcttatagcacctcctgtttccctggcaatcctcagaacccagacaggagcgtggccccatcagtgcatgctgaagggcgaagggctggtaccgagaattatccatttcaagcagaaggaaaatggaccagttgtggtgttgggacacattacaggattgcctgaaggccagcagatgccatgttcatcagtgtgcaaataatatacaaggctgtaccagtgcaggtcctcactttaatcctctatccccaaaacacggtggaccaaaggatcaagagaggcatgttaaacacctgggcaatgtgactgctggcaaagatgatgcaatgatgtgtctattgaagattctatgatctcactctcaggaggccactccatcattggccatgcaatggtggtccatgaaaaaccagatgacttgggcaaagatggaaatgaagaaagtacaaagatgggaaatgctggaagttatttggcttgtggtgtatttgggaattcccagtaaacattccctaggatgaggtctgagtgccagtaacacatgtgttatcctgctagctgtagaaatgtaacttgataaacatttaacactgtaatcttaaaagtgtaaagaaaaaaaaaacacacacacattcacaattctccagaaacttcttatgtagaatacagttttaaacatgtttatgttaatgacattttacccacacaaatttaatctatgcaaacctgagcatctcttccgattggacaatgcttcctagacatcttgtcaatgataacatatcaaacaatcctaactgtttccaattcttgtcttttcccacggtgaaagaacacatctttgcaactttccagaggtcctctgggaaatctcaaaggcaattttgggcactgaggaggctgagaagactgtgcttgactgttagctgaaacaacttttggctgtttggcagaggactaacaggccctctgctttatgtgaatttctcactttaacttgtttgctccattttgggtgcagacccagccccatgtgcctgaccacaaaccaacatttcctgtctcaattctcctattca

SEQ ID NO: 131634 - DNA, 1037 bp, Homo sapiens
tttattgtgggcatcctcttacaaaatctccctatcagtcctatggttgacatttcccaaataagaatacaaaggcccagggaggtcaatatgaatcttgcccactgcaaggggagaggctggattcgaatccaaacctggctgcttccaggtctgtttttcacactgtccagcagcctcagggaacaccagcatatatgtttgtttgctcagccagaaactgacaggtctgagtgaccaacatacttagttggccgaagactttcctggttttagcactgaaaggcccaccacattctaggcaaactaggacagctggccaccctgctcgggtgcctccctgtcttggtcattgctctccctaagccaagggctgtcatgagggtgaagctggggatattgctaggatagagcaggaaagggggagaagagcaaagagaaattgatgttttagtccagtccccactcttacaacgagcccccattgccaggcgaggttatacatacagcagcagctgcatagacagggccatccaataaaagggacagtacatattatagcctgcttttggcattcatttttattttaaaatcagactcttcacaataggtgaggcctgggcctgtctcacctttgagagctgctggcctgtaactgctttccttagccctcccagcctgcctgcctttgactgtaagtcctgcataaagagtttcacattttggctgaattattacttgaccttcagatgaaggaaggaagcccggaggctgtggaatgacatccttttccttggcttctgcattttatttgcttagatcaacagagcagattctgaagctgtctgggcaagagctagtttaccctgtgggtaggggtgaaaagcaggtactctgagaaggggtctgaggctgcagcccaccccaaaccagctctccatgtattaatcctgcagctaaattgtctgtgaggaagcttttaatcttttcctggaagaaggtacatgggtggggagacattgaagccagtccctgct

SEQ ID NO: 131635 - DNA, 1046 bp, Homo sapiens
cttgcatcctgagctccttggagtagggaccgcatatcgcctgtgtgagccagatcgctccgcagccgctgacttgtccccgtctccgggagggcatttaaatttcggctcaccgcatttctgacagccggagacggacactgcggcgcgtcccgcccgcctgtccccgcggcgattccaacccgccctgatccttttaagaagttggcatttggctttttaaaaagcaataatacaatttaaaacctgggtctctagaggtgttaggacgtggtgttgggtaggcgcaggcaggggaaaagggaggcgaggatgtgtccgattctcctggaatcgttgacttggaaaaaccagggcgaatctccgcacccagccctgactcccctgccgcggccgccctcgggtgtcctcgcgcccgagatgcggaggaactgcgaggagcggggctctgggcggttccagaacagctgctacccttggtggggtggctccgggggaggtatcgcagcggggtctctggcgcagttgcatctccgtattgagtgcgaagggaggtgcccctattattatttgacaccccccttgtatttatggaggggtgttaaagcccgcggctgagctcgccactccagccggcgagagaaagaagaaaagctggcaaaaggagtgttggacgggggcggtactgggggtggggacgggggcggtggagagggaaggttgggaggggctgcggtgccggcgggggtaggagagcggctagggcgcgagtgggaacagccgcagcggaggggccccggcgcggagcggggttcacgcagccgctagcgcccaggcgcctctcgccttctccttcaggtggcgcaaaactttgtgccttggattttggcaaattgttttcctcaccgccacctcccgcggcttcttaagggcgccagggccgatttcgattcctctgccgctgcggggccgactcccgggctttgcgctccgggctcccgggggagcgggggctcggcgggcaccaagccgctggttcactaagt

SEQ ID NO: 131636 - DNA, 1093 bp, Homo sapiens
tctattaaaatacaaaaaattagcagggcatggtggcgcacgcctgtagtcccagctacatgggaggctgaggcaggggaatcgcttaaacccaggaggtggaggttgcagtgagccgagattgagctgctgcattcaagcccggtaacacagcaagactccatttaaaaacaaacaaacaaacaaacaaacaaacaaacaaaacaaaacaaaagcagatataccaaaatgtttattttggatggtaggaatattaaaatattattttttctttgtatttttactgaaaaaatgttttaattctaaaaaagaaattaataaaaaggaaaatgtgaatctaagattagtgcatgagagctggagacccagagagggcaaacagcatcaaggtcaaagttgagtgagtcctgggtgaaagtgtcttttcagccaggggagattttccatgcagaagggactgggcatcaactgtcaggacatggacagagacgtctgccattagaagctggtcctctcatagcccaccagcatcccccaggaggacactggcttcctcaaggtcacagcctttggtttctggaaaaaatgattaagcagtgaaaggattaaggtctcacagctcctatcgcatgatgtatagatgcagaggtttctcatcatcttctttttatattttaaaagatggatgacaactagatgccaactgcagctcaggcacctgcccagtccctctcagagccgggcacaaaacagacacctgtctagcccctcacagagagccaggcacaaaacagacacctgtccagcccctcacagagagccaggcacaaagcggagacttgtccagctcctggcaaggagccaggcacaaaagagatgcccatgagtgtaaatgaatctgtgaaacaggcagaacaggagcatcaactgagtaattgttttttctttttcaaataagaacatttgcgttgagaagccgccacgggaagagatgtgatgaaacactacacagaaagagggaggagcctccgggtaggttggagtgagtaggatgtagggtagccggcaggggagaagaggggcaaccttctgt

SEQ ID NO: 131637 - DNA, 1790 bp, Homo sapiens
catcatggtcattcttcttggctgggctgttgatttaattaggtttgccttctcttgctaacgtgctcttatttatgccagtgtttgtggttctgggtgtagactttcaggaagcacagccatgaagctgcatgcgtctgtgtgtggatgcctcatgccttttcctggtggtttgcaggcatggaagattcttctgttcatctaagctcctgactttaggcccttctagaacattagagaggagaagaaatcacgtgcaaggatttagggacaagaggatgaggttttggtgtttcctttctggtattaggttttccagagagaggctgttagcctgtctctcgcccactccaccactgtgaatcctggctactggggctagttccttgctaggaaaaaaaaactctagagaaatgtgtttgtgtgtggtgggtgggcgggggccctgaggatgcagggactgtgtctgctgtgttgtctgttataagatgtttcagacctattttgcatactggcagcgacaagttgagacttgttcaacttgacacagtcctgtggtcatagcgaatctttctaaagctctgatcagtcaagaagggggttgtatcaatcctcagaaccctgagtggaactttctacaggatttattaggagaaaaaccttcccggaagctgcagaaggacaaatacagaatccgtgtctgggagaaacctcgtggcctggtctccattatttgagatgagttacatcttggaggtgaggacgtgcctcgtggtctaaagcttcggcacaagggcccaactggaattccacttacgggtatgactgtggggtatatgctgtacccattgaattcccagagggatttgttaagtggttgtgttgctgttttgcctggttaagagtggcttattcttgttgcctcatctatcttgagtgcagaatttttgcataaacggcttctcttgaaaaatagaagtccgtttttgttttgttttgttttttttctgattaactttccttttcctctgtcttaaacaccttcccccgcccctcgccacctccatgctgtgtttctgtggctggagcttttctgcactggaaaggaggagttctcccctctgttctgacatatctgatccccactagtttatatgattgctggtctgaaaacctggtgaattctcactgcccacatcaaatcaattccctgttctttagttgttttttttttccgcctcctgagcggtaggcaggcactctggctggattctggagcctgtgtttgccatgcctgggccttctgcctgcccaagatggacacgtttctctggcagctttgtcaagagatctcctggactataagacaccctgttctttcctcctgtttgtgtgagtggccctgcatttgggcagagtattggcagaatatctgggggaagtggaagactttggatagttgccggtccaggtcgtctggagaggcagtggcaggcctgctgatggctgcccctttgctatttgttttatatcaggtggcccttctggatgtgtggcctttttattttgcatttcctttcatagttggctgcagacataagattcttctttttctcttgttttgcttttttttttttttttttgagacagagtttcactcttgttgcccaggctggagtaaaatggctggatttcagctcactgcaacttccgcctcccaggttcaagcgattctcctgcctcagcctcccaagtagctaggattacaggcatgcatcaccacacccagc

SEQ ID NO: 131638 - DNA, 1033 bp, Homo sapiens
ttggtcaggctggtcttgaactcccagcctcaggtgatccgcccgccttggcctcccaaaatgctgggaggcctcccaagttgctgggattacaggcatggaccaccatgcctggctaattttgtatttttagtagagacggagtttctccagattggtcaagctggtctcgaacatctgacctcaggtgatctgccctcctcggcctcccaaagtactgggattacaggtgccacagtacccggccttgttttgctttttattgtttcctgatgcaggtttgtgatctctttgagggatcaggaccacaccccccaccccaatttatattcccagtgtccatggtgggaccctgactgaggatgggaacagagcaacaatctggaatcatttggaccattgagtcctgtggacagtcacttcaatatcatccctagagagtctcagaaattcaaggccttttggaatgctgccaaaatgggtcctttggcaggagccccctttgtctcttctgttttctgacctcaaataatctaaggaactaataacggtaataaataacaattaataataagaacaataatagtgcatgtataacatggacattgtttatcacgcaaagcatgttcttcaccttctactccctacaactccatgaggcatttataatgaaatgtctagcaatggtagacttcttgttgtggggcagggttggttctaacacttcaaattatatgatctcatttaactttcctataaaataggatgattattgttgtggttttgcagatgaggaacccacagcccagagaggttaaaaatatcctcccaggtcacacagcttgggagaggcagagctgtagagatttggaccacagtcttcgacttcttagtgtgactctcagaagttagaggataatgaggttaagaacaagcaaagggccgggcgcggtggctcacacctgtaatcccagcactttgggaggctgaggcaggtggatcacctgaggtcaggagttcgagaccagcctgg

SEQ ID NO: 131639 - DNA, 1753 bp, Homo sapiens
aacagtaaagtgcttagcagaggctcccacacatagtagttactatgtagtggtagttgctatgtttattattattatattattctcctccctcataaaatggcagcctccctttcttccattccccttcctgagttattttttctcgatagggcttatcttcctagtataccatatgtctctcttctcccactaaattgtaacccattcatttttccaggatatatttgttgggtgtctactctgtgcctggcattgctgtagatgttggggatgcagaaaggaagaaaaaggacagatttccatgctagagcttaggttacagctgggttagacagataaggaacagcagacataataaagaaggacatgaattgtgtattcaagattatgaagtgctgtgggaacaggcctagcagggtcagtgtctggagggctggggcgtggtgctgtgtggttaagttgtccggtcagagtcagggcaggctccatggaggagctgacgttaacctccacctgaagtaggggaaggacaggcgtttcaggctctgggaagagctaggacagaggtggaggcagaagtgagcctgtgggggtgaggagcagccaggagaagcgtgagatgagaatggcgtgagcaagggaggtaggagaacccgagcagcatgcagtgtgcagcctcacagagagcctgcagggcattccaaagattctgtcttttactctgtaaaatggggagcccttgcggtgttttttgtttttgttttttgtttgttatgaggcagagtcttgctctgttgcccaggctggagtgcagtggggagatcttggttcactgcaacctctgcctcctgggtttaagcaatccttacacctcagcctcctgagtagctgggattacaggtgcgtgccaccacgcctggctaatgtttttatttttgtagagatggggtttcaccatgttggccaggcaggtctcaaactcctgaactcaagtgatccacccacctcagcctcccaaagtgttgggattacaggtgtgaaccactgtgactggcttccttgcagtgttctaaaaaggaaagtaatttgatctgacttggcttttgaaacggtcagtctggctgctgtgttgagaagaaactaaatcagggtcaggagctagagcaccaggacaaacatgcacagagcgttaagtgccaggtccaggctggcagtggtggatggggccacaggaatggacttctaggctgttcactgttgtatccccagcatcttaaactgtgctctccatatggtagctgtgagccctatgtgggtattgagcacttgaaaggaaattgatatgtactgtgtgttaaacacacattggatttcagagacttagtgagaagagtaagatatctcattatttatttatttatttatttatttatttatttatttatttactgagacagagtctcacctgttgcccagcctggagtgcagtggcatgatctcggctcattgcaacttccgcctcccgggttcaagcgattctcctgcctcagcctcccaagtagctgggattacaggtgcccaccaccacacctggctaattttgtatttttagtagatatggggtttcactatgttggccaggctggtcttgaacttctgacctcaggtgatccatcccactcagctttccaaagtgctggaattacaggtgtgagccactgcaccaggcctatttgtttatttatatgag

SEQ ID NO: 131640 - DNA, 1036 bp, Homo sapiens
ccttcctcagcctcctatagttctagggttacaggcgtgagccactgcaccctgccaagttatctcatgaaccaattctttgatgttaattacatattgaactgataatgttttggatatattgggttaaattattaaaattaatttcatctgttttttctaactttatggctactagaaaatctaaaattacatgtgggttgaatcatattttcgctggatggaacaatgccttggacgaggtcagcatttagtgaatcaaatgtgtgggtgaggcacaggtgttctgccgtgaatgagaaaccgttgccatcttcgggaagtttccagtgtgggagggaggcacactgcagatgtaactgctaggagagaaagaaggcaggttgaaatgggaccacagccaaccaggcctgctgtagcccagaagctggaagagactcgcccaggagggaaggaagacactggggtgttgggtctcagtctgggtcttggtgacagcagtgggctggcagtgcagaggttcaaggccttggactgcaagtccactaaggtggctggtggtgtgggtggaggtggaaaaggcaggtggggcgagggtgaggggcaggacatcctggagagcctgaataaccaggtataagtgatttctttttctttctttctttctttttttttttttttttttttaagacggagtctccttctgtcgcccaggctggagtgcagtggcgagatctcggctcactgcaagctccgcctcccgggttcacgccattctcctgcctcagcctcccgagtagctgggactacaggcacccgcccaccacgcccggctaagtttttgtatttttagtagagacgaggtttcaccatgttagccaggatggtttcgatctcctgacctcgtgatccgcccgccttggcctcccaaagtgctgggattacaggcgtgagccgccgcgcccagccccaggcggaaattatttcaactgggtcctgagaactgggcacttttcaaggattgtcagcaaggagc

SEQ ID NO: 131641 - DNA, 1043 bp, Homo sapiens
tggtctttaactcccggcttcaagtgaccctcccactttggcctcccaaagtgttgagattacaggtgtgagccactgtgcccaggctgtggttttttattttttaattttttatttttttgtattataatcatagtgtatatgttgcatcctgattttttttttttttttttttgagacagcatctcattctgttatccaggctggagtgcagtggcacaatctcagctcactgcaacctctacctcccaggttcaagcgattcttctgccttggcctccgagtagctgggatgccaccgtgcccggctaaattttttttctttctttctttttctttttttttttgtatttttagttcagacagggtttcaccatgttggccaggctggtcttgaactcctgacctcaagtgatcccacctcggcttcccaaagtgctgggattacagcgtgagccaccacatctggacacatcctgatttttttcttagttgctattaggacacaggcatttttgaatattatatgcactttgtccatgtcttttttttttttttttttttgagacggagtttcactcttgttgcccaggctggagggcaatggcgcgatctcggctcactgcaacctctgcctcccgggttcaagtgattctcctgcctcagcctcctgggtagctggcattacaggcgctcaccaccacgcccggctaattttgtgtttttagtagagacggggtttctccacgttggtcaggctggtctcgaactcctgacctcaggtgatccacccgccttggcctcccaaagtgctgggattacaggagtgagccactgtgcccagccgtccatgtcatttttattgggtagatatttctgttcagtgactgtttcgttgcttactttatcattcctttgatttggatgcttagcttcataacagcctgtttatatagattatgttttctatttttcagttaattaaaaaaaaaacaaattctcagtcctaggattattgtgcataatgtctgaattttttagaa

SEQ ID NO: 131642 - DNA, 1208 bp, Homo sapiens
ttcccaaaagtcaacaacaaaaagacaaacagccttatagcaaagtgggtgaaagataggaccatgcagtgctcatagaaagcaaagtagatggctgggcaccgtggctcatgcctataatcccagcactttggaaggctgaggcgggcggatcacaaggtcaggcgttcgagaccatcctggccaacatggtaaaacctcatttctactaaaaatacaaaaattagctgggtgtggtggcgtgtgcctgtagtcccagctacttgggaggctgaggcaggagaatcgcttgaacctgggaggcataggttgcagtgaacccagatcttgccactgcatgccagcctggacacagagaacgactccgtctaaaaaattaaaaaaaaaagcaaagtggatgataaatgtgaaaagattctgaattttgctaacaaagtcaggttttggagatctaatttctagtcagtaaaattcatcctttctaggatacaatgctaagagttttgataaatgcatagaactgtgttacactgttgtgtaattaccacaatcatggcttagaacatttccatcgttcacccagattccctcctgtcccttcacagccagtctccttctccacccccagctttaaccaacccctgagttgtttgctgaccttacagtgttgcctttttcagagtgtcctataaatggattcatacagtgtgtagtctctcggatttgtcttctttcacctggcataatgcattcgggacccttccatgttgttctatgcatcaggggtttggtagtttttattgctgactgggactctgttgtatggatataccactgtttgtttatctgttctccatttgaagagcatctgggtgtttccacaagatacatgtttcatgctttacaacgtgccagaaataggatgtctgactcaagtgttgacaaggcacagggtgttcagcagctccgctagtgagtgtgtgaggtcactttagagaccaccttgccagcaggtagtgaaattggaaacatgtgcagccccgttcctaggtaagattgagaattcacagttcgtgctgtatgttacttaaggatatttagagatgaaagtgaaggtttaaaaaatgggctggaaagatctatatcaaactcactgtcatcatctggggagagaaggggagtgggctgattgtgaaggtcaaagccta

SEQ ID NO: 131643 - DNA, 2262 bp, Homo sapiens
cacctcctgggttcaagcaattctggttcctcagcctcccgagtatttgggacttcaggcacaacccccgtctggctaatttttgtattttttttagtagagacagggtttcaccatgttggccaggctggtctcaaactcctgacctctggtgatctacctgcctcagcctcccaaagtgctgggattacaggcgtgagccacggcgtccagcctgttctttaaatttctttcaaaacagtttagggaagggatatcctaggtaaagataatagcatgtgtgaaggccctgaggctgcaaaacttttggtgtgttcagagtgtcaaaagattcgtgtggctggaaaggagtgaacgtccagggtccagatgaacaggtgtttggtcatggagggccttaagtgcttttttaagtctttgggggtggctaagctgggtggttcctgatttgattgacctttttgttgggtagatggtggatcaacggaagcaggtggcccatttggggactgaattacagcaatccaagagagagctggactcggctctagcagtggagaggaagagaagaggatgagtttggtatttattttggagacagaaaggacttcttgggaccaggcgtggtggctcatgcctgtaatcccagcactttggcaggctgaggcgggcagatcacttgaggtcaggagttcaggaccagcctggccaacatggtgaaaccccatctctactaaaaatacaaaaattagccaggagtggtggcaggtgcctgtaatccgagctacttgggaagctgaggcaggaaaatagcttgaacccgggaggcggaggttgcagtgagctgagattgagccattgtattccagcctgggcaacaaagtgagattccatctcaaaaaaaaaaaaaaaaaaaaaaaaaagaaagaaaaaaaagaaaaagaaaaggacttcttggagggcaaagtttgagggaagagttagctagctagagaccttccaaactgtgctcaggcatttggattttaccctgtgggtgatagggaactattgaaagttttcatttttttctttttggagacagagtcttgctctgttgcttcaggcaggagtgcagtgagccatagtggctcattgcagcctggaccccctgtgctcaagcaatcctcccacctcagcctccagagtagctgggactacaggtgcatggcaccacccccagctaatgttttgtttttaattttttataaagatagggtctcactttgttgtccaggcttaaaactcctggctttaagcgatcctcccatcttgacctcccaaagtgttggaattacaggaatgagccatcatgctcggctctatggaaggttttgaggtggggcagggatgagattagagtgatgtgcctttgccagagagatttgtccagaggaagggtgaccagcctggagtctctttggaatgttctaggtaatgtagcagagattgtgtcagttaccctctggtgggatgcttggcttttcccattttttcaaaaggaaatgggaaaaggaaaaggtcctctgtatggaaagtccccaggaatttataggagagtggctaacgaagacagagttcccttccggcatttattgtgactgagtttgttccatagttttagtcccacttaggtcatgattcatcccactgggccagcagcagcattgggatcacgtcagccaatcttcgcacttagagattttgaagagagatatctcctatccatgtggtacattgcttttcacaaaacaaaagagttcattttgtcggtgaaaagccctggccagacccagccggtggagaccagtagcttcctctggcaggctgggcttcctatggtcattgcagtccctccccatttataaggctgccttccctgagaacacctgggacagatgccccccagaagcatgccctctggaaagggagaggagcaggagggggcttcaggcatgctgggcctggggggccaccccctggcctttgctaagttcctggctggtctgagccctcttctttcctctccccaggccttgcaaaggccatatctcttccttttcatgactctggaaattccatacatactttctgcattaggaagacattctctgcatgctgatctcgttaaaaaggaaaagccaaggagcatcctgcacctccctcctgtaagcgagctttgcaaatggtaaactagatcctgaaaggcaaccacttaaaagc

SEQ ID NO: 131644 - DNA, 1657 bp, Homo sapiens
gatcatgggatcagaggcagcaggtgaatgtggggtgtgaatatttttgaaggcttggaatgaaatgattcttccagactttagaggatttgtgtctgcagattcttctctaaggtttgtgtctcacatagtgagagaatcagccagccagggaaatgggacaggattttgtctctttccccatttcctcttctaatgaactcctacctatgctttatgactgcattaaggggtcacctcctccaggaagcattccctcatctccttacgctggttctgagtgtgtcgttcctgcttgatcccctcccagcaccatgtgtgtgagttctcacagctcacaccccatagtattactatgttgtttctacagtgggttcctgtcaggggttccaaacttagctgtttaggaggatgagtagattgtacaaccacaccaggcgggcctgatcaaatacagtaagaagtgtccggattggcaaaccagcgggtccctcttctagatgttatcagagagatactgttagagagaggttgctagatgttaatagaggctgctgttagattccagctccctcctcccctggtcccttttctctcctcatgccaaaagatagacccagtgttgccagagcttccacttttaaaagagaagccttttaaaatataaactctcctgatttttaaatgttttcagttaagtttttaaaggaacattcataggccaaaccaaatacctgtgggccgtatgtggcccccggggccagcagtttgcagctccttggttataggtgcctctaacccattgcacaagctccctcaggcatttcatgtctttcctttccattccccctgggcctagcagggagctggcatgtcacagtgggtgctccctaattattggttattgacttgaatgctagactgagcaagcacctccctgctcacagggtgttaacatttttccctcagaactgtttgtatgtaatgctattctgaattgcttcagttccttacatactttagtgatagtctgtatgtgcctggaaaagtcatcattccttagattctagacaactctgttcttctgttcttttcctttttcctttctctctccgtcccctcaacatatgtttttgttttttgttttttgccagttcttttgtatctggccggttaacacagggcttcataacatggggtcggctgttattaagcaacagtggtttccggtagctcactgactttgccctctctgctggtaagccattgctgatttccatcagggtaacaagcatgattttcagatttaccttcatttgcagtgaacaattatagcaaaattgcttaaagaaatgaaccttcaggtgtggcggctcgtgcctgtaatcccagcactttgggaggccgaggcgggaggatcacttgagcccaggaggtctctaggctgcagtaagctgtagttgcaccactgcactccagcctgggtgacagggtgagacatcgtctcaaaagaaaagaaaggaaaagaaaagaaaagaaaaggaggggaggagaggggaggggaggggaagagggagagagggagggagggagggacggaggaaggaggaaaggcaggaaggcaggaaggcaggaaggaaggaaggcaggaaggcag

SEQ ID NO: 131645 - DNA, 1147 bp, Homo sapiens
cttgcctgttgtagtcctggcactttgggaggctgagatgggaggaattggaaaccagcctgggcaacataatgagacttcatctctacaaaacaaatttttttttaattagccagtggcatgcacctgtggtcccaggaggccaaagctggaggattgcttgaggatgggaagttgaggctgcagtgacctatgttcccaccactgtactccagccagagtcacagaacaagaccttgtcaaaaaaagaaaagaaagaaaaggagagagggagggaaggaaggaagaaaaaaaagaaggaaagggagagaggaaggaaggaaggaagggaagggaagggaaggaagggagggaagggaggaaggtaggaaaatggaaggaagggagggaaggagggaagaaaagaaagaaggaaggaaaaaaccggtcggctatcttgacgaaaaaagtctcagtccactccattttgtgcagcatttcccgtcttgttatctttctggaaaaactcagtaagtctctggctgggaattatagaagcttaatatgcacttgtaactgtgtcaggctctcacagggaacaaacaagaggaactatagatttttatagtctgcaagagcccagtccatgcatttaggaggcacagagtgagagaaagagcattgacaatgataatatagcattaatataggtacaatctggagtaatgttatctagtactactaatagcgatattaaaatggcattatatagatattaagccctgacttcgtgccggtttgaacttttcctgtattaattcatgtgaatcaattttgagactctgtctcaaaaaaaatatatgtatataatatatacaaatatatataatatatacaaatatatataatatacaaatatatatatataatatatacaaatatataatatacaaatatatataatatatacaaatatatatatataatatatagatgtcatggtgatgggaagactgggggaggagaggagcagtttaatcccaggatcccatggagaggaaacttgtaggtctcttacccagtgtcttctcctgctctctggctctgatttctgaactaagaaaagtgtgcaaacatcatctgctctcctggttgtatttgtaaatgc

SEQ ID NO: 131646 - DNA, 2497 bp, Homo sapiens
aggggcagtaactagcagaagggaaacagcccgggtccagtttacttcccctcaacgtgggccaaggacgccaggcaggatcatagtccggctggattgtggctttcctcaaggtgatcttgacttgcccaggtgggatttcacccccacttccttccaggcttcccattttagacttgaaatgtaggcctgttggggcctcctccagtagatgtgtgcccttgagcttggatacccccctgccaagatacgcctttcaaaaacagataaacttatcgcaactgaatagaaggggctcccaaggggtcccaccctgctccggaagtctcagtgaggaatcaatagctgttaattcctgtgctgccccctgcctgacattccatccacacttgaggcccagattgtaagaagggagagcaggcaggtctctcttccaggagagggacccggttcatcagcaggatttattcattcatgtattacgtcaggctcagcgcctgggctttttataaatgagggctctgctggcgttctgtgttattcagatattcggtgagagaccaccagaagccacaaaaaattgctgacatctgttggaaggcaatcatgcataatggataagggtgcactctgcagttccagcagcattgatttgaattccccctctgccgcttcaaaactctgagatctcagcgagttgcttaccctctagagcctccacgtcctcatctataaaactagaaaataagtggtactcactagatccttaccttgttgtgagagtagaatgacgtgcatgtagagctttcccagagctggcatgtggtaggtgctcaataaacgctggttattctctctctctctctcactctgttgcctaggctggagtgcagtggcgtgatcatagctcacaacagcctctgtctgccaggctcaagggatactcctgcctcagcctcctgagtagctgggacttgcaggcaagtgctaccgctcctagctaatttgttttattcttagtacagatggggtcttgctatgtggtccctgctggagtgctggttgctctctaactggctgcgagccccggggtaggcacactggtactggggctatagcaaaatccgtgctcggtaaatcatcattgaaggagcaagggtgctttacagttgtagaatctcatagtacacgttactttggtttttctcttcccagctctggagtcctgggatccaagtgtgagccccatgtctgcaaaatgaggctagtcacttgaatcctcttggatcttgctttcctcatctgttagtgagcttgtagatagctctgactgtcaccaggctttgctctgagcactctgcatctgtattcaacctgtatacttaatcttcacaacagttgaggtggttgatccatagtaatttctcgttgtacaaacggagaaactgaggcagagagataagtgtcttcccaaggttaacagctaaccagtagcagggcacgctgggatttgaaagactctctatgtgtcctaactggtatgctctcctgtctagaggtgatctcttcctccagggttccaggtagattggttgagatgtgcaatgcggaagagcctcgggataagtcggctaatgacaccctcaggctacccagccctcgggagctcacagcagagcagttggggatgccttgcaaggttacctgtgccagagttcctggggtacatattaaataggtaggacccaatactactttgcattttcctggaatcctagactcttaacattggaaaggatttctttgccaagtaattcgccctcatcattaacctctaagaaatgcagaggtggaattagaaggtgcgtgtctctttcttttgcaccacagattctatcgagtctcatctggcagcttcaaggatcatccgcattctttcatcttcatggaatgtcactagattgagatgattctaagggtgaggtcaagcatttggagtttggaactctgccttttgtagagatgctcccgtgggacttgccctgcacccagttcagcttgcttgggatgcatctgctgagcctggaagagaagtatgggttcaaggccagcggtccagcactcccacagacctgatctgtaatagggaagggttgcctctgtgtgggttgggagtttaatcagcaagagtggattagcagcaggctcattctgtttactccagtaggtcacggggccaagggcaaacatacacccctcccagcccagaaactgatagctgcaaagttgcacacccttctccccaaattgacaaatatggttttcattgttggagtaataaattatgctttttaaggataaaaatgttgcccagctgttgagtggtttaaacttccagatgttcctctgctcagtaatcagagcaggatgcatgatgggatctctttaaaagttgatgaacagaatggttcattaaatttcaacaatgtgcctggaa

SEQ ID NO: 131647 - DNA, 1014 bp, Homo sapiens
tccagcctgggcgacagagggtctctgtctcaaaaaaaaaaaagaaagaaaattaacaattacatgtgtagtttgcattatatttccactgggcagtgctatgctaaactgtgacacaaacggtggactttagagttgtgcagggtacaatctgcacggccatatgtggcaggcctaccaggtgtggatgaggctgtctgggttcgaatcctggctctaccagtaatcagttgtgtggtattgactaaattgtttaaactctcagagcttcagttgttctatctgtaaaatgagtattgcaatagtgcatgcttcatagagctgttgtaaggattaaatgaattagtgcatataaagtgcctagaatagtgtctggcccgttttaagagctcagtgagtcttggttgttgtagttgttactttagtggttgttttttagaacctgaggacacaaggatggaaagactcagtctgtctgtggcaaaccacgaaaggaaagattaaacaattcaatgcaggctgggtgcagtgggtcacacttgtaatcccagcactttgggaggccaagacgagcggatagttgagatcagaagttcttgaccagcctggccagcatggtgaaatcccatatctactaaaaatacaaaaattagccagacgtagtggcgagtgcctgtagtcccagctactcgggagactgaggcacaagaattgcttgaacctgggaggtggaggttgcagtgagctgagatcacgctactgcactccagcctgggcgacagagcaggactctgtctcagaaaagaaagaaagaaaaaataaattcaatgcagtgattattagaggggtaagtccatcgggacaaatcagggggcattcccactgaggcaggacttgagatgaatctcggaagcagaaatgctgagcttgttgggctggccagagataagaaggacattgtgggcgggagaaacagcacctacagggctgagatggatgaaagctcagttcagt

SEQ ID NO: 131648 - DNA, 1046 bp, Homo sapiens
tagctgaggtgagaggattgctcgagcccaggagtttgaggctgcagtgagctgtaattgcaccactgcattccagcctgggtgacagagtgagaccctatctcaaaaaaaaggaactatctggcttcatcctaagagtagttgcattttaaactctcagtcagcttcttttactgtaaaatgggaataataattaacagtctaaattcctaaagtgattatgaaggctgaacaggtgatgcctgttcctcaggcccctcccttggggccccttcagccccatgtgtcccaggctaatctcaaactcctgggctcaagtgatctgcctactttggcctcccgaagtgttgggattacagacacgagccaccactcccagccaggttgctattaaattttacctttttatccaggagcgtgggtcatcatttctttcaaataatgcttctatttatgagatttttctttgtagaaaatgtgggaaatgttaagagtataaggaagaaaataagtcgtgttaacgcaattgctgcatttttctttttttctttgcatatttcttttaaacttgagatcatgtaatgtcaacaagtttattggatttttctcctaatgtagtattagtatttccatgtgttgtaaagagcaagcttttaggtatcatttttaatgcaatataatgttgtaacatcctattgcaatgacagcttgtctttctcccaattttatctgcactattaggtattaagaatatttaatgtggccgggcatgaaggctcctgcctgtaatcccagcactttgggaggccgaggtgggtggaacacttgaggtcaggagttcgagaccagcttgggcaacatggtgaaaccgcatctccactcaaaatacaaaaattagctgggtgtggtgatgcatgcctctaatcccagctactcggaaggctaaggctggaaaatcatttgaacccaggaggtggaggttgcagtgagtcgagatcatgcactgcacttcagcctgggtaacagagccaaacactagctaaaaa

SEQ ID NO: 131649 - DNA, 1050 bp, Homo sapiens
tagcctctggtcccctggcagccaactgctcctctggttcaccccctggggctccctgtataggggagccatcagcctgactgagcagccctgaggctggagtttttggcttcctcctaaccagcccccttcacggtccaggagcctcccagcacagaagggagaatctgtgcagcttgttccttatcctcctttgaaccaaggcctgttccaagaactccagggcctctctgcttgcacgtcagggttgagctgctcccccaggccccatgcacggagttggcagctccctggaaaaatttccttccccctttctttctggcaaatacgatggattccctgcatggccccagaccatgagtcttgagttgagttctgcaggagcatcttgctgggtggcttcagcaggggcaggggtggaaagcctgaagtcctcctctgtcctgaaagcctttgatcttcattctggcccgaagcccctgtgccgtatttccctcagcaccgttgtaacatctggtgagccaggctgttagggccaagtgcctgctctttggagggcatctagttcaatgtgagcatttttttctacccagcgaccaattctggaaacatcaaagtgtttatgagcctactttttgtttctccattcaaaatgaaaatagctttattgatcccatggtgaggggtgggcagggtgtgtatcttcttgctgctgggatgttctactttgttggacagaaggctatgtgctttctggcaggttacacctgggtacatttcagtcaagccgagctggctctctcctcatttcattctcaaagtagatctcttgctaagggcttcttactgagtgtctagttccttgttgtacaggtgagggaaactgaggcccagagtggatgtgacgtttccgaaggagaggctctgtaaagttctgagtaggtgagacttattattagctgcaaataacaacaacaataattagaagaagaagcatcttctgccctaaatcatggggcttttatttttcagctggatggtgaagcttag

SEQ ID NO: 131650 - DNA, 2047 bp, Homo sapiens
attgcctaacgccgcatttctcagaatgtatctctacccttaagcaacgtgtgactgtcctattatcatcaccccattttacagatgaaggagctgtggcaagaaattgactaacttggcccaaggtcacccatataataaaaggcgggctgggtgcagtggctcgtgcctgtaattccagcactttgggagtccaaggggaataggatcacttcaggagaggagtttgagaccagcctgggcaacagagggagaccctacctctaccaaaattataaaaaaattagccgggcatggtggcatagacttgtggtcccagctgcccagaaggctgaagtggaaggatggcttgagcctgggaggtcaagcctgcagtgagccgtgattgtgccactgcactccagcctgggtgagagagtgagatcctatctcaaaaataaaaaataaaaaaaaaatgaaaaaaaaaataaaaaaaaataaataaaataattaaaaaaagagctgggacttgaagccagataataaggcaggcagagggcatacgaaacacccagatgggtcatgagcccgtgcatcagtcagggtctaatggctcagctgaggaagggaggtttaaggaagagactgtggacagaggtgttagggaaggtgtcagagaaggttaaggagccaacatggatcatgggggtggtacagtgttgccagggctggggaggattggctgcagtgtggggtacccagccgctgccatgtggagagggacctgtcactcctgctgtgaactctcccttcttctgccctctgacctcctgctggtgcctcccattggctaaacacagttgatggccagtgcactggggagctgttcttggagcccacaggcatctgcttcttggcacagagcagacaatggattgagtcgggagggaggggaactagagaatacccaagtcccaatggctggagaggagtgagcaggtaaagggggtagaaggtgaagtcagagaggccggggtccacactacacagggcctttggctttcttcggaaggagcaggaagccagtggagggtttgagcagatgtgtgcatcacggccactgccatcaggagaacgtctttctctatgctaggtgtgaacagtcaccccttcctctccctttctcaggatgagtgctgaggaggaaaaggccctttcctccaatgtcttcagaggagacgtctgcccagtccagactacgtgcctcatgccagccagcctgtaaatgacaggaaagagaaaggagcagtgtctcaaaagaggatattctggaacgtttgataatcagagcccattgtaaagtcatgttttgagttacagcatttaaatctttgttccagtggaaaacttttacaggccgtcctgggcaaggcttgaatcctgtttggatctccaaaggccttaaaatagtgtgggatgccgggagactggctccaaaagggaggagacctgtgctggcagccctggccacaccttggtgggaccggctcctggccttggggaccctgccactctcctagctgtgcttccgcagagctggacacacaaaagctttcttgtctggatttgttcccctaagagggtggcaccgaactggtcctgcccatgcaggaagctggtcctgtccaaccagggaatgaaaagttggccagtatcttctcaggccacgctacagccaagtctcttttaatgagctggttctcttaggatgcccaggggagggagaacacacttgagtgggatggcgaatgaagaaggaagcggctgttcagacagcttccagttctgtcaggttctgctgctgtgaccaaggcaccaagtcatctggaaacccactgcaggcagcaacctctttttcacctttgtgtgccccaaagcttgctccgggaatcgatggtttgggaaacaatgcttgctgtctttgagtcctcagtcctgtaaaatggggaaagtatacatcagagggcatttgagagtaaggcaagaagcgcttggcatgtgcctggca

SEQ ID NO: 131651 - DNA, 1082 bp, Homo sapiens
ggagaaaccccatccctactaaaaatacaaaattagccgggcgtggtggcacatgcctgtaatcccagctacttgggaggctgaggcaggagaatcgcttgaacccgggaggcagaggttgcagtgagctgagatcgcgccattgcactccagcctgggcaacaagaccgaaactccgtctcagataaaaaacaaacaaacaaacaaaaaaggccaacaaatttgaccaatactcctcaaaactggaaaagctggtgaccaccacccctagtgctccaataaagggctgtgggaacagttgtgctcagggtggtactggtacagcctggcagaggacatgatgcttgcatagtgtggaaaggccctctgagatattgctgggccttaggggaggaggtccaggcctagagaggactgaagccctccccagggcatggtgtggaccacgctgaagggaggtggggttggagacacagctgggagtcagatcccaggggctctcctgtgtgatgctgaattgctgggaaggggatgccagctagtctctttctctgtgccaaccctgattggttgggtggctgctgagagccttatggtgccctggctcagtaggaagagtgtgtgttcatttagtgagtttgccaaagacaagggaagggggttagagagtaggtggcagataatgccggcctggggatcctggaggttttaggctggcagaccctggctgaggctgttttctgttcttttccttaggccttgggagacctttaccttttcagtgcctctaagacagggtcagagcagtttggtgacaaagtggaagtaaaccatgggtgaaaaacagctctggggaccctcataggcttccacttattgaggattaggcagaacttgcagcttggcccagctttcgaaacaaggtgttcccaggaggtggaaagactggttttcaatcagataaaggtaggatcctatgaaaaactcctagggccttgccgttcctatgaagtggtagctatcattcacactcctagttatgccatcgaggtaaaaagaggtggaataagaatcagggacac

SEQ ID NO: 131652 - DNA, 1191 bp, Homo sapiens
taggttctggacacacgttatgacatgttctgatgatctggcttagacagtggggccctcgaggtaggcccagaggacttggtcctcactgcctctgtggcgccttgcactgggtccagctgacgtggagagagactcaggaaacagtggctgagtgtgactttggctggcatagtggttgctgagagaacagacaaggttctctctcacgacatacagatttcagatcagggaaagtcccagctggcataagtttatcgagcatctcccatggacaagatcagctgtgggtggagccttgaagtacatggtagaaggacagcgagtcttcccaggccagggcttcaagtgaggagacaagatatagcctcccagagaattcctataatgcaatcgtgaaagaaccatacccagcaggaggccggggaaagtgactcctgcaactctaggaaggcttcctggaagaggtggaacgtgagcagcataggattttgagagaagaaatggaatgggctgagggagattctgctggtggaggttcaggttgacctaagggctggcagcagtggaggccccccacgagtgagtttgaggggcctctttagctcagtccagttgaggcagcagagcctttccataggggtgtggtgtgacctgaatgttgggcacgtggtcgtaactgagctttaaaagtgaatgagaggagccatgcgtgatggctcgagcctgtaatcccagcactttgggagatcaaagctgggggatcacctgaggtcaggagttcgagaccaacctgggcaacatggtgaaaccctgtctgtactaaaaatacaaaaatcagttgggtgtggtggtgggtgcctgtaatcccagctactcaggaggctgaggcaggagaatcgctccaacctgggaggcagagactgtaatgagccaagattgtgctgctctactctagcctgtctcaaaacaaaaaacaagaaacaaaaacaaaacaaaacaaaaaaacactgtctcaaaaaaaaaaagtgaataaagagagaagaaaggcggggcacgatgctttttaagtctacgagcatcttatagcattgtttacatcccagcttttcactgacccttcctttacccccgcccccatcccgtggcccttgctctgtcctgccctttctgtacggcgttttctcttcc

SEQ ID NO: 131653 - DNA, 1050 bp, Homo sapiens
gttcatagctcagttcatagttcatagcttagacctcccaagctcaagagattcttccacctcagcctcccacaggtgcacaccactatgcccagctaattttaaaatattttttgtacacatgaggtctcactatgttaccaggctggtctcaaactcctggcctcgggcaatcctggactccccagatgctggaattatgggttgagccatagcctgcagcaaactcttaaaacatgaggggaactatcttgttataaagttgcttttctttgactactggtgtggttggccagcttttcatgtttatggcttatttgtgtttgttaactggtcatttcctttggggtgttagcaatttttttctcattgatttgtaagatctgtcttgattaacttgtgaattttgcagatggtggaaccggggtgccccacagtaagtcccctttgttaggcatcctgtccctggattcgacacctccatttctatgggggacatttctttacaaatctgcatctgattgtgataccaaaccatgctttgcaagtgaatacaaggatctaccccattaatctgggcagttgctagttttatttatttatttatttatttatttatttatttatttatttatttttccgagaccgtgtcttgctctgtcacccaggctggagtgcagtggcatgatctcggctcactgcaacctccgcctcttgggttcaagcaattatcctgcttcagcctcccgagttgctgggattacaggtgtccgccactgcgccagctaattttttgcatttttagtagagatggggtttcactatgttggccaggctggtctcgaactcctgatctcatgatctttctgcctcagcctcccaaaatgctgggatgacaggcatgagccaccgtgcctggccagttgccagtttttaatgttctcaggtgagtggcatttgccaaggaacttctctcttcccttctgtcttcataaacaaaaaatcctactaacttcaggtgtcagtttaaaagtcatctcttctgggagc

SEQ ID NO: 131654 - DNA, 1889 bp, Homo sapiens
ggatggtctcgatctcctgacctcgtgatccgcccgcctcagcctcccaaagtgctgggattccaggcatgagtcactgcgcccagccaggatatttctaacacagagaaattctcagtggaggccgcgggaactagagatagaggtcctcttgcctaccaaagcaccagatggaggtgacagaggccatcttgtcctagagggacctggctaagaggatctaagaccagaactagtctgagtgcttgggattcatatggggctgtagacggcaggcctgcttgaacaccagtgttccaatcccacatctcattcttagagctgtgtggccctgggcgagtctcttgccactatttcttcatcctgaagtgggcaccacattactgcacctcaatttggacgaggattctcaggatggggaggtggttgaaatcatccaggggtcactggaatcaggatggtcctggctttttcagaaggacaaggtggtaggtgccaatctgggggctttgcagatattgaacggcagcctgaggatggggataaacctgggtgtggcagacagaattatgcttcccccaaagaggttcacatcctgatctctggaacatggggatgtcatatgccatacagagaagggaaattaaagtcacaggtggaattaaagctgaccttaaaagagggagatccttttagattatccagagggcccagtctcatcacagagtccttacaagtgggcgagagaggcagaagaagggttcagaaacatgtgaggtgacaagtaacattgctggctttgaggatggaggaaggagccatgagacaaggaataaccgtccctagaagttggaaaaggcaaggaaataggaactcccccagagcctccaggaaggaacacagtcctgctaacactcagtgagacccactttgaactttgtatgttcagaactgtatcataataaatgtgggtggatttaagcctctgagtttgtactagtttgttccggcagccctaggaagtgaatgcaatgggcgcagcatttgatggccagcctggcatccagcctgtggggagtgggagctgagggcagtccaagggaaatgtcctttgagtgtggcaccggcaggcaaacccttgtttgggtgtgatcatcagtgagttgggccactgaagctgcctggtgacctggcagggatggcttaagtaggcagggtttgcagatcagcgagataaaggggcttgcataaattcacatgcccatggcttctccctctgacagcgcagccctgcctccggctgcctggccaggatggcgtgttggtgcattagggaccccttcctctcctgccctgctgtttaaattgttggtctgttggcgttctcaggagccctttaccagtacccttaggccccagacgacctactcctcaagctgatcatatctgctggctgtgtccctgctctgggcccagcaccctcatggttttccataacacgtatcccaactcctgctgatgggaccctcgtgagctgtctgtgtagggagcatggctgcccctgggtctgctttcctgcccctgacccacaggaataggatgtggcagagtgggggccagatgacagagatgctggtgctctctgagctgaggcccactgctgacctgctggtggcttgtcctgctcttggatcataggcactgggacatcctgccttccttcagtgtcccctcccactccctctccttcagcatcagaggaatgaaggaggcctggaggagtagcccctatctaatagagacaggagtgggctgggtgagcatggggtggtcgcagggggaaggggataggagatggagagaggaacctgctatctggtgggttccag

SEQ ID NO: 131655 - DNA, 2150 bp, Homo sapiens
taatattgactggaggcttaggggtctggttcagggtggactcaacaattttgcaagttctatattgttaaaattacaatgaattatttataagcagttgttagtaaatcatgaagttggcattattattctttatttatttatttattttgagatggagtctcgctctgttgcccaggctgaagcgcaatggcatgagttcggctcactgcaacctccacctcccaggttccagtgattctcctgcctcagcctcctgagtagctgggattacaggcatgcaccaccacacccggctaatttttgtatttttagtagagatggagtttcatcatgttgcccaggctggtctcgaactcctgacctcaggtgatgcacccacctcctcctctcaaagtgctgggattacaggtgtgagccaccacgcttggcctattttttattattaaaaaacaaaatgatgctgatgctttcaaatatgtattgcagtcttattacttagtattgagctttgcagtgttggactaatatcacaagtcgaagggacaaagaagatggtagacaataccaactgtttcccattaggctctttccctcctcttgtttttctgagaccttaagggcctggttgtttctactgttccctgctacttcataacctgcaagcttgagaatgtttgtcatttacaaattttaccttatagtagaagaacatagtaaataattgtaccagattgagtagtgtccccccaaaattcatgcctgtatgaacttcagaacatggcattatttggacatagggtttttgtttttgtttttgttttgagatggagtctcgctctgtcactcaggaaggagtgcagtggcgtgatctcggcttactgcaacctctgcctcctgggttcaagctattctcctgcctcagccgtccgagtagctgagattacaggcacccgccaccaggcttggctattttttgtacttttagtagagacagggtgtcaccatgttggccaggctggtctcgaactcctgaccttcagtgatcctcctgtctcggcttcccaaagtgttggggttacaggcacgagccactgtgcctggtggacattgggtctttttagatgtcattacttaagatgatatcatattggattagggtgggggctaaagccaatgacccatgtcctcagaggagaagagagggacataggaaagaaggatttgtagagatacagggagaaggccatgtgaccacagaggcagagattagagtgacacagctacaagccaaggagctccaaggattgcaggaagccaccagatgccagaaagaggcaaggaaggatctttcatggagccttcagagggagcacagtcccgctgacaccttgatcttggacatctagtccccagaactgtgagagagtgcatctgctgatgtaagccacccagtttgtagcaatttgttatggctgccctcagaaactaagacagtagccaacacagaaccaaataccctttggggattgagggaagtggagcgggagaatgagcggcactccctccctttacataggactacttggtaaatatttactgaatgaaggaaagctgaagtatctgtagaactggccatttcattctgcatttagagctctgggagctcttgaaatgtctagacaaacatcctcttcagctagaggaagctccttctcccacttactagctatgagatcttgggcagatggcttaacatttctgggcctcagtgaccttacttgcaaagttgtctgggtcaaggcaatgattaaatgcgatgatgcatgtaaagccccagcatgcagcctgaaaatgtgagcccttattatttatactgtttgccaaagtggtgagtagtgttgctgaatatgccgtgtgtcctattaactctgtgacggccacagtcacgtctcctttctgcctcctcctcctcctcctctctgtccagtgactagggagggcaggaagttcagagggtgaaatgctgaattaattcctgtcctcctggtctatattccagatcaccctgtgggtgggttgaaaaccatgccctgtctacctcctctgcaaggaaaaaataaagacagagagcaaatctaaaacacgca

SEQ ID NO: 131656 - DNA, 3337 bp, Homo sapiens
tccttccctctctctctttctttctttcttctttttttttttgagatagagtctcattctgtggcccaggctggaatgcagtggtgtgatcttggctcactgcaacctccgtctccttggtttaagcgattctcattcctcggcctcccaaatagctggaattacaggcatgcaccaccacacccagctaatttttgtatttttagtagagacagggtttcaccatgttggccaggctggtcttgaattcctggcctcaagggatccaccagcctcggcatcacaaagtgctaggattacaggcgtgagccaccgcgcccagcctcaaacccttttcctgtgattttttttttttttttttaaagctgtgtgaccttgtggaagttgcttcacttctctgggcctcaaatttctcatctctaaagtcggttaacaataatctacaactcatagttttttgtgaggatgaaatgagggtttcatacatgcagaaagcctggaagtaagttttagctgtggccattctgggcaggaatccctcactaggtaacttagagcggcggatcagggcacagacttgggagacagactgtctagcttcagatttaggcttcttactagtctgaagtagaatggttgtttgttcctccactgcttcatctggaaaacaggggcaggcatcccagggtgtttgagagatcatatcagatggagaggccagagtttttagccgatacatcatagacattccccaaaggacagttattgttatcattgggtggatggggaatattgagcctccagccctaggcattgtggatcaatttgttcttcagttatctttggaataatttaaatacactggattgggaagacaaagctatcaccctcctgatgggagagtgctgggtacctagcaggtgctcagtagttagtgaatgaatgagtaagaacagaacaggtcctaggccctgccctgaagaggctcacagtgcaggacaaggcctggagtcaggccagggttttgtggttgtctttaaaaagaaacaaaacaaagaactacttcctaccagctgaccctaaacccctcagctccctgcagggacctctcagccctgcaggggagcccaggctatgtgccaggcctggccttgctgtcagctttctaagccagtcacaaacattctcctctcaactttataatggatgccccccagcctcctctcccctctcagggtgctcctgaggctatgagcagctggcagttccctgtctgagaggtccttcgtaccgcaggagaggcagctctcacctgaaggcctccctggacaccggtctcaactttgtgtgttaccagttatggagaattatttttagtgagttacactctgttagggccaaacacaaggaggaaagagtgactgaatactgctctgagtcagtgactgtgacaagactgtttttttcttcttccctgttgcaggcctgatcttttggccagaaggagattaaaaagatgcccctcaagatggctgtgcctgtcagctgcatggagcttcgttcaagtattttctgagcctgatggatttacagtgatcttcagtggtctggggaataacgctggtggaaccatgcactggaatgacacacgcccggcacatttcaggatactaaaagtggttttaagggaggctgtggctgaatgcctcatggattcttacagcttggatgtccatgggggacgaaggactgcagctggctgagagggttgagatctctgtttacttagatctctgccaacttcctttgggtctccctatggaatgtaagaccccgactcttcctggtgaagcatctgatgcacgttccatccggcgctcagctgggcttgaggtgaggctgtcctggctggtcacggagggttcactgggatgtggctggtgttctcaacgaggtggcatttaatgagcaccctctgtgtggttggcgtgatgctgggtgcctgggggagacagatggaactaaagaggtccttcctggaagccgttactgttccctgccctgacgtgtgttattgtacctgtcaccattttctgatgttcccagtttacgtatctgtcaccatctacctccctataaagtgcctctgctgttggttctgtgtccttaagacattgtgtggcatttggcacagtctctcatgctgcagaaagggtaaattaagacaggattgttaatgaatgaagacatgggagattcaatggaaagatatgcatggggggataatttcttggctctgtgctcagagctaggaacaacataaggccatatggctggtgctgtgagggttgtatgtgggcagatgcatgtggaggcagacaggcctgggtatgactctttaacacatacacactgcatgcctccaggcagactgatggattcctttccctgcagtgaagggttaagtattatcacacgtcacaggactggaattgaagatcgccaagtagacattgaaatgctgaccacatgacagacactcagcatgtggtgggtgatgttggctgggggtagcttttggggatggtggacatttcttggccctgatctttctgagcagagccagggaggcagtgctggactctgacctgggcacagctggttggcgtggacagttgattaaaggtcacagtttccctgcagcccatgggaaggcagagtgacaagtcagtggcagatgaggaaatggagtctcatgccagctggagggagggagcagctgggttggccacaaaggcctgttgcagttctgcagctgacaagtggaaggactggcctctcaggtccaggcctggtggcctgggaggctgctagctctgagcgatgagtggtgccaaggtgcctgaaggagagttgcagctcaaacagcaagtggtccagctctcagaccacttgaggccacctggcatgtggcggccaagaccacagttggggcggggccttgagtctgattttgattggattcctagttcggctcatgcctgacagcactttctcagacaggcttccctgacctcctaaggtaaataatgtccctctgggtgttacatgctgttctcacccatagctcttagatgtgttctaattgtatattcatatgtgcaatttactgggtttcctgtctttctctcacactagaaagtaatctttctgagttgaggaaatgcatttgccttgcacacaggctagacacatacatagtaggcattttatttgttgcatcacagttgccttgatcaaatatggtgactctccgtggttttctcttggtttcttt

SEQ ID NO: 131657 - DNA, 1235 bp, Homo sapiens
acactcttttcttgagtatatatatgacttagcccagcaatcccactaggagagcaatggtttatccattatacagttgagcgcctggaggctctgaggggccatgtaccttccccaaggttatttatccaggagaagacagagccagaagctgagaactgcctcgtgttttataccaaacaaggccccttcagctgaagacttttccttgcggtcttgggaagggtgtgtgtgacggtgagctgcagcaggtgctgggctgtgcttgactgtggtcacgtaggggcaggcagaggagccatttcggggggctgctgagggtctggagagaggctcacagtggtgagcaaagaggttctgggatgggaggggatcagttgggaaagacagaggcagatactccccactcctttgtgccttcccagtcctctctcaccccttcctgccctctccccacaccctatcgtggtggcagctgtgcctcacttatcacatggtccatagctctgttttttccccttttatcagttactgcctagaacaacccaattgtggtggtctgggttatctcccactcttcacagtagggccagagtgggctcagacaccaaaggacacagaatggttatggcaatgaataagattccttctctgtgtcagcaaggatgctgatgtagtaataatctccatttattaagccatgctgtctacagggcacatagcacatgtttttccattcaaacctcaaaacagagctatgagatgcgcaccattatgatgattatctgttttactgttttttgttttgttttgtttttgttgttttttttgagactgagtcttactctatcatccaggctggagtgcagtggcgcaatctcggctcactgcaacctccacctccttggttcaagtgattcttgtgcgtcagcctcccaagtagctgggactacaggcgtgcgccaccatgcctggctaatttttgttggccaggctggtcttgaactcctgacttcaagtgatctgcctgcctcggcctcctaaagagctgcgattacaagcgtgacccaccttgcccggtctgttttactgttgaagtaactggagcacccagagggaaatcaagtgtccctagagaatacaagcagcatttggacagccctgtctgactccaaagccactgcacaacattgcctggagctgagagatgcacattctcccttcttggccactgg

SEQ ID NO: 131658 - DNA, 2319 bp, Homo sapiens
tatcacttactctgggatgacaggtgtatacgaggatgtagctgggcaagccaggcctagtggctcgcacactcatcagttagatggtgggtgctggtgctgctggtgcatcatgcatacaaggctggctctcccagttttccctggacttttgcctgaacagtttgcatttctactcgtggtgcaggagcttgctgttctgatttcatgtcacaagcctgctttcagccacttagaagagccctgttatccctgactgccgctacagcagtcccaacctgtgttgttttcacttgatgggctcctggaattattgacagcacactctctagtcgtacgggctgccctgccacctacactgacatcctggccaggttcctggagatggcctggcatcttggacctgttccccacggggtgcctggagcctctgatggtctacccagggtggcaatgagggaaaggctgtgacttgatcatctccaggggttcttcggtgaacagcccaaggttgcttaacagctggtgtgtatgaatacctggaatgtgccagttcaccttctaatctggcaaggagaatgtgtctcctccttatgcatatgaacaaactgaggttcagtgagatccagaaagctgccacggttactgatggagagagcagagaagctggtgtttgcagtcccatctgtcagccttgacacccctactcctgtccagccagtgttttccaaagcgtgctgatgagcaatgcaagatgatttcatgttatagataagaataaaaaaattgttttgtgtttaactcaaattagaaaaaggcaacaattggtatgtgcgacctgtggttttgcagatgatactgcttaggatgttggtacttaagaaaaggtcaacttttcaaaaatactattagtgacatgtggacctagtcctcctgaagaggactacattggggcaccggtaattgtttctatttgcggtactctggctgtgtggctctggccacgccactggaggcagtgtctgagcctgtgacttgagtagtagctctgtgtcatgtctgctgattctccccaaatcctgaagattcatgatgaagtgactggccggcttggtctgaagctagattgaaaacaataaggatcccagaacgatagcactttacaatcctataatttggctcaaattgcctgcagttactatctcagccctgcctgttatgttcattgagcacccaaagtttttcagtcaattcctgagttaattattctctgggattgaattatgaaatagtaaatatttccactatgcaatcaattggtgacttattcatgtattcatttcattcatttagtctcaataaattgaagataagggctgagcacagtggctcacacatgtaatcccagcactttgggaggccgaggtgggcagatcacctgaggtcaggagttcaagaccagcctaaccaacatagcgaaaccccatcactactaaaaatagaaaaattagctgggtgtggtggcatgcgcctgtaatcccagctactcaggaggctgaggcaggagaatcatttgaatctgggaggcggaggttgcagtgagccgagattgcaccactgcactccagcctgcgtgacaaactgagactccatctcccaaataaataaataaataaataaaagataatattacctaccccatgagtttattatgagaattaaataagagaacatattaaaaggtttcattcagtgccaggcatataatatgtactcagggaatactagttttttttaaataaaattttaaaatgggattagaaggtcaaagcatataggcataaaggtataaaaaatattgaagatgagtgagttactaaaatttaacattacgtttagctctgagcttcctaattagcacaacatgctaagtaggttatatttgtatctaaagtaaagattggcaaactttttatatcaagggttaggtgacaaatgttttcagctttgcaggccacacagctctgtactgcttgtcagttctgcctttgtatctggaaagtagccatagataatatgtaaatgagtgggtgtggctgtgtgccaataaaactttatttacaagaactggcaataggcctttaggctgtagtttgtccttggcctaaataaaggaaacatgtttgtctttcaaaggcagaaactcctcctggatcataaacattgaaaaaaaaattgttacaagatgcaatatttctgtgagacttgttaagcagtatatgcgcagtgctttcattaggattttacagaaaacttaga

SEQ ID NO: 131659 - DNA, 1050 bp, Homo sapiens
gagaccagactgaggcagtgaagtcaccataattgatgggccacactagactggagccaaccatggcccattgctgagactctgggcctcagggtggccttggctggaacctgtattccagtggccctggtggctctcttccctctcaccttcccaggaggcagattatttccctgtggtgggggtgaggcggtggcgtgggggcttcttccctctctctctgtcttgtagccttgttaaaatagtggccacacgctgatagctggatttccagtgcagttgctggggatgggggtctttccctctcatctgtctgtcaccctttatcactccacaaggggtgggggtactggacagaaagagtgtgtcccacctgattactgggaagtgcaatggacacccccaccccccgttgacttatctggctccaaccgaagaacagctgttggtggtcaggtctctgagtcactcagtagcttgggactgggttcagtgggagatgatggcataaacaaataaacactggctggcccccagctctcagctttctgctcactggggggccccagaagcttcctgttgcgtctgcagggaaaataaggatacccataatgaaaatagttttcctgatggagaaatgctctggggaggttgttgaggcatgttagaaaatccctgaggctttctggctctgtgagctaagggaggacacttggcctctctgggctttcgcttgctcctttgggaagcctgttattgtgaaagtgagatgatctgggaggtaaaactggccagttgtccatctcccctctctgaacatgatgcatagtaagccctgaatctcatttaaatttggaagtcagactgactttgtgactgtcctagtttccggctgttgagtcagctcaggcagttcttgggacttctgtgagtctctggctccccgtctctcaatggggtgacagtcctcgtcttgtgcccctcacgcgcttgttgagatgacagatgagtcacctctgggaaactgcctgagagctggatgacaccact

SEQ ID NO: 131660 - DNA, 1486 bp, Homo sapiens
cctggatcattgtctttaaagaaatttaaaaaaaaaaatagataaatgggaagtctatgagccttgtctcccattccccatccttctcttcatacaagtacctctcctgaacttggggtataacaggtcatgctcttacaatttcattacaaatctatttgaagatcactggtagcaccattttgtgtgtttttaaattcttaggtaggtgacataacgtataagatgtctgcactttcctcttttctcccggcgctatgctgggcagatgatgctactatgcttgttcattcattccctgggccacagagtcttgggttgtttccagaattttgcttttgtaaacaatgctgtcatgagcatcctagcacagggctgcaggtgcatgtctgggtgtgtcccaggagtacagggcacagagcatgcacatttgcagcctgactggaggttgccacatcactctccagttggcactatttcctaggttccttccctgagagcctgggaacttctggaaggcaggagtgggtggtgttcaccactatatacctctgccagtcagcatgccccacaccatgtaccagctcatgacacgcctgaatggggtgaattctggaaggggacaaggcaagtgccagggcaggtccagagtctgggtgtggaaggagcaacataatgggggccccttgcagaagcagcagaaagaacaaagaaataggggcctggagtgggggtgtgaatgaagacattgctgttgagaagatacttgtgaagaagccaacagcgttgtctgggcctggctggatatcatgaggctggacatggaggtcccaggcaccattgctgtgggcttttggggagttggatgcacagtggagagctgaggaggaagttgggcttgctgcagagggctgctggaggggctggctggagtctggctctggccctcactcactgagggttatccaagtgacccattgcaggaagaggggtgggggacccagagttactgtaaccactttatgagtctgtctcagccaggatctggggcttctagcaaagcccacagcacaggcacattttaggaaaggcaagattgagatgccctcggtggcccagaaggacacttcagggcagcagggctgtaaaggtcaggagggggaaacttctggaaggaagttgaatgttgtgggaaaaagctgacataaatgaacaaggaatgatttttttcttttcttttttttatttttctttttagagagacagtcttgatatgttgcctaggctggtctcaaacttttgaacttgagtgatcctcccaccttggcctcccaaagtgctggaattataggcatgaaccaccattgtacagccacaagggaagattaaacatagacagtttgagaagagtttttttttttttaaatttctaattttatatttaatagagatggagtctcactatgttgctcaggctagtcttaaa

SEQ ID NO: 131661 - DNA, 2837 bp, Homo sapiens
aggcaagttatttaacttctcttgacctcggtttccccatctgtaaaatggggctatactagttgctctgtgtaggaagggtctgaggtttcagtaagatacattttgcacaaaccccacacacaccaagtatccatgaagcctggttatccttataacctcagagcggtttggagagggttaggaacttgcagatggtcacataatcggtgtatggcagatcttgggcagagctggactggtcttcctaatgagagctcctttccccactctgctttcatggacagaccctaatgaccacctgggttatgtttttgtccctgtcaattcctttgtccttgctgataacctaagggaaccttgagagccagaacgagacaggaagaaaatgcctggctgctgcttgcggggttaattaaaccattcctggggtttcatttgctctctagttagcaccaaaataaatcctccaaatggctttgagccttccagttgacattgcattttgaattctgacagcaccagcattttacatcttcctgaggatgataaatgtttagatagcaccgaagataatggtaaaaggagaaactgggggtagttcaggctgtggctgagcagattgtaactctttggtgtgacgaatgggtgagaagttgcttaaaggacacatctgatgtcccctgctcctaggggttgagagggggatggggggtggactctgttttgccatccggagaatccattgccttcccgatgcttctggggtctcatgcttgagtcttgtttccatgcgttctgtcagatgttaaggtcttgtgcataatggttgaggtgtcaatgtgcaggcgttaatgtcaccattcttatgtaattgttaccctttattgagtgcctactatgtgccaggatttaaatatttctctcagcaacccaaagatgtaaatgtcatatcaccttcattttacagatgtgaaaacaggctcggagaggctgagacacccagccattaaggactcagctgggattcccagccttccctggcactctctcttttttttttttttttttctgttttgagacagagtcttgctctgtcagccaggctggagtgcagtggcacaatatcagctcacttcaacctccctctcccgggctcaagcaattctcctgtctcagcctcccgagtagctggatttgcaggcatgtgccaccgcacccggctaatttttatttttaattttttttggtagagacggggtttcaccatgttggccaggctagtcttgaactcctgacctcaggtaatctgccagcctcggcctcccaaagtgctgggattacaggtgtgagccaccatgcccggccttccctggcactcttgagcatgtttccagaccgcctgcttcctaccccagacatgtcaaaatgcggtgctgtaaatgacagggctctggtcccagatggacagcccgggccctttgaagacactctggccttcaggagtctggatctttatgcctgatggaactgacacgggcctgctatgtttacagtgcctgttctcctgcagggtctccggaagtcatcagccgtgctggccagcactccggaggatgacaggaaattctgctgcagctctgtgggctggctggggtgcatgctggacagggagcgggcggacagggctggtagggaggaaaacaccactgaaatagttcagaccgtattgtcagtgaattcctggattagtatgcagtgctgccaatgatcagatttgggtcaggaagcccagatggcagaaagattgtgttaaatctttatatttttccacgaaatcctcaccgtttcagaccctgttttctaagctatcaccctaataattgtggattttggatttccaaggcacgttttatagtggttgtaaggaggggatggttgggttggggattgggatgggaggggggtagctgaagaaataagaaagtgctgcagaaaggagcacattccacacccagcttcttcctgattgtgtttccctccaagcagcgaacaagaggctgattcaagtggctcagtggcctccctgcctggagttgggttcctatgccttccagtgactaaggaggaaattccatttcagttaatctgtggccgcgcatcacccatggcattctctatcttaattttatggctgcctcatctttttggaattcgccttctttttgtgtgttgggtgataagtcaaggagacatatggcacagctccacaaaatacaaccacattttagtattccgtacacagtcctttctgggcatcccaggctttgtattttcacgttggtcggccgtgaggagggtggatcttcattatctgtgcatgcatgtgcatcccttcatcccttcctcttcagtttcttttctttttttttcttttttctttctttctttttttttttgagatggaatcttgctctgtcacccaggctggagtacagtggcgtgatattgactcgctgcaacctccgcctcctgggttcaagcgattctcctgcctcagcctcctgagtagctgggattacagggttgtgccaccacgcccggctaatttttgtatttttagtaaagacggggtttcaccatattgaccaggctggtctcaaactcctgaccttgtgatccgcccacctcagcctcccaaagtgttgggattacaggcgtgagccaccacatccagcctcctgttcagtttcttaacccttgatgggactcccggctaaacacccccattgtctgggaccttgagattagatgcagtagcactgctggtttcatgg

SEQ ID NO: 131662 - DNA, 1527 bp, Homo sapiens
gattggttgcaaggtgctgggagtggggtgcagggaagggcctctgcacaccacgtccgtcctcatcctgctatgaggtcagctctgtacatgtgctggaagagcaattagcggggtgcctaagcagtgtccatcatggacgtgggtctctgctggccacgcaaggggaagatgggactggtgggaagattggggagatggaagcgggggcagttgtgtgcgaaaggtacagggtcgtggaaacatgcacaagaaagtgacattttagaaggtggtttttgttccataataaatttattagctttggaatctgactctattgccttggcttctccaaactttggtgtcctcatctgcaaactggggatcacaatctcagttttgcagggaatgtgaaatcctgacctgaaatgatcacatgtgtaggaagctgacaaagaatgctaattttcttccttcttttctttatggcctttccttggtaaatctctgtgtgattgataactcatgaagaacctaccagtcaaatcagttaaattaaatgacttcctaatgataataattagattagtaactaataatcatagctgacatttatctagtgcttattaacttctgggcagtgcgaatttggtctcatctgttaaataatttaattcctgtaataatcctaggaggatggtgctataattagccccattttacaaacaagaaaactggaggatcagagaggctaagtataatgtctaatgtcacactgctgaaagtggcttgctggtgttccagccccaacagtctggctccagagtttgtgctattaaccattatatcagtctgctgtgtgtgtgtgtgtttgtgtgtgtgtgtgtgtgtgagagagagagagagagagattgtgcattgtacggtgaagagcaatagaaatcattataaggcattcctgtgctacagtcttggtgggtcaggcttacttatagaagctgtgagaaggatggggctatgggctttaactcagttctgacaatctgtcactcccagaacctgaggcaggctggacctatagacttccacctcctcttcctcctgccctgaaccgtccagggactcagaggaggtcagacaggtgggactcccagaatagtgacctcctctgccacttgcagcctatgtcgggctcctcttatagagccacccccttgcttatgctgtagtgttcctttgttctggccatagttttcctgggcctgtgtcagttgagtgcgtccagatgcagctgggttgagactcaaagccctgaagataccgcaaggggagtgctcctgtgtgcagttgctctgacctgcacagcaggtcggagtggccgccggtccccggctgccagctgtttacctggccggccttgcaaaggctcttcagggccaggccccagccggtgaatcactgaaactgatccccgtggccactgtgaagtacgggactggaggtctccggaggagatggcagctctaataaaaacaggctgccaaa

SEQ ID NO: 131663 - DNA, 1093 bp, Homo sapiens
cctccacctcccgggttcaagcaattcttctgcctcagccttccaagtagctgggattacagacacctgccaccaggccagacgaattttttggatttttagtagaaatggggtttcaccatgttggccaggctggtcttgaactcctgacctcaggtaatccacctgccttcacctcccaaagtgttgggattacaggcgtgagccacgcccacccacccccttcacaccccaccttgtttttttctttttagtagagatggggttttaccgtgttggccaggctggtcttgaactcctgatctcaagtgatccgcttgcctcggcctcccaaagtgctgggattactggtgtgagccaccacgcttggcctcttccctcccttcttgctaactttgaagctcagctccttgtccaagagcctttctgtccaggtgttttcatggtgcctgtgccttctgctggtttggagtgagcggtttccacagcatcctcccatcagccatgcattcctcagggtcaggcgcaacatgctcttcatatctgctccctggcacttggccttcaaaccaggaattcactgcacctagcctgatccattgacctgggcccagtataggccctcccatgttgggaggccatggggtgttaaggttaatgctgggccacacatgactgtgatgagtccctttctctctgctgaagaacgtgtttccatgggggacaggggcagttaagcctgggttctgttgggcgctgctgcttgggtgggtccagtctgccccatgtggggtctgcattctatgccaagtgttggcaggttctgccaggtagagctcttcagtatggaagcacttccctgtgctcagcctctccccgactgtgcacatttccttctcttctgctggggaaatggaaaacagctgaccactgattccttgaaatcacctactcagacactccagggtctgtgtgggattaagtcgtccgcagtctttccctcccttaatctcttctaaccttcctcgaaagtgccgtttcccaccccattttaatcatgccctttgctctcgcctggacatctccaggggct

SEQ ID NO: 131664 - DNA, 1690 bp, Homo sapiens
tcctggagctgcaggctgtatgtgtgggaggtgcacagcagtggcttggccgccccaacgcgcctacagcccgctctggggacagccgtcttttggcagagtctgcctctgcagtggtggcagctggcccaggcagacctcctctctgtccggttagtcagcgtctggtggccaagggcagagtggagcctgtgtttccgacaggccagctgcccctcagagtgaggcagcgccgtgattctgagggtgatgctggcgttcgcccctcaaccctgtcccccacaaggagattacggacaaggcagcatttctaataagcagcctctgcttgccccgtagcagatgaaagactgcgtgtaagagtgggtaattttgggttttcctgatgaaagtagttgacatttgtgctgagacctcatgcgctctgcagcgctgcctttcatctctgctctcaaagccctgctcatctctgccatgactcgggggcggcctgcgccaccggaattcagttgggccagtggtgaaatatagaggaaatggtggaatgacccctgaaggcagtggatgggggagtggagacaagtcctgactttcctggtggaggggatgttcctgggggtgtggaactgtgtatcggcccatgcagcacagccagggaaagagtgtggatcttggagcttggtatggctggctagattggaaaggcagctcctccacggacttgctcggtgaatggagggcatcctttctcttccctgatctgtgtcctcatttgtcagtgggaataatagaataacattactaccaacgacgatggctttcacaactggaaccactaggccctcaggaatgtttactggcttctagtctcattgataaactgaagccattgtgccatagctctagagaactggcactaggggcttgcatgattcatctgagttccccagacaatgctggcacatagtaggccctccataaagtaagaagggacactttgctcctgacatccatacagctcctctagctttgcagagaaagccctagagagaaagaatgtgaaggaacaaagggtcaggttaggttgtgcaacctttctgatatgcatttgtaatgcagtgagcaaatgcacaagccttgagtcgctgcattcttttctaaccacccaagagataagttgaacccccactcgtagcaacctggccacttgtctgtttagtcagccctggaatacctccactgacggggcactcactaccactgaaagatggtgtgcagaattctaatgttcttcctctcgcggggtcgtgggggctttcttccagttctctgggttctgatcgttggggctgtcctgacacccttcttcagatgaccgctgtcaggttggtgaaggcagtgcgcgttgggccttccctccctagagatgtgattgcacgtcgggtaccaggagcctggccagccctcagcttctgctaaccagggagcagtgaagcccggtttacttttgttggcttgtttattttctaatgtcacctgcctctgcactttaagtagtatttgggctgttatggagtgtgcacattctaacacagcaccttgtcagctggctgagaagctgaaaattctcggcattcctccttgatgtcaattacttcaaggagcaggaaggtgacttcttttaacaagt

SEQ ID NO: 131665 - DNA, 2202 bp, Homo sapiens
aattctttatttctttttccaagatacccacccccccccccaccaaggagggctaggacaagtgacaaaagtcaccccagatcacagccaaatgggtagagctaggaatccgaagtaggtgatgaagcttgatttttcaagatgctgcaacccctctcccccatatgctacattaaatatctggacctattttaagtgggttcttttctggggtaatgaggttctcttctgcctcagttttccatggctgcagagctcctgctgttccttctgcctagttcactcttctttgccttgactgcacctctctgagctaccttcctacctccatccttgcattcattaggggtttctttatgtgtccagctcactgtgggacccaggactccttgaagagggagatcttgctcatccatctgtgtcccccactctactgccaacacagtggtaggaagggaaggcggcaggcttaggcgaggtcctgcaggctggacaggatctgtcaccattacttagcccaggcccatctctttacttccagaccaactggtgtcaccataatgccttctggcaatttgaagattctggcaacctcttaccggatgcagctggcaggataatccctgtgcattagccactttcagaggtatctgggcccccaaaagagtcacgggagtcccagacatgaaggagcattagtggccatctccccaccttgctgtatcagcaaaactgctaagccctgacccatattttgggcagtgctcaccctatctcattttatcttactgtatatctcgtttgtatcattttattaggtatcttattttatctcattatatggtaatctcatttgctgggtagaccagtgaggagggctgggacaagtgactggaattgcccaaggtcacagacaagtgaggtttagagttaggactccgaagcaggtggcggagtcaccgttgagttcatcatagcgatgctggctgcctcaaagtactgttttagttaatgctcacaagcaactctgcgaagcagacgggccattcatttgtgcttcacagtgtgggaaactgagtcagagcaggttcatgtcacacagctgataaatgacaaagccagatgtgaagcctgtgagttggattccaacattcatctttgatgaagcgttcaggttggggcctggtgtgggacatgctcagaggaggacgaggaggatgatttgggggaggcctcagaaggcgttcctggtctgagtgtgctgctgtcactgccttggtttgggtccccgcttctgagcaggatcttctattggcagagggttcaatgcagtgggtgccatgaaggaagatgtctccccaacagcatcacagtctcagggactgttcacatcacattaaaagcgctgagactctggcttttggtgaaaacggctattttgtcttgttccacgggagctgggaagaggagactaaacacaggagcctccccctaacccaggggcacatggagaaggaggaaggcagcccatgctggggagcaaaagggagagaaggcgagggccagagccctgggaagtgtcagatcctggtgtgccgcgcttctcccaggttgtataatcagctgtcacttcagcatttccctgcatcagccttcccaagtacagattgaacattaaacaaacagtgacggctttataaatatttaactcccactgtttaggaattgctcggggcaggagacaaaataagagttcctggctgtctgctccatgccccctctggcatggtgttggaggccgggggtcagagatttggggagtggtgggcagcagctattctcttcttcctttccagggggatgtgtttggggacacatgtctgtgtgttcatggagctgttagggcctcttctagaagccaccagtttgcgttttcatacagtggctgggatccatcattgctggtgttattccttcacatcagagcaaacttcttcctttcttttttatatatagcagctttattgagatataattcacatataattcacctgaaactcacccatttaaggtatacaacacaattttttttgtttgtttgtttctttgagacagagtcttgctctgtgacccaggctggagtgcagtggtgccatcttggctcactgcaacctccgcctcccgggttcaggctattctgct

SEQ ID NO: 131666 - DNA, 1043 bp, Homo sapiens
cacgcccgactaattttttgtatttttagtggagatggggtttcgccgtgttagccaggatggtcttgatctcctgacctcgtgatccgcccacctcggcctcccaaagtgctgggattacaggtgtgaaccaccgcaccagaccccaacttttgtatttttagtagagatggggttttgccacgttgcccagactggtcttgaactcctggccttaagcgatccacccacctcggcctcccttagtgctgggattataggcaggagccacggtgctcggccaacacaattgttcttaatatattcatggagttgtgcaaccatcaccacaatcaatttgagagcattttgatcaccccaaaaagaaatcgtttttattagcagtcacctctttattcccacaattctctgcgtgctaagaaattgttgagctacttgtactacaaatatacctatcctggaatggtcttttgtgcctggcttctttcacttggtgtaatgttttcaaggtttatctgtgttgtagcatagatcagcatgtcatttctccttagggctgaatactgttccctagcacaagtatattgcatttttaaaaatctactcatctgttgatgaacatttggggacagcaaagctctagttgaaaaatcaagatgaaaaatcaaaaaaatatagttgaaaaaatcaaaaaaatctagttgaaaaatccagcatcatgtgattaaggccaaactcaacttcacaaaagagagcctctactattttgggaaagatctagaaggttatctgtaagcatatggtggatgttacaatgtgttcagtggacacgccattcagcttttattcagcacttaccatatggtgggcactatggtaggattcattaattaatttattgaaaataattattgagattatatagtcttgtgaaaagatttatcagaggctgttctgtgaattttagaggttttttgtttttgttttttttttgaaatggagttttacttttgttgcccaggctggagtgcagtggtgccatc

SEQ ID NO: 131667 - DNA, 1691 bp, Homo sapiens
gcccgtttctggtctcattgcttttgttcatgtactttcctcctgggttgctcttccttttctctctgacctgtcaaaaagccccattgtaagcaacatttaaatgctacctcttccatgaagcccttttggatgcctcttagggggatgagttctttccatcctagcactgcttgctgcatggtccaggatctgtggggcctgtcttctttaccactttgctcacttcatgaatgtgggggtgtatgaagagtatgatgaaattagaggctatgttctggagtcagactgatcagtactgggattctggccataccccctccttagctgggtgactttaggcaactgactgtaccatcctgaaagtcatctgtaagccgtgctgaccccccaaccacaggacacttgtgcccgctgcaggtgctctgtcagcagtgacttctcactacctggcatcctctgaattcacgagcagtttgaagaatgagcaaatactgagcaaagctcataggattaaatacacacagacctgtgtaagttaacaccaagctaagggttaaatactttacaaaaattctcagtgcggttggtgggtgagaagggctgtcgtcccctctggctgccttgccaagctggtagaggggccatctcccactacctactgacaaagattctttgcttgacccaattacccaatttaatcagacacttaagtcttttcctaggcccatctgtgtacttcctgtaaaatctagttttagcaaaaaactctgctgagtcagtttggtaaggaccaccggccgtcaatatcttccatatctgatagatagggttcctcatcttctaccaccctccagatgatgtctggtcaccctggcctgcctttagcaagaatcttgataggttgatttaaccagaatcccccttactcctgatgttgcctgttagtaattttctatcctctgacccccaccctgcttcttggctgtgaatttccacttgctcaggctgtattgagttgagccctatctttctcctacactgcaaattcccattgccgtggtccctatacctatcaggatggtcctgaattgtcttctttatcatctgctctgctctgccagagcttaagcccaggcagctgagttaaaagtgtgaccaaatggaccatcttgtccctgaaaattgggacctaagctcgattccgagatttaatcatggcagaggagtttactctgctaaccaccatcaccccaccctatcccccagaggggtgcggtgagtaagggggtggcaactggttgtttccaatctcccatctctctctggccctcctctgtctctggcctcccttctccctttgaaagggacacagtgctgctcacagcctgtcctgctgcggtggctgcagagaggggctgagaataagcctgtgtccgaggcagccctccaaatacagcagggctgggttgacctttaaatagatgggctctgggccactcagttcctggaagtttgaagaaagtcagcctttcaagtgatgcgacttccaacctcaggaaagatcgctgtgtttgtaaagggtataatttactgttgcttttgcacttcatgatatgcggctgcacagccagtgggagccagcatgccagaattaggaggggaaaatcctcaagtattttaatataccc

SEQ ID NO: 131668 - DNA, 1187 bp, Homo sapiens
ttttgagacagggtcttgctctgtcacccaggctggagttcagtggtgccgtcactgcagcctcaacctcccaggctcaagggatcctccccttcagcgtccctagtagctgggactacaggtgcgctccaccacacccagctagtttttgaatttttttgtagtgatggggtttcactatgttgcccacgctggtctcaaactcctgggctcaagccatctgcctaccttagcctcataaagtgctggaattgcaggtgtgagccactgcacctggccaagaacttggtgtttcttatttccaagcttatctcctctgttatttgctcccagggagaccccttttccatttatgtttccagggtgctggggggaagtgattgccctcatctcttttgcccagccaccaaacccagtgcagactctgctgaatgcaggccccatctctgtattttacttattccatttcctgtcttgaaggtgggggcactatgtttatctctaggaccctgactggctcatcattgaaagcttattttgtgcaaagcattgttctgagcactgtgtgtgtatgattctacttcatcctctgtaaccctagcagtccggtcaaatagtatcattttatagacaaggcaactgaggcacagagcagctcagcagcttgcccagatcacacagctggaaagtggtagagctggaatctggatgggtgctggcagcctggcctcagagtcggtgctaaccactgagcggcactgccacccaacggatgggagcctgcaggatgaggccatgggaattgatttcactcagcgcgagccaagcagaactcccgtccagacctctgtccaccaccctaataaagccagtgtttacacaggctggaggtgctcatcagatgtttttgccaatccccaaatacggccagggccagaaagtgagaggggtgcctattatgtaaggccctgcggctggtccccagacaatgccacttcctcgcttggcgctgtgtgactgcataacaacgggttactcatttcctctggaaaacttcacagggcctctttgccccatttcctcctcccaccccatcctcaggcttcctctgttgaattttctccagattcctgggaacaccaccatggagggcctggcctttggcggtggacagtctgtggctgggt

SEQ ID NO: 131669 - DNA, 1149 bp, Homo sapiens
cagtgggtggtgtggcccaaagattgagaatcttgtcaggggtggccacgtgagggtggaagtggtttgaatgaggaatggtcttgaggtaagagttggacaaacagtgtcttctctctctctctcttttttttttttttttttttttttacttttttttgagatggagttttgctctttttgcccaggccagagtgcaatggcgcgatcttggctcaccacaacctccgcgtcccaggttcaagtgattctcttgcctcagcctcccgagtagctgggattacagacatgcaccacccacgcccggctaattttgtatttttaggagagatggggtttctccatgttggtcgggctggtctccaactcccgacctcaggtgttctgcctgccttggcctcccaaagtgctgggattataggcgtgagccaccccacctggtcgacagtgtcttctctaagcagaactgtagccctgaagcgcccaggctagaactctctattgaatgaggatcactccattgtgccagctgctctcatattgctttgatggcctttctcagaaaggagaaaggtggtgctgggtgtggctttggcttcctatggccgccccaatgctggtctgacactttctgaatctggtttgtggttggatctgtgcatcctaccgctccactccatgtcctggccttggagaaatcatttccctcccgccgtgattgttcaccttcaaaggtcaacaaaggcagtaggcactgctgagctcttgcagccttcagggctgagctgcttcctctcctgcttccagtgaggggttgcttgagggtgcctttaggaaggaacctcacccctaatgtaacttgagcaggtctttgctctaaactcttcgctgggaacataccctcccgtgggacttggcatggcacccacctctgcagagccacctgtgccacagaataacctcttctccctagacacactgtgtgtccttggttggattctctagatgggagggaccggctgaagcataactgtgtatgttcacatatgtgccttggaagagttttatacaggaaaggatttgtaaatcagaaaaatgaatgctggtatctaatttcctgtccccgttttaagtccagaccaagtcacc

SEQ ID NO: 131670 - DNA, 1055 bp, Homo sapiens
cgtgtggcggaatgcatgctcacacagggaagttggttgagcgtctcctttgagcagtccttcctctggtgaggtgcacaggcgggcatcatgcccatttcatagatgaggaaactgaggctgagagggatgctgcaatttaggacttctgggtgatatcacagaagcctcattctcttttgtggcatgtaccttctctatttgggaagttaaattggactatggggattggaccaaggggtcttcttgcttccgctttctctaggccaaggctttgcagttatggaggaagaaagagctggggtctgtcttggcaaccctgtgactcttctcccctatcctcacctgccttctcacttgaccaacatattttaagggctccatgtacaaaggtggggctgtggccctttcccaaccagcaccttggccctgtaccctgatatgggatggttaaggcacacaggcttcatggatgggggcctacgaccgcagatggagcagaggtggacagggtatggtccggcaggtggaggtgctggagaaaagccgcgttaggcagcacgggagccaggtgcggggtctctcaaagcctcgagtccctggcagtgctgtgctctgtgaggactgcttttgactgcagggcactgacactcataccttttgcttctgcagctgaccatactccctggagccttctcccgaggtgcgcgggtgaccttggcacatacagccatcatgatggtactttaagtggaggctgaatcatctcccctttgagctgcttggcacgtggctcccttggtgttccccttttactgccaggacactgagatttggagaggtaagtggcttacctgaggccatgtgctaacagagaagatgaagagatgattgaaacaggcctaagaccagacctaagggtctgtacattttccacatactttccatatctttagaggcctgaccaaagcagatcttttcctttcttctaggtaagtccaaaggcacctgcctgctgggcccactgttttctaactttcctaactttctgatcc

SEQ ID NO: 131671 - DNA, 1061 bp, Homo sapiens
tcattctggatgttggcagaatttgtttccttgaggttgtagggctgagatcccgttttcttgctggctgtccagatgcattgagcttctggaagcctcctcgctaggcttgtggcctcctctctccattttcaagtccagcaatggtgggtccagttccttttaggatttaaatcttttctccctctttcttttcacctctgtgatctcagctagaaaagattatctaattttaaggattcatgtgattggactggggccaccctgataatccagaataatccctacttcaaggtccttaggtttaatcacatctaggaagttctattgccatgggaggcaacatattcacaggttccaggaaattccgacatgggcatctctttgattggaatgaggggtggcaggtattctgacacagtacctcagaagggttgctgtgatgatgaagtgaatggagacacgtaaagcgcttaaaatattatgtagagccatgtgaatttggcagcattgaattgttgacctataaaaggtcaacttaatagtatctggtctatagtaaatcttcagtaaatgtttgctgtcattactctagtggtagaaatgtcatgctttatttagccagtttgctattgttgggcattactttttaaagagttattattttgttattatagtatatatgtgaacaccgtgatcatcatgcctttgcaaattttattctgatttagggcaatgcatgtctttccaggccacactcagtctcctgctctggtgccagtgtctctgtggcctgaggggcccctctttcttgcagagcccctcatccagcaccagctcagctctgggccatgtgtgtggggtgggacttttctcttttgggaagtgggccatgcctctccttcctgagaccatcccctttggcttcctcggggcccttggctctttgaaccagcctgcagggcaccacacctgtgggcccatttttgtcaggaaacgactcccttcccaagggcaccctgagtcccaggtccccaggcccacagatgttgggccctcag

SEQ ID NO: 131672 - DNA, 1086 bp, Homo sapiens
actgtgattattattccttaggatttgagaaataaaatctgaggagggagcaggacctgcctcagggcctcctctccaagttgagtgacccatcttcccaggtctccttttgttctgtcttgagcctctctcctgaggtcctgaaagaagagaatgtgctgttgtagggggcctggaaatgtcccatggaccatctcgtgactcagtaagatgatgtgtgtcctctggggacagaaggaggtcctgcacagagtgttcctgcccgttgatgccctccccagatcctaacgcgaagtctgacacatagtagcctcccggtaatcttaataagcaaaaggacacatttctcaagtgatcttagcaccatttcatgcaatcaattccagcccagccctttattctggccagccctggtgggtccattagctgcaaaaattagtcgtgctcagttttaatgcaaatgactaagtattactttattgaattgattaataaagaagctctctttgtatgatatcaagaccatgaagaaattgcaaagacataggtagggtctacagcagagtttctcagccttggcgctgttcatattttgggtcagatgatttgttgtgggggctgtcctatgtattgtaggatgttgctcggcatctctggcctctacccactggatgccagtagctctgtcagtcgcaaccccagcttccagttgggacaacctaaagtgtttccagacattgccacatgttcttttgtggtggtgttggtggtggtgcgtacatatgtgtgtgtaaaaatctccctttgttgagaaccactaatctagagaccacctaattagggctgacgtgggctcttccacagagccttctccttaaagacagataggttgatggacagttggatttagggaaaagaaaactgagttgagggtttaaagtgaatttcatccccaatgtggaagatgagcgttccgttcctggctgtaggatgtggagcatgttactccacatgtgggagaaaaaaatcatcccatctacttcaggacttttgtgtgattaaagaggcaagatagtctagtgcttt

SEQ ID NO: 131673 - DNA, 1050 bp, Homo sapiens
gtgatttaaggaagccccaggttcaatttctggttctgccacttgctagccatggtgagaccttgcccagctttcatactttcaggttctttgtctgtaaaatgggaacaataagagtactgacctcaccgggctgttgtgctactggctgtgctgcctgaatgggccctcctttatttgaatccctctgccacagttgtcccattttttttttttttaaatggtgacccaagttccattatggacgatcaggcattcaggggaaggagggatccaaagcagagacaaaagcagccagccagctcatcccctctgcagctgataccgaggaggaggatgccagtgggaagaagcgtggccatatggctggcaggatgcctcactggtaacagtcagcccggcccctttgaagtggttttaagaccaatttggtaacttgatttggaaagtggtatcgatgactccgagggcgcaggctgctcattagctgctgtctgggcccggcaaattggtttaagtggaatgaaattggttccttccctccccgtgctcatggctgaggtccaggcccgattgtaatgggaacctctcctgggcaaaggacatagaaaagctttccggggagtctgaccctcttttttcatatgtgaattctactttcccctgggggtcaaggcaataggctgataaaacataaaaatgaacctgaagtgggtggggtgagtgtgtgtgtgggaagttggatcagaggagaatgaacaatgaacagtggccgagtgtttttcaagggccagttaaccattcccctgttgagacactgtgcttgatgcattttttttcttttctttctttcttttttattctcccatattacaaacactgctgggaggaacatccgcacatgctttcttggtcacttatgtgagagctcatccaggatttataccctgaggcgacttcactgccgtggaggctaaggaacattttctgtttcataagacgcgatcacattgccctccagaacaatcatgccagtttacactcccactg

SEQ ID NO: 131674 - DNA, 2199 bp, Homo sapiens
acccaaggccatagtaagttccagagtgacttcccgtctgttttattatccctgacaaagggatacagtattgtgcggtggctgtggatggcgtgtagtagtgttttccttctcttgaaaagcagctgctgagtggtggagcacagaggtattccctgagccccagcttgtgcccatggtaggtccagggcgtttgggggaaggagaccgactctaggtggtcccgtctggtttctcaggggagaaaattcatagatccatctcctagctgtcatccaattctgtgtagaaggggaaagccaaggttgccctcagattttgatcttggttcactctgatttctctatgccagactagtagagcttcagggaagcttggtgactatgactggatgaattctgtcccccttaaaaccataggttgaagtcctactcacccatacctcagaacgtgactgtgttcggaaatagggtctctagagaggtacagttaactgagctcacgtggcggggctccaatatggtcagactggtgggtgtccttatcagaagaagagattaagatgacaaaggaggagtgaagaccacgtgtagacacagggaggaggtggccatctacaagcccaggagagaggcctcagaagaaacaactctgaccacaccttgatcctggacttctggctttcagaattgtgaggaaataaacctctgttgtctgagcaacccagcctgtgaaaatttgttgtagcagccctggcggatcaatacagtgaccatgagcaagtcactcaccctctctgaacccccttggtctcagctctaaaaagaagcctgagaatttctgcctcacaggctgtggtaagaggcatcagaaatagccgactttcatcggaggctcactgcgagccagggcctgtttaagccttttccatgtctgaacacacttcatcttcatgtgtagcctttggctggggaggggagatactattgttcccattttacaggtgaggagagtggagcacagagctgttaattaacctgtcccatgttagtcagcaaggaaggggctggtccatatgtggaacttcgtagttgtactctggtgcccacacaccagatcactatgccgtcccagctgttgttacaataagactatgtaggtgaagggcccacccagtagtgcctggcctatgggacacattgaagaccagccccctgtgaccagaacctcccatttgctgcattgagtttggaatgtttgaactccaggagctgtgtgtgtgtgtgtgtgtgtgtgtgtgtgtgtgtgtgtgtgtgtatctgtctgtctccctctctctcctctctcccctaccttccttttcttccctcctgtttttgggagggagctcagcctcccttcactgccactgcccatcagcatcctctccctattcagccacccccaccccccatccctggtattaattgactttggctcctgtcctggagctcagcctggcacccagacctgccgtgctatactaacacctctcacatggttaaaccaatgggggtggcatttagcagatgacgctgaaacccgtgaatctgccctttctcactgggccctcactgctctagagtccccgcctcttttacgaagcggctgtcatggttgatgggtgagtgtcaggccccacccagggacagggaggcccagtgccggctgtggagttacccagaccttacggtaaaaacgcatcaccctgaatgggggccaggccaggcatcggcccaagccggccctgcccagcggctggattctgactcgctgtgccttagtcacaggccagagactcttctgcttccagctgaggctgtcccctgccttccctggcggcccgggttcctggaaaagctgtgtgccagaggacgggagtttccctccaacttaagccattagaaagctcatttattgagcacttactaagtgtcagagactgtgctaggcactttacatgaatcttctcatttaatccttttaataaacttccggggcacatgctcttctaatctcccttttactgatgatgcaggcttgacagtgggaatgctaaccgcagaaagcagctcacctcacttgggtgctactgtgtgccaagtcctggggttagcacccaatagccccgtggcggcatgctgttattactctccctgc

SEQ ID NO: 131675 - DNA, 3276 bp, Homo sapiens
gctcctgtatgccatctgcctgtccagcccttagccacaaagctgttgtgccatgtggggagatgcggccagtttcccaggtgaggctggtcctgcttcaagcgtgggagctccaaccactgctccacgctgcctccactcctgaacctgaaggtggaggagtttcccactgtctcaaataagcaccggggcccaggggtcaccaggctcagatggaatttgcttaaaggactcttgggagaaaagctgattgggggatgggaagagacagctggcagtcacttaggagacagatgtgtcaccagaactaaagactgacctgggaggactgactttcacccaaaagggcctgggctgggaattctcctttatgtctccttccctcacactcaagattcaggtgctcacaaggagcaccttcgagtgaggaggtgtaggagggaggatggctaacagctcagtctgctcagcacttttacagtttataagccatttcacagacattatctcactccattgggcaatcatatgggaatgcaagccactgtcttttcttttcttttttccaaatggagtcctgctgtgtggcccaggctggagtgcagtggtatgatcttggctcactgcaacctccgcctcccggattcaagcaattatcctgcctcagcctcccaagtagctgagattacaggcatgtgccaccatgcctgggtaatttttgtattcttagtagagatggggtttcaccatgttggccagactggtctcgaactcttgacctcatgatccacctgcctcagcctcccaaagtgctgggattacaggcgtgagccaccataccctgtgcccctgtcttactgaagagggaaccgaggcttccttagagagggagaggaccctcctgggaaactttcatcccacctgctccttctaccccagtgcactgctggagctcaatattcctgaggcaaagctccctgcacagcagtgtccacagccgtgttgttgtcatacccgtgcactagcagagagctcaggggtagggccctgggtaggaaacccagggcaaggccagtgggtagagttgatgcaggcctcaggctgatcaaaaggaagacagcgtcacagcatggatctgacatctgagggacgtcagatcacagaaaggtcttgagattagagctgaatgaatacccctaggagaaactaaaaggcgtgtaacaaaggagtacaatatcaacagcaagcctcccccggtcattacatgcctagactgtgcctgaacctcacatttgtcattgcactggtccttggcactgtccttcaagggaagaactgtttgccctattttgcagactaagaaacacatccaggaagcagctgagctgggaattaagcccagggttgatcccaaagcctcccttctttccatgctgctctgctccttacaaaaacaaaaacagaattcctttttttttttttttaagatggagtctcactctgttgcccaggctggagtgcagtggcatgatctcggcttactgcaacctccaactcctgggttcaagcgattctcctgcctcagcctcccgagtagctgggattacaggtatatgccaccacgctcgactaatgtttgtgtttttagtagagacgaggttttaccacattggccaggctgctctcgaactcctgacctcgtgatctgcctgccttggcctcccaaagtgctgagattacagacgtgagccaccgcgcctggccaaaaaacagaattctttcaatgttgctctaggaaatttatttttaaaaaatgaatttccttctgcaatgcctggctcacgaccgattgtagatcaagaaacagatcttgggcctttgccacccaagcaggttcagaaagactgccctggcctccatgtgcccagggaggccagaggagcccacagtttcactgtctcagcagagctggaggaacctgttaaactgtctaagaagctaataaaaaaatcccagtgagatcatgtctgttaaagccctttgagctccctgagctctgaggctgtcttaacactcactgtctcattgcttactcagcacaaatttccccagggctgcaaagccccttccctgtttccagacccctggtttcctcactcatttcatttgatgcttcctttacatcttgaagatctgccatttttttctttaaacaccctattctagaaagaactggcatgttttgggtacctattttgtgctaagtcttttttctccattggctttatagtcatactttgaaacaaaatgtaatatgtgccctcattttccgatgaggcaacagaggcacagtctggggagctcagcaaggtctcatgttttagaatcacaagctgtgtctgcacctaggttgtgcctgcattttttttttttgagacggagtctcgctctgtggcccaggctggagtgcaaaggcgcgatctcagctcactgcaacctccacctcccaggttcacgccattctcctgcctcagcctcccaagtagctgggactacaggcgcccgccaccacgcctggctaattttttatgtttttagtagagacggggtttcaccatgttggccaggatggtctcgatctcctgccctcgtgatccgcccgccttggcctccgaaagtgctgggattacaggcgtgagccaccgcgtccggcccgtgcctgcatttttcaggtcattctctccagtaggcagaagcttctctgtccttcctcaatgggagaacaaggacctgtctggaatttggctctgaactgatggttatggcacattacttattcttgctttgaaggtcaggctgggcaatctctgtccttttgaattgtcctggagtatcttggccccgatctgctgggagatcaccctactgcaacctccctgtgcaggaatgcttttactggactctgcataaaatgaatgaacagatagatcttgatgttggagatatcagcctgtagattgcctgagaacctgactcaaaccccactcttgtctccatctgcaaaaatcaggctctttggaatacctttatcaggggatggccataaagattgttagaaaaataaattataatagctaacatttatttagtatttagtattatagtaacgtttatttagtatttagtatcagaaaccattctaaagtttgctctggtagcaacagcactatccacacccctcccaaattaaccatgagataaattgaacgggtaatt

SEQ ID NO: 131676 - DNA, 1088 bp, Homo sapiens
ggggtttcactatgttggccaggatggtctcgatctcttgaccttgtgatccacccgcctcggcctcccaacgtgctgggattacaggcatgagccactgcgccaggccaacaagtactcacttctacctgtgggtgtggttcagcgcccccagtgcctctcccaggtgggagttgcctgccttgagcaggtgaacaaactgaggcccagggagtggcttccccaaagtcatacagtgtagaagaaggattcgggcctctgagttcgtggattcctccatgaagcaatgactgagctgctgctctgcaactggtgctcggcttggtcctgggggtctgtgagctctgtaccatgggccagcgctttctgtgtgctgccacatttatcctttgcaccaccctacaagcctgtcctccaggtcctccatcctttattcaaaacatttaggatgaattatgtttgggagtttatcctgttttgagattttagaaacgcaatacagtacgcatatcatactatgtgttatgggctgaattgtgtctctgcaaattcacatgttgaagtcctagtgccaaggacctcagaatatgactggatttgaaggtagggcctttaaagaggtaattaagttagaattaggctattagggtgggccctaagccaactgggctagagtccctgtaagaagaggaaatttggacagagacaccaggatgcgcacacacagagggaaggccatgtgtggacacagtgaaaagacagccatctgcaagccaaagagaggcctcaggagacacccaactgccaacaccttcaacttgatcttctggcctccagaattatgagaaaataaatttctgttgttaaagccacccagtctatactccttttttatggcagccctagcagaccaatataccgtgtgtctggggcagtgcctctaaccaagcccaaaatttctacagggaaatatattaattttcatagtaagtgggataaataaaatccataaatagcttcatggtagttcaggtcaagatactaagtttccaacacacagtataagagttatgcccaagagtctgtaa

SEQ ID NO: 131677 - DNA, 1593 bp, Homo sapiens
aagaaaagaaaaaaaagtcttctgcaggccatgggggacatggtcttcattttataggtgaacagactgagatacaggaggagtcacttgcctagggccaaacagctcgttcctcttcaggccttcccggtcctgggagcgagtgtttctctttgccttgggaggctttgcagcttgtgctgcgcagctgatagcactgcaacccctgaacatgcacacacacacaaggtgcacacaggcatgcgcatggcggggaggtgtgggtgcactttccagcttccctgccgtgcctcgttctgcagggcaaggccgagaaacagcgggcagcctgtgtgatatggggacagacatgttctcagatcttggccatggtttctaattccctggcaccagaagccctgctgggtgatcaaagctgagtgcccctaacagaaagcagagaggcacatgggaatgacaggtggtgaggtgaagggaacacgggcgtggcatcaaacaggatggacagagtggttggttggctgatctaagtgtggaggaggttgtaaactattcatttaaatgaatatatttattcagcacctactataccaaccttagaaaacttcatactttctgtttttttctcttctttttttgtttttcttttcttttctttctttttttttgagacagagtctggctgtgtcgcccaggcaggagtgcagtggcgcgatatccactcactgcaacctccgcctcctgggttcaagtgattgtcctgcctcagccccccgagtaggtgagactacaggtgcacaccgccatgcccagttaattttttgtattttattggagctggggtttcaccgtgttgcccaggctggtctcgaactcctgagctcaggcatccgcctgctttggcctcccaaagtgctgggattacaggcatgagccaccatgcccggcccatgctttctgttttatttgatcccctttttggggaagacagggcaggttgaaaggtctgctttccaggggaggaaactgaggctcagagaggagaaagtcaggcgccagaggtagatgagagccaggatttgacccagtgatttaggattccaagtccaaggctcaaagtgtgacttgacagctgcaatctgggatctggatgtgtgccttctgtggctcggtgactccagaatttttccaacatctggttgtacggaataacaatagtagcacgaatgatcccatagctgacagccacgggagccatgtgccaggcctggttctaagcacatgtcatatttgaactcacagagtcctcctagctcactgtgaagtggatactatcgaaggggagtcttaagggtttcagtcagttgtcacggtcacagcaccaagatgggaacccagcaggtggcctgggtcctcatggtttgctgctgttctgtgctgccccttagcggggtggggtggggtggggtaggtgggctcaggcctgcagagcttctgtgtggctctaagggagaaagagcagaagggagatttgggatgtcttctgagtgctagccacgtgagtgcattttaccaagcgaactgatgactatc

SEQ ID NO: 131678 - DNA, 1106 bp, Homo sapiens
ctttgtggccttctggatggatgcaccacgatagggaaatcagcaagctgaagatagggaaagtgaacacttatcactgaaggcctctgcagggtttgctttgaggtacttccttcctgtcaaccctgttctggagtctgtctccatttttcagacacaaaaactgaggcatagataactgttttctgttttttgtggggagagagtattattgtttcaatttcctggacacttcaaaacatagggtatttctcattatgcaatagtttaattgagcacatactgcaggccaggcatggtgctgcatgcattctggaagtacaggaatgagttggaagtgctctttttccttagagattttttgttctcttgtgtgtgtgtttgggggtggggggggcgggcgggcacgaataggggaggaatttagatgagaaatcagataatcacagccaaggtgcctgcctggggacacagggtgccataggcacacagaagggcccagggtgtggacttagggtggtcaggggaaggaaggagtttgcccagagaagaggcaggagggagacaggaaaggtaagcagaggccagatcctagaaagaccattttgactttgtgctgagggcgatggtctcatgatgcagattttaagcagaggtgagagagggagagattagcatttcagaaagcatggcctctgccataggaagacaagatcagagggaggtccaagctggtggccagtggtgacggggcctgagctggaggagacagggatgcactggagacccaagagagaagtccctgaacgcggtgcacgaagagcctctggggttacaggaaggaaggggtaaaatgttcttttctgtgtccagcttaggccactgaatagattcggtgctgtgtgttgtactaggaaatgcggaggtgatggggattgtttgggctggagtctggaggggctgtgccccaccccaagctgggtgagcatctaaggtaagtgagggctgtgcccaagactgcatgagcaaatccaggttctcctaccagcaagctgccttgaagactctgaggctggaaatgtataaccttgtccgtaccactgagc

SEQ ID NO: 131679 - DNA, 2379 bp, Homo sapiens
aagtcactgggctgagcagcaggcagggagttggggagccccttgccatttatttgctggtcactcacagggtgttcgatggtttcaattggagctgttgaactgtggcctaagtcaattatcactgggttgctcctgcttgagttagatgtgccccaacccagtggcacagtggaatcagctttaaaaatagctgtgcgttgggagaccgaggtggtcggatcacaaggtcaggagttcaagaccagcctgaccaacatggtgcaaccctgtctctactaaaaatacaaaatattagctgggtgtggtggcaggcacctgtaatcccagctactcaagaggctaaggcaggaggatcacttgaacccaggaggcagaggttgcagtaagccgagatcccgctattgcactctaccctgggcaacagtgcaagactctgtctcaaaaaaaataataataaataaatagaaatagctttgccagggttccgctcccagagaagctgatgacataattgctctgggaaggactggggcatctgtgcttcttgaagctcccaggtgatcctaatgtcagccaagtttgagctgtatattaaaaaaaatttttgattaaaacaaatttttagagagagagtctcattctgtcacacaggttggagtgcagtgatgtaatcatagctcactataacctcgaactactggcttcaagcaatcctcccgagtagctaggactacaggttcatgccacaatgtccagttaagtttttatatatgtatatattttttgtagagatggagttttgctatgttgcccaggctggtcttgaactccaagcaatcctcctgccttgacctcccaaagtgccaggattacaggtgtgggccaccatgcctggctgttcagctgcatttagtcatttacctgtgtgccctcccttgccatgtgtgcacacctggtacctgaagacctgggagacgaatcaatgacaggggtacataggaaataagaataatggagagagccaccagttagtgagccgcgactactgccaggagctacactaagtactcaccatgctgctaggaggaaagttctgaaatgtccccattttatggatgtgaatactgaggtcatgggggtaaaataacatgcccaaaggcacagagctggtactgttggagtcagaactagacttaggtcccctgtgattccaaagtgctacctttgccttggccacccctgcttggactttcagtgaggacaactgtgtgttgggattgtggtccacactggaaatcccaactaggtcccacctgatggaaaactaaagttcctcattacttctagtgccagtgtagaagctgacccaagttgcctttttgaaaaaaaaaaaaagaaggccaaacacggtggctcacacctgtaatcccagcactttgggagtctgaggtgggtggatcaacgaggtcaggagatcgagaccatcctggctaacatggtgaaaccccatctctactaaaaatacaaaaaaattagccgggcgtggtggtggatgcctgtagtcccagctactcgggaggctgaggcaggagaatggcgtgaacccgggaggaggagcttgcagtgagccgagatcgcaccactgcactccagcctggggacagagcgagactccgtctcagaaaaaaaaaaaaagaagacatagtttaggaaattcagtatttatttcttggcctctcagcagggctttatattttcgaagggtgggcacttaaattacacagattgggtttttctgttcctctttgaacactgggctgtgtgaggaggaggaggaagaagactgaatcttacagagctgagatgatcagatactgccggatgtgccatggggcctggagagctgacgttgctaatatatcaccccattggtgcctacagtttccattctctgattagagatcatatttctttgacttgatgctcaaatgcctctgagtttgatcctttctcatatcctgaattctatttccagttccccagagttttatcctaattttatccattattgaagttttcccaaaaaaagtcagcatcatcatcatcatcatcatcattattattaatttttcttttgagatggagtctcactctcacccaggctggagggcagtggcacaatcttgattcactgcaacctctttctctcgggttcaagcaattcacctgcttcagccacctgagtagctgggactacaggtgcgcactgctacacggctctaacttttgtattttttagtagagatggggttttaccgtgttggccaggctagtctcaaattcatgacctcaaatgatccacctgcctcggcctcc

SEQ ID NO: 131680 - DNA, 1437 bp, Homo sapiens
gaaatgcccacattcaactcagggggaataaaaggatgggagttagaatttcaacttgcagttgcagaatctcagagttaaaagaaacctcagaggtcatctcttccaacccttctccagagcagctttaattgcctgtgtgggagattcagggccagcagctgcagcttccctttccctgcctctgacttgccaggtgagtttagatgagttccttgctttcttgagtgtttattattattactaataaacaagaggatgaatatttgaagttcttctgctgtcttaaagccctcaaactccactggctactgaaatcttatatgcaagctttatacctgtaacttgttaaaggagagctgctttgataaaaatagggttatagtcctcctgctgaacctcccatctccacctggcccccagaagtcactcaggaggctctcttgaccccctagggatttgtggagtacagttggaaagggtggcactgtgacctatggttataataacaccggcacctacttattgaacattaaccaggcatcaggggcttggcacaggtcatgttcagttctgacagacactttgggggctctgtatccttatccccatatcatatatcaggtctgagcctcagggaggtgctcgttgctctgccacacagaggtcacacaggaaggaagtggtggagactcagttccagcccaggtagctcagcagcaaggcctgtctgcttcagctctgagctttactgcctctttgtgacttgtgaccttcaacctgacacacagcatcccagccttccctggagtttggttttttgagttgtcatcccacctgccatctctgacagccccagtatttagtgttttaggtgctcccagatccacgatgtgtagtaataggctaaaggcatcagtgttctctagaatacttcgtaccacttagcaaatagcctctgtgacgccactggttttgtgattttcccaagcaaactttactatccctttcttattgtcctcatcacttactcttgtttgcacaaagcccaggctctaatttattccccttgtccttaatcctctcatctctttctccaggtatcaccctcagaaataaggatgtgcagtaggtctggtgggcatctgaatgaggatggcccccagggtgtgtacatttcctggggggaaactgaagctggagtctgggcttctcaagtgtgggttctgcccctgaagctgttttctcacaatggaggctccaggtacttcctaagcccccatctgctgcaggagatacctgaagaaactgtggacagttcaaaggttggattatttaagaaatcttggctgggcatggtggttcacacctgtaatcccagcacttttgggaggctgaggtgggcggatcacttgagatcaggagttcgagaccagc

SEQ ID NO: 131681 - DNA, 1152 bp, Homo sapiens
gaggtttcaccatattgtccaggctggtctagaactcgtgaaaacaggtgatttgccctccttagcctcccaaagtgctgggattacaggtgtgaatcaccgcacccggaccattattattataattttttttggagacaaggttttgctttgttgcctaggctggaatgcagtggcagaaacataactcagtgtattcttgaactcctagacttaagctgccttgctaatgtatttacgtgtgtgtctgtgtttgtaggtctcactatgttgcccaggctgatctcaaactcctggcctcaagtgacccttccgccttggcggttgccatttttagcattattgttatttggacattgtgattaatactttacacaaatgacacaatttaacctgtaccaaataatcatctttcatttattgtctaacaataaactcaaccaaatgtgtaagttcatctatctatttgtccatctggtcatcatctaatcacccaacagaagttttaccaaactccttttttatattaggtgctaggtgaacaaagttgaagaaaatgggtctctaactcaatgagctgggattcatccacgcattcaaacgatcacaagtgtttgcacactgctcactacccttgcttgttgatgccagccttgagtccaggctttccatccttgtcagcaaggtgttcccacaaagtagctcccatttgctatgatatgtttgcccttctggtcctggaaccttcatcttggtgacacaaggcctgagcatctgtcatataaacctttgcgatgcaggctgtgttctctaggaaacagacgctaagatgtagattagcaagtaggatgtttattatgggattcctttgggatcaacagctgtgaaactgaaggagaagaaaccatagttgggcagagggagaagtggagctgtaacaatgtcccaacaaaggccaatgccagaggagcctgggagctagactgatccttcagaattgtcctgaattgaggtgagggttgatcagtcatttcatgtgcccccgaccccaccacccaaaggatgcctaatcttgaacaaggtgattgtattcggccaaggcagttcccagagagggctgatagctgatggtcatctgccagcactttagta

SEQ ID NO: 131682 - DNA, 1741 bp, Homo sapiens
ctctgtcacccaggttggagtgtattggcatgatcatagcccactacagccttgatctcctgggctcaggcgatccttccacctcagcctcccaagtagttagacctacaggtccataccacagcatccggctaatttttaaaatatttttgtagagatggggtctcactgtgctccccaggctggtcttgagctcctggcattaagcgatcttcctgcctcgacctcctgaagcgctgggattataggtgtgaaccactgtgcctggccaaatatctgctttgcttaccattttatccccagtatctagtacataaaagcacacagtattggggggaatggaattacctaagctttacggaagcactgtgagtaattcatttagcaaatatgtatatctattatgttcctatgacatgtcagtcacgattactacccttacggaggttatagtctagggggtttgggctgagcggtggctcaacactgacttcctggaagaggcaacctgcatactgggggcgtgacttcctggacgatgggctctgggccagcgttgggctcagtgtttcctgggttccctagaaggtggcttattgagctggagacttgaatggatatgggatgttttctcagggagggggctctctgttgcagcccacctctgggcgcacctgtccaccataggaaattccctgcttcacttaccttcattgacgtttgaactcccaggagcctggaacttccccaggtgccccattggcttggtgactttacatcattacatcagttgagtaattgaagaatggaggaaccattcttttgagctaagtggaaaaatatattttctcctctgtgagtcaccaaaaactacagcttcttttttttttttttttttttgtttgagacagagtctcgctctgttgcccaggatatagtgcagtggtgcaatcttggttcactgcaattttcaccccctgggttcaagtgattccttgcctcagcctcttgagtaggtgggattacgggcatccaccacaacacccagctaatttttgtatttttagtagagatggggtttcaccatgttggccaggctggtcttgaacttcagacctcaagagatccactgccttgtcctctcaaagtgctgggattatagacgtgagctaccgcgcccaggcttagagcccagcttatacccagttacttagcttctgtgtgtgtgtgtgtttgtaaatgaactattatatttcaggaagttcctagcagggaggatgagatggaatcagtgaattttagatctcaaggagaactagagattgcttggtccaacctctttcctctgcaagagggcccttgtggggaagggactggccaaggctacccaaagagcttggagagaggtgcagggcatgtgaccatgtgcaaagcatttgccagtagagttcggcattttttcctggcgcgttcacctcctgacagggcaccaggaaggtgctgcacagcctggcatgtggtgggtggtgtttatctgcacaagtcacccaagtgatcagaacgcttttacggaaaacaatggctttgatgttctgggtgacaagaccaaagcatgctggcgggaagggaggtttttggggttagagaaatgaaaactatttacatttagggctgacttaataacttaacacctctgaagtgggaggatgtttttgagggaaagttgaatgtaagtgtagta

SEQ ID NO: 131683 - DNA, 1089 bp, Homo sapiens
ggctaatttttgtagttttagcagagacagggtttcaccatcttggccaggctggttttgaactcctgacctcatgatcctcccctctcggcctcccaaagtgttgggattacaggcgtgagccaccgcgcccagccttccaggctggtttcaatcttctggcctcaaacgatcttcctgcctaagcctcccaaagagctgggattacaggtgtgagccactgtgcccggctgagtagctgctttttttttttttttaatcctcgatttacagatgaagaccagagaagctaggctgacttcccatgttgacacagcaactaactggtggggatcagctcagagctgggcagactatgcacttcccaccctgccctgcaccccatgctcggcttgctggatttgatagaatctagcaagcgtgggggccaggctctgctgactccctgtgagaagcagtgtctgtttctgtgtccttttctggggccttctccagagggaaggaacatatcccaaagctggagcttgcactcaggagcttcccaggggaaactgctccactctctgccatctacagctcttgcaggtaccatagtctacctccatgatctatttgcagtgggcgatggtgttttgatgatttccacatcatgaacccaagtgctgttgctgatttcgaagcttgttcactgtctcctgccaagtggccaagggctcctaccctagcccttggtggctgctcctggctgccatctgcccacccagttggccccactgcctgggccacgttctggtggcatccaagaactggtagcagagatggtgattagtcaatgtgtgttataccctgggtctctccatctttccaacagagacctgccttacatgtaggactgcctccccttgttcaggttacctagcccttgtgcaattcaccttctgattggagaaggaagacaatacggccctgcctctcggcctgtagagaggaatggatgatgtgaaactgtggcatgcttgatattctgctggcagagaggagaacagatgttaacacagagcacacctctgccccgaacctcctgggagc

SEQ ID NO: 131684 - DNA, 3243 bp, Homo sapiens
ggcttataatatccagagacaagtgctaaactctgcaaagattctcacttaacaccaggaacaagcctctaagatgagaaactgaggctcagagagctcaagtttgagtacttgttcagggtcctaaaaagcctctttaagtagtagaactgggacaccaacccaggaagcctgagaagagcccaccgtcaaccaagaggctgtgcctctgccctttttgggtaacgaagcaaattcattttgacaataaggctaaaagtgctttcctggtcacaatgcctgaggcgtgtgggaggctgctcactggggagcccagaggcgctgaggacagcatctttctgcgtgcctagctagtcaaggggacttttcagagtaagggggaattcactctgtgctgctgggaactggactctgagtgcaggatgcgttaagcctgcactgaatgggaggaggcgaggactctgaggcttgcagaaccactgcagatctgtccgtgataccaacacatctaaggaaggaatatgacaaccagagtgcctcagagaagacaattatggccaagttgttccttggggagagatgaggaaatcaaagtggggaatacaagccacctgcccgccgttcttgcctgtggggcaaggatgtttcaccagctattccagagttgagagcaaattccccttcagaacttttcagcgttctttattctgagtttgtgctgactaagcttcatgtcattcatgatttggctgccagtgaggatggtgggggggcctgaaaagggaaaagggcaccgtactgtaaatgtatgaatggggttttctgtgggggccacaccggagcatcacagttctttgaaggacaggagagaaggtcagtgcctggatccccaggctaagtaccaggcgctgctttaggatagcctagaagggtggcccctgggcctcattctccacactgtcccaccccttttgaccacctcatctagccatcttgatgatcagttaagataagaatctctagtgaggctacatttttttgtttcctgaataatgcatgatgtccactgaacacatgttactagatgacagtgttgggctcagataaaacttacaacaaaattaatctgatgcagcctccatggctcacatgatccccaccatgtatgaaatgggctgggcacccagggacaggctattctcagaatggggttattgggtgtgtttcttattcctctctacctagtattcttggaagaaggtgaatgaaaatgctctagtaggggagggaaacatgattaatgggtgggggcttatgagtcagaaagacccaaccatcacttctgccctgactgcctgtgtgacttcagaaatgggggatatcaaagcctatctcataggattaaacagtttaatgtgtataaaatgcctaacacagtgcttgccacataagcattgctcattaaatgtcttctcttcttgtgctcctcattcagtgtatagtaaatgtgcagtccttatcttttaaatgaatgaaacatctcattaccaaatctattcaaggtaaacattgatattaatatgtatcctttttgtgtgtttctagaatcctgttacacctgggatttaggcactttcaatctgaaaaaatacatatcctttcagcactctggacggacttgagaactgtccttacgtgacctaaagctggagtattttgagattggagaattaaggtaagcgactttatcttcctgatccttgtgaaaccaaaaatagcttttggagttgacgacctcctgcagcacagcttgggttgtggttcttgacctctcggtgtgtcttcctgtgccgctccaatgtgttcgggaagctggctccccataacctctccccgacctggttctcagagtctagtccacttattcattgtgcctaggaagctctccctctgtccctagtggagggaggagcccaccatctcctagtgaatgcgccacttgtagcagaaggtgcaggatgctccagctgtcttgtgaaaacatgtggagacagccttggggaaaagaggaaaaggtgaggtgagggttatataatcagattgaaacacctttgggacatccagaacatgagctcttcctcctttcccagccaatccgtgcttcctcctttcacctccttgaattctatgctccttccacactaaggctgagggtgcaggaggtaaagggttagaggttaagactgagtgcttcaggtagacttgggttttcttggttttgctacttgcctcattttggacaagtcactcagcctctcaaagccttggtctcctcattagtaaaatagggatggtattagtgcctgcctcatgaagatgttgtttgtgttgagtgagatattggagcaaaacagcttagcaggctgccttgcactgaggaagaaatgctccaaaagggaagagagtttttgcaaattattcctcaattatgccatttagaattccttccatgtatcaggctattttgaagtctttcatttgctgtccccccagcctttcacctatcaccaagtcagcctgggaaacagctgagaatcaccttcccagttgtgcccagccccttacccaaagcagagttgattcccccctcccctggacggcagcgggctagtgaaggcatgtctccactataccatggctactgcactgggttgaaatgtcccttgccccttcccctgcccattccccctattgctggtgaaattgcttagagcaaggactgtcttacacatcacaggatctggcatagtgcctgaccgagggtgaaacaacaaatgaatgagtaattgaaaggagagagaaaaagagatagagaagtaaccaaaagaagaaagtttttaaaggttcagaggaaagaatgaggtcagttgcaattttttttaagtaagatgttggaaagaataaatgacatgatgaaaaggaaactgacatgattcctatcatgaatttgaaagctatgcaagggtggaaaggtgggtgagaagctgtggactggtgagaagacagagaagtcagaactgagagcatagcagagaactgtacttctgttgtgctacatatgtcatcttcatcttttgtattgtgccttaaattttcaaaagcgcatttgcgtttcaaatctgctgtgatagtcagcattcctgtggcatgcagaggtgaagagcatgaggccttgcccttcag

SEQ ID NO: 131685 - DNA, 2526 bp, Homo sapiens
cacttgaaactgggaggcagagttgtagttagccaagattgtgccactgcactccagcctgggcaacagagcaagactctgtctcaaaacacacgtacaaatttttttcttttatttttttaaagacagggtcttagctatgtggcccaggctggcctccaatccctgggcttaagcaatcctcccacctcagtctcctgagtagctagtactataggcacacaccacacacccagccagacttcaattttcccagccacatcatggaccagaagccacttggtctggttgtgaggatgacggaaccttgcccgaggaaatgggcaatgaacaggagcctgtttgtttctccttccagctcctgacctgtctagctcctgaccctctcagtgtcattcttgctcacccctggccctgctccctggatatgcagacaggatgggcttcttccctttagaccttcactttgctcttttggactcctcttctggccttgccttcccctggtgtcatctgctggctccctgcctgatactgccacactggtcatgctggcctcctggcctttggtgacaccgcatcagcaggctcctgcttccctgtcaagggatacaagccagcaccggtctttcgccacaaggtatgtgtgtaaagattgcttcctgtacttggtgtccacaggattttaaagaactcctggcccactcggaactctacgcttgaaacagaaacatcttctcaaaacacctctggtattggcccatttctctattactgtttcttgtggtttcatactgaggtttttggtgcattgcaattgccctggagtttatttttagtaataaagacagagttcaattaatgtcaaaacatgagggtaattgcagaggaaggattagtaagtctaggggaaaatgtgcccaactttttttcttctgataacatctttcactgatcatacaccgtcacacccacagacacggagcttcctccgtgatgtctgcaatgcactaggcccagtcggggagcagtggctgcgccaccacctgaaaacgaaagcatttctgagtctctttcagtccagctcatctagcagccagccacacaggtgaccacccaccgtagctgtcactatgggtgatgattatcattatggttttgaggaaaggctgggctttagaatagtcaattcttatcctctctccggggggatttattctgtctccagaagcagcatttcactttcctgaacatcagctcttctcccctggattgcagggtctaggtcttgttctctgtctgcttccagcttttggcattttgacagcacataggacatgcttggagaacgttttcttgagttaactgaattcaggacactgacttggggctggaaaggcaaagtgaggaagaaagtattcccctttcagaagctccccagtctgccttaagaaacaaaggcagccctgtcatctgcccaggactttacagtttataaagtgatttctcatcctttctcctttcttgtattgcacaaatatcgaacgagaacctgcagtgtgccactgtgcagggtgcctagaataaaggagaaaagccactgtgctttctctgaaggaatcacagggagtgaagctagcttcatggatgccagaatttcacagatgaagggactggaggcttggagcaattgcattgcttgagatcccccctgctcatggatggtggctcccaaatcaggacatgagtcttctgaatcccttaaacctgccctgtgcctgcctgttctcccagcacattctctgtactctcttgtgctgctcctcaccccctctccaactgtctctccttctccaccattgtcctctgcccactcctagtcccttctttcagctctgtttcttctgaaaatgaggatctttctctctacagtgcctcttgtgggacgggttctgctgatgggggctgtgtttgggatctcgcctggaaacacgatctctccaactttccctgggagcagagccttgggtctcactgaacccacctccccagcaccttgtgtggtgactggcaggaggtagccattccctcctgtcctctctgcccttgtccactttcctgttatgagtcagttgctgagataggctatgaggagttaacagagtggataaaaaagagctttgtccttctttaaagccttcaaaatatacagatgtattagtcagggctttccagagaaacaggaccaatagaacatgaagatagatgcgtatccatgtctatatcaatatctaccttgatatttatatctatatctaggagatttatttattataaggtattggctcatgcaattatggacccagaggggtcctgtgatttgccacctgcaggctggagacctaggaaacagctgtcgtgtcacaaagggcagagggctggagaacctgtagtgtagattccagtccagattcgaaggcctgaggaccaggaatgccaagggcaggagaagatcgatgtcccaga

SEQ ID NO: 131686 - DNA, 1034 bp, Homo sapiens
atgtgtctctccctgggcttcatgtgcccttgctggtttctggactgtcctgttctgctcctgtcctcctactgacagcctttcctgctttcctttccctcccatgccactcccactccatacaacctcttcccctgcacactgctcctagaaccccttggttagccccatcagggatgtccctgctttcctgggacccgaggcacacagaatgaggatgaaacagttgacgtatcatgtagtatcccccacctggcttccttctcagccaggcgtcccaaactcaattgtctgcagaggccaggcaggcaacaaaaataagtgatgtgggcctcctgggcagtcaggagggcttggtgcagaactggaagcaccagaggtagcaaggaaccaggagatcaggccagcacctgctctgaatggtcaggcacctccatggttgcatagcaaatcagttgttgagaaatgttttgactatggtccttgtgtaggcccagtataaagggggaaatggccagtctgtggctgctgattatggccctgaaagtctgcaggcccagaatggccagacctggttgttcaaaggaaaactggcaggtgggaagggcggagggccttgccccttcccatttgcctcctgtgcctgacagtgtcaccgtagcaatactttcctggcagcaggactttgtcccataacaatagttgattttagtgtgtagggcttttgttgttgttgtttattccatacttggaaccagctgcgttgtgctactatcagagatgacagcccagcctggagctctgcaaggtcctccaggcttctcagttctgatcattccaccagcagatcccatcaccaaaggggtgtacttgcttcatgcagctgctgcttctcccagacctcattgtcccccttgtgccttttccatgttcaatacaggatttgttttttatctgaaattctacccgttaaaacatttggtatgtttcctcttctcttgtgaggtgtatttctgtatttcctacctttgcat

SEQ ID NO: 131687 - DNA, 1016 bp, Homo sapiens
ctgcgtgctgtctgcaccccgtttggctgcttgcccacaaccatgactgctcctgaggggctcgccagcagcactgtttcccagcctgctgtgcataaaggtgacgcttcgggttttccacagtgaacaatggttcccagagtgggcaggactccctagtgtctgcaagggtgtgtgaccatgcagggtggaaacaaccttgtcaaaataaaccagggcagtgctgaggggggaagtgaggctagctggggggaaatgtgggctgagtgcttcttggggggtttcctctgtaccggtgcccagctgcccaagggtcccagaaggcagaggctgacacacttcctgtgaccctttcagactcgccattggcccccaccagatcaggaatctgttttcccttgttgaccttgagccactcacagagtgggaaaggtttgcctatggaacgaaaacagtcctccttccatgatttcccctttgctcccatgttcatccatgtgggctgctgtaacaaaatcccataaactgggtggtttacaaacaacaaaaatttatttctcatagttctcaaagctaaaagtccaagatcaatgcgctgggagatttggtgtctggtgagaacctgcttcttggttcagtgtcttcttaccgcgtcctcacatggaggaaggggcgagaaagctttctggagcctcttttgtcaaggcactaatcccattcatgaggactcaacactcgtgactggatcgcctcccaaagcccctacctccaaatcccatcaccttgagggttaggatttcaactatgaactttggggagacaccgacattcagactgtagcagctccccagcacaatcctgctcgaccgaattcaccttcctgaccaggcacgtcaacaatctttctgtccctctgatgccagaacgttatgtttctgagggtgaaacttgagtgattaattgacagtattcctcaggaatccttgctgattgctgaatgcataaatgagtgaaag

SEQ ID NO: 131688 - DNA, 1025 bp, Homo sapiens
ttctcagtgcctcagatcaggaggcacctggtgttggcttgtcacattactaatgatgtttacttccatcacttgattaaggtgatgtctgccagatttctctactgtaaagtttctatttttttttctgtgtaatgaataagtatcttgtcaggagatgctttggacctatgtaagtatcttgtttctcatcacactttcaccaaactaattttagcattcgtggataattcttgtctgaaacagttattactacagtgtgtgccaaacagtgattttctacttccatcattactcctacatttgtcaattaaaatgttactataaggaagatattttcttttatattgaaaaaatgcaattttttaaaaatcagtctggactcttggattctcattatattggttataacccatgactataatacattttgtgctcagatttttctagattttacattgggatgcccttcaagttgggttctatgtatttttgccattttactgttgttttttgagcactgccttaccttttgaccccacaagatattctaggctcagtgtacactttgcctggtccagccctggaatcagccattgctgctgtgctatccttgacagaactataacctgaatttaacaaggaggaaatatcaggcaaacacaaatggagtgacattctagttaacaactgatcagcactctttaaaaatgaaagacaaagaatgactgaggaatgagttcagattaaaagagacgaagggacacgctccaactgtaactgcaacgcatgactgcgggctgcgttctgcattggaaaaaagtgttactgatgaaatttgaatatcgtctctagattgagcaactaagcaataatattgtattaaattgctagattgggcaatagtattgtactaaagttaatttcctgacacagttaaataattgtactgtgtatataagatgtcaaaattgagaagttgcaaggctaaatggaatttctcagttttttaaactcttactttg

SEQ ID NO: 131689 - DNA, 3758 bp, Homo sapiens
tgtccacaatcaattggaaaagataagttgtagtaccatttgtatagaattggcccatttttgtaggagcaagacagaacaatatagtgcacatacatatttatctacacatgggagaaattctgtgaagggtatgtacttcctgttaacagacatttctgggaaatgtgtttggaaggtatgagacaccttttactttttgatgtctcctgataatgggaaaacagtaagaatgtgggttgtatgcatgagtgtgattctacacgtgtaggtttaggtttgatgtactcccatccagcttattctcttttgcattttccagcacaggcagtgctgtgcaatgtcttgcccagtggacacccacctaattttcactccacaaaccactgtcctacatctgatccttaacaaagtatgttagttgtagacacaaaggtggcctacatttcatacttgttgacagtaatgctagttgactcatcttacctttgtctgaggaggctggaaattgtttgtcctcagaaactttagggagaaatttattactaagattgtatcattttggtctccccagagaaatgaaaaattagaaattggccatgtgacaatcgttgcatttacctctttaaggagcagtgattctttaagtggtgcttgatttatctaaacccgattaattagtgaacggtcatctgtttctcccaggaatttttaatgatcattaggcttttgtagttactgtgaaattttgtttacgtggatttatttttgtgcaggattgtatacagggcagatgctccttaatttaagaagggagatgtgagaacaaaagtgtcttctcttgagtgagggcctgttatgtgccctgacttgttacaaatatcgactaatgtaaccttctctaccatgtacctttcttccaatttatcaatgaggaaactgatgcaaaaatgtatgttcccacaggctctggtgtgttcactgagttagctccagaaagaactgtccccttctcatgcctgttccctacttcttttgcagctaattctccgaaatggtttctgtcttcagctttctgggctgccccatcacctgtgttgcttctaaatgttagtttcattgctgccttctgggttcctctgcttctctctgacatgatgtctctacggatgcatctctcagtaatgattataatggtggtgatgataataaaaagagaatacacaagtgtttttatcaatccctgaccatgctgggcacaatgctaagcatgtgcaggcatgatgtctttattctgcccactcagctgatgagattgaaggggctccctgcaggttggggcctgaaaaacacagccaggtccatctaggaactagaagctatggtcaggcttacatgcttttttcatatcagtgttcatgtagatgtttaagctcttgcagtaggtttttgcaagctagtgaacgctgccaaattatgctcgccacacaattgcagccacctattcccaggcagtataaatatatggctgaactaacattaatacctatcactgttttatcaagtgacataatcaagataattatgaagtatccaaatattaattttcatagattaaaagcagataaagtattagaaatctgcttatatcattagcagaaacatttttgggggccacagggtaaggaaaagaggggaaaatattgtccttcaacaaaagtaatcatattctagtaagtataataaaagaaatgacaagcttttcagaatttccacgactaaaaattgttttagctgcagctaaaaaagcatcacataacaaaatatctcttgtttaaaatatttgctacaaaaaagtcctattctatatgtcctgcataagaacaagtatctttatataagaaatgtgtttaatagccctctttcattctttttctgaagccctccctgttaaattgcacccaaaggggaaacattaattgaactgtaaagctttttttttttctgtctaaagacattaaagacatataggtggtattaaatgaacctttaactagagctctgtgagttttcaaaatagattttatttttctttaccataggccaacagagattttgagaaacacattgaaggatctgttaacacttgatatacccaataaaagcagtggttgtgccagtgctgatctgtcttgatgtgaatgtgaacaatgggaacctgagctgagcaggtaaataatcatgtagtacagtcaccgtcttcagtgtttgagatgactagcagggtaaaccacgctgtgtctaagatgcagtgttaattctgtttgaagtaaaaatatgcaagtgtggtactggatattttggcacgcaatcttgcgaaatttctcattgatgagattctgacataggaactacatttgagtaagaatcatagctcaatacagcatgatttcaggaaagtcgactaagataaaagtgtttctgaggctgaacagcaagaatcttttgctaagagttagaatagattgacaagaacctaaaatcagaagttgcaattctgctgagatactgcttttcagttctccggtggaagcttcattggacatattgtacatcaagcctctatgtgactgattcctgcctctttatgtcttgttttagattctccatggcagtagctttaggcaacccagttttactgaatgcagcaatggtttcagtgaccattagagtccaattttaggatgatacttctccaaattgttaaaactccctggtgcttttctcttataaactgcaaaatgtcttcatatttcatcccgcttttcagttaatgctagggtgacagaaactggacctctcccaagacatgtgacagagtaatacagcagccaacttcttcgccaaattaaagttttacaagatttaacctgtcatcaagacctgggattttggtggtgagtcatcttcaaaagccaagttcggtccctggtttgccttcttttccgcacaagaacaagggttttgatggctctggtctccaggaccatctgtggctttctattagcaataatcgcacctcggtgaaacctcattggctacgatactgccactgcgcaaagctcatggctttctttaatagcaaatggcctctgacttttaagaagccatgtggctacccctcagcagacttaggagaggtcttggctattatttgttgttttataaggtgtcatcattgagcatctactctggatgaggctctgtgctgggcttgaggggtacagggaagtttcacatgtcccgtcttgttgaatcacacacacttgatctcactacaacagcagaaaacaagttaaagttccccaggggttgacacatttgcctgccgtgtttattgctgctgtgatttctgcagcatggtccaaagaaggcaatcagtcaacagtgaatgggttgagattttgtgattttggtttaggagtcttaatctctagaataaaatctaatgaaagggtggggctatgtttttctcttgccttgacttctttgactctatttgtaaattccaaatttacccaggcctctggctcattctgtcttaaggtgcggggacctctaaaatgtagatggcaacaatctttagactatatgtgtcttgatggtagggcaatcaaattgatttcctcagcatatacgagtcatgttttgtaagcatggtgggtacttagtcaatgtctcaatcagatttgcttctg

SEQ ID NO: 131690 - DNA, 1424 bp, Homo sapiens
tcactgtcaaataaagtacttatttctgataagctctttggcttctgtgaagccgcctggccgtgtctggccgtgggcggtgctgataatgaaccgaacagagaacacagacttggcggggaaggtggggacccagtgggtagaaagaatgggctttttagaccatttcaaagtaacaagaaagctttgagagtgcttagtgatgtctgctaccacattcatttcctctgtttccattgaaattgaagttctagatggactgaacctgactaagaaaagggaatgtggacaggaaagctaatgacaaatgcaactggcttatttctggagtgctttgtactctcagagtcttgtgccctgaactttcttcatctggactctaggggcacttaagcaattagcatgccacaagctgggtgctgtggaaagatcatagactttagaaactgtccaagaaactagtgggactccacaccttgtgagttgtgtatccttgtcaagtttaatttaccatgttgagcctcagtttcctcacctaagagaaagaaaagagaaatagatttatttatttatttatttatttatttatttatttattatttatttatttttgagacagggtttcactctgttgcccaggctggagtacagtggtgcgatctcagctaactgcaacctctggtatctgggttcaagcgattctcgtgcctcagcctcctgagtaactgggattgcaggcgtgcaccaacacatcaggctactttttgtatttttagtagagactggttttcactatgttgaccaggctggtcttaaactcctggcctcatgtgatctgcccatctcggcctcccaaaatgctgggattacaagtatgagccactgtgcctgtctgagaagtgattgtttagttagagtaactctagatgacataacaaataaacctcagtattctagtagctcaaagacacctctttctaagtcagataatagtttgaagctgggcgcagtggctcacgtctgtaaccccagcactttgggaggccaaggtggtagatcacgaggtcaagaaatcgagaccatcctggccaacatggtgaaaccctgtctctactaaaaacaccaaaattaactggctgtggtggcatgcgcctgtagattcagctattcgggaggctgaggcaggagaatcgcttgaacctgggaggcggaggttgcagtgagccaagatcacgccactgcactccagcctggtgactgagcaagactttgtctcaaaaaaaaaaaaaaaaaaaggtttgagaagggttttcctggtcattaggtggcttttcttcattctgtgatctagagacccaggtctcttccatgttgttgttctgccatccctgggaccttgaagttactccaactggcagcggaga

SEQ ID NO: 131691 - DNA, 1080 bp, Homo sapiens
ggacaggatgcaaattgttcaaatggcatgatgatattataaggaaagaaaaagatgttataaaaggtcacataaagtcacccacaggtcagcagtcatgtcatgattagctgctctgtgccagacacaggctggaaattggtagatgctctccccaggaagtgggcagcagcccctttgtgcctctgtcacctctgttaggctcctggaagcccccttcattgctgcatgtaatgacatcttcgtcaccacatgtaacagcttctttaccactatgtgtaatgccattctgtgtgcttattgggctaaacaatcacagaggaaaagagtgctggagaaatgccagggagataggtaccgaaacgttccagatggaaagtctcgtcttcaggtggccgtagcagtaaatgtcagggtcaaacagggggtgtattcttgggagagcttcagctcgtctgtgacctagtgtccagccagcttcctgggaaggaggctgcatcctgacattgaagccctgtgtgctaggatgagtgtgttacgcagagccttacaaatgagaaaatcttgcgtcctcaggacaggcagttagtgttgctgtctggaatacactggctacctccctcctccccccaccacttaaaattccctgaatccgacagtggtagggaaagggctgatcctggagaagattgttccttgataatcctagtatgattcataatggttgcagcagatgagccgcgaggtttgtggctcagtctgcagctaaggaaggctcttccctggggaggtgtgtccagcttcccggaaagacctcagctgtctagctggtctgggctgcccagttcttagcagtgcatcagcaatgagcagccgctgaccatcaggcagcgtttcccacctgccagagaacgtcagagccactgcgtctggaccagctgaaggcagccacggtgcccaggatgctgctgctgcctccaaggaaaagaactctgaaaatgaggaattacagcctggtggttttgttttatgttaattttttacatctgggagataatggaaaaaattaaaaattgctat

SEQ ID NO: 131692 - DNA, 1054 bp, Homo sapiens
gcctcgggggccagctgctgggctggcagcttctctgaggagctgtttcttgccctctttgtacccctgtctctcaactacctgtcaggcaggtaataatcccaccatcacctgatgtacccagaggagaaggcaggaggcctgcgcaatgtgcacagaacaaacactggcaaggtgcctgagagccctgcaccaggcaccttcagccctcaggggagagagtctcctgtccagctcaccccaggcacccttctccaaatgcccagtcttgcaccattcccagaccatttgggccacatctgaaagaatttgccatactgcctgcctttgattagatgttagggaagatttaaattcgtgcagaatctcaatacagctcccttcctgttggaaccatgtgacagactatttccaaggctgtttcttacaagaggatctgccttactaagtcagagcattgcaataattaacgttttgaaagctccctgatttccaaagcattttcacatacattagctcacttaaggtctcccaaaccctgtgaatggagcattctttttagccccattttacaggtgaggcaactgaggccaagagagcttgagtagctcccccagtggcttaatgtagaataagtatcagagcagagactggagcccagatcttccttatgagaatccagcctcctttttttttttttcttttgagacagactcttgctctgttgtccaggccggagtgcaatgttgtgatctcagctcactgcaacctccgcctccagggttcaagtgattctcctgccagagtagctgggattacaggtgtgcactaccacacccagctaatttttgcaattttagtagagatgaggtttcaccatgttggccaggctggtctcaaactcctgacctcaagtgatccatctgcctcagcctcccaaagtgctgggattacaggcgtgagccaccgcacccagtcccagccttctttctgattcactcttgttttgtagttgtggacatttaagaagactttttatttttttatttgtatt

SEQ ID NO: 131693 - DNA, 1138 bp, Homo sapiens
aaagaataggttcctctggttttgtaaccagcttttgtcatttaatgtaagttgaattttttttctgttagggaatttttctgcaggaaaatattttaaggccacctggtatgttataatacaaacatgttatatccatttgacagttgaggagctggaagtgctgagatgcaacataagttccccaaaattatgctacttgaggcacagctgacatccagaagcttctctgggaaggcttttggagttccccaaggcagagtcaacaagaacataagtttcttaagaacagggactgtgtgcctcacttactgtcatctccccagcatctgccacaaagtggacattctgttaatagttactgagtgaatagacacaggaagttcagtcttcttttttatctcatttcttgctcaaagctcatctcagcattgaacgtgtctttccacatggcctcctcactagcttctgtacccctcaagtccaggaccatgtcagattgtctttgaatccctcagccccagtcccaggcctgccctagagcaggtgttcagtaaatgactatcgaattgtggaaacagggatctctccatcctggattcaagacagcgccctccctatgaagcttttctgagctctttcacaccaaagttctcccaaccatcgtgttgacagctatctgcctgctgccctcagtccaggagcaacttggacatcagctctgcctgtcacactggggtcggcgcacctggcctgttccaggacagatcacaaggctgagggttaagtaacacctggagtggttaggaggctgggcacctccttgtgaatctcccgggctgcgtggcgggtggcgggtggctggcaggggagggacccttggcactgctgtggctttgtatttgctgccagcggggcctttgatgccccaggggctgctcgcccagccaagggcattgtagaacacaaaagctgcagaaagcagcacaaataaagtgaaagcgacccaggaaactgccagggagcttatcagcctgtttcctgatcataggtatggggtgtagggaggcacggggagcatttctgggcccggtgattgcctgcacgttgccagggcccctggtattgcgtacaaagc

SEQ ID NO: 131694 - DNA, 1047 bp, Homo sapiens
cggcacgtgaatgggcttgagggtgctggcctctggagtaacaagcctctgtaaataatcaagtcacccatatcccagccctgccctgaagcacagtcttcacttggcctgtttaggatcatttcacagattcattgacagggcccagttcctgctagttgactccttggggacggaatcctctattgcttgcaaaaatatgctctgcagtaggctgtgtcttgctaattgagagggattctgagaagtggagcagccctgcctcactagattcagtaagaggaggccttataggtacgttgaatctggcctggtggacaaagcaccctgctgagagctgggcaggtcttcggaaggagatttaatgttcttcagtaggaaacatggtaattcctctctccctctccagatgtctgcaaccaagtcattataacacagaagggaccttgcagccattgtgtctttgtgctcaggtactgtctgagggagggaagggaggcagaaggaaggggagggacggatcagctccatttgctgagccaacctactcagcaccaggtgcccctcctcttggccactggaaggctttctttcttctggccacaatcaaacaccgtttcttctttctgccttggttccctgtgagtcaatgactgttgccgtgggaaatagtagctgcttggcaggggagttcatgaaggttgcagagcacctgctcaggttcttgcctcgcctcccttccccctttcctccctcctcccacctttccttacctggcagctacctaattcttctctttcaaaatacagttcagagaacaatccacaccagctggttggggaatcatccaaagagacaatttctaccctgtgcccacctctcctctagttaacacctttcagtgttccctcccttcctgttgtccttaagttaatgccctaaagtcatggcccttgctcagcctctaaggccctggtgggtgctgcttccccttgtagctgggtgggtttcaggaaatgccccatctggtcatgagagataggcagc

SEQ ID NO: 131695 - DNA, 1284 bp, Homo sapiens
agacagaccaatcaggaggctattgtggtaatccagggtattgcagtaatcctggcctggtggaagcagaggagattgtgagacatgatcagattcagaatatatctcaaaggtaggatttgctggtggattggctatggggtgccgtaagaaatatgatcccgattgttgattatcctgtgcaactacagaatgaagtttccatttattgatatgggccaatcctcagggtgagcaggagtgcctatttgtttttttgtggatagaggtggaattgttatgttagagatgttggtcagacatccaagtggagacagtaaggaggcagctgcatgtacagatccagagtgtccacttggccaggccatggtactcagacatgtgatcaaataccagttgagatgtcacatggagtacgttttgaatgaggttaacatttaaatcagtagactttgaggaaaggacattaccctccacaatgtgaatgggcctcatccaatagttgaaggctttaagagtaaaaagactgaggaaatgggaagtgggaattctgaccccacattgcctttggactcaagccgcagtatcagctcttcctaggggctccagcttgctggcctgccctgcagagtttggacttgccagcccccataatcacacgagccaactccttaaaatctctctctttctgtctctctcttcaacatacacacatcctactgattctgtttttctggaaaatcctaacacatggaagaaagggataaatttggatatccaaaatttatgcaaaaatggatattctgatttgtatttgggacttaagttatttaagccttaaatatgagcgtgatcatcaagagacaattgtgggcagagaggagccagtccatggggccgcacagcacagattaagagattcagaaattatgtgtgtatgtttgtgtgtgttatatgtgtttgggtgtgagtgcttgtgtgtgtgtatgtgtttttgtgcttttgtgtgtgtgtgcttgtgtttgagtgcttctgtgtgttgtttgtgcttgtgtgtttgtgtatgtacatttgtgcttgtgtatttgtatgtgtattgtttacgtgcatgtgtttgtgtgtatatgtttgtgcatgtgtgcatatgtgtgtgtgcttgtatatgtgtgtgttttctgcttgggtgtgtttgtgtgcatatgtttgtgtgtgcttgtgtgtgtttatgcttttgtgtttctgtgtgctttgtgctcgtgtgtgttgagtgcctgtgtgtttgtg

SEQ ID NO: 131696 - DNA, 1305 bp, Homo sapiens
tgacctccacacccagcctcaggcacagagatgtaaagtaacttactcaaaatcacccagctactgacaggcaaatctgggcccagagcccatgctctaatctaaatcattactacctccctgctggtaacaaacaaaacctcagcacagtgcctgcaacacagtaaggactcagtaaatgttaaataaaggtaataatgcttataacaaccatctttgcccccagaaagatccttaccttgaggagatagcaaggatttgagatgttcaatataaaataccaagtatggtgcctgtgcatagttggccatcaatgagtggtggctatttactattatacttgttattttattatactttagcacattgtgttgtacttaaataccacttgtttgccctacttatctttgtccctcctgagggtgcggagtgagccttattcattccagcattcctacaatcttgtacatccatacaattcttgatatgtagttgacatacactactgtaaggtacatgaatgagtaagtagataaaggaatgaacaaatggaccagtggtttgttggggccactctggccagtggtttggggacatgcttcctggagtcttatcccctcttgtcagattcaggtttaggacaacggtacagttgttccattgttcccagataacatatcctatcttaacgtctttgctggggcagcccttggacacaccctgagctcctgccctatcactggccccacttgtaccccttgtgggcaggcaccacggcagcctgctctgaagggagctttcatgtggccgaccaactctactccttgactcctcccttctctcattgaaaaaaaatgtttaaggggacatttctctctcctaaactttttatgttccattgaagacctggaaaacatgttaaataaaaatgctttgccacagctgacctatgtcttctggcttgtaccccacaacatcttatctaatgggtaagtcagttcttatctttatttcactactgaagaaactgatgcataagtgttatatgctttttaagttacgtagtattagtgaaagagcctagggccagaaccagctgtctgcacgcaacccaatgctttttccacaagagttacccacatggctgtatttgttggtattttctacccttacctgcttccagaagactttggaagggtgtgttacaaaagcagtgatccagggcaactttcaagtctgttagctccttgtgacaaccgagctgccctgtaaggcgtaatgaggagcggcttcataatgagctga

SEQ ID NO: 131697 - DNA, 1187 bp, Homo sapiens
tgcagaaacacatgcatgatgagaagagaatcttcattacaacattgtttgacacagaaaaacgagactcagcttaaatgctcattagttagtgattggttgattaagttgtgataaaatggaacactaatacagctgtttaaaaaattagtaaaaaaaaatcagtatgtgagatgatgcacctgttaattaactcaacttagccattccacaatgtatacatcattcaaaacttcacatcatatattataaatatatacaatttttatttgtgaattaaaaattaatctaaaaaaattagtggctatatgaagtaattgggaacaatcttgaagctatattaactaccaaagagcaaagtcaaccttaacaatgctgactttttaaagaatagtgcctagaacactgtgtggagtatgctaacagctacacactaatgcacagccaccaaccccagatcagttacgtgaacttctgcattcacaaacacacttaacacactctgtggctattgcctctttactgacctgtaagtcagttctagaagacagacgatccatgaaggcaggtcctagcctgcccatttgcattggtatctccaaggccaagctagagaaggcacacaataggctttccactaatatttgtgaatgaatgaatgaacagagagaggagttttctttccacagtttccttctacctgctactccttgagcatatgaggctggaatctaagccctgaggtcactcactgctctcctgggtactatccctggcctcccgtccttttccttgagcttctgtgctctgcaaggctttctcattatcctttaggctacagagaaacaaggagacgggagagccttgaaatggaccttcaagattacaatgtgtagctgacattgtcagttaagttgggcagatctgacttcgctgattaagtggatgtatgagccgatcctccccagaagctgggatcagcttccccatctgatggtgagtcagacctgctggggtttgggtcctcgctccagcatggctgcctgtgtgaccttggccactttacttaaccttgctgaatctcaatttcctgatctgtaaaggaagctaaaaatgcctctcttgaggttgtagtgaggattaaatgtgatagcataagtgaaagtgccctttgaagaaagaggaag

SEQ ID NO: 131698 - DNA, 1781 bp, Homo sapiens
ctgtgttctgcagccagccatatgtttaagcttgatagagatttttatctggcttggtaatattacccagcaagggatgacatttcttatcagaggccctgaggaatcagagataggagccctttctttttcctggccgccaggcctccatgtgcagggctggcagggaggctgggaggggctggctgggtctggtagtgggcatcagctggccctcatttcttaagacagcacttctgttagctgacctacacagaagcaggtcatttcgagatgtttgcgtcttggagccactgatagaagcagggcaagggagagtgaatgaggaaggaaggcgggagtgtgatgacgcatgcccagctttgcgcggaggcagagcacttgcctgtgtggggccctgcccttctcttgagaggcaggcgggccctagctgcagcgtcaaggtctggggattctgtggctctgtagggtgaagggcactggagacctaccaggggctgggccattggagtggtgggtgctggggagcttccgtgggcccctccaggtccactccttgctcttctctgccttgttttgtgcccagaaggctgacctgtgtggatgcattatcagggtggatgcaacacagggctgccatgctctctggtatcagtttggaaggcactggcaggatgggaaggcaggcggggagtgaggtcagggggcctatccttccactgcctccctgctgctccctgactgattcaggtaaggtttacaccggggctctaggtttgaattttgattctggcatgtacttgctgtgtgatattaggcaagtggtggaacctctctgtgcgtccgacttctcatctatagtaacgcttttgcattccattgatctctttgcctctcatttgccctgaatgctgaaggaaaggacactgctgtatcccctgagggactgtctgagcccaaagtacactggggacaagggcttcagggtgggcaaggagatgaccgatgatcacgtgatttggaactatagcctccattggagacacgtgctctgggctctttccctcctgagttttgggaagtcctggcctgtgcagcctaattctcaagtactaatcttgcaatcataagaagaggaaggagaagtggttttccctctccctggacccattccagccagcagttcctgactttgcttccttcctgttggtgcccactctgtttccttccatcccttccccaacctctcccatcccatgcctcatgttgggcaacttgagtttaactgtctcttcttccagtggccaagtccaaattctgaaagcacagttctgaccatgtccctgtccaactcaaaaacagtagctccgtgtcacccacaggcttgaagtcagacctctcagggggcattaagtccaccgcaacatcactccagcctgtgaataaagactgaatgcctccgagcctcttatgtggggaatcagttctggtaaacaggtctcacttcttgtcttttaaacactacttgctttccttgacgtctgtgctttgatcccattgttttttctcccttggatgcctgagagatccatgggctctggcttcagagagtgctgggttcagacctcagctccaacagttgctggctctgtgaccctaggaatgtcacctcaccactccaagcctctgtatccttgacattaacctgggctgatagttcctacctgcagggttcttgtgagaagaacctgtctaaaggctcctactggggcttgacttgt

SEQ ID NO: 131699 - DNA, 1662 bp, Homo sapiens
tggcagggaaaggctcaatacgcagctcaacacaggtgaatgctcagccattgttgcccaggctcaatggctgggcagggcagttgactatgtgttggacactgtttacgtgtccaccaggggtggtcaaactatgcctcatgggccaaatctgtgcccaccactgtatttgtacaatcctagtgtgaaaaatggttttcacattttttagtggtagtgaagcaaatcgagagaagaagaatattttgtgatatatgaaaattacatgaaatgagaatggaaatttcaatgtccataaataacattttattaaacatagcagaccctttttcttaacatatctcctatggctgcattatgttacaatggcagagatgacgaggggcagtaaggccaggtggcctcacaatgcccaggatattgagtatctggcactttataggaagagtttgctgacccctgggttacatgtgtaagctcatccaatcccgcatagtgttggcagttatcataccatccccattttacacatggggaagtgagatgcaaagaggttcagaaactacctgaagccacatgcagcatggaagtggtagagttggggtcttgttcctagaactgggactcttcatcgttcagccatagggtaagtcattggtctttgcaggtgagggattgtgaggcaggaaaaaagaaagtcatgcactaatgtatggtagaataagaatttagaggctgggcgtggtggctcatgcctgtaatcctagcactttgggaggccaaggcgggtggatcacaaggtcaggagatcgagaccatcctggctaacatggtgaaaccccgtctctactaaaaatacaaaaaattagctgggtgtggcagcgtgcacctgtagtcctagctgctggggaggctgaggcaggagaatggcgtgaacccaggaggcggagcttgcagtgagcccagataatgccactgcactccagcctgggcgacagagtgagactccgtcaaaaagaaagaatttagaaccaggttcgttggcctcaaagttcttggtctcgctctcatgatgagctccttccaccactctagtctcctaggatcacctgctaaacgcagggccagacacacagaggcattcaagatatccctataaatgcagccacttcatagcaatgtcaggactaaatgtggttttgtacttcctactaaacatgagcttaataaatgtttgtggaataaacagatgaatctgatgaatagttcctggactctcggagtttaaactctgggaacagggcagggactcctgaggaaagcagacaactcctcaaccttctcatgggagggaaggagaccttctttcctgaacaccaattatgcttcccaggtggcatggggtccttaggccacaatgccaaacacttttgcagttaaacttccgatgaaggaaaactggtctgtcttctctgcccattacaattgtctttactctttttgattctgaatgttcttttttctttaaacagctttgttaagatataatttacataccgtacaatttaccaattttagaatattttcctcatctcaaaagaaagtctgttccctttagatatcacctcccaatctcccttctatccccagtcctaggcaact

SEQ ID NO: 131700 - DNA, 1010 bp, Homo sapiens
cctttcggcctccaaaatgctgggattacagacgtgagccaccatgcctggccatggattcgcctattgtagacgtttcacgtaaatggaaccacagaatatatggtcttttgtgaggaacttcttcacttggcataatgttttcaaggttcatctaagttacaacatatacttcattcttttttatgcccaaagtatattccattgtgtgaatatatgccccattttatttattcattcattagttgatggacactgggttgtttctttgggggtggggctgttatgattaattctgctctgaaggttcgtacaagacttcgtatggaggtatgttttcatttgtcttgggcatgtgtatacctaggagtggaattgctgggtcatatggtaactctatgtataaccttttgagcaactgctaaagtcttttccaaagtgtctaccctgttttacattcccactagaagctgctcgttcttgggctcattattcgtgtttatctttaaacacagaacgtgactccattcatatgacggtgctagaagtcagtacagtggttttctctgggacgatggcagaggaaactatgaagggcccaggaacactttctgggaaagggaaatgttctgtgtcttgctggtttggtgcatttgaatacttgcatttgtcaaaactcatcaaactgtttatttacaaattgagcattgcacggcatgtgacttatgcccgattttttaaaaaaatgtacaaatgaaaaaacatagaaagagaggaaaaagcaaaatatctgtattttaattatcacatgacctgactggctgcttatcttacccaccttcccatggacacagggccagtgcctggcaggcaaggccacgtgcaagaaaagctcttaattgatgtgattaactacatctcaatagggagcctggttaacaacaggggagtgaaaaggaggctatttttcactctcccaactggtgaatgcctggaaggggtgatggggg

SEQ ID NO: 131701 - DNA, 1032 bp, Homo sapiens
ctttccaacctacccctttatcctggtctttcctggcaccatgaaaaccagcactcagcagtacagtttgatgacttcttattgctaggtttcatctgtaatcgttgcagatgcttaaatacacacgcaggccaggcacagtggctcaagcctataatcccagcactttgggattctgaggtgggaggatcactttaggtcagaagttcaagatcatcttggccaacatgttaaaaccccatctcaccaaaactacaaaaattagccaggtgcggtggaggacgcctacagtcctagctactctggaggctgagacacaggaattgcttgaactcgggaagtggggattgcagtgagctgagattgcaccactacactccagcctgggcaacagagtgagactctgtctcaaaaaataaataaataaattttgagatttatgtgtgtgccagacacacacacacacacatatgtacacaagcaatttttgtgtgtgtggctcaagccaggcagagaaagacaaatactaaatgatctcactcatatgtgaaatctaaaaaagttgatctcaaagaagtagaaaggagcctggtggttatcagagtctggggagggggttggggagatattggccaaaggatatacaatttcagttaggtaggaggaataagttcaagaagtcgattttgactatagttaataatgtgttgtattcatgaacaaggctaagagagtggatgtaaagtgttcttaccacaaaaaggataactacatgaggtaatgcacatgttaattagctagatttagtaattccataatgtatccactgtgtccttcaaaacatcgtgttgtaaatagtaaatacatacaattttatctgtgaattaaaaaaaaagattaaagaaaacccccatccccacggatgagttaagactgatcactgacggagctagtatgtattactaaccaaagctagaactcattgccgcaagcatctgggtgacagcgctattgatagtccttcctgcagta

SEQ ID NO: 131702 - DNA, 2332 bp, Homo sapiens
agccacttgcctcctctgttgcaagaggagatgaggagacaaatgtggaatttttattcccattcccttccctcctccataggcagccactccagtgtgcttgctgcaggccctgcatgagggcctgcatgaggatcctccctgtcttgttctgattgggtatctgtttttaatttagacaaatgggattctgctatagatctcaatttggttcttttgcttactcaacactctttttcagagccagtcttggtgctctgtgttcacctggttcatctgaggagctgcatctaccctgcccatgccatagatcctgccctgtttgcttctcctgttgctgctagtggacatgaggtaaccacagcctagttctgtgataagctcttcacacctgtacccatatggactgtgggagagtttctctgatatggactgtgatgcgggtgagtcatagtgcacactcacacttaatttcacaagtactgccagattgtgttccagaatgactgtaccagtttacacttccacaggcagtgctcaagatttctgtttccctctgtcctcgccagcacctggtattggcagatgcatcaaaaaggatgcatttgacagctcaaccacctcagagcacttgattagcatccctgtgatggccctttctgctgcagacatcactttgtcataacagcattttgagcaggaagaagcatcaggcaggaaaaaaggggcccttttactgtgactccctatcttctgttagggaagaaaattttccccagaaatccccagtagacttcccctatgtctcagtggccaaactgggccaggtaagctcccagccagtccctgacagagataacaagattgtcatggctgtttcaagccagggccaattcttccccctgccatggactttttttgagcacattgctatctcccttgtccctgaatagaactgggaatattttaataaagaagaagagaccagtggctgatcagtaacttggcagccaacagagtcttctacatcagagttctgcatttgccaactttttgcatgcatgctgcctcttctatataagggatcttcccccacatctgtttgatttgcagagaatgtcagaagcggcgagtcactcatacatgtccattgctttggggattagatccatccagctcattttggaaacggcaattctttttgccaggcagacatgagacccatttccacaccagctgctccagctgaggttcccatgcaggttctgcgtgacagaaatcaatagaaagattcgaagggcagagcaccaaagttcctgccctgcaccatgatgtcaaagcagaatgcctgctgaggacaggtgcagatgaatacctgtcagagagtatcacttctgcaagcagcaacttccccttcttgtcagccacgtggatgccatagtaaccttgtgtttctggctagctcaagaaattaatttataggatgtgtgcagcaggtcatgcctgtaatcccagaacttttggaggctgaggcgggaggatcacttgaggccaggagattaataccaccctaggcaactaaggagacccccatctctataaaaatttttaaaaaaaaaaagcagttttggtggcacatgcctgtggtcccagctagttaggaggctgaggtgggaggatcgcttgagcccaggaggtcaaggctacagtgagctctgatcatgccattgctctccagcctgagagacagatttgagactctgtctctaaaataaataaataaataaataaataaataaataaaaataaaagaaatggaaaccgtatagttataatttgttgagcacttatctttgccaggtggcctgggaagcattttatttctacgatctcatagatatctcttggcagccctctgagagcattgatatattattgctacatcacaggctcctacagaatcctgattctgacaattatcagccatgtggccttaggaaagtcacttcattttttgtaccttagctttctcatttctacatgaagaatgataatagtatattgcacctgctcacagagttaataaacataaagtgcctagaatggcacttgatacttattagctactattgttgccattttttaaaatgaagaaattgagaggttcagaggggtcaatttgccaaaagttagttattaagtagcagggccatgatttgaatccaaaagcttctggctccgaaactgggcttttatccaagggaacatcaccattgcgcccctcatcagtagaatcaattttcaggtgaagactcggtgacaaagaccacaa

SEQ ID NO: 131703 - DNA, 1047 bp, Homo sapiens
aaaaggagcccagaaaactgccacattttgcccatatagaaaagcatatcccgaccgggcacagtggctcacgcctgtaatcccaggactttggaagcccaagatgggtggatcacaaggtcaggagttcgagaccagcctggccaatatggtgataccctatctctactaaaaatgaaaaaataaaaataaaaaaaaaaattagtggggtgtggtggtgcatgcctgtaatcccagctactcaggaggctgagacaggagaattgcttgaagccgggaggcggaggttgcagtgagccgagatcatgccacagcactccagcctgagtgacagagtgagactgtctaaaaaaaaaaaaaaaaaggggggggctccttcccactcatttctcccataacatgtaatgctttttatagtgatttggtcactgctgagctatcttcatttaatgtggttttgacagaatagttggtcaggaaaatttattttcaattaaaataacttgttgaactgtctcggttttgaaaggattccgttaggatggctaattatatagcggttgctacaaggagatatttgcactcaatttcagctcttaggtaattcaaatcaaatgcttgagattttcctccctggagctgtgtgcaaccatcttcctctcacactgcaggcttcccatgagttatttttagaaacccaaatttaagcagcaattttggcagagccatttctagtctagtggagtaaaccatatgtactgataaatgcagccaaagagttagtttctttaaaaagtaacaaaaccatctctctccgttcatgggggttatatgtttacaaactgcaaactatccgttgtactattatattcatttgtgaactctagctgaagtgagagatcatggatattactttaaaattacaaagatgtgtccttttgcaaactgttgtcataatactctttttttttcaagatggcaggccttggcagaattgactggagactctgttttggcctttggatttcccgtgaaacatggagatcc

SEQ ID NO: 131704 - DNA, 1045 bp, Homo sapiens
tggggttttggttcccctagtcccagaactttgttttttgcccctactgtgagtttctgttcctgaacaccccttagttaagtgttccctggttgagcaggtttctaccaaaggagaccaaagctcagtgcttttccgctgctgagctcgctggggtaggtgactaaccctctcctagcatctgcttcctaacctgcttgggcttcagggggtgaaatgagattctgcaataggtgctcaatccacatttcttttatttcccttttcctgttttatatggaaaaaaaactcataattttataagcactgaatctataactgagcttccaaaaacccaccctgggcattttttcacattaaccaagataaaccaaaaaggcagtaccacgaatagagaaaatgtcattaggaaggtgtacatgataaattcgttttttaaaacaggaatggtgatcgtttccatttatcaagcctctctgcaaatttttcagcagctgccttcctcattttaataaaatgcttgcagatctggtttgcatttttgtagataaatgtagaacaagtcacattgacactccctacatctgatcatcctcccagccatcaataccattttcattcacagcctggaatctttaagaaatgagtcaacctgacctatgattcacagatacttgatctgaaatgcttggtggtgtggggttggtggatggggtagaaacaaaaataaatttcctgacaccaaaagtcagttcaagtgaactagaatgggcagagaggggtcgtggggatggttcctgcccttcaggagctgcacttccaagtctgacttagggtgatcacacatccaggcttgctggtggagcttcagtttatgcctgtggtcccagcctcttaaacagttagcgtgcctgtccacgattagaaatgtcacacgttggaagatgtagggttctgaggagagtagagtggcagttcttaaaggccagagataacatttaatcatgtgtatctccagtgcctagcctcttgtaagaaattaata

SEQ ID NO: 131705 - DNA, 2246 bp, Homo sapiens
cagtgtagagcagcttaacatggtacctatgtgccaaagttccagagcaagagttcctgggttctaatcttggctctgtggcgtgactttagacaagtcacttagcttctctgtgactcgcttttctcatgtataaaatgctcagtaactgtgtattgactgttgaataaaggataatagtgatactgaattcatatgattgttaggatcatcgaatggctaaacattttataaaatgattagaacatcgcttggcgcattgtaattggctgcagatgtgcttgtcaaagtaaaattaaaagaaaagtagtcactattataggcctgggtttgcatcttgatcccatcattgggccacttgtggtatttaagcagaaccttcaccctttcactactgaggctcatagagcatgaaactccccctaaaatctgtctcaaagcagccacaatggtggtttctttttgacaaaaaaaggctccttagagaacgttggcttgcaaaggagaggctgtgactaccaagtcgtgtcaacaactgaatggctgaaatacccaaacttgcccatgcaaatgggcttgggtctctcctggcagccgcctttgaaggctctagacttatctgtgaactccttttttgagagggtctttccaactagtggtttattctttgactctcctcataccttttttgccagagagtgagagtgagaagggagggctaatgcctgagctcctgccctttctatgcagtgagggtcaagatcctcagctagtgtttgagggaactggtgtaacctgggtctctcattttctaccatccaagttgccacctctgtcggggtcccactctaatttgggcagccactaagcaatattttgaaatataccttgttcatgagtttaaaggatcaactggtaggtgtgtccattagcaaatcctatggaacaaatatctgctctttttaccccctacttaccttctccaccaaggacagttcagacaaagttgtcaccacctttagcctgatttactgcaggagcctcctaatctatcttcctgtttctactctatcctttatcccccccttggcagccaggggatcctttaaaaatgtgaaccaaagcatgagactaaaccactcaaaatcttcccatggatctcatctcagattaaaatcctaagtgccttctctgtccttagtgaaccccaggtgcacccttcctctgccactttcccccttgtttattctactttccacactggcctccttgctgtgggccagacatatctgagaccagtgtggcttcagggcttttgcacatacgattttccttttctggaacactctctcttccttgcacatctgcctggctctctgctcagatgtcaactctcagagaggccttttctgaccactccctctaaaagagtttcccccgcccctcatttcccatcattatctgtagtactgatgacttgcagatgttattacaaatttggttattttttgcatcctccagcaaaatgtaagccaagtgaagaatgaggtatcgttttgttcatcaaggaatccacagaaaccagaacattctgtagcaggtgatcactaaatatttgttaaactacaaagagccattttaggttagaaataaggtatagctgacagaattctaagcctgatgtttcttatgagcctgctcaattggccctgaaaccacttcccagaaagctctagatatgttctgaataatgggagcaatgctggaccagtgtttgaggttccaaagtgaatacatgaaagtgaaaatgaagctacatgtgactggatgaaccctcttgcattggtttaaaaatcctattcatcatgattagttcacgctctctttttcttgctttgctcccaggcaccagacaagtcattccaaatatggggtcttggtaccagtcagaacgaggttcccatctgtggtggtttaaaaacaaaatgaccttgttccttgatattctttccattgaaagatgggatatatgacttttccttgagtctgtgcaggcttgtgactgctttatgcagctcctgcctggttttctgagcataattattccagggaaagcactgggactgtcaagccgaagaggtccctggtgggtgctcttgtttgtagcctcagctgagctcccagcatcagccagcaatcctgagagccgccatcttggatgcacatgtaggccctctgcaccttca

SEQ ID NO: 131706 - DNA, 2592 bp, Homo sapiens
ttaacactctgggcatcaggtttctcatctgtaagttaagagtgataacatatattgatgtggttgttgtttcaagcaaaagcaagttttgtccaaaacctagcacgcttctccacacaaacaatattttctcaaacttaagatgctttcattttacgactcacccttaattcatgtgtactaagaaagaaacaaatgcttccaattaaactactgcattactgtatgccactggttgtaggacacatacctgttttggagatattgaaatttgaaaagatgtatgtcttagcatctttgatttaaagactgattaacataagcacctagctaagcccaggcaaaaaacgagatccccaagattagagtttgtgaagtgtaagaggagacattaaagcaaatgtacctttgtatgaatgtctccaatctgccattctgttttatacgataaaacacaaagattagtacagacatccttgtggtccagacaaaaagtgccttccttgtcagccgtcgaatggttagaattcaaatgacatcatgtcacagttattgagccaaaatgtattttgcaaaagggatgaagtcagatccctaaatctggctgtgagtcgataagttgttttcagcagtaactcatccctagtaatagtaatagtccaagccccatttctctttggttcttgagaatttcctttttttaggacacgaactagtagttccttgagtattccagccaatgggcagaggggggtctaggcagtgggcaaaaggatgacacagggagacccagggccacatctagggggacagaagcataagcatcagcttcctagcaggcttgacgttaagtgttcacatggagctctgcagttagtacggctgccccaagtgctactatgctaatcctcatgtgaaaggcaaacctacttcaggacaagaggggttaagtctcttccccaaagtcacacagcttgattatgtcaacttagaccatcagacaccagagcctgtacttatacccacagcactgtactaacaagaatgtttgcaaagacacagaaatagtcataaaaggctccaacaaacccaaagctcacaccacaacagctgtcttgtcagctttacctaaacagagaatttcttttcatccataccatcttactttgttcagtatgggttttccgataaggatgttcttacctccttctctttctggtaaaaaccaaaacatccttcaagacccagctcaaatggaacagcttaactccttgttcctacagggtgggccctggctgcgtttggctccagcatattgtcccttgggctgcatggctggctctcctggaattgttgggagtggtttctgttgattactcctattggactggaagtttcttgaggttctggagttagactgagtttgactctatgatttacagctatgtccttggacaaatgtcttagctttcctgagctttaattttcttatctacttcccagaattgtcataatgcagcgtctttgcttaggttgcacgatcagtgcccaatattgtttactgttatgtgattggcaatagtggagcatctttgtgcattatctcagtcttcaatagccctctgaggtaggttctttcactaccacccctttttcacagatgaggaaactgaggtgaaacttcttgcccatggttccacagctcagatgtgacaaaactgggctgtaatcgtacctttttaaactcccttccctcgatggaatcccagtgagagcctccatgaactgattgccaaggatgttttgtcatgtatcagtctctttagatgtcttttaattcagatcttaattttccactcatttgtgcctaggtgacattatcctagtttgccggaaaatgatgctgcaaccagctttgtctctgtaaactgtggttgtttacacatttcaggcatctggcaataatgtgtccctcccccaggctgttatgcgtggcagattattaacaccacaactgccgttttagttaatgaatcaaaaacatggatcactcccattattggccttgaaaagctcaagcaaactcttaagcataactaagggcccacatcgttttccaacccaaagaatgccagggctatgcctcctatttactttgaatgattggctcaccaaagtttttgctggttttctgtgttgttgcaatcatggaaaccctctaactctgctgacattcctgatgtgctactttttttttttttttttttttttgagatggagtctcgttctgtctcccaggctggagtgcagtggagcaatctcggctcactgcaacctccaccttccacctcccaggttcaagcattctcctgcctcagcttcccgagtagctgggattgcagacacgtgccaccacacccggctattttttgtgtttttagcagagatggggtttcaccatgttgtccaggctggtctcaaactcctgacctcaagtgatctgcccacctcggcctcctaaagtgctgggattacaggtgtaagccaccgtgcccagccgctacttgttttttttccctcaagacataacag

SEQ ID NO: 131707 - DNA, 1758 bp, Homo sapiens
cagcttctagaacagtgcctggctgcgggtgagcactcggcaaatacctgccttagaaaggtgattaaaagatgtagagttcctggcacacgatagaatctcattaagtggtcacattgccattgtctgtactcaaccaggaattggcacactatggcccacagcctgtttttgtaaataaagttttattggaacacagctatgcccatttctttacatattgtctgtgactgctttcctgctatagtgggggagtggaatcgtgagacagacctgtgccctgccgagcctaaaatatatattgtctggctctttacagcaaaactttgtggtttctgctctgaatgtcagggtaaccctgtctgaggatgatcacggatttcattttcccttgtttgttagcgttgcggtcagccgcaagttgaaaacaaggaaccagcttgaggtacgcattctcgatgccctttctaagatacttatggagacttttcttttccactccaattctgccatgctctttcggcatggtcagagctggcttctctgtgccctccagatctcatatgtaagatggtgttactttcatttctttgtaaaaagaaactcaacccacctgtcaattgctggtatattcattagggattaaccatgggtcctgcaacaagtaggctcagagcacagaggacatgagtcaaaataaaaaaagataaccaaccaggtacaactgtgctttgtaatattatagaatagaatgctgatggggttcaggaaggagtccactgtgtttgtggggcacaggatacataagattctgatttacttttccatcatggtgaatggcatgatcttagacaccttagttagctttattcaaactcagtttttcaatctgtaaaatggcaatgttcactatatgttgtcactctctttgatgggcagggcccacagttaggagcctctcgaggccttggtatctagaatggtgaaggagagctttctggaatgagtgaacatgtgtcaaatgctctgacgtcctcatttgaagggggccctgtcccctgtaccagctgagcaatgcgagtgggccactgtcctgctaccattttatagtcagcggatctttttttttttctctttctctccagaaggacagaataacgggctcccagattcacaagccccaccaagaggatcaccccaggaacgcttggaggctgaggagttcactgaggctactgcatcttgagactcaggatgaagacccagcttggggctgtcaaaggtgcgacctgccagctgagacctccaggggtcgagcccaggcccctttgccttgttcatggcttaggccagtgcttagcatatagtaaacaacttgtaaatgtttattagaggatgtatggtgggtcatcccttctgaatggcacacagtccattgtcattgtcctcagaggctccagcctcaggtgcttcttaaactgcgatgggaatgatggcagcagatgggcccagggctcagcatgagagctcacagcaggctgtgctccaccccacccaggcccccagtcttgccatgtttcctctgcctccccaggctggcctagaaactgcttccaactgaaaccagccaaatgcctgcccctaaccacacctacaactctagggttacctttagtctagatcaggggtccttaaactgtagcctttgctgggtacagtggctcacacctgtaatcccagaactttgggaggccaagg

SEQ ID NO: 131708 - DNA, 1027 bp, Homo sapiens
tagagaggccatgttctggttgtgtgaccttgcacaggttacataacattctgtgcctcactttacttgtttttaaaatgatgaagatgataactacctggcagcgtgtcttatattagagataatatggttcctggcactttgtaagcactcggtgtgaaattgtcttctgctgctcctcttcatcagtccacccctcctctgcagaggtttcctccatgctgagcaagctggcagcacctaaattcctgttagtgcaccctagtgccttctgcccaggcctcgggacccccagggatcctggcccctgtggacagggacttttgtgccctccttctctgttaccagcaagagtgagtcctgcactgaatttccatgggatcattgcttgctaacatttgtgagtgagttactgtctagaaagcagcttttctggacttttcccattaatttcacgaaagttatcttcctttgcccttactacatgttcattactacaggttcattaccccattttacagacaattaatactccgagatgaagtgactcaccaggggtcgcctagctaagcagtggagagtgggcctcccacccaggccttctcactctgactcctgttctccacgtcattgcatatggcgacatgcgggtcacgtgatcacacatccctagccgatatggaattgtgagcttctcctgggtcttccgaggaaggatgctttcaggagtgctttggaatgaaggcagtggaggccaagagacctctaggtcaaagccaggcgggagggtcctctcaggggcccagccgacaagttgcatttctccctcagaggcctgaagaggcagaacaccccagaggagcctggggccaccacccagcatcactgtgggaaaacggcagcaggaaatgtcctctcgcctgcgtgctccacctcggtccacgccttccctccttctggaagccttgcctgaccactggcctgccccttctatgggaatcactactgaccttgcagcttattatag

SEQ ID NO: 131709 - DNA, 1093 bp, Homo sapiens
acctctggtgctccggagtggcaggccagtcacaggtgtggtgcatcagactatgaagaggctgggtggccacaactctgtgctgggatgctgacctctttgaggcaaacagcatgagctggaaaaagtgtgtctatctcagagttaaaaactggtgaattcccctgttgctctttaccatctcctgggtccgtatgatctgactgccacccactttcccctttcctcactgggctccagacacactggcttccttccttcctgaagcctccatctgctgccgagctcagggctttgttagacgctcaccctgcctgtgttgcttcctgcagtgtgctgaattgtgtctcccaaaagatatgctgaagttcggacttccagaacctgtgaatgtgaccttatgtataatagaaatagggtcttcgcagatgcgatcaagttcaaataaggtcactctggatgacggtggcccctaatccactggctggtgtcctgaggacagagacacacagtggggaggccttgagaagatggaggtaaaggtgggaatgatgcatctacaagccaaggagcaccaaggattgctggcaaccaccagaaactaggaagaggcaaggaaaggctcttccctacagctttcagagggagcacagtcctgctgacaccttgatttcagactgctagtcttcagagctgtggaaaaatacttttctgttattttaagctccccaatttataatattctgttatggcagccccaggagatgaatacatttctttctcctccttcgtttcatacctctagtgccatctccttgaagagtcgttctttaactcccagtcattactaggttcccaagttctacacctttagctctgcagcctattcccacgggagattctcttggtagcctcccccgacacagtgtaagcccctttgtgtccaggttgctcactatgggtcctcagtctctgagagcgtcttcagcacacattgcgtgagcaatcaatttttgttgaatgaatgcattgcaatctggagtgagcataagatcccagtcagaagattgccctgggtgcttcccctagaaat

SEQ ID NO: 131710 - DNA, 1037 bp, Homo sapiens
gcctgttcttactgtttagcatgaaatgtgttttcctgctaagaacatgaaccagaaatgagttttaccgagtggttagcaagaccttaaatagaaaggaaactccaaaaaatgtaacttctctcacacttaagcctccttttcaacttccctttcctgcttcccatcactagaacctccagatcttatttcctgggtgatgatgaatggtgggccctatttcagacctccccaaattctgctgaacttcctctctttgggttttagacagagaggtatggtaagtgcctctagaactgacatctcctgtgagacccttctcttacatgctatgtaggtttggctgctgatggattcagaatggtttttattgagcacctactaagtgctagcttttacactacgcattttgacactctgtaacttctttttcatttaatctgttccagaaacttatgttcactatgatgtgatcttgcttttgatccattttactgatgaggaaattgaagctcagagaggtcaagtaatttgcctaaggtcacacagttaataaatggtaacgccattttcaattctacatctgcctgactacaaagttggtggttttcctttcctaaatgttacaactaaaaacccactctagctcaaaatggcaatgggctttattgtaaggatttgggctgtgcctgggactgtctggtggttatccagcagcctcttaggaggagttggcctgttggatttatggacttgggacccttggtatgtgctcagcacatgccacagacctggcaagcatgctggcctggggtcatctgctcttggggctgtgttttctgattaagggacattaggctagccacttcccacatccagcttcagtttccccaactataaaattaagacatagatatgctttccacgctgccatcctgccctgataatcagattttagtatcccagggctataacgccccattcttccatacccctcaaactcctgcctttctatcctatctggaactgtggcttac

SEQ ID NO: 131711 - DNA, 1004 bp, Homo sapiens
gccaagccatctcatgtggattctgtaaatgaaacctgaacgtttgcatttaatatcatttgcttgcaacaagtttgagtttctccctttcttaaaggtaaagaaaactccaaaatcaaactaggctcttttttcccccttttatcaggggaagaggggctttctccttttattgggagctcagaattgcctttctccttttattgggggctcagaatagctttgaccaacaaagaaactaggttgcctgccctagtagtggttgtgaaggttcttctaagagtcatttggtgactctttttcacctgcaatcttaaacctgacatttacgtctgcctccaaagaaaagccactggggtcttaggcagaagcccagccagctctctccatgtatccaaacatcttctcttcttttgagagaatgctgaacatatttattgagctttcattgcatgttaggcagcagtttttacaggcagcaattaaccctgtatgttctatatattagggtggactttaggcatcaaggtgcaggttcatgcctcagtttccctccctgtaatgtggaggtacatactctttggtgacggagaagtagaatattttgtttaaatacagtgtagatatgtattcactcaaatacacaacccacttttaatggactcttgataccaggaatagaagaataagaacagttagatctagcgtttactgagattctttcatgtgccagggccttatatttggtattagtcagctgttgttgcaataatgctgcataaaaggaaacaaactcaaacaaaaggcttatgatcaacaataatttgttctaggggtcatggggttgcactaccacttagctgattgaggctgagcttgggggggggctttgcttcaagctgtaggtttgctgggctttgctccaagagtatgctcagtacatatttgctttttgtatgtttgtttgggggccagggatgaaaaggccaaagctacctgaaaca

SEQ ID NO: 131712 - DNA, 1374 bp, Homo sapiens
gaggatgacaggctgtgcagaacctgaacagggttaaagctacaatgagaagccataattttgtgagttttgctgagaccaattctccatcctgtcataattagagaacccgatgctgattattttttaagttcctaaaattgatcttttttcttttctttttttaggtacacaacaaaacatttgaatgatgagactacctccaagcaaattaaatccatgctgcaataacaattctggaataagcacctgctgtagacagaagacagtattctgcaatgactgagaatgcagttttttagtgattgcaattactatctcatttattcttgcttttatttctttcctctgttcctcttccctcttttttaatcatgttcttaagacttcttttctgtgccaaaatcagtaaagttacactctgaagggatatcatcctttcaaacgggccatctaaggcagctaattatgcattgcattggggtctctactgagaaaaattctgtgacttgaactaaatatttttaaatgtggattttttttgaaactaatatttaatattgcttctcctgcatggcaaaactgcctattctgctatttaaaaaccctcaatgactttattttctactgccgcctttttcatgtgcaaccaaaatgaaaatgtttaaattaactgtgttgtacaaatggtacccaacacaaactttttttaaattagtaatacttttgtttaaagttttaagtttgcattttgactttttttgtaaggatgtatgttgtgtgtttaacctttattaactaacgttaaaagctgtgatgtgtgcgtagaatattacgtatgcatgttcatgtctaaagaatggctgttgatgataaaataaaaatcagctttcatttttctaagtgtggcttggtttactgatgttttgtttttaggcttctgaagttttccccatgtatgtttttatggaatgcatatatacattacatgattttttcttcttttaggggagagccgggtcttttcattagaattttgatcattgtctatgtatatacttttaattgcctttaaaattttgctaagtatattaagaccagtgatcttttcattaactggacttttattcttgatttactcttgtatggatgtagtaatggaaggaaaaccgcatccttgcttgattctccatttccaggggagcgggtagcaacatgaaggcagagtagccctttaatcatgggaagagagtgattataagagggacttcccaggagaaaagcagaggccatgatctcactagtggtagaaaactaacaggtttcagtttaagatcataaaacctaaatcatgaaatctaaatctcatggttg

SEQ ID NO: 131713 - DNA, 1041 bp, Homo sapiens
ccaatatttaatgatatcatgagtctttcctccttggtttctttctgaatactccctgtgtctcagtcaacctgatttttctcccaagactttgtctttctgattggtcaggctctttgaagccagcaagtggcaggaaatcttttttaaaaacttgaaggtaattgagatctaggaggttttaggattctttcttgagcttgaaggtagtatgcctaactcagaatctacgtttcactttaagggtagttcagtttccttttccttagaatgaaagcagaggagaccagtgatggcgagtgaaagacagggttgaagtctcccacaaagtaatctgtgtttgagggagaggggagggaaggaaagcaccacggaggcaagagtcacctgtcagtttggtacattttctttcctattataatagataatggaaactagaaaataaaatgttgcttttagaaacaacaaaatcaggtctgacttgggactcaggcactttccttttaaacaaacaccctagctgatgtagataatgctgatactttgaaaaatatttcttaaaggaaatccatctagcctttaatatgttttactgagagcacatgtttagaaagcattttgtaaccccaaaagtactacacgagtgttacacacctccacaaaatagaacttaaagaccaaaagattttaaatgagagaatagttccatatgtatgtatatgtttgttttgaatgctttcctgtagtaattatttatatagaacttcctgtgctactaagagaaggcatcaagtcatatgtccattttacaggtggaaaaatggaaccaaatacatttaatcataagagggaaagaaaaaaagagagctgggagttcagattcagtagtagataattgtcttctttattaaatttaagagtaaaggtaaataataattggttttctttagtaaaacagtcgcacttggaaaaaaaatttgtttttgtgcacaaaggaaaataatgccatatatcttcatgttttattttcacgtatattag

SEQ ID NO: 131714 - DNA, 1027 bp, Homo sapiens
attgcatgtgtggtatattagtttgactgattttgttctcaaaaagattttgttttcactaagtgagaataataactcttaggttgggtttttttctgttctaagaataattaatttgacatagtatgtaatctcttgagttccatagttatggtcttgatttattttactattttgaaaaggaatgttacatgaaaaaaatggctgttttaccttttctgttttctttttctttagatgaaaggttgtatcaaagttcttaaggaccaacctcctaatagtgtggaaggtcttctaaatgctctcaggtgtgtatatgtacgtgtacgtatgtacagaaaaaatctgtaaggaaaatggtcgatgtttatgtaaagaaaatgcattaagtgtgaataggatataaaaataagtgttcaagctagaaatatgaagatcttattttgtttattgataatcttgcttccaaacactggttacggtattttatgatgaggaatgtgtgggacacatgacaatagcagcttcattttctggttgaagattttggcttttacttgttgcttctcttcaaacagagattgcttgtttttgtaataaaagtattatataccagttataaataaaattcagaaaacataagaaaatgtaaataaaaagaaataatgtaatctcaccattttgagataagccactattagcatatagccttccagagttttttctttacatatatagataatagctctatgtagtagttatctttttacaaaataatatcttacaaagtggcttgtaactagctctttcctcttaatagaatgtaattacatttgtgctcagacttgtgttctgttatttttatgtatttcctacaataaaaattaagtagtcattatttaatgtcttttcttagattagttttacttaatttagttgctcaaacttctacaaatgctagaacattatttcgttatttagagttggaatctcgctctgtcacccaggctagagtacagtggcacaa

SEQ ID NO: 131715 - DNA, 1071 bp, Homo sapiens
aatgtttatttcagaatgcatataaaaagtcagtagtgctgctgggcgtgctggctcatgcctgtagcccaagcactttggcaggctgaagcaggaggatcacttgagcccaggagtagaagaccagcctgggcagcatagtgagacccccatttctacaaaaaaaaaaaaaaaattagccaggtgtggtggcacacatcggtagtcacagctacgttgagaggctgaagtgggaggatcccttgagcccaggagttccagcctgcagtgagccacgatcacaccactgcattcagtctgggtgagagagagaccctgtcttgaaattaaaaagacagccagtaggatgctccagtggaaaaagatgaagactttatgtattttccctcccctacctagtcataataatttgtgactatagttggctctcgacttttcttctctctgtaaaagtttgtattagaaatagttttctaatttctctacttcgtagtttctttccccaacctctcacatctagttcattagtgtttggtgagaattgtcttcccgtttccctttcatagctagtttaggctcttagcatttcggatctcgattactgattactagccaagcttgttgccttcatgtacacctgtcatatgtaaagagaaatgagttaatatttactgtatggttgccatgtcccaggaattttacgtttgttctcccttgtgactctgaaaatactcttttaggtgtcatctccctttactgacagggcaactaaagtttagcagatcaagtaatagaattgctagtaggccgggtgcagtggtttatgcctgtaatcccagcactttggcaggccgaggcaggcggatcacctaaggttaggagttcaagaccagcctggccaacatggtgaaacctcatctctactgaaaaaaaatacaaaaattagctgggtgtggtggcacacatctgtagtcccagctactcgggaggctgaggtgggagaatcgcttaaatccaggaggcagaggttgcagtgaaccaagattgcgccactacactccagcctgggtg

SEQ ID NO: 131716 - DNA, 1018 bp, Homo sapiens
tacctaccatgtaaaataagataaaagcaaaaagcaaagcagccaatcctatactatacccatccttgccatcacttaaggctaaagacattagtcatcttggttctcccttttaccctcaataattacaggtaaaatccaatttttttcaagtgaaatatctctgaaatgtcttctccatccccctttccatctcctcctcccactgttccaacagagagcctaattcccactctttctggcagtcactctgcacagcataactcattttcggacctacaagtctttttccattttggtacaatctgcccacgattatcagttaattttctttaggaaactgacttagttgtcattcctttcatctaacacactgaatggctccccattccacatggaagaaaaatatgaacttaagctagcatttatggcactatacagtctgaccccaacctgtatctttcgttggttgcagccccttattacactgaatatgctgaattactctttagggagtcatttgaaaacatactctttcccctgccagattggaataccttgtttacctgcccaatatgacctgcaaaaggataactcttctccttagtttcttctgttccaacttaatgttctctgactccctttttgtgttatcacctgttagaatcttaccatggatgttgtatggatacttattgttcataatggaggacggtacaattttataatcatttttctgtcctccataacatttagaatctcttgtatgtagtagacagttcatcaaggttttatttaaattctttaatatcatttaaaatatttttgaagaggttaatctttttttaaaaaaaataacttttttttaaaaagaatatttgagtattatcgatacatgagagtctaaaatgtaattgaggcaggcaccctgcctgggtccttgtataattgttattatatgtaataatttgtgaactaacatccagtgcttttaccttccccacaggcagaaggagaa

SEQ ID NO: 131717 - DNA, 1109 bp, Homo sapiens
gtgtctgtggagttgagaagactcacccttagcactcaatatagaatattcaacactcagccgtgcgtggtggctcacgcctataatcccagcactttgggaggccaaggtgggtggatcacctgaggtcaggagttcgagaccagcctggccaacatggcgaaaccccatctctactaaaaataaaaaaattcagctgggtgtggtggcgcgtgcctgtagtcccagctacttgggaggctgaggcaggagaatcacttgaacctgggaggcagaggttgtagagagccgagatcacgccactgcacttcagcctgggcaacagagtgagacgctctctcaaaaaaaaaaatattcaacactcctagattcaatattctatattttatggattataccagtgtttcctatgtttgctaaagcctacattttaatgtaaaaatgaacctttttttttttttaactctaactatttttattctttggattttgaaggcaatccagcatccagcagatgagaagttgcaagagaaggcatggggtgcagttgttccactagtaggcaaattaaagaaattttacgaattttctcagaggttaggtaagttgaaagttttgtaattgtgacttccctagtgaaaaagatgtttattcattccagaagtttagagtttttttatgttcataatgctgaatttggcttagtatctgttttataagtaaagcaagcttgttagactgtaagattatagttaatcttctttcaaccctggccttttaattcatttagaccatttttgtccacaagttattttcctcatcatctgtcgttttacatacatgaatctgagcattgattttaaatgattttaagaacacaaaagtttgactaaccaagggcctgaggattactttcccatatatgggaaaaggacttactgtagcgatggagagagattctaccaagtgatttctcataataggaccctttagcatccaaagaaatcaaagaggttttcttgaaatttttactggttacgcttaattcatgtatctaaaactgtagaagatgagaaataggctgggtgtgcttgctcatttctgtaatc

SEQ ID NO: 131718 - DNA, 1671 bp, Homo sapiens
accatgttggccaggctggtctcaaactcctgacctcatgtgatccacccacctccgcctcccaaagtgctgggattacaggcgtgaaccaccgcgcccagcctttttttctttcttctttatttttttttcttctttttttttttttttaaatatagaactcttaggcttttttttaatggggtttcgctctgttggccaagttggtcttgaactcttggcctcaagcagtcctcccgcctcagcctcccaaagtgctaggattataggtatgagccactgtgcccagcccgggttttttttttttttttttttaattgcagtacttcccattgggagaattattctgcttctgtgtgtgggaaggctttctacaataaaataataatagtgttttctctaaagtctgtttatatatttgattggatgcatattaagattcatttgtaatcttttggaatagagtatagtggtagaaaagtttatatataggatatatcaaagagactttctggggctgggaaaccaggatctcgtaatgctatgaccaaagattgaagttttgcataggataccgtagtcactcagtagtgctgttttcctgaggaaatacaagacatagccacgcatagttcactcaaaaatagtccatgattggtgatgtgagaaagtaagtaagtgtctccaagtttaaaagaaaagagaaagtttacatagaaaaataacattgaagaacaccaaaatataagggaaaagtaaaaagcaatggtaagtaattcatcttaccaggcttgaaacaacttataaaggtaccattgttaaacattgataagtaataaaagagaaataggcattgaaatacaaaatatgtaagctaaaaaacggaaaagctgcatttaaatctactgtagatcggggacaaatatgtaactattgaagcagttgaaatttttgttgagaagttgatgcaggtttaatgatacaaagagaaaagatttctgaagagtagagaaacaaattaagaaaggaatgtacaaataaaagatgaatatacaccaaatatacaaataactgatgtgttacaagagtcataggtcaataattaaattgctaatagtgttaattaataagacttagagcagccaactattctacctataaaaaagcacagacaacagaaaaaatggtcagctttgctagtaagtgcacatcactgtgaagaagttttggttggtttgtgaagaaacagtaatctcagttagtgcaagaagtattgtaaaatgggtagtctttttggaggtcagtttgaagtatatttaaaaaaaaactataaaattgtttgtgctcttgcaccaggtacttatattttataaaacattgcaaacaactagtttaagaggaaatgtcaatgtaaaaactggtatggccgccttattcatagtagcaaaaatgtggaagcaattcacagcgttattatgaagataaaattagacaatccatgtaaacagcatagcaccgtgtctgatacacagctaaaatgaactgagagttttcttattatcactgtactaataatgttgaattatatattaatatattttactttaaataattttttaaacattattaaatagaataaaatttgatttaagatagaatctattaaataaa

SEQ ID NO: 131719 - DNA, 1344 bp, Homo sapiens
tgtcactgtaaattttcttgtgctttcctgctgtttagatgcccagcctacagagtctgagaaggaaatttataatcaggtgaatgtagtattaaaagatgcagaaggcatcttggaggacttgcagtcatacagaggagctggccacgaaatacgagaggtaaagcgcatttatgtattttctagttaactgaaacttactgtcccacctctttgtaatctcttgttttctagacttcagaattctatatttcatattaagtattatatttgaaggatgctcacttggcattgtttcagaagtgattgcagtgaaatgagcataaaaggaaaaactgtgttccataaataggtagtttttgtaaattaagaaaatgttatttactttttgggttgctcttatacctgaaatttgcagtatttatgtggtgcttcctaggagaaagtggaaatcatccttgcagtcagtacaccttccccatgactttacatcacaaagaaaatatgtagtgtggtctccctcaactttcctctcccaaactgctgaactttttcaggtttgcattcatctcattttttgtttcttttgtttttcagaagaagctgtgtccttgcttctttccaagactgacttctttacctttgttcttcatcctgttctgaaactttactcttttaattatttcttcttctcttaattaaatcttctatcttttttcttttactgaattcttccccgtagcatatccatgtttaggtgtccagaactacacagaggaactccctgtcccctgggccttcatctctccccttctcattactgcatttcttgaagccattgcccgtgctgtgtttcttgattcttcccatcctctgttttgtttattattgtctataacaaagagtgcagaggtcatcagggtcactctttggggcatacattccatatggggcatacattccatatccaccttgatttctcttctgacattggagtactagtgaaggcagaatcaagtgcagacaccagaaggtggtgattcaaaacatgtgttggtgattgaccaaatgtttagggcaagggaagagagagagttaaatgattccatggtgtttattttattttgagacagggtttagctccgtcaccctgccggagtgcagtggtgcaaccacagctcactacagcctcaacctgctgggctcaagtgatcgtcttgcctcagtcgcccaagtagctggcactcaccaccatgcctggctgatcccctgccaaatagaggcagggtttgccatgttgccgaggctggtcttgaactcctggcctcaagtgatcccccgccc

SEQ ID NO: 131720 - DNA, 1022 bp, Homo sapiens
tttggtaatgtaattattgaattttaaaaaaaatgtggtatatttttgactatttggcaggtttattaggtagaattgaattatgacttgctccaagcacaaaataacgttaccgtttttagggatctttactcccagtttcacgtgtaaacaaagtttctttacaatgttctaagtaaaggaataaagaaatcattgtgtatttgtggtgaggtgaaaaggagcagaaaagtctagttaactaattttatatgattggtagacaaagatttaccaaaaaccttcttgtttgttaaaatatttttaaacttaaaagaccagtgtgatagtattaaaaacgttcttacttcatcttataaatttggactgattccttttccctcataagagaaaattttagcatggaggaattctgccagtcatttttctctaaaatatgataatcataatgtttatgattttaagtgctttatgccttacctgtggtgctgaatgtggcctagttggaaagatttgtaaagaaaccttcatttcctcttagagtccacctttttccttaaaatataaaagatttgtccttagagaaacaaatgaccagtattattaaaagcaagatttctgttaacttgagtcaagcagagagaaatccagatttagtcattcattaacatatgttttgtggctaacaccacaggtggtgaaaatgcccatatgtttgtgtccttgattctgctttttataactgtaattcttccttcatttttctcttactcccaagtgtgtaggaactcagattttctttagtatttcaaaatttcagtagtagtattgtagtgtagcttaaagtatctagttttcagcagctgagtaattgtggagcagttttataacttgaaatcctctgcacaggattcttgaccttctgttcatcagcagaatagttcagtgatactctcttgggtttgttgttagatatatatatcctctcttctttaacctataatatcatatatgttgagaca

SEQ ID NO: 131721 - DNA, 1072 bp, Homo sapiens
tggtactttttttttaaatagtaaagccatttttttctatggaaaatcaaagtgacaagtcttggttgcattatatagtaccgttttttgaaaaaaataaaataaaaagctttgttttatacagcttttcccccttcctagtatttcacccttttgcatgacttgctttcagtaaagtagtgcttacttgtctgctattttctgtttgtcttcatttctatagcagtcttcagcagctttcaaaattataaatgtgactttcctgtgacagtctaaaaaatgtttaatcattgtggtgctgggtgtttttctcaccctaaagggaaacttaaatcttctcctctatttttaaatttcttggtacttattaaacctttactagttattaaccacttacaaggtctacttaagtctacttgataatgtttcgtttgtatgttaagtctcagtgtcacatttttatgttaacagctagtcaccacacctaaaatacatagtctagcattttcaaacttcacagatacctttgatatataatagctaaactattgtcctttgtcatgaattcccacttcatgaattcaaactaaatacgtgtctactattgatgttatgtctgtagtttcacaattccatatgaaaaagtgtaagactgtcgttttttgcatgtaaaacatatttttctctactgaatctgatgtaagtataaaagttatgaagtgtgcttttttaaaaagagtgtatgtctgactattacattggaaaatatggtctggctaaatgtaaaatatttagcagtaaattattactgctaaatagcaaagcttgatctataagaaagctaaccatttagttgcaatatcagtatttgttcctagtgataatacctttgtagccttggatagagagtctttttaatttttcaattggctcctcttgtataattattttgtcacagtattttcctcctaaaaaatgatttctgaaaagaaatttgaaaaataagggaacagatatgtaaacacattcttaagttgactttacatatgaatgttactttattgttgctgta

SEQ ID NO: 131722 - DNA, 2485 bp, Homo sapiens
aaaagagggacaggagctataaactcagagccaaatgtgcttttgttgttccaaattctcaatgccaaaagcatataaacctgcacctgttgataattatgagcaagccagcctttgccaaatcccaggcctctgcttaaaattttttactggaactaaatgatgttgccatttttatttttaggtttgctggcatgggtaatctcattaaggtgctaaccagggacatagaccacaatgcagcacattttttcttggactttgaaagtaagtctctttagcccttcacagctggtgcataatggtaaaggtgaaagatgaattatactcaccacagtgaaggccagccagaatatttgttaattaaacatgggaatcaaacaaaggttgcatgattttttcttaatcgtaggcaaacatcaccatcatatgtataatttagtttttcatttgctaaaatcatgttgagtgtgtagccagtgctgtcctttcattagtccatgaagcaagtagccttatgatgaacattctaatagtatgctttagtgactatgtcaaacaatattcgcttataatcctgtaataattttattttaaaaatcagaattgtgctgcataccttgaatcagtagtctccgtacctccacaaattattgacaatccaaatttggttagaaatatatgctttattgaaccgcatgcaggaagaaagttttatactgttttaagatgagatgcaaaggtgagacatggccaaatgtattaatatttggctttgaaataaattgttgtttcagtgctatactaacagtactacatgtaaataattcttgatcagaaatttctttttcagaatattagcactattggaatacttaaagaatttttcattataaggccattaatgaaacttgtcttgggagaattttgagaagaattagagcaacagttgtgccattgtgtacaggaaaaccacatttcacctctaggtcctacatatcaacaccttgagaacccgttttgctgtctgccagagcacagtctgggtaacctgaagaatgaattcatggcctaatgaacattttccctgttactatttttctttaagtaaacttcagatgttcttttttataaagggatattttctcttttctcattcttgtcttgacaggtaccttaacatggggaatcttcttaaagttttgacatgcacagaccttgagcaggggccaaattttttccttgattttgaaagtgagaagatgattttatatctatttctctttgcctgcagtagactgcgtttgtcttgcactaaatgaatgtttccactttgccatctttttaactgctttgcatgactgagctatgaattgtttgagtaaatttctggtgccttctagaactggaagtcctattttatagattaaattgtgatgataaaatgtctttgagtttttataagagatttcatatctcttagttggagattattttgtaatttacgatctattctctaatgaaaacatttttatgaaaaaattttgttggaaaggacaagtactacctcaagatttattaatagaagcaatatttggggaaaacttatattatagtcaagaaaaatcgaccaggtttcagttattgtagggtacatatttaagtatttcaaatatcaatctgttcatgaaggccattcagagctcagtaatttgggcataatattaaaaggtaagtgtgaacctaaattatttaatctttgcagataatttgaaaagttaaaaaaatagaatgtatttatttcaggaatttattttttctgactctaaatgaaaggaaaaataatgggttcacagacctttaagtaatttgccttctgtttgttttatgttgcatgacctattgtaatatggtctaagagtggcaggtaagtgtcattgaccttggtgcatgttgcaaagcttttgctttttttggctgttgatatcgctttagcttgtctggttgttaaattgagaagaattattaaattggtgttttagtgtgaatgatgctattttaactgatcaatagaaaattgttaggaaagggtgaagaggtatttcttaggtttttaatcatgtgatcccttatatttttaagtgttagaatgtatttttatatacttaaaatttaagatgttttctgattttaaaaacaaaacaaataaatcacttaaaccccagaaagtcactgccttttcctccaacttcaatttagtttttacaattttatgtaattcattctattttatgaatcattctaaaccatggcagttcatatgaacacatcaatttatagctatctccattttgtagaataatttgtggtctctggttattttctacttttattccatttctataaaggatctgttacagtttgggtactgtgtacaggctagtaaagagtagtaaatcaatatcaggtccatgtgaaattgggt

SEQ ID NO: 131723 - DNA, 1301 bp, Homo sapiens
cagacactgagtcagtgcttaatctaatttaaccctcataataggaatttaagatatttactataattacctgtgttttaccaatcaagaaatgagtccccaaaagggttaactaccatccttaaggtcaaacagctagtaagctagagtcgaatttctggtttgattccatagattaaactcctaaaaccaaatggtgtgctgcctttttcctactgaaaataattatagtcctttctcatgatatatttttcatctgtagttccaattttgataccactaggtaattttttgtgtatttggtctcagttcttgttagtgagaaaatttatatatgtttggatacagtcattccatatatgttggaaagcttttaaaaattaaagctgtgaaatatgctatttccaaatggtttcttccaacatctattgaagaactttagtaaccaatttgagataattatttgggtgtgatgatttaggaaaaatgtttatcttttcctttaatataaaagcttggtattattaaatgttttacaatgtatacagtaattaagtcaaaatattaaatatttccctcttagcttaatgtcacctaatccacttgtgtaaagtattgtacaaaatcagaccattgaaattctgtgtaatagaaatgttaatataagaagaagatagatctccacctcccccattgggggaatattgtttcaaaagggaagaaccattcagtacttaccatatatgaataaattggattgcttttaacattttataagaaatttgtgtttccgtacatcagactttgacctctaaagcaaatagctatttgtatttcctcatgggaagcttacagttagaaacatatgctgatgttggagagtaggtggaagagggggatgccacaggtgacgggaagtgctaacttttttcaagcttcttataatgagagtgagtggcaagttgtcttttttcttaataaaaatattgttttatgttttgccttatttacatttgccagcaacgggatctttggagaaaaacacatagcaattggaggaaaagtacagcagttggagggaggaggatgtgggtagccgtgataccatagtttgcctccccttttgttactctaccttccaggtttgaacctggtttcctggatgtttctgaccccatttcccactttcatcctcactgcattatggaaatcttgggcaacatttatgccaatgccgtattttcactttttgtcctccgcaaacctactaagttgtgataattgctggctccctgtttgct

SEQ ID NO: 131724 - DNA, 1026 bp, Homo sapiens
ggctgccacaaaggtctctgagatgccttcaaggcattttccccattgtctttgatttgtcattgaatttgggcggagacacaaattcaaatcatatcaacctggtaaagaatttggattttattttgagtgtgttagtgagtcattgcatggctttgagcagagaaaggatgatttatatgtttaaaagagtgctttgcctcttatatgtggaagagattgtaggaggaggctgggttggaaacagggagaccagcaaccctagcaggaagtgagggtagcaagaagtagggaggtgtggcagtgggggaggtgagacgtgctgccctttaagctaatgataaaagtgtgttgaggaggatgaggggagtgtcagggcagatgctcctggcaggcaaggtaaggtgtgagggctgagtattgacactggaattagcaacgtggaagttacctgatggccttcccagtgcagttttggtggtgtgggatggggataaaagccacattgcagtgggtttaatagagaacgaaaggagagaaacaaaagatgctgagtgttagattattccttttaaggaattttgctgcaaagagaagcaagggaatagggtgggagctggtgagggaaatagaatcaaggtacatttctgtttatgttttaagatggaagaaataaatgtatttatgccaaacagaagggtactgaaaaagaaaaactgaagtaggaaggaaactcaagataatgtattgttcagaatgtcaaattttgaagaaagtgttttcaggaaggcgtgggtgataactgggtcaagagctgctagttcagtaagttgaagtgtgagaattgtcctttagatttagccaaatgcaagttttggtgaccttgacaggcacaggtttattgtagtgggcataaaagccaaactggaatgagttgaaagaatcggagtttgaaaggtggaaagaaacagctacagacagttcatttgacaagtcttgctataaagaggacaggaaagatgatgt

SEQ ID NO: 131725 - DNA, 1052 bp, Homo sapiens
aagactgggttaggtattcttttttctgtgtgttcagaatgccctttgcttttttctttatgaaagcatacccacacttgcttgtctggtctcttccacttgtctgtgaattcctcagcaccagatattcagtattcatcatagccattggcagacaggtgctaagtaaatgttgtttgatttaaaacgactaccaccactgatactgtaaaagctaaatatatagaagtatctgaggcttatataatgatacattttaaaaaactgatcatccatgcgttgtagcatgtgtattagaaagaggtaggtacctgaattccattctaagcttttttgttgggcatctttcagtgagacatacgtgttctctgagcatcaatggctttacatttttaaacattcaaaattactgattcatacaagagtgtgcatacttcatttgtaaattgtgaagcctaaaaataaaactcccacaaatccgccgctaattgaggaactagaataattctcaggtttttaaagttgcccaatcctatgattgtctccccctgtataaataaccagtatctttaatatgatgtttgatttaatggtattatattgtgtacagtttgccgatagcattatagttctcttattcatctttatcgtatgtagctggagttaatttgtttgcacagtattatagttcattatgtgaatattgcacatgaacttcagaaggaatgtcagactaatttcccaaacttctcatagtagtttacacttccacccaattgtgcccattgctcttgcgttttacatcagcctagtgtaattttgaaatatataatgaaatgaaacttttctaaaataaaatatttccagaagtaatcattgaaactattggcatatatttattttacagcatgatatataaagaaagccatagttaaaagcagaatgctactccacaaaaaaaaaaaattctgacaattttggtaattaaatgtgacagtggacttgtgtgaccaggcttttcttttgagttgttgacatgaaataaaattcat

SEQ ID NO: 131726 - DNA, 1069 bp, Homo sapiens
tcgtggtggcttacctgagcctgggatgtccaggccgcagtgagccaagattgcatcactgcactttaacctgggtgatagaacaagaccctgtctctaaaaacaaaaacaagggtgggcgcagtggctcatgcctgtcatctcagcactttgggaggccgaggtgggtggatcacctgaggtcaggagttcaagaccagcctggccaacatggtgaaaccccatctctactagaaatacaaaaaattaggcaggtgtggtggcgtgtgcctgtagtcccagctacttgggtggctgaggcgggagaattgcttgaacccaggaggtggaggttgcagtgagccaagatcacgccatgcactccagcctgggcaacagagtgagactctgtgtcaaaaaacaaaaacaataaaaacaaaaacaaaaatccagcccatcattttattagagctggtacaacagttacttctatgacagtccttcagaattgttatcaccttgcttactctgtattttacagttcagaggttcttaacgagtattttttgtgccaaggacctctttggcaatcttatgaagcctatgaatcctgcctcagaataatgattctaataatgattcatgattgtatgaagtaaactacataggattaagaaggaaacgttacattgaaaagccattaacaaatactaaatacaaatttgtgataagtaatatgtgtgcttcttacattaatatgtgtgcttcttacattaatatgtgtgtttctcatgttagagaataagcattaggagtaaatatactatatatcataattttaaatagatgttgtgtgcaaaaattgtaatacaaaaatacccatggtttctattaatgacaaattcataggttttctaatactactgtagtttgttactaatattcttgattgaaggaattgttaatttttgtatagaggttagtgaaaaggttcccatccatattcacagatccctgaattctctatggactccccatattaagaacctcagttagtgaaaattcagctagacctttctccatcatactt

SEQ ID NO: 131727 - DNA, 1085 bp, Homo sapiens
gcaaataataggttatggtcacggaataaggattttaataccttgagtaaaactgattattaatacattgaaactgaatgaacttaaactgtgataagaaatataaatatgcctcttttcatagttttaggcccctgctgtaagactaaagaggaataactaactttccttttcttaccctttgcttcataagctatgatgagaattgtgtacttgtcttcgtacactttttactctctgagtatgttgacggtgacaactgggttgtcttacctattgttgtttccagggcttaatatgatgccttactctaaataggtcctccataaatggtggttgagttaatccaaggaaataaataaatatatgtgtgtatgtataaaatgtgcacgtgcatgatggcattcgtaaactttaaagttaactgtaataaaaacttgttttaaagtataataatgttttagactttcttcctttttttctttccttaaacagatagaaggacaaggacagaatcaccagcactggctgaaggtaaatatgtctttgggggaaatgattattcaaatataaatgaaaagttatgatttcaataaaaacttatattaactatatataatttaagggaaatgttctatacacaatattgagttgctaaaaatgttgttaggaaatattgattgtttagtttttggcttagaataggacctggtggggaaaatgtaaattaattagaactttttttaacagctttctttctttaggagaggtatgtgttttcctttgaattaagtcattttagctgtcaccagtatagttgatcaagaaagttctaagccataattttagtagtttaaagtatatatatgtacatatatattttttttcattgaaaacagaagggaagacactttacacataatcttaagaattctatctgttactggttttggtcctttttttaaaaaaaaattttttagaaacaaagaatcgttaccataaaaggtagttactgttaaagggtcctgagtactgaaacatttgtaatcctgcagttgttttaattataacaagttattaagtat

SEQ ID NO: 131728 - DNA, 1017 bp, Homo sapiens
tagttctaggtatatcaaggagggaggctcttaatgtaaccattgtgctttcttctgatcaaactattttgtggtagtaagcatggtgtaggatgacatagaggaatcctcaggtgtttgagttctggtgctgttagacatggttttcttaagagtactgtacttgagatttagtgtcagtagagagatacatattattgtaattttaatattaaatattaaatacaaaaggtaatgaccatgttcagcaaaactagcatttccattaatctacacactttgagtttatttttgctcttttacaaaggaaaaggatgcatagataacctaatttaaataagtgaaaatctgcattttacaaataaagatgctcaaataacttaataatttaaataattggaaatgcaacccaagcctgatttcagaaccagttctctaaaccattttaccatatttgctttttattattagggagtatacatttttttcataatttattgttttgcctccctgttacaaattatcgtttatttttttctgttgtcttcatgtgatttatatacactcccatgaactattttaagacattttggtatcccttatctttaatttttacatgattgattcatctttccattttaaattttttatagtgctttatattttagcatattattcctccaaagataagtaagattctttgttctattttctgagatttagttttgagaaattaaactcaaatccatgtgtaatgtatagtttgagaagggtctgtcttagttttccatggagttatttcaacaccatttacttacttatttattttttgaacagagtcttactctgtcacctaggctggagtgtaatggtgtgatttcagctcagtgcaatctctgcctcccaggttcaggcaattcttgtgcctcagcttcccgagtagctgagattacaggcatgcaccaccatgcctggttgatttttgtatttttagtagagatggggtttcgccatgtt

SEQ ID NO: 131729 - DNA, 1006 bp, Homo sapiens
atggtcaggtttttcaggtcttacagtacaggtaagaatgatgactggtgttttctaacttggatggatgaatggtattggtatgtattaatacataaacttctttaagatcagcgcttaaatcttaaacagtttggtgtttctagaacctagtacaatatctgccacatggtggatatttgatctgtgttgctaataatagctacaactaagtgaatgtttgtgatttttcctaagcagtaaacatgcattctcattgaatcttatttaatgcttgcaacagtgctgtaaggtctgttaactccatttgacaaatgaggaaactaatgcttactagctgtgtgatcctgagttatggtaattgtcagaactaggattcaaactggtatttgactggtttcaaagcctctagactaaaacttttctacctatatatgctatgctgtttcccttcgttgtaaaatacttaagcactgcatattaaatagggtacaaaagacttgagaaacaaattttatcttccctcagttatacaactaacatctgcagccaatgagtagcagtgtactattggatgaaaatgctttagaattatagggattgatgtgggctggagtcctcgggaaaagcctgttgaaagcaggaatagctttaaattggccctttaaggataagaatctttttagaaggaagaaaggaatgcctttttaggaggaaacagatttcagtactggaatgggcataggctgttagggggctctgctctagtagcatgtttattaggagtagcctgaaatcagaatggatattcattcctaagtgtgccagtttgagaatgtatcctgaagagtattgggagctattagaagttttttttttttaatagagcagtgatgagataaaattagtgtctcttatagtgcttgactaatattaggtactcaggtatttgtgtgatagaaataaagtggggagagaactacagaagtaggttaaccatttagga

SEQ ID NO: 131730 - DNA, 1846 bp, Homo sapiens
aatttttagaatagtacttttttttttttttttgaaagtgttttcccctgatttggtttgtaagttcagacttgatagtccaaatttggaattatataagctatccaataaatagaaataacagaagggcaaacagattaaggttcaaacatggatagcaaacgggatagaaattattgaataaatcagtgcagttttgtatttattaggactgaaaaatcttacccggtgttcttctgaattcttggagttgtctcagtctcagtttaataaagcctttttcttaaggattttagtattattttattatgttaccccattgttaacaatcataggtagtaattaaaatgctttgtataggagaagattttccttttccagtttagtgtatatgctaacataaatcttaaaattaagttatttgacttaatttgaagcatataaaaatgtctttggaagttgttagtagtactggtgtttttttaagtatgtaaggcacccagacatctcacttctctagctttctctgacattctcctctagacataatgaaattactccctcatctgttttcccatagcagtttaaccacagaactccagcatagcattttatttaattgtactgtattgtagtaatttgtttacatgtcatctcatagactatgagctttatgagggcagatcttgtttttacacagcattttgtactttgccatacatagaatgtctggcctattgggagtctgtaactgatctttgttgagttttgaggacgtttttaacactatgtgacaaaagtatttttcatagtcttaaaatctattgttctattgctaccaagacatgcggtaatatatgttaccacatatcagatatataatatcactccaaagtggttatctatgcctattggtgcaactgagttttatcagtccagaaaaactatatctatctgtaggctgggtgggcacggtggctcacacccacaatcccagcactttggaaggccgaggccaatcactggaggccaggagttcgagacaagcctggccaacgtggcaaaaacccatctcttaaaaaaataagtaaaataaaataatttaaaaactatctgtaaaacggtggtggacacaccttagagtatttcatttgaagtctctttatttaatttttaataggagaaattacatatttttctaaattttaccagttttctgctaacgatacattgacctctccttatctctcttttccccaaacaaatcattttagcagaatgacagccttttggaaccttaactttagacgggttgcatttattctaatgtacttatattatttatgatgtttgcttattcactcattcagcatctatactttggagactgtgatgtttcaggcattgtgcttagtgcagagcagagtatgataacaatgaacagcctgtggtagccactttgagtcatgggaaagggtccagcgttttgatgagtgatatgatgtgctgtgaggcctacagagaagatttttaactcacacatggaatatacctttatctcacactgtcctgttctctaaatttctgttgtaattgtagtctgtaacaatactttggtgttgacagaattattatgaattcgttactttttatatatgcaagtattatttccacaggaagtcattaactactttcaggataaagattgttgttttcttttttcaacccttagaaaacgtaaaaagcattctagtgtgcgggtagaacaaaaagccatgggattaggcatggtctgtgggtggtttgcagacccctgctttagatagacaaagcaatattatcatat

SEQ ID NO: 131731 - DNA, 1853 bp, Homo sapiens
atggtgttttttttttttttttcttaagagatggggttcagagtcgaggtcttgctgtgttgcccaggctagactcaaactcagggctcaagtaatcctcctgcctctgcctccttaataactgatgctacagacgtgtgccaccacacttggctgttaacggtgtcttttgaggtgtaagcattttcacttggtagagtctagtttaacttttttttttttttgctgttaagaatggtgcagtgtgtgtcatatctaagaaatctttgcctcaccaaagattatgagatttactcttgtgttttcttctaaaaggtttctagttttggtccttgcatttaggtctatgatccatttttgttaactttatggtgtaagttactaagttcaactttttgcctgtggatttccggtagtctccgaaccatttttgaaaagactatcctttcctctactgaattgccttgatgtctttgttggtaatcagttgaccacaaatgtttgggtttttctatagacttttatttctgtttcattgatctatcattctgctagtaccacatggcttgattactgtagctttcatactgtattttaataatgaaaattcttgtaaacatacatgctcatatttataaaaaaattgaaacaatatagagtagtaaaagaaaaaagcaaaaatcaccacctaggtagtcgctgttttggtgaccatctttccagccatctttatgcatatatatatgttagatgactacacacacatactctccacatttattcatagagacatatccgtatttgcctacgctcattgttcttgtgtacttttttgagtgaatacatttattgtcagctttaagagagaactgattatttttctttctgcagggacttttgtaattttgtgcatttttactgacttaaacttcttagcagaccgaagcctctttgagctaagaactatgagtgcatttttcttggtagcatgtttaaatggaatttacttctcacttcatctggtaaaagatgactttaaaactttttttttcttgtggagacagagtctcactgtcgcccaggctggagtgcagtggcgcaatctcggctcattgcaaccttcgcctcctgggttcaagcgattctcctgcctcagcctcccaagtagctgggattacaggcacgcaccaccatacttggctatttttttttgtgtgtgtatttttagtagagacagggttttaccatgttggctagcctggtctcaaactcctgatctcaagtgatctgcccacctcggcctcccaaagtgctgggattacaggcatgagccactccacttgactctaagacaattttttaaatgtgtgctctatgaatgcagcacattatgtgtagaacttacaacaaaattaattcccaaatccagttttaggcatttaaagtttttataaatctgctcttgagtattagattaactttttggcagttggtgataatgagtgtggagccagtagatatatgtgtagtgatacagaattttatttgcaatcatgtgaggactgatccccactgcaagcttagttttatcatgctaataaagaaatagccacctttgttcttttgcatttcagaatttggtcccagttcctgttgaaaatatctcaggatccagcttcattgaggggttacaaggttgaattcgcaaattctgaaatgtttctctccgctagtgtagatcacatcccattattaggaactcctctgacacctgcatttttcttgtagtatgattttatatggtgcatacatggttcaaaatcatatttagagatgtaacagctctaggagac

SEQ ID NO: 131732 - DNA, 2028 bp, Homo sapiens
ataattatattttgaacaattgagttaatggcaaggtcaaagaatcttagactgtaacagcattttgtaattatgtggcaaaaaattttgataaagatgttgattgccctgagctgtagttttttcaggtatcttgtatatttttaagactgctggctgggcgcagtggctcacgcctgtaatcccaacactttgggaggccgaggcgggcggatcacgaggtcaggagatcgagaccatcctggctaacatggtgaaaccccgtctctaccaaaaatacaaaaaaattagccgggcgtggtggtgggcgcctgtagtcccagctactcaggaggccgaggcaggagaatggcatgaacccgggaggcggagcttgcagtgaaccaagatctcgccactgcactccagcctgggcgacagagcaagactccgtctcaaaaaaaaaaaaaaaaaaaagactgctatattgggttatctaatttgctttgagatctttgggtgaggaagtatagacatgattttgtgttatactttagttcatagaatggatttgtttgcttagaatgggcacttgatatatgtatcttgtcagcattcatgaacaacagtgaattcaaataatttattgggcatttagagtttctacaattatacataaatgttcttggatgtgtgaactcattctatattatgatcagttcactaaatcctggctcttaattacgctgtagtattgaacacctactgtttgccagattccttataaccattaggttagttttataacaactctgtaatgtgtaggttaacttctatttaatttctaattaacattaggaaagtaaggctcagagaccttaggtatgccattaatcataattaaatatttccaattaggtatacttgttcaagtatactcccaagtgggagacgttgaagactggcatttgaacccatcacgtttacttaaattctatttcaacctactaatttgaggtcttatattttatattaagtatttgtaaaacatacttaaaacagcaaatctcaaaactttttctttttcagctgccaaggaggatggataatgttcacttgttctgtactctcctgtaagcatatacaggattgacagctatagcttcacccctttcccacttatgcaagtaattagaatgcaaatgagtcacatttgtaaactttttaaacaaagaaatcattcttagaattttgattatttaaatataaacatttcttgcaacacaccttcacatctcgataatggtaccatgggtcagaatgactactttcaaagatattgtgtgattttgttgaagtagaagacttaatgcagagatatatttttgtagctattcattttgaaaagattgatcatcaacattaaggtactattgtatgtgacactgtgaagcctgagtcctgtacagttattttctgctaatgcagtaatctcttcttggtatattttagttgatgcattatgtatgatatatattaaattctagattgatacagaccctttctactgtgtctagagcaggggtccccaacccctgggccgtggcctgtttggaactggactgcaccacaggaggtgagcggcattactccctgaggtctgcctcctgttagatcagcggagatagcattagattctcatagtagcatgaaccttgttgtgaattgtgcattagaggcatccaggttttgtgctccatgtgagaatctaacgcttggtgatctgaggtggaacagtttcatcctgaaaccattccccctgtcgccctgtccgtggaaaaattgtcttccacaaaaccatttcctggtcccaaaaagattggggaccattgatctagaatatttattccttccaatcatacattggtatgtcttcagataatccaaattaacctgaatactactttaggtcaagcattttcagaaaacacttgctaagaaagaaattatgacatagtcccggatgtcataatgtgacgtaatatgtca

SEQ ID NO: 131733 - DNA, 1527 bp, Homo sapiens
aattaatgatcagcgtttaaagtccagattctcagtcttagggtgtggtcttagtgtgtttccaaacgcgcaatttctactataattacccaaatctataactgtcaaactctagtggaagtggcaattgctgtgtgtgtgtgtgtatgtgttttaacctcatggctattctgggtcatactgagtaccttttttatttttttcatggaagacttctatgatggattaatttcctctgagtgtaaaatttggcagaaaattagtattctttctactcctctggattcctcctcacttggccccttgactgatttgcaacattacctgttaatacattgctgtagaaatgtttgttggtgagactttgttgtctcatctgtcagcaacattgtttgagtacccctatgtgcggaatactgatgaaatgcctgaatccttggagtaccacaaagtgccattctggataagacaaaggtttttggaatttgcttacacgttttttgctacttctgtgtaagtgtattgagtttgccacctttttaccccttaatctctatgtgaaaaatgtatgtcagtgaattttgtgtgttttaagtcttacggtgtgggagatcggcattccaaaggagtgttttatatagctaaaagaatttcagtcactcgggtgtttggtgacttactatcgcaaattattttagactaatatacctcaagaaaaacacactgatccttttaattctttaattgtatttagtaatagaaacagaagctttgtgtctagaactgcttgataactggggtttatttgatagcctgtttgcaaagtgttgcagttaactgaaactccctaatcagcattcataaaatgaaatgacagcacttttttttttcatgtgactttcatatccataataacgaacgagaggctcttagtcctaaagtacacctacctgcatatcattatgatggtgctattgctgtaagtatttatggcagcattttctaacagcttcgtttttggggagcttggtgttaaaaaggtacttggctgtttgtccccgcttaggttttggataaccacttcagtagtaagatttcctaactcatgagagagagagagagagagagagaatgtgtatttgcagaacagttttgctagataataatgtttaagaattctttaaaactttaatagtgatgtagctgtttgtcagggaactcttgctttgtaaaatgttctaggatatatagtatgaattctagattatataattgggtagaggctagatttttgtctcccaagaaagtggttggttgatcagagggaggcgtggttagtaagttaattctagctgccccagaaaaagtataatttcagatgttgagtaaaactaagtgaatgcagtttatttttgatagatttttgattgacgtttaacttaatcgaacttaaaattcatttttctgaactctccaggaataaacgggttttaaaaatttacaggttaaattagtgtccctcttgag

SEQ ID NO: 131734 - DNA, 1062 bp, Homo sapiens
aaaaacaccagtgacatgctagggaatgagtgaaggtaggtggggttcacctttggaagggtgatggggggttcacctttggaagggtgatgggggaactgctttgaatccgaaggctgacaaacagccaagtgaagagactggaaagtgtacttgaggtacagaagggaacagccaatgtgatgcagtggcacccttttttcttcctgcaggtcacctgaagggttggggaaatgagacttggagttgccccacttgtgagaaatatgttagatttgcagatgtgccggaggctcatagataaaccttataactcgggggaaatatggctctaaggacagctttatggctcctgtgagactggttaatgttttgctaaataacaggaaggtgtcagtttgattggttgccttcttacttgggttctttttgaatagcggctctgatgtcatctttcaatgctggatgagcttctagcccttcccaggggattctcaggcctctgtcccctgtcctcttcccctttcttcgttaaatatccatggagtcctcatccctaaggcaacactggagtccctgactatggtggaaatgtttggagctgttttctaaaggattcagtgttcattcatcctgtgaaaaggaagagagaaacagttgatagaactccctgaatgttcaattgaggagcgagactggatacagaggcagcaaaaactatactctaggtgctgaagcatattgaaagatgtctttgagtgaaggctggcagcaaaatatagagtcttctctaaggacaattgggcaataacaaatcaggatctaaaaaattttcagatcctttgacccagtaattacaatccagggagcttacgctgaggtcagagtttttttaaagggaaaaacaaagaaaacaaaatgtctctaacaaaagttaacagtcaataatgacatagtgctttggagctttgaaagtattttcttatacagtcttcatgagagcttcccaacatttccgagaagtagattgtcttatctccatttcacagataggaagcaaag

SEQ ID NO: 131735 - DNA, 1191 bp, Homo sapiens
gcaatcacgacccactgcatccttgaccttttgagccaaagcaatcctactgcctcagcctcccaagtaactgggaccacaggctcacaccactgtactcggctaattttcctttgtttttaaattttttctacatacagggtctcctcatgttgcccaggctggtctcaagcaattctgggctcaagcagtcctcccaccttggcctcccaaagtgctgggattacaggcgtgagccaccacacctggctggaattctctttttctgtaggcaaagatttaattctgatggtatgctatgtaaggtgggtggaaaagcagagatgaactaacctctccataggttttggggtcacagtggggtgaagctcagaagtgaacggcccaccctttttctcccttccgttcctctggagccatctatgattttatggcatcttgtcccttccttcaggtggcgccctcctgtgcctgtgccttttcctgatggaaggaatgggattgtcagagctaaacatgccaagtgagcagtccttcgtgctgctgaaccacaccaggggctgaaagagctgtttgtggaaggggtggaaccttctgatcatgccctcttggattttttttgcagccagtgagtctgtaaatggagccatgggcttggtctgcaaactgcttacagcatcagtcagcatggtggggaacagcctatcccttgggaaaaacctctcctcgagggtagggcttgggaagaagtgaaggcgtgcagaaaatcttttcctcttctccctattcaaatcttggcaagaaagcacactcttcatttctgtttcctgtatcagcagcacattcccaatttgaacttcaaggcatcgtccttgcttcgtcatacatcagcttttccggctgcaaacaattttgcttctctagttgacgaggactctaataactccaggtggtgaatgggcggtggggaatacagttctgtagaaatacagctctaaagcaatacaaacacagagggaaaaaatgggaagcttggcaagggggaagtgctggaataaagcattttacctttattgacattgaagaaacctcccttcagctgaactccagaatcattcaacacttcatggttgagctgcacagcggagtgttatatagcctttaacagcgatgtggctgacgttcctttat

SEQ ID NO: 131736 - DNA, 1036 bp, Homo sapiens
ttttaatgtattgagaaccttaggactatataactttattattatttttttgctttgtttttcttttgagatggagtctcgctctgtcacccagactggagcgcaatggcacagtctcggctcactgcaacttctgtctcccaggctcaagtgattctcccgccccagcctcccgagtaactgggactacaggctcccgccaccacacctggctaatttttgtatttttagtagagatggggtctcgccatgttggccaggctggtctcaagttcctgacttgagtgatctgcctgccttggcctcctaaagtgctgggattataggcgtgagccaccctgtctggccaggactatgtaactttaaatcatgagaagacatgggagtcattgagagcaaacccttcatttctgaggtgaggaaacaggtccagagaaaataaatgacttgctcaaaatcgtactgcccccaagtagcaaagcaggggcttacattgtaattaaagtgattttcattaattctaaagatggttctttcagaatcctactatgccctttccctatagtgggaaatttaatttgtgtctggcttttattataaataatgctgcagtgggcagctttataccaacagcatcttaatgaaagcaagtctgttaataaaaacaataataataagtaatagaaaatgttaatatttactgagctcttaaattttctgtgccctgtgctaagtactctacatgaaataatttacatctgacaatgagtaccattagtttcttcatttttttttttttctttgagatggtcttgctttgtcacccaggctggagtgcagtggcgtgatctcttctcactgcaacctccacctcctgggttcaagtgattctcctgtctcagcctcgcaagtagctgagattacaggtgcacgtcaccacgtctggctaatttttgtatttttagtagagatgggcttttgccatgctggccaggctggtctcgaactcctgacctcaggtgatccgtctgccatg

SEQ ID NO: 131737 - DNA, 1047 bp, Homo sapiens
aataaccatacaattgcagtgatggtgtgtgctgtaaacaagaagcacagaggttgagagcacgtgcacaggggatctgacctggtttgctcaaaatggcaaatgcatggctgtgatgaggaacccaggccaatacctgggggctctaggcattaagagcagcaagtgatctcaagtacaagttgggaccaggtgaaggggtcaagagtccgctcacgaacagcactagggtccctgttattggataaagtgcaggacaagtccttccctggacatctccctgccaccctcccctgaccttcccaagctggaaggaactcttctagccctttaattttacaggatatatcatccgtgtcatttatttggcagttgtgcgttgctttgtattggagtaagtagtgtgcctttcatcccctagaagacaagtctgtttcctacactctatgtcccccaagtaggtgaccctagatgaaatgcttgatggatcagttggctaatgaaaatgcctgtggcattcagttagtcttagaatgtgggcctctttcttcttgcctccaaagcagctgatcaacagaaggttcggaatgaagaacagtaacacgtaacagttccaagtgttcctttgtgctaaaatttaccaaagcttctgtggattgaggcagttaatggggggaaattctatcaacctaggagtagtttaatagatattagcttggaattaaaagttcaaggtaaattgtctttcctttatctactcacttttctttctgcctgtgtgattctatttccattaatagagtaactaccagccatgagccttctgtttgctttggcccctcctatctttccttattttctccatcaggttctctcccttggccacttctgcttcctcttctcttccatatttctcctgttcacactcttcctttttaaaatgccatctttttggacaaacaaaatggttcaaaacgttaaagaaaaatgaaaaagaatattatttcacttccacattcatcttgttatcattgagttttaccttct

SEQ ID NO: 131738 - DNA, 1060 bp, Homo sapiens
ttgaagaatctaggagtgaaacataaggcctggaggatccaaggcttaaagtgttgccaaggcttacacagtttttcaccatctttaacgctgcctcccttttcttgtggattgtggtccaaaatggttgtcagcggttctagcaggaggtaaaaaaaggccactgttccagtagttcaacaagtcttagaactgagtccaactgtctttctgattggtcttttctgggtaacatgcacagccctgaaccaatcgctgtggcaggcaaatgcgacgctctgattggccatcttggatcaaatgccctccccctgagggagattgggtgcagcttgcacctgctcaggtacagagactgagaatgagggaaagattgcaggtttccagggaaatgcgggtaccgtttgtgaatggtgggtaggcaaaagccaaggatgtccaatatagtaggtttttaatcagtgtttactcagtgaatgaattaacagatgaatgagcaaacaggagcgtgctgctgattctgcgagctggttatgcaataccccgagtggggttttaacagatggagactttgcagaggggagggatagaagagggctctgaaatcaagtcatttaaggataccattaaattagctgaaatatttaacaagaaataggagacaggggagacatatgatagctgtttccaaacgtaaagggcattcatagggaagggacattttctgggtccctattttatgccatagatgctgggctagacactttaattgacatcaccccacgtttatttttattttaatttatgttatttcatttttttgagacaaggccttgctctgtggcccaggttggtgtgcagtggtatgattctagcttactgcagcctcagtctcccaggctcaagcaatcatcctgcctccctcctgagtatctgggactacaggcacacatcacacctagctaattttttttctttttctgtccttctttcttttgttctttctttctttctttttttttaaacagggtttcactctgttgcccaggctggagtgcag

SEQ ID NO: 131739 - DNA, 1038 bp, Homo sapiens
attaaatttagtgacctggaatacttctggcagcatggtggactaagctgacttgtgtgagtccttcctggtatgaatacagaattgatggaaatataagaattttatctaggggagcgctgaagaaagggaaacctgcaaatgtcaaaaatgaggataggccggccgcggtggctcacgcctgtaatcctagcactttgggaggccaaggcaggcagatcccttgaggtcaggagttccagaccagcctggccaacatggcgaaggcctgtctctactgaaaatacaaaaatcagccgggtgtggtggcgcatgcctgtaattccagctactcaggaggctgaggcaggagaattgcctgaacctgggaggggaaagttgcagtgagcagagattaagccactgcactctagcctgggcgacagagcaagaatccacctcaaaaaaaaaaaaaaaaggaggacaaatttaagctaaatggtggcatgtgagctgaagccatgactactcctggggcttttgcacagaagctatagagcctgagggccaaagttttaatggcacggtggctctaggaaggaggcctggactcaaggtggaattgagtgctctggagccttgaaggtctgactttttcatgaaaaggggctagaaaaacttcaatacttggagaaatagagaggaagcttgacttgactggaaaaaaagttaccagcaagaacttaaacacatgggattgtactatatatggttgtggaatctgtattttttattacttatgaggtatgagacccttcaacctgaaaaattaacgtaagaactggtctagtaccatggaaacctctactgcgaacgcaaagtcattccataggcatatttcaacaacctatacctaacagcactcccacagtgagaatgacctctgaagacgagttcacaatgaaaaactatattcaggaaaccattccaagttggaaataataaaaccatttataagagactataaaaatggtatatttaaaatgattaagatgtctt

SEQ ID NO: 131740 - DNA, 1058 bp, Homo sapiens
gtattacctccttggggaagtctttcttcgattatccatcactttccatcccctgctgagttaattaaatacccttttcagagattgcctcatcccctttccttcagagcgttcatctgcctgtaattgctcccctaatcttggagagctcctgggtggctgggacggtttaattcatggaattatttccatggccacaatgcttggcacacaataggtgatcagtagctattgagtgaatgagtgtcctcactttataacagaagttaagtgacttgcccaagtcagatgctccgaaagactgagaagggatgagacacatgctatgaggctgaagaggaggcgagatctggtttctagagctgtagtccaggctttctgcctatagcttggaaatgaaaagaagccacacttgtttagaggcccatgttacttctatcagagccacactctatgccctgggtgtgctgggtgtgtgagtgatgtggggtgtgtgtgtgtggtgtgcatgtgcgtggggtatgttcctgggatgtgtgtggggtgtgtgcatgggatgtgtgtatggtgtatgtgtggtgtgtgtacatggaatgaatgtgtggtatgtgtggagtctatgtgtgtacataagaggacatagtttgtgagtatgcagtatgcttagatggttcttttttttattttctttggagacgggttgctctgtcacccaggctggagcacagtgcacatcatgggtcactgcagcctcgacctcctgggctcaagtgatcctcctgtctcagcctgccaagtagctgggactacaggcatgtgccaccacgctcagctaatttttaaattgtttgtagagacgagagctccctaaattactgggctcaagtgatcctcccacctcagcctcctaaaatgttaggattacgggtgagccaccgtgcctggcctagatggttcttaaatcctcttcttggccactgagcagttcggtgattattatttaaaagggaatgtgaaaccacactcatgccatagcaagaagaacgacagaaagaaaa

SEQ ID NO: 131741 - DNA, 1106 bp, Homo sapiens
tcagtctagtttagaaaaacggtcatgaattctgaattaaagtaattctgaatatccattattattataaatagcagatgtttattgcatatttgctataagccactgtactgggggaaagttttattaaataaagcaataaagcgttgttagaaatattacagagctcttgtaattgaacaggattataggcataagtttataattttattaacagggatagaatgaatcatggtaaagaaaaaaaaacaagtgataaacaagccaataaaataacaagatgaatccactgaggggaaggagtaattatttaaattttttttttgtttaattaacatttattgtcttctgggtaacaggcactgttagggacttttacatctgctattttatttaattacaagagttcttcatttccagataagatttcccatgggcttcctttgactaatgagttatcttagcctggtgcttgtcagtcccagctgcacatgaaaatcacctggggagctttggagcaatatggtgctggggtgcttccccagagagtctgtttaattatgcagagtggggacccggctgcagtatttttaaactctggacaaaccagagatgtcatttcacttgcaggaaaaatacagcaataagcaactgctgcaaacttctgcagtagagcatgctatgccaagtagaataagcaaaacacctgttttccttcgtctgtttcctattaagtgggatgtggaaagtgtcagaataattatggaatgaagcaggctagaaaatgttgctttaaaagtctcaaacccagaatttccaggtgctcttaacttgtagcctgggttttgctccgtggcgtttatcagaaacatggtgccagtgacttgcataataaaagtttttgtcttttttattttttaagaaaaaaggaaactatttaacaatcttttatactaaaggtaatgtgttttaatgaaatacatacatatgtccagagtacagaactgtggataaaacagtttaggaggacacagaattgtaaggaattctttcttttggtggagggattatgggtagaaatgtcttccttaaaaatcatctgtttc

SEQ ID NO: 131742 - DNA, 1076 bp, Homo sapiens
gttgtctgttggcgtgctcgcagggttccaaccgatacaaaaactttacattgaagacatcagggtcagctgatggtggctttgtaaggtgtattaaagggacttgcgtcccagtctgtaggccgtgggagccagcggaggatttgtgtactagaaacggtggggccgggcgcgatggctcacgactgtaatcccagcactttgggaagccgaggcaggtggatcacttgaggccaggagtttgagaccagcctggccaacatggtgaaaccccatctcttctcaaaatacaaaaattaactgggcgaggtggcgcctgcctgtggaatcccagctacttaggaggctgaggcaggagaatcgcttgaacctaggaggtggaggttgcagtgagccaggatcgtgccactgccctccagcctgggcgacggagcgagactcagtctcataaaaaaaaaaaaaaaaagaaaaaaaaaaagacaagaaaaagaaaagaaaaggtgggaggtggcaggcgagagaatgtagtccggggcccacaatgagagagggatggtgtgtttgcatgaatggagggcttggggacttagctcagcctcccaggtgccatcaacaagccacagtcagacccgaaatggtagccagggtaggaagtgggacctagtagcaaccagcagcctctcattaacccgcagaacattgtgtcagcgttatgttgcaagtgacagtaaccaaactcaaggtagcttaaatctagaaaagatcatttattgtgtcaagtcactacctggttaggcatggctgatccaggggccccagctgtgtgggccaggttttgtctcctgtgtcgtggccctgcttttctttcttgtttctcaagcagtctctcctttcaagatggcaagaggccatcagcttggattcaggtttttatccactcatgttagcaacgctgtagggtagggggaaggtacccctttcctagtggcttcagccaaagtgtgagagaagtctcttactgtctagttaggggcatatggctgcatttgagccgtctattggttctggaggttccg

SEQ ID NO: 131743 - DNA, 1087 bp, Homo sapiens
gaatgataatgccagattcttaccttgagtctcccctgccctttcccacttggcttctgtttccccacggcccctctgtcctcctgggtcttcccactggcacttcctcaggacatccattctgcttcactgtgtgccaggcactgtactaggctcagaggatgcagtggtggatggggtggatgagtccctttcacatctaaaccaggaagtttagatagaaggagacccagtgctgatacagggagcttgtgatgtagggaagtctgagctgccgtggcctgtggggtgtgaggtgggggttgggggacattgatcccagcctgagaggttaaggagggcttcccataggaagtggcaaccaatcggctagcggctgtgattaattactctttaggttcttagctctaagcaaagtgccttggtgttcaatgaatgaatgaaggagtggatgcctgtaaaagtgtcttacaaactggagtgtgcagtgcaaatggtaagcgctggtattatgattgtggagggtagagcaggggcacctaaaacagggttcatttcccagtttcctgaggaccagctgctgaccaagagctaaggtctgcccaagagcacagccaactggcgtgttggggtcagcctctgtgtcttgtcttccacccagggaagcagattgccatctaccatgttgacatctttagcctacctggtagcctgcagcccttcctaaaaggacctaggtttgcatatccaggcctagtcctctggaccacggtcctcgggctggtggctgattaaggaggtaactgactgggaggaagtatgtgtgtgtgtatgtgtgtgtgtttagaaatctgtgatgcccagcaaatgctaaaaaacatctggaatgcaaattcacatcactaacctctaaccctccatgacagttgccatccccagtgaagccttctctgttctcctctcctccagcttactgagcttgtggtcagggatggcaactcattcatctttgtaactccagtgcccagcacgaggccaggcacatctgggtcttaggacagtttgctgaatgaatgaacaagcttca

SEQ ID NO: 131744 - DNA, 1074 bp, Homo sapiens
agatggatcaggtccttttgcttcagtagaactttggcaattaagtctttgatagtcttaaaatgggtgattggcctcaccaggctgaaagaaaggcaactttgttagcctaggatgcatgaggttgagagcaatattttttttttcctctcctccttttctctttctagaggcagtgaaggttttggggccctacagcctgggttcacatcctggctctgccactcactagctctgtgcccttggccaagatacttcctttctctttgtctttctcttcatctttcaaatgaggactaacagtcgccacctggaagtgttgctgtgacgatcaacccagaggttgtatggaaagtgcccagcagagagcatggcacctagaggtgctcagcaatgtctgtttcttccctcagcccctggtgctctttctgtccctcccctggtcccatcatctgtccctgcatccaatgtcttaccctcccctgacagagcttcagtttcctttgggaatagagcccttggctggcaggtcattcctggattaaacttggagcctccaagctttatgaagtccaagtgtgctattttaaaccaattgtggacttttgtgtggcgcttccgctgaatggaaagataattgtaccagagcttgtcgagaagagtacatggacgagtcatggagcttacattctgtcccattgattttttttttccttcttttggaggacttactagctgccatctgctccttgaacatcgtgttcataaatatataaataatcgaagttgatgaggaggtttgcttaaagaagtgttgctgagagtgatttttataaatatttaagataatctgaaatcattaaaggaattgcggggtttattaaaaaactgaagacgtgttttggaaaggatccttttctttacaagctgaataaatgtcaagagtagagaaatgagggaagagagctttctgaacgtggacatgggatccgtgtgggtgagtgggcagccagtctgtctgactctgccaggcctcagcgttctttttttttttaattatttttatttttattt

SEQ ID NO: 131745 - DNA, 1100 bp, Homo sapiens
cttggataaagcatgtcccttctgtaagcctcactttcctctgaaaaataggacatgattaatcgtttctcacaaggatgttgaggaactcactttgtaatctgttaatattattataatcaagcagtgatcatgttctttgctaagcaactgatgactacagcagagatacctgcggggaatgggaagctgtcattggtgtccctagcatcattcctaggggacattgtgtgtgccaccattacgtgcctcgccagatgtaaagatggtgccacacacacatgctaactgtgatgtgaaattcacaaagacctcacacatgcatgatgccaactaagaccacacgcggtgggtgggcaagccttcaggagagctgggcaggcctggttgactctgttccactcttaaaaccaccttcctctctatcgatttggcattggaagccaatatgcacgattttgttttttctattgaaggcccattacatgattctctttagtgcaatcaatactaatctaattgaggtaattagaaaatttttacaggtaactggcttacaggccaatgcagcagacaataaaattgccattcgccaccatcagtctcaaactttcacagtattcttcctccacggtaaccagaaaacaagtgatagtacatagcagccttttttttttttttttactggctagaacaacactttactcacaaagagaagagacagaacaagattagctttgatttgagtatggtaccccgcagtgggtcttgccaggcagctgacacagcttaatggtctgtatgcatcctacctgggctgtgggcaaagaaaccccttccttcccaactaggaataggtaatagtactgggattggccaggtgccatagcagccttttcatttgcttttttttttttttttcttttttaaatgtatcacacaagcctggagagaagggattttctttagccccacttaacagagaaaaggcttagcaaggtttgtgtgaggtcacccagctgtaaaggcagccaggcgccctggttcagagcaaggactctagagccccacgcctgtgggagagcatgtcacctctctgg

SEQ ID NO: 131746 - DNA, 1173 bp, Homo sapiens
taatcccagctactcaggaggctgaggcagggaattgcttgaacccaggaggccgaggttgcagtgagcagagatcgcgccactacactccagcctgggcaacagagggagactccatctcaaaaaaaaaggaaattttgaaagcattctttagatgattatgtaaatacctttgatttgatttacttgaataatattttgctattgatattctagcacttttagatcctaaatgattcttatttgttgattagcaccagttctgcaaagactgcccttggcccaagagttcttcctaaactacctcagaaaggtaagatctatcatttttacatttacatgtaattaaagtgtcactaccccctccaaggggcccaaggtttttatctcccttgttcattgatccatcccaaatgcctagagcagcacctggcatgtagtggatgcctagtaaatacacattaaatgacgaaaggtatttataaactcaaatttggtgattagcaaagcaccatacttttccagaatacataataattttgtagacattacattattataatccccaggaaccattctttctccccttataaacataatcagagagacttgggaaccaacaccagctctaccacttagtagctgtgtggccttgggcaggtgacgtagtagcttcactaaacctgagattcctcatctgtaaaatggggaaaataatacttcgtgaggttttgtaaggacaaaatgaagtcatgtttcagaaagtccccagcaagtgggtggcaaaggaatccttccctaggatggcatctgttgtgcagagtagagatacccatgctctgcaaagtacaagaaagcagtgtctataaatactgtttttttgccaagctaagacactcagctctttgactgagtcttctttaatgctgacaaggttttcatttgtgaaaccaaaatttcagtcttcttattacaacacaagtgatagttatgccttttttgttgtcgttgttgttaccataccttacctttaaagctgcaaaatacctttaggagcatctagatcattccatccttctataagcctgcaaggccagcagggcccaccttggatacagacggaagctccgaggagctcagggcctgctccttggattttcagtgccagcagca

SEQ ID NO: 131747 - DNA, 1198 bp, Homo sapiens
caggagtttaaggctgcagtgagctatgattatgccactgcactcccacctgggtgacagagcaagaacttgtctcttaaaaaaaaaaaaaaaaaaggccacgtgtggtggctcacacctgtaatcctaacactttgggaggccaaggtgggaggatcagttggtctcaggagtccaagaccagcctgggcaacttagaccccatcttgaaaaaataaataaataaaaaataagaaaaaaaataaatgccctaccttgaagaacatcacagctctgaggattttatgagttaccaaagaagtccttaaatattaagttatatgggctcatgaacatatactgatggttagtttaattaaaattaaataaaactaaatttgaaagcctttggttcttctagtaatgccagtttatctcatttcttcttgtatcaatatcatagaattacagaacattctgtccaggaggtgagcaccctgccagcctctccctcttcagtaggtgcagtcagaccaggaggtgataggtgctagagtgtggtgattcacagtacagaccctggaagagggctgctggctttccatcccagctttgacccttaccagtgacctgaccttgggcaattgactttacttctctgtgtgcttcttcatatataaaatgaggggtgattatactatttatctcataagcataattactatgagtatgtagcacagtatgttgctcacagtaagtgctcagtaaacggtcgttgctgttaataatgttactatcagggcgtcttgatgggtaatgaagagcacattgatttgtggtcaggactcccaggtacaccatttccccacgggacctgcagccatttattcatttagtctcatttccttatcttatgatgccagtctcatgctgtgaggaaggaaggctggatgaatataaaagcatgtgggcaatcggtggtgctattgagcagatgtgcagtgtagtgaggatcagttagttttttttcagccctgccctcttcatctgccctcctggtgctcagcctcctcagccagcccattcccagtgccacctaggcagtattatagtcttctaggtagaggaggagaggaggctgctgaaagaagagaacaagagtttccagagcagtcataggaagaaaggacaaggaaatgaactagagccccagagacag

SEQ ID NO: 131748 - DNA, 1082 bp, Homo sapiens
tgacttcaagtgatcctcctacctcagtcttccaagtagctgagactacaagcacacaccaccacacctggctaattttttaaatttttatagagatggcgtcttgctgtgttacccaggctggtctcaaactcttggcctcaagcaatcctcccacctcagctttctacagtgcaggggattacaggcatgagccactgcacctggccaattttattttttttttaaccaaatttttgaaaccctacttgtgagttattaggttgatggagttagccatatccagccttttgcttttgtctctgtgtgtcataccacattctgatgtgtggaagtgatttcatactggctgttttgtatctgtgagactgggattaatcttcctgcccccattcaatttcctttctaggtccaactggcccaccttcaacactccctctaagcacccagacctctagtggcagctccaccctatccaagaagaggcctcctcccccaccacccggacacaagagaaccctatccgaccctcccagcccactacctcatgggcccccaaacaaaggcgcagttccttggggtaagttatcctaaagtcagggccaaagctgctggggccaggcagcgtgtggggctccactgggcagtggcctgttagcacattcagaaagtgtgccaaaatgcacacacatgctgggtgctgactcgggtatatatgacatgattctacctgtctcttaagggaaaggaacattttgaaaaatatttaggccattaaaaactaaaaggtgctgagcacttcctaaatcttactcaattataatagcaactctgtgaggtaggtattattagtctcgtttatatataaggaaacagaggctcagaaaagcaaagtaatccattttcctcacaacagccagaatggttttcttataaagtgtaaatcagctcatggtcacttttctccttaacacccttttgagatttccttttgagcttcagataaatgcaagctccctatatcaaggcccacagggccctgcatgatcgggctcttatctcctagaccctctcctgccact

SEQ ID NO: 131749 - DNA, 1080 bp, Homo sapiens
tctgcaccctacagaggactgtgagaagcctccagactgaatacaataatggaaaaagtgactgaaagatttcacatctcctgagtgtggttaccaacatagcagtggggacctatctagacaggcacagcctatgcctgttcagagagcctctaggtcattgagagtcctgaaaatggtttataggagaaaatgacaccagagtcctgggggccaagagaccccctcatttccctccacccccttctgtaattttatctcaagggggacaacagaaacccataatatatactgtctgactttgtgccaggcatatctctcatgtcttgaataaattctaactagctctttaccaaagacccagaagacaaagactaaatttatttagtgttccagctgctgaaacaagtgtttgagacttggccacagcaaccgtggtcatctaaggatacagtactttccccacttcccccaaaaaaagcccataattgaaaatagaaatcctccctacaaaaaccaagagtgttcttcatggctgttcacagcaggacatcaaattcagagatttggcctgtctgctggtgagacatagggagtacagccttctcatgacttttataagggatttgaagtgtgcgatatcccatagctagctcagctcacatgcgcttacatttggaaaactgataatgtttagaatggagctcttagaagacattgttaaagatcagctgatactctgtgtgcagagataattcttctctgtttttttggcccctatgttttttttcatttccttctgttgagctgatagaaccatttgcatgaaaacaaggatgccttggatctctcatttgagttccttgttctccatgacaaataaagcagaggtctctatttgcagcagaagtcatttcctcaactgaatttaggggtctgaaggacccctaaattaagtcttccagtgagacagaaacagacacttgagataaagtccccacaaaagcgaagaggagaaagaattattctgaatctagctgagaatattttcaagaaactccagctgcctcatcgaaattc

SEQ ID NO: 131750 - DNA, 1235 bp, Homo sapiens
ccaccagttgggcctttttattcttaaaagaatcctttgagacaattatccctgctcccattttatgaatgagaaaatggggccacagattggactgggaccttaaaagcctacgtcttaaacttcaaagactcgttttgcctttcagccaggaatttgcaagtttgaggcccatttaataagaagaaagcttttaattttggagacaagtcatcaaaataaagaaggctctgcctgcaattgtttgcatttcttcttgagcctgtcacatagcagtgcagcttgtctaagcagagtgttgcctatagtacacctacagatgattcattgaaaactaggaataaggtgggatttgctcagtgtttgtataatattgggatgtttcagcatttaaattaaaatggtgcacatttgctgttccttccagctttcccaggctaaatctggaaagttcaatccacacgtccacgtagaatatgagtggaatcttcgacaggaggagatagatgagagcgatgatgatctggatgacaaagtgagtgtaaattatgtcctcgaattctcaacaactaccccaacttttctagtctgtgtagacaagatccatttttggtgagattgattgattgtggttttatgatccaatgtatcagggccatttatgttgttcagtccttattgggcaccatttaacagctatattaaggttgtccagagaaacagagccaacaggatagggagagagacagagaaattttttttaaggaattggctcacatgattgaaggagctgtcaagttcaaaatgcacagggcaggccagcaggctggaaatcccagcaggagttaatgttgcagtcttcaggctaaagacagtctggaggcagcattccttaccctttgggggacctcagtctttttaaggcctttctttggctgattaggtgaggcacacccacatcatgaagggtagttcccttgactcgaaatctactcatttaaatggtaattgcatctaaaaaattcctttacagcaacatctagactagtatttgaccaaacaccaggacactgtagcctgttgacacataaaattaaccatgaagctaggcatggtggctcatgcctataatcccagcgctttgggaggccaaggcagaactatcgcttgagaccaggaattcgagagcaacctaagcaaaatggtgagaccctgtctctacaaagtaaatggat

SEQ ID NO: 131751 - DNA, 1022 bp, Homo sapiens
tgaaatatcccttcattttcactgttaagtgtccccactgacatggacttgcagaaaatacataccttttgctaaactccttttcctggctcctctccatttctcatcatttctttctcatccttgcattggatgggtccctcattgagtcctctccattccaacattccctttattcagtatgcccacacggaaatgcagtctccttgtatattcgttcaagtcctcagttatattgattttttacttttctcatctgctcctctcctctctctcattttcccctatgtgtcatttttcattctttaactctcaccttccttcaagtttgatttctttgtttttcctcactttattgctattttggaagggggcttctcttttggaattacttgacaaaagtagattttttttttttgcagtggcaaaaaaaaaaaaaaaaaaaaaaaaatgaccatgctcttataaagacttttttcctcttatgtttttaccaacagatggatatcagtattgacaaatagcaaagaagaggccctaaccatggccttccgtggagagcagagtgcgggagagaacagcctggaagacctgacaaaagccattattgaggatgtccagcggctcccagggaatgacatttgctgcgattgtggctcatcaggtttttgtccccatatttgaacgagcttttacaacatcctttctcttcctgtagaatataaaacgatctagttattgaaaaaccttaacccctatggacacactcacatacacacacaaaacacgtattcccaacgtgatttttcctaccgctgagctgcttttacctatgctgttttctctacctggaaagccccctcttgctctcctaggtgtcactgccaaaatactacctttcctataaggtccaggtatataagcaccatggacattatggagagagtagggggcatggggtccacattttgtatcactgtccaccactcccagcctggaccatctcacactgagtcccttta

SEQ ID NO: 131752 - DNA, 1010 bp, Homo sapiens
aatgaaacagaaaatactgaattagctggcactctccagtttgtcatggaaatccatttggatcaaataggaccttcccctctcctcactgtttattcaaaagcagtgccagatgtatgcatggtatttgtggttattttattgtattcttgttgcacttaagaagaataacctcgacagaatgaatcatgtagctgttttattgccgtgtgaccttgtgtaagtcactgaacctcttggagcctcagtttttttttctgtaaaaatatgagaaacagatagagcttttgtgaagattagcaataatatacacaaggcacctggcacataatggcgtaaaactaaaataatattaaaattctacttttactggttttcttcccaggaacttaaatctgtgttgtacctgaaagtaccctgctttctaaggtttcacttatttttctttttttttattttagataatagaacatatcactttcaggcagaagatgagcaggattatgtagcgtaagtagttttgaaataaaggtgcgatgccttggattgaaaaagcacctctctgtttacaatacacatcaacattttcttttcatttgtaagaacctcgcctggtggctccatgcttctttcccgcctgtgggccatcacatgttgctcttctctctgtctgtggttctccctcttgtctactcaataagctctggtacctcctgcaagattctgctcaagcctcaccctctctggggttatagctcactactccttgcccgcggcctcttcataaccttctgtgatcctgtggtgcatgtctgcagccctttagagaccaagagcttttcgagggcaaggaccgtgccttatgcatcttttaatcacatcccttgccctcaggaggggcctttgctcagtttttggtggccaaacatatcagccagcctacctgggcacttgaccattattgtaagaggagcaggtgagccaggccctgaaggaaggaaactgccatg

SEQ ID NO: 131753 - DNA, 2216 bp, Homo sapiens
tatttttagtagagacagggtttctccatgttgatcaggcgggtctggaactcccgacctcaggtgatccacccacctcagcctttcaaagtgctgggattacaggcatgagccacctcgtctggctcttcagctgttttctcagaaaaacttgcaggcccacaagctcctgcctccccttctaggtttggtgacaagttctggagtacaggaatcttcccaagcactgtttcctctttggcaaaattctcttgtacttgacttctggttccattcctaaatcaaaggtacatgcattgaacatggaatcccctggggtctctcacttcctcccctaaagcagttcgctttggaatagatagatatgggacaaagggcattgttttctatgtttaatctcattgaaatcatagagggagaaagatcttgaaaaatggtccagagagcacaggaagataaatagaaattgtttaatgcccattatttagaaggagaggtggcagtgtgtcattgaaggtgtcttgattgtatgccatctctgttgtttcaggcttactgatgtgacttgtctctaactccctccccctctcttttccctgaaaattttaattcctcagctggagatgcacctggtactaggattttcagaaccacagctctcaatcgaaacagggatataggtccaattaaagagtttcattgcttatttctccaggcttctcgtgttcgagcacagcccagcctgggcactcaaacatttcattccttggtcagcttctgcaggaaggagggatcctagtatcagccattgtccagcatgtgaccttgaacatgggcaggcaggagagtgttttgaccagtgtgaatacgtggtgagacttcctaagttagcgtgactatctagatactatagggtctgttttatatgtgtgaccaagagatttgctgataagttatatgaaatccttatcaaattttctctctccccagatattggggttcattaagcattgcctcacaggtagtaattgtcattgtacttctgagagaagtaatgtaaattttgcatcacaaccaaaatttgttgaatccatggatacctgggagatcaatttggggatgattgattaccggggtcattttgaatgaataaatgaaatatagctcagctacatttcatagtaagatacagcattaaaagtgccaactgttggtgcttagttatgggtaggttccagaaaggtgcatttccatggaccatgccgactgttcattggaagtgaggtggattatttttttattctcttctgaaaaatcaccaggatatttatgcacagtttaaagacatttagtaggacacctaatttttttttccatctttaatgagattcagaattcaactgggataaataaaactttactaaacttaccagcttatatttgagggcagaaacctacagatctgttgtcttcttgcagcaaacttggaacaatgctcagatgtctgtttcttctttgctgaaaatgtatttttgtaccactgagcaggccttatgaacagcatacctgccctacagggcactgaacctgcagacaagagagtggagctgcatgtaacttctccattttctctttttttccagtctaacaggcaaccagccaagttgaaccttctcacctgccaagtaaaacctaatgccgaagacaaaaaatcttttgacctgatatcacgtgagtcctttttctctctctgagttggttattgtggcttctgacacctgcacatttccattctccaggtcagcagcttttccaagcagggctcctcacagttggcattggaacagttattcctgcatgtgctgctctaggaagatgccccaggtctcttaatttccactgagcccacctgcagttgacaaggcatagcagtgtcagatctgaccagcaatagaatagaatctaggatttgtacattgaactaaaccaatgcttgactgtgagtacacagctttatccccttggagagatgtttcttagtatattcccatttctgtcttagatctactgaattatagttgttggtatgaggcccagacatagtttaaaaaaaaaaaaaaagccactaggtgattgtaatgtgcacctgtggttaagaagcacggatgtagacttgggaatgcagatgtgccactatatctgtacaacgaatttgc

SEQ ID NO: 131754 - DNA, 1043 bp, Homo sapiens
ggagggaagatgagggaactggccatttaagggcagtaagaaccagaaaaggcaaaacagtaaagctatattttgactgactttgtaagttttcctagggcttggcttgacagggaaacagtgtgataagtgagaagagatttgttcagaattcagctttgccttttattttttgtaaaacataggttagtttacttcaccttcctgatccttggttacctcatttatgaaatgggtttgggaacagtacctaactcatagagtcattgcaaaaattaaataatagaattcatataatgtatctggcagtttaggtactcagtttttcaaaaaattgttaccttttatctgtttggaaggccaaaagccaatagtcttgattgctaaaattctggcgataagatctctctgcagtggtaagtgttcagcatgtaccttaatttcttaccacggttgtagttattgattgtatgccaaaaatatatgtccctgtagggcacagtaggtgtctaaaaaactatttattgaatgaaaactttgaaatgaccataatggtctgagcagctctgttttcagacactagcataggaagtgaagagagctttgtcattttatttttacctctttccacgcgtcagcctcatcctggctgggtcaggcctattttccaagtaattaatgttcacttcttgtttgtaaagcagagcaattcagtaagatgatgggaggaaataatttcatttctgggtactaattccagtagcagctgttttctgctaactgagaaatatgcctgtgctaacaactttacacttccagcaaaaacactggaaccatggtgcacactaagctgtctaaagacaaatgtgcggtgtttattttcttttaggaaacacagaaacattaattgggattgactcattctgtttctgcatgcatttctacttacttatttgatgattttcctagctaaacagccactttctgttatgtcagagggatatcttcatcacttctcttcatgaaatgtacccagagcttcc

SEQ ID NO: 131755 - DNA, 1047 bp, Homo sapiens
ttggtggtagtcaaagaagtgcacagtaagttttgccctttttaaaccaacagaaaactcttttcagttcttaaagatgcagagattgtagtggaaaatgtaccaagcaggaatggaaatggcaaagtatatgccaagacttttttaatgtgcttgctgtttaacccagtaatctcagtttggattttaaaaactcattaaattacagtatcctgtgccaagtgatgtccttggggcactgctcaatgaattgccagcagaatagtagaaaagagagatgagcatttattatgttggcaattttgtatgacttacagctgactttagatatctatcagggaggaaaggaagtaccacttaccttcataaactttatttcagttaatcctcccaacaacccatgtggtataataaccttcattttacagatgaagaaactgaagcacaaagaacagctgtaacttggctagttactcacagaattggaagttcaaactcgggtgtctgtctgacattagtccttgtggcctttctctctcttcctgcagaacacatcatcttactagactgtaagcgcccccttgggcacttactagtcctgttctttctgtcttcagcctctcacacagaacttgacatacagaaggctcttagtatacacttgtggcccagtcctttgtggtaaatgactgcacacatcttaaagattgttgtcctttatggaacttgagcagttgcattgtctctgtcccttgcccctcgcagcacacttttcagtgattcttcggaggaattcctcagaggtctgcaatttccctcaaacagcccagctgagatttttagctgtcatgccagttgtgtccagctacccatctgatatcagaaatcctgtctacagacttggatctgtttgtaattatgattgaggctgtctaacagttattcatttcttcagcaatctttttttttttttttttttttttttttttttttttttttttgagactgagtctcgctctttcacccaggctggagtgcagtggtgca

SEQ ID NO: 131756 - DNA, 1020 bp, Homo sapiens
tcagtacttacttcagttcccaaagtgattttcagtacaaagtcagctggtattcaacagtgaatttgcctaggtagtaatagtcacgacacttccgtgtggatgaagctactacactggagaaataaataaagggaacagaaaagaagggcttttaactgtttccaactcatttcagctcactcactaattactgctcaatttcagacatgaacattgtcgggaacatgctgctttccaaacagacatatcctccagttcacctgctccttttacctcctcacaagtgtcattatgacctgcagagttaacagcatttataaacattgctttattatctgtcattttacagataataagaataatagctaacatttaccgagagcttattttctgggacgaattatataggccctgcctctaagttccttacatgtgttttctcatttaatattcccaacactcaagaagttgtagctcagaaaggatcagtattttgctcaaagtcatgttcattcatttaataaacgcttagtaaatgtgtcaaagcagacaaagtaagcacaggaaaccaaataaaaatataaattggacttcaaaattaaaaacttttgttcatggaagtatattatcaagaaagtaaaagacaacccacagaataggagaaaatatttacaaaatatttttctgataagagtctgatatccagaatatataaaaaaaactcaacaacagtccaggtgtactggctcacacctataatcctagcactttaggaggccgatgcaggaggatcacttgagcccaggagttcgagaccagcctgggcaacacagggagactctgtctctacaaaaaataaaaataaaaaattaccctggtgtggtggcacacgcctattttcccagctacttgggaggccaaggtgggaggatcgcttgagcctgggagatcaaggctgcagtgagccataatgacttactccagcctaggcaacaaagcaagactctgtatattaaa

SEQ ID NO: 131757 - DNA, 1046 bp, Homo sapiens
ccaccttagggtttttgtaaggctgtaaaaagtgaaaaagaatgcatgtggagtgcttagcccagtgcctgcgaccttgtatgtgttgacagctgtgatgattctaagtggcatttaaaattatttatttatatattttattgtctaggatatttctcttaaggaaaacctttttgatgatcaaattgttgtttacataaatttgatgataactttttttcaaagtaaattgtaccttatataagtgtctttcaaaaataaaaataatatattgaagtagaaagttttcaccttcttaagattaagtttgtttattgaagacctggattaactaacttacttttggctttgtagtgtggttgggcagttatgaaactttggcctgtgttctaatggtccctgattttagtattgggtggaattttttatctttcatcaaatttagttttcctggaaacatttaattcctttgaaagttttaaagaaataagtgaatctctcagtctcctgaattctgcagtactttggcagcaaaactgatttcacctgactttagaaatctattttcacgttaaattctctaagtttataaggaagagtttggcctacacaaacaagagtttttcaaaatagaagatgctttgtaaagtatacatatattagccttcgctagtaatggtgatgctaacttgtatagctaatgcatcctccctttattctcttattctttgctttttccctttccacaaatatgtattagtcttttaccaaagatcagctactgtgcccagttctgggacagagataaagcaaggcttttccgctcaggagttaattgtccaggtataggaagtaagtcagatccattattaatcataatggggctggacagtgacgggtaccatggagcatcaagaggaagagagacggctgggcgcggtggctcacgcctgtaatccccgcactttgggaggctgaggcaggtggattattagattacaggagttcaacaccagcctgaccaacatggcaaaaccccgtttcta

SEQ ID NO: 131758 - DNA, 1050 bp, Homo sapiens
tgtttagttacctcaataaattagtgggttattcttacttttattctttaatttttgagtagtaaaaattctttctgattcacctctttttcctaaagtttcaatatcctatggtatattctttgatgagaatgctattctgcgtactttctgcaaaaaacaatcaatctttccagtttttgaccacataaactatacgtttgagatccactgcaccaaggggaaataataattctagaatgttttgctgtgttttatttctgcttgtcgagtaaactaatcataaaataatttataaaatgctaacactctagtcaatttgttttgaacactttgtgactgcgaaatcagcattctctaaactgtctaaaggacaccaaggcttggtaacttgtgcagattcaggggtgatgttcagccacctgaacccatggctgaagagccccatctggaattaatcaacgcaaaaccctgttttattttcacagtatctcattaaagttaatgaaatcaagaccaaaaagggtgtggatctgctgcagaatcttataaagtattaccatgcacagtgcaagtgagtagaatattgcaagcattgttattagcccaattactgccccctgtacttcattatttgtcttaatcctcttcatatcttttcttcatctcgtgactaaataaagtgatataatgacctttttcagctaaatggataagaaatagtgtcttccatcttcagtgttttatacaaatcagtagctcaaattagggcttaaaaatattgtcttccttacaagaagacaaatacttacaaatacttcttcctaaatttgatcgcctgtggagctcttattacagatgcatgatcccctgtcactgaagagtcctttctgatgaccccctaccctgactctcttacttggcattttgcctttttttttttttcctttgagacggagtctcactctgttgcctggctggagtgcagtggtgcagtctcggctcactctaatctccgcctcctgggttcaggcaattcttctgcctcag

SEQ ID NO: 131759 - DNA, 1035 bp, Homo sapiens
atagggaagtcacacaataaatagtttctactaagttctctttaagaatcaaatttcatttggtcaaagtgataaatgtacgtaaactaaaacatcagatagtgcttttactagttaagacttactctgtcagcatgtaatggaaaccccaaataacagtggcttcaacattgttaaagtttatcatagaacagagcattctaggatggaccaggtaccctttgtagcacttctcacttatctgtattgtcctccacaatctaaactcagtgattttatgtcatacctaatggtacagggttctttacaaatcatgacagggaaaatattaagtaggcaacaaatgtgcttctaatggaaacacagtggccttctgcctgcccctcttgatcctgttagtccctcccctttttccaactcttttacctgcttcctgacttatctacacgttcctcagtattttcttgctctttctagctttagctgtgatgtattgctgtggtagacgaggattacattcccttgcatagacaccccatcactttcgcacccttgttcatccattgtggttaatagaacaatttttattaaactagtttcagtgtttacatttttataggtataagcattcattgctaatctgaatggtagaataggattgaatttctgttcttagagtacagttgtttactttttcttaatgacataatggcctcatttcttcatttgcttagttctgtgtgaatcttctgtgaattcttatctgctctagcagatgtcagacacctgtcaataatatttctgtttataaagtacattatgtattttattagcatgattatatatctattagtattaaattgtgtcagcttcttctttcctggagacatccctttgcagagctctttagatcagcagtacagctgccatcctgggatggcgtttgactctctttagttttaaatctaattcctcttgactagtatagttccatattttggtggcccattacctccagtagttttcagagaacag

SEQ ID NO: 131760 - DNA, 1043 bp, Homo sapiens
cgcctaacctacagaggtgtcatgtaggttcaatgaaataatgcatggaaagcccttcaacagagcctggtgtgtggaaaatgctcagtcaatagtagctggttttattgttcatgtggactttattttttaaccatctcccatcttccctttgctttttcagctccagggtttgagccacaatgtgatcttcaccttggattctttgttaaaaggagacctaaagggagtcaaaggagtaagtgttcagaaatttgattttcactttaacttgaaaggattaattttttttttcctctttcaagatcatagtagtacttgtatttgaaagactctttgaacattttcagcgttaaaaatgctcttggaaaatgatcattggaaaaaatgtgcctcttcacataatggtattgacagaggaatgagattaggcactttcaagaagattgggaaggtcctccatgggtgggagagagaagctaagcccgagtcttggctcccacagtgtgaccactggggacccagcccttctgaacctcgggctcctgcttcatcagcatgaccagggcgcttacccttctttcctctctcaggcttcttgtgtatataacacatggtttgatgttggccaggcacagtggtcatgcctataatctgagcactttgggagaccatggcggcgggtaaattgcttgagcccaggagttcaagaccagcctgggcaacataataagacccccatgtctacagaagaagtacaagaattagccaggggtggtggtgagtgcctgtagttctagctactcaggaagctgaggtgggaagatcaattgagcctgggagttcaaggctacagtgagctgtgattgtggcactgcactccattctaggcaacagagtgagaccctgtcaaaaaaaaaaaaaaatggtgtaacgtgcataaagtgaagttcccagtgtcctataaaggaaacaattcttgctaagatgtcatttcaaaactatttattaattttcagcaaaagtagttgcaattttaatct

SEQ ID NO: 131761 - DNA, 1057 bp, Homo sapiens
cacaccccctccttttactttctcctttgtcttggtcttataaatcctagctacttcccctttccatataattatcgtcaaatgaaatcagatgctgcagataatgcacagggaaatggtactttcattttcacttgatgtaggagatgatgttaaatctaacccaccatttactaaattgaattagataaaatataattgcattattttaagttaaggaattctcatattccctggtactcttagacctacccatttttctttctagcatttccagtaaaatgtactttatgagtaaattcagtcttgtcagtcccgagtgcctttagcacatggtgtaatttgtcttgcatttttccttgggcctttcccagatcttccagagcagtacctctgttcttcattgtaattatgccttagaccataggcaagtgatttctgctctctggctgtaagtctttccttctctaaaggaactttggtttttcttccacttggacagcctttagtctaaggcagtggttctcacacttgatcttgcatccatttcaccttgagagcttgttaaaacttaggttgctgggacccactcttggagtttctgattaattaggtctgggatttcataaccaacaagtttccaggtgatattgacactactgatttgaggaccacacttttgagaaccactaggaaggattgtcactctggacagagatccagaatttcctagtgttacggagaagctgcaactgtttttctctccagattcacttttatattaattgtttttacttttatacatgacatctgatttacatctttatcactgaataaagaacaagttgaatgagaaataggctgctggttaattatatcaccctcttgtgattttgcatcatgtttctttttaataactttgtacgtacaaaaataataccacttcattgttgaaaactcagaaaatgtagggagaaaaagactaaaataaaaatcaacagtaatcttatctgttatggagtgtgtgtatgtgtgtttgtgtgtacaccctctgtct

SEQ ID NO: 131762 - DNA, 1011 bp, Homo sapiens
aaataagaatatctgataatgtacaggttggatctagatttgtagccagcagattatttctcaagttcttctttgaaatgttaaaaagtatggagagcatggatgtgcctaatggtaaaattggtagcttctgggtgccctgaactatataatgcatttttaaaaccttatcttttaaaaaaatggtcatcaatcattggcagttttcagcgtttgatctaccaggtatccccttatttcctgacatgcctcactgcctcactaccaattaatactgtgggacattttgtgaaatgtgatctatccatgtgggttggtgggtgggtaagagggaaaggtttatttttaactccttctatttaaaaaatcatacatatttattataaaaatttgagatatatggaaaattttaaaataaaaattataattctagcttctgttaatatttaagagtagtatttgaaacaattttatggatttgtacacagagatactgctgatttgcatagatatctgcaggtataggtatatatctcattcaggtccaaaatccttggggttagatttgtttcaaaattcagagttttaccgatttcagaagggtgacagggtgtacatgccttatattatgcagcacaccccctagtgacttcttgggaagatgcttataattaaacacagttttgtgtctgcagtgaaacttgaatattcacatgaagtctgatatataaagactattaggtgccccacctcaagtctagtcaagagattaccaaccaaatggagtcagaacaggttttgctattaagtgagtttaagctaaaaaaaaaaaaaaaaaagccgtgtattttatatatatatatgcaaatttgctctaacaggctgcatactgtttcattgtatatctgtaccataactgattatttgaattttctgtttgtcaatacaggtataccttgtcttaaatacatccaataaacaggtatcctagtgtatatatacctcaggctg

SEQ ID NO: 131763 - DNA, 1049 bp, Homo sapiens
ttcgttttgataatgtactgtttaacatatataagatgttactattgggggaagctggttgatgggtacaagggacctctctactagttttacaattttttggtgagtctataattttttcaaaataagtttaaataaaagtataacctatcaaattattatcaaggagagaaaagtaggggaaagtgtttagtatacattgttacataaaaatttcagcataaaacaaatgtgcagaacacaaatcaaactcacttcctgatactctttgagccaactgatctgcagtcctcagtcctgcttccttcgcactttaataggttttctaatttcttcctctaattgaagtcctatatgtggttgctattccataaaagtaggaatgattagctatttcctcccagaagtgagtctagttgtcatgattgaatatatctagggaatgctgcctcttagtggtgagaagccagagaaatgtggacaagatctattctattgctgttgtttttactatatttgtggcatacttacaagtgcatgggttttgatttttaatgaggcctgtattaaaatactcagcatcttacttgtgtgggcttgttgagttctttgagtcttggtttcttcatttttgtaaaaagggtttagtaatccctccttgtgttcatttatgattcattctgttacttattagggttctacataagcactgtgggtaggctgtagggatgcagcagtaagaagaacacagacaagggccgtatcctcttggagttgccattctggtggcatttttagaaataatttatgtgaaatacctatgaaagcattcagttcgtagcatgtacttaacagataatgacatttttaaaaacattttttaaatatttatttagttgccttgcaatctctctaaacttatccttcctctcattaaagatgccttcctaatcaaagccaactccagacataacaaacgatttgttgttcatggaatatataccatttcacgcttccatgcctttatagattccattccttccactttg

SEQ ID NO: 131764 - DNA, 1015 bp, Homo sapiens
ctctaatgtttctgtgcttttggatttaacaaatccatgtttttgtaaatcttagattatataaacctcatttattcagaagagcaccctcggttttccttcactctgagcattgcctgcactttcactggaggccttgctcaaagtgtggtgtggtagaaagagaggaagcaaaacaagactgacagttcactttggtaatagctggtaaaggacttgcttgggcaggaagatctgttttctctgagatgggtgttttcgcattgatgtcttgctttagtttccaaggaccaaatgtattggcttaagtcaagagtcatcacctccaaggttcctggaccaatctcatctctacggtttgctacgctgcaggttcctttcaactgtgtgtatatgtgccatacacacagctcagtggccattcaggccaacattcatcatctgcgtttgctcacctaatacatttgtttgtctccatacaaaaccatctgagatttattgaatgtttttgatgaacctggcagtttggtgggtgtgttatgtagattatttcattgaagacattacaacaatcctgtggttactgtacctttaatccagatgaggaaactgaggcaaattgagatatataacttgttcatttaccctattagtatgtgttacagacttgaacccaaacattctgtctctgaacccgttgcctttgctcttctacaatatcctgcctctgtcacctcatgctctggttgtgctgtttccctcagcagaagtactgatcaagctactcccatatacatacctcaagctacagccctttttccacacccactcccctttaaggagtagaagtctaagaaaaatctaaaggaaattgctggaaaacctaattcatttagtaaaggaaaacaaattttgcctttgaaagtggtggtggcattcctggtgagggagccaagtagaagaatcagtttctactgtagtttggttactaagaaaacattattctgattgaata

SEQ ID NO: 131765 - DNA, 1010 bp, Homo sapiens
ttttacacataaacttttatcagtactagtaaacattataaaaatgagggttttttggttttttttttttaaacaaattgtctccatgcaagccctttggtttcaagattgttctaggaatttgtgtctcacttttccttgttgtgtatgaggacattttaaaaaacaacacaaaactcaattctgtgaactacttagaccaatggaaaattctccaagccattcagttttcctgtgttgttctctaagttttgaagttttaacattattaatctgtgaaacacattgtcgttaaggaagtctgccttagtggtccctctccctttcccattttctccctccttcgcccttttgctaatatatgattaaaatgactagtagtttcttgggcactgtggaggttttaatttattgtaattcttgggcaattttctttagaaagatagagcctaatcccctttccccttgaatgtacaccagagttactaactcccttctaatgaatagaatgtagtagaggtgatgccatgtgatttccaaggccagtccatagacaagatagcttcaacctcgtccttctgttctttttctgatcattttctttggaggaagccagctaccatattgaggatactcaagcagtcctatggagaactaccactcacttactagccatgcaagtgagacgtagaagcaaatctaaccccagtcaaactttcaggtgactgcagccctggcagacatcttgatcttgatctttgtgagagaccctgggtcagtacagtaggagtggggctggctttcccttggaagcatgggcatgtgaatgcacgtaagtcaggtgtggcttgagaaaagagcttactgcttgcttctcagtattgtttaaaaaacacagtgagacatactgcacttttagaaatggaagcatgtggttcataataagcgtgggtatactgagttggctattctaccaaatgaattaggttgaaaatgttaatctttttgag

SEQ ID NO: 131766 - DNA, 1050 bp, Homo sapiens
ttaagtgattgtaataaacactaaggcattaaaacaaatagtacatgagaaatagcagcattattgagttccagttttcttctgtacagctttaattcttgatgcttttaatatagaggcagatttatttgacagatatttattgagccctactctgggcctaacataggccctgccctcaaaacgtatacacacctaacagataatttatgcctacgtaggagagcagacttttgcgagctagttttatgcagtaccttttctttggcttgggaagttgatagcttggtggtgttttcttggatggactaaatccttagaattgtttaggagatattggtcgaaggtggtatgttaaatttttgccaaggatctgaactgtgaagtaacttgtcaagtggggcccaaacctttcaaagtttaggatttacagatctttcctgttctttggtcaaattccagctgagaaccatgcagccattaagctgtaggcaccgtagaagacgttaaatgtttctgacagaaatctttataagcacaggagaatcttaaggacactttttatagtctaaaacagcacagataaacatcttaaaacctttatttgcagataacataccaactttcaattttggggctgtgttatgcaaatcaaattttattttaggttggtcatttccccttcatggcagcctcaatcaactcatattaatcttgaaactaacatgataacatctttacctcttcctttcatataagctgcggctgccaggtccctcttcctctgttggcaagtattctgcactgctgcttcctggttgaaccccactaactgtgggtgttgttacacaggatgattcttagcactccacacctcaactcctcaaactgctgtaattggagttcctatttctgttctgcttctctctgcctcaacttgtctttcctgtctgcacccttactcccattccttcctggcttgttccaagaggagtgtcagatagaatgccatgggcgtcttctcctccaggattgcaggggttaaagatg

SEQ ID NO: 131767 - DNA, 1903 bp, Homo sapiens
taatcacgtctttgttctaaaaccctagaggctccatcttggccaaactacggcctccagaatacaatccagtctccttaccatggccctttcctccctgtgtgatgggtcccagtgtatctcttcatccctcctgtggccacttgtttcaggcatctgatctccctgatgcttcttaacaacaagggcctgttttctcagaatgttggcatgcacgtggttgttctctgtctactccaccttgaagaagagaacattcttgtcttcaccaggtatccccacacctagaacagacttgatgcctggaggtacaggtctttgtagatgtaggagccgtatctgcctgttcattccgcactcccccctccaacccccccggcacccgccacattcctcagcacagactgaatgcttgagtgacctctcaatgggccagagttaggattagaaataccaggtagataaactattcctctttgataagtaagctcctattttctttcctgatgccacagataggcccactaattcttttcaaggatttttctaccaatcagtcactctcagtggtgtttttcagtaagtcaccagtattttaaagggcacctggaagctttcacaagcctgtgcatctccacgtggtgttgtggttggttatttatattaagcctattttctgtatgcaggtacacatgccagcgatcagttttagtgaaaatgatgctcattgtcaagactagttttcaatttgtgaagtccacaaaagctgtggttcccagggtgtgcctgaagctaagtggaaagcccctctgtggttttaactgacactcactatgctgagcaaagtatttagcagatagacctatgtgaaatggctgatgtgcagctcacgtctgacctgcttgggtggcacaaccccagtgacctgcaagttgactccttcccactttgctttttatctcaactactctttagctgttttacatagagcctcctggaatgggaagaaaaaggtctttgaaactgattgtctagtggcctgatgactgaatccttgttgttgtttttttttaagggtcctccatcttttgaaccccattgtgtcaggttgaagggttggagagcaacatggttatgaatatagaccttgagatcaggaagacctgctttggaatcctggctctcttattagctgcatatcttagggccattctgatgttcaattttcttatctgtcaaacataggtaatagaaaccttcttataagttactgtgttgattatataagatgatataagattaatggcaatgtcacattgtcattttatcatcatcaatactggggagaaaagagacaagaatgaaccaaaatcagactctgaggaccattggggaaaggaggaaaagaagcaaacacatgtctgtgccaggtattatatgagaaaggtgttaacagtacctttagtatcagagagagtgactaacttgaccagggtcacacagtcagtgtgtggtagccaagcagtgacacaggtctctatgacctcaaagcttgtgtttgtagccgtggctttacacctctcaagatggtagcttgccgcgtgataggctatgtttcttccaagaggcaaaggttggacctcttaacaaatggtagttgatttctggaacattaatggtcacttagaactgtgggtactcatagtaacttagtgccagatggtgtgggaccatcaaggattctactgattaggtgcagagaatgagcatcccagagaaaagcaaaacttagcttagccctcagaggtgggttgagttctctttacagaatgtatggaatggctgtagttgtttaggatgacaggtttgattttaagggttgtattagtttgttttcacactg

SEQ ID NO: 131768 - DNA, 1487 bp, Homo sapiens
gcactgtcacccggcatgtttctagaagggaaggattcaccctttctcatgttcatattcatgggttgaggatgaggagcaaacacattatttattagcacatagtgaagtgaattgaaacaaaatgaaatatgttgtgcgtgaatatctggtaacatttcaagaatacagttatagttccaaaaaaagcttagataaccattgcttgctagtattgatcaagaaaggagagacaaagtaggcttccacagtcagaggtgttgcttgggccacttttccttccaagcactattggtatctaagcaggcagaggaaagggaggataagtcctgctagccaagtcagctgcctggcacgcacgactgcctttgctgactgagaggacttggctggcctgagagtcgtgtccatctggacagagtgctggtgaccacaggatcctatatagatcccagcagcgttttctgacaggtcaaccatggaaggaccaggtgaaatgaaacatcagcacttttctctctccatttccaatcctatttaggagcctccgttgtttagctagcattcttgatttgatttgcctttaggttaagcccatctctgatgttctgaaatttcattctcttctccttatctggaggtagcactcaagaaagacatgtgtgttgtgtctctctgttgacctccacaccatgtcctgtccatcatatttaggaatcctctgccttttccagttgtggttttttcctcctcactagttttaacaggggctagaacctaagttgtcagtgtgtgcaccacagaggtctgtggcaagaagaatgtgtgtgagtcattggcctgtcattattgtctacgttactttagacacactgaactgctctgaacctcggtttcctcatctgtgaaatatgcccacttttcaaggcaaatttgttgtaaaacagatgtaaagtgtccctctgtgcatagttggtagaaggcactggaagttgttattgtggaatgcatatagcatggtgaataagccctaggatgtagagcaagacattgctgagcttgattccctgatcttgctacttaatagctctgtggcctgcagaggttaataatactcacttcatagggtttttaggcttaaataaaataacagagagaaccatttcagttaggctccctaagtgagcaaaggctcatttaaacttactcaaaagtggtggttggtgggggattaattccagccacctcctggtgtctctcaaggatgtcttcttttttgtatttatgttttgttctcttcacactcatgctgtacccagacttgcctttgcttgttgcatcttttttctacacctagttgtagtttgtgttccttcagtaaaatttgtgcatggcccatcatggtctcttctctgtcaaattctcttctctagttcaaattcctgagagggtgggatctgactggcccagctcatctttttttcctc

SEQ ID NO: 131769 - DNA, 1052 bp, Homo sapiens
cactactctaacccaactatttttagttattattttttagtttttgttgcttgtatacattgttttaaccgttaccatcttcaaatacatgccatgttgaattttgcgtttttttctttaaaatagtacaaatattgctctatagttacacagttgtgtgtgtgtgtgtgtgtgtgtgtgtgtgtgtgtgtgtgtgtgttttaagacgggatcttactctgtcacccaggctggagtataatggcatgatcccagctcactacaaacttctgcctcctgggctcaagtgattctcccacctcagtctcccaagtagctgggactacaggtgcacactatcacacctggctaattttttaatatttttgtagaggcaaagtcttgctgtgtttcccaggctggtctcgagctcctgggctcaagtgctctacctgcctcagtctccctaagtgctgggattacaggcatgagctaccgtgccaggcctatacagtcttattttgagggccacataataatatcatcatatagagatgttccttaatttactaaatcatttctgtgttactggatctgcagagattgtgtctgtattttggctgataccatcagatctgtaatcaactttgagttattagccacttttctcctagtgaccaatttccttggggtgtatggaagtgagatgcttggacagagggaatggagcaccacctttatggaacttgtgctgccatgttgctttgtgtaacaccactagccacaaagaaggttcatggttttaggaaagactactttttcagctgctcctaccagttctgggctggacacttcctgagtttctctctagagagagggcctcacccaacatccccttgtatagactacttacgggaagattttctcaaggagaaaatatatcagtcacaactaagttccctactcttgtgaaggaaaatattctacccaatgggcaaaggatattccaccctgaccacaatgcttttataagcatagggtagaggagttccttcaacacgtaatttatttat

SEQ ID NO: 131770 - DNA, 1039 bp, Homo sapiens
ttgtttggccaagtggattgttcagcacttgttctgtgtgctggtgactcatcttacactgtagggtgaactacttctcaggtaatacttacaggaaagatttctgtttcaaaaaaggaggattaactcaattcattaggaaaaattaatttgagcagatgagggaaatggcttttaaaggtagagagaaacagtggactaaaatctgtaactcttttctaaggactgttttttcccagcagcttctacctgttggacagaattaccttctttaggtacctctgtttaggatagattttgtttgttttttattaaactcaaatattagaaccaaattgccttcttgcaaagaaacatacaggatgaagatttagcctagttggtttagtttttgtgttcttatgcatgttttagttgaaagacagtttctatgaacatagagcaaaatatgagcaaaatgaaaagctttgaatttataagttacttgtctctacactggttatccaattaaccttttaaatgagggaagttatttctttatacttttacatacagagctgattccttgagatcacacagatcagacagaaagaatgttagaattaggaatcatcagaattataagggtctgcagaagtattcaaactgcaggtcacaatgtatgttaatgggtaatgaagtgaatttagtgtgatctttaccaaaagaaaaagtttcatcttattggagggggaaacatgggcccaaagtgacttagcttggtactttattgtaaatgtttgataactttttatttgatttggtttgattttttattttttgagacaagattctcgctctgtcacgcaggctggagtgcagtggcacgatctcagctcactacagcatctgcctcccaagttcaagcgattcttgtgcctcggcctccagaatagctgggattacaggtgtgggccaccacgcctggctaatttttctatttttagtagagatgaggtttcgccatgttagccaggctggtcttgaactcctgacctca

SEQ ID NO: 131771 - DNA, 2226 bp, Homo sapiens
tagaagaaaagcctaaattttgaattcatagttaagagttacagtccttgttagcacttgtttacagtgtgatctggggtaaatcatttatcctttataaaatggagactaatgtagcttttgtcacagtagcagaatgtatatggaatcactttgtgaacttagaggaaatggaagagattgttacagctggagcggcccagtgccccccagccttcttttttaaacaaatgaggaacgaagctctaggagtttgctgtgcccaggaacatcataatttattagcagcaatgccagacctagaggtcaggcccgcagggttctttttgtgacatcttttgtcagggcaaagcatccattcatggaactgggctgaatctttctcatactcttcccttaaagaggcttgcctttttgaaacttggttctttccttgatcactctgtcatagaatctgttcttggagccgctgatgaagtccggtcattatcagtacctttacttctgcaaaaaaatgtgactggtattatcttctacttggttgtaacggtttacgttctcctccagttctgttgttctccgtgaggaatgtagttttttacatgccttttccattggagagttacaacaaaaaagcaaaataaatctatcttttctctgatatggcctccttatttgttttaaaagcatttttatgtttatttggataatatttagaaaatataatagatttaaacataattttaaaagcatcaaaatgcttacgtttctctaattgtgcaagaatctttatatacatagtttttttttttaactgaagttgcatcctgccagtaaaatttgaacgaattgctttataagttgataaggcccctttaaaacccttttcacttcttagctcctgtgtgtacctctgtttagaaggtgttttctccttcctaggctagccaggaggagagcttttgtgtgcaggcgctgggacgcctcaggggactggtaattgagagaggggtattgacctgggtcatccatctgaaagtacgtaagtgctgctgcccaaagccattattactgccttccaggaatctttgataagtgaattagtggctttctttagctctctttgacctgtggaaagcccaattacaggcttctttgttcacccatttgtaacttctttctgttagggccaggaatataacttcatctgaagacttctcccagttgtgggtttcaaagcatttggaagaagaaaaggagctaccatttgttgagtgccttcggagtgctcagagctttgtatatgctctcatttcattcttgtctaagatctagagatggttaggattattcattcctgtttcacagatgaagactctaaaaaagttggagaagtagctcaaggtcatccagctacaaaataacacagctaggagttgaatatggagctacagtctcaagagtctatgcttattatgtctcactaaatggtttctgttccaagttaagggtagtggactatgaggaaaagcgaagagaggtttatcctccatttccacccacaggtatacagaaataagaactacagtaggtgtagctaagagccaatccaatcctgtactggtggtattcaggaaggctttatgtggatcaagattctatgccagagaacacagattccttcagttcacttcagcatacatctgctctgtgcctggtactctgctaaggaaaagaagtccgtgcttccaaggaagtgaacttctgttgatcactcggacttgaatgaaatattatgtcatccagtattaattctcaaagatacatcctcaacaatgaatgcgatagtgagaagagaggcagaggttgctatgtcaagttgatattgtgtggcggggttaagtatccccttacctgttttccatttaggatttaaggtagatcgagtggtctggtgcaagggttcagaccataaaccacagctgtttgattcttcagcctggttctttaccagctattatctcctctctaccaaagaacatagtaacctccccatttctgcacctcctccaaaacaaaacttccccgtaatggtaagtgaaaacttggacttactgaaaaatgccagcaaggcccagttgaacctccatctttcatgccttattgatatgcatgccacttcttccatcttcatagtatcagtcatttgtcatcctctaataattt

SEQ ID NO: 131772 - DNA, 2274 bp, Homo sapiens
cccaggagttgtgctgatttgtgaggactagttgtcaaaagattccataaccattatcacaagtagactttatccacaaaatgcccagtttcttgggacatataatcacaattgaatatatcacacaccacttttaaaaacttgtattctaggccagaggtcagctaccattttatcctgctagattctcctgaaatccatactccatatgagaagtaaaggtagaaaagggacagcgaggaatatgagcaagcactggtctggtaaaatcatctttgttcagttccagctgggctacttactggccttgtgatgtgttttaaaggccccttgatccctctgaaccatggtttccttgtcagcaaaatagtcaagaacactacctctgcctatctctttttgatgaccaaataaaataaggaacatgtaagtgccagtttgaggtattcttaaacagtacaaagttgctgaatgagacacagactcaggtttctaacctggcacatagttgatgtttataaaagttagttcccatctcctctttttagttgtaggttttatattgattattggttcaagagaggcaaaaggttgtaaatagctcagggtcgctttagttatggacgcccctaactattttagtggaccggtttcctgcttaacgctctatgttctttcctccctgccttcacttctcttttttctccttctctgtcaactactacattgctaactctttctcatctgtagtatagaaattatacaatatttttacaatagagaaagatctagaaattatctagtcaagtctatttgttttatagatgaaggaactaaagctgaaagaggttagtttcttgtttgagatcacacagctgataagcacccaagctggaatttgaaccctgcgcttgtttcaaaagcaaatttattttcactgcactatgctgcttttatgatttgcattccccccactccatttaaaaatatgcttaactatctctgcagaagtggatttctaacatctgccattaacatccactgcggtttgtgagccagtcctcacattccctcgttgccatattcaagactccatgtgggacagccatggatctggcagagaagcagatttcagcagaaggtgtgggtgacttcagaacccctagtgctgggtgtatgattcagaccttacatgaggaaagagtaatttcctgtgcctcccccgtgtacttttaggctatagcaaccacaaagttcagaggaaggtgtaggattcgtgtacttctgttcattttttttcccctctctgtctcattgtgaatcaagggcttgattttggagattttgcttttacctgccaagcagagggaccaggatttgttctgtcccgtggtagacatggctttcgataccttattagggtatcactttcaataacactttctacttcagcttcctcatctgtgaaatgggtttgagggttcctgccttgcttgtctgtaaggattgttttgaatgaactaatggatgaggaagggctttgtaaacatgcctaacactctctaattgtgagggcctttatgaaaagacttaaaagtaagaggtaaaagccatggatttgaattctggttctgcccccagagtggttactgggtacggtgagtagatgttgggtggcccagaaacaacagctccccctctcttctgtttcacccatgcgtatttatatttagaaaggatatttaatgcatatggataaaatatcccaggaattaattagagtttttttcgtccaatgtctctcgactgttttatcgtatgtcccagtccaatatttgcactcttagctgcaaaacttgatgatgcatcaaggaaaaaaagagaaaggcttatttgcatggaagacttttgcaaagaatgttttcttattggcatatattgtcttcatgtgtttctaatgaaacagaagccagtgagtctctgggtaatttctttgtttccaccctgacgctgttgatgtcaacaaaaagtgcagttcatttttaggtagggtcatattttctttttcttttttttttcatttagcacaggagtggtggacttaacctgccacacccttttaatttaataaaatatgtctagattatgggatgtgactacagctttctgtggttggtcgtgtccatcctaaagatctggactcaataccttgaaatgctcatgttactacaatgaaaagcgtgtgtaacacagcagtaagtgtttacattgctc

SEQ ID NO: 131773 - DNA, 1050 bp, Homo sapiens
tggctgctagaattggccttttgttgactttactggagttaaaataattctctgttttcattagccaagagaaagacttgtgactcttgatgcttttcccactgcaggagcaaagcagtaaccccagtaagggagaagagaacttagatttgtgtaagtccactgtgtgttggacacttaaacatactttagatgtattatctcattcatctttctgactgcatgaaggtgctattgctgtccccattgtgtaggtgcagagagagttaaaggtcactgtgcagctggacatgtagtcgatctgggattcaaacccaggtctgtccagctcatgttatttctactgtatcacacttctcacctgtatatgttgaatggccagagtgaaggctgggctttatgggatacagaggaggtgactgtacaccaggggaaatcagtgtcacctttctgacgctccgtggcattaccctcattcagaactcattaccaaatacttcatgtaagtaacctcgaaagtcttatgagtacatcgagaactagttccaagtcacagaactgttcttgtggtgaaagtggttgaaaggctatagttcattttggttattggatggaaatgccctctctctctggttgattaacggagaagacttagtataccagccattgtttcttcgtatggaacgttgcttgttttgtcccattttctcatctgcaaaatgtgggtataatacctattacgtaagattattgtgagaattgagaagtgtgataatgtaggtaaaacattagcagagtatttggctcttacatagaggctcaaattgcattagtggcaggaggaaagtctgttttattcattgttgctccctcagcagccaggccattgcaaggcacatggtgcacattcagtaaatgttggtgagtcattgatttcttttctccctttgtacttattttttacagatatttgagcacctagccttgtgctggacaataggggacatggggtccttcacacaagaaacatttgtagcctcatgagataga

SEQ ID NO: 131774 - DNA, 1299 bp, Homo sapiens
ggaggtaataaagcagaaaaagatgttttatttttagaaattaatgtgcagctttctgatctcccaatccagttcaggttctttcaacttcattatctgttgagaactattagcctaagaaatgatgtgactgtggttctctaccttggctgtgtgttagaatcatgctagaaactcttaaaaatctaggccacatcctagacaattaaatcagaaactctgggggaggggtctaggcagcagtgttttaaagctgccaggtgattccagtgtgctgctagaactgagaacttccacaatatggttataccagctacacaaggcagagagtttttaccttgaaaaaattaaaaaacagcagtagtgtaaaaatattatcctcttattaaaagaagaaacatgtgacagagtgaattcatttagatgtcttgtttggtttgattttaaattaccacacttaaggttgaaagccttatctgttgttccccattctcatggcctgatcactgtgaaattctgggaccttagaagccttttgtattgactgctcgctcgctcgctctctctctctctctctctctctctctctctctgtgtgtgtgtgtgtgtgtgtgtgtgtgtgtgtgtgtgtgtatttttcttttacttcttgtttggccaagaaactgtatgtgttaatagcttgtttgtttttcgtcttttgttttggctaaattgcttttcaagaaactgcctgactccttgtttaattaacttccatatcctgcatatgtggctcatttcacagtccctccatcccttagtggttttccagtccaccacgaagatttgtatgaagaaaatagccacctcatctatttatactattttatcttgatgtttttcattgtttctctgaagcacattatttctgatcttgaaatgtaatgttttaaaatatatttttataggaatttatttttctcctctgaattgcctttgttgttattcctttggattttgaactcacttaactctgtgctggaaagtttctgctgatttttgtcttcttgatctctctgtttctttaaattctaaattattttgcatttttccttactgttgaattgcaacacttagtctctctatcttgtcacaatttatggagaatgatagcagaatccatctcaatagtatagcaactaaacatgtatatcatcgtttcctagctgacagcctgcatggagatgcatcctttaaaaaggggatgaggatgagaaaggtactgtgccatatagtgttgggcatacaaccaagacg

SEQ ID NO: 131775 - DNA, 1088 bp, Homo sapiens
caaagaaggagaagacacgatctttccacaggaagaagaactttccatctgattgtcttctggagttcttatttcttcatagttttctccccttagaagtgattgcaccagaagataaaggtacattggtacatgtcctctggtgattcagctcctcctagccccagaaccaaaagcctcttttctccagagaaccgtttgtttaatgaagctaatgaaacttgagatgtccccacgtgcccctccccctcagctggtgtctctccagggcttggctgccacctttggccttctttctatggccattaatctagtgctcccagcagatggcagctgatctggataaagaacttggttgttcttttcagtgcccattagaggcctgccctctctatctgttcttcctgtttgccatgaagaacagctggccgtgttggtttaaaagccagaatttttatttgtttggagttttgcctcttcatttttagcatttctctctcatctctttctgcctttgagatagctgttcacagtgccacattttctgtgtctgtgaaaaaacgagccccttaacctccagtacacaccatagacatactcacccccttctaaaatatttattcttttagcagccctggctggtttccattgtgtttatttaatctttcaagaattttcttataaaagactggacaatcaatgcctttttactgattaaggtgaaaagttgtacatggtttttcaaatatttgtgcaaatgagagaatgtatgagtctttgcatgcatgcagatattatacctaatgttagactatagctgtaggcagattatctatttacctgtctttctctccttttggaatgctaactcttaaagcacagagaatattagtagttgagtacttaccaagtagcaggctctgggctctagattttggggacacccctgccatcgtggaggttacagtcttctcattacaactctgacccagtcattctacttctttgaagattatcctgtatgcaagctttacttagaattgcagaaagaatgagacatccttagtggtaaacattaatgaaatcta

SEQ ID NO: 131776 - DNA, 1390 bp, Homo sapiens
tgggaggccgagggaggaggatcacctgagatcaggagttctgaccagaacctgaccagcctggccaacatggtgaaacaccccctctactaaaaatacaaaaattagccagacatggtggtgggcgcctgtaatcccagctacttaggaggctgaggcaagagaatcgcttgaacccgggaggcggaggttgtggtgagctgaagcttgcggtgagccgagatcgcaccactggactccagcctgggcaacagagcaagagtccgttccaaaaacagtgaacgaatctttcattaattgagtacctacaatgtggcaggaattgtctaagcactatggatagaacaatgagaaagagactaagaagtatgtgcattgaatttgttttttagtggggacaggcagtcaagaaataaacagtatgttaggtgtcagtaggtgctatgaagacaaaaagagaggagatacaagagagaatgattgttgggcagtgtggtagcaggaggggagacttcatgagcaaacttaagttgtgatggagtttagctgtgggggtccgacagcacgaaggtcctcaggtaggttcatgcctgacacattcacgaaacaacaaaaggaggtcatgtggccaaggtgtagagcgtgtgaggaagaagaggttggaaaggtggcaggagccagattatgcatggcctgctgactgctgtcaagactttggcttttactctaaataatagggagtctttggagttttgttgttttgggttttccatttgtttgttttgttttgtaattttgagaaagacaagcagcactgaattaccatatttacacttaaaacggatccctctggctgctctggaaaatagattgtgagagtatgaggtggaaagagggtgcccagttaagaggctgttgaagtaagtagtttaggtgagatcatcatttagttggtgatgtacttcctgtgtaaaattgaaaacatcacacatttgaacaaggttgaaattaaacatgagattgtcacatacaaccactgtcactggggtgggcagatgcatagaagactattggttgtgtaaacgtaaattggacagcgtgtttcagggagtgcagatgcgtgaaggttggctttgagcctctgctagacttgaccaggttcataggttaaaactgtttttatctttattctttcaatatattagtattacaatagaagacttagagaacaattgaggggggaaatgatgttcctttttttagggtgaatgtgtcagactttcaaagatgactctttggatattaggtgttcatatctacttagaactggaacagaaacataaaatatacaaggcgttcttttccgggcagtataaaaaaataatatata

SEQ ID NO: 131777 - DNA, 1049 bp, Homo sapiens
aaattttctgtcaagtttgggcagaatttaaagactatttcctttggtgggcatgaagtagtactgtttaacatgcttgctcaataaagttttcagactttttttttttttaactagagaatatgtgatttggtgattgactctataaatagtgtgacccatttttaactagattgctgatatgtttttcagcaggactttgtggtttagttaatgaaatcttttcagggatgatcctctgagccttctgtctagttactatcactgctgttgcttttatgacttaattgcctttgtggtttaattcacttcatgacacatctatcaccatgaagtttagactcttcacccctatctttccgagtatttgcttgatgactcctggggtcaaggagaggttgataggtggttttatgctgttaaaaataagtggtcttggctaacttatcacttagttaaaacagtccttttaattttaattaatgcattgaagctacttcttcctcataattttctacttcataattctgttgtctgagcccataacaatggttatttctattatttgtagagaattataaagctctttcatatttgttctaccatttaatccctctatctttatctcctcccctcccctcacccccctcccccccccaaaaaaaactgtattagccccattttgtagatgaggaagctgagacaaagaaatcataggcaagtatgccaggtcggtatggttaatgtatggtagaactgggaatttctactatagaaactggacgattgggatattacgatttagaaaagagcctctgtttttttattgtctgctattactgaaattaccatagtgttaacatcataaaaatatgtctaaagactcatgctgagttctggattttgacagattttcaactaaacctaggaaatttgcttggtcagtctttgatttttgtggacatggttgggagttcacctggcagtacagcttgtgattaaaagtccagttttagaggaaccaaaatctgttcttcctttagagccaa

SEQ ID NO: 131778 - DNA, 1029 bp, Homo sapiens
tgatttgatgattgactcagagggtttgggttagttggtttctaacagagctggcagggaaggagaggggtggcccaatacattttgagcccctggaggaatagggtgataactgagggagtagtattgttaggaagccctggcagctctgggagccatggggcaagaaaggacaattgctcctgcatctgcatctttttgtttctgggtatttatttacagataagtggttttttttaatgcctggtaatctattaggcagtaggataaaaagatgccctcaaggatgtctctcaaggctagaggggagatgcttattgtttatcaaagatctgctgagtgcctagcattgtgttatgggccttacatacatagtatgcctaattttaatatagtatgataaattctttgcaagtgatgtctgcaaaggactatgggaccatagaggagtggaggctgcattctggctggaaatgggaattagggggaacagacagtagagggaggtaggaggagtcaaaacggtttttcacatgagatagaactttcagctcttctgcagatggcactggaaatgtggtcactttcttatccaacatgacaggggactggcaggtggaaatctgtgccttgaaattacttatatttgtctgatagagctaggtcagtttaatgctgcctttcccttgtctgatagtgttggttacagttttaaaggcttatttgttcttttcagaaaagtggctaaagaaagtatgttccctcttgtttctttacactagtgtttaaaaacatcaagagtttctgtccctccttctcacatccctaaatgagtgtccagtccgtaatgttcaggcttgaatagaacggcatagcagtccatttgcctcagcattaggaatcttgtcctccccaggaacatggtgatgatccagaacggagtcttaatactaccatgccatcaacaggagcagttgcttttgtttaggaacaacagtttccttccatttctgtgcagtagttgtctgt

SEQ ID NO: 131779 - DNA, 1142 bp, Homo sapiens
aaaagtagtataaaggttgtcacctgcactttcactgcttttaagactattgactactgtattatttgtcacagtggttaagagcatagtctttggtctcttggccctggttttgaaactctgttgtggcactacatactaattatgtgaacttgctcaagcctttttttttgtccaccagtcgtggtcatttcctcatttagtaccagtttcacagaattgttatgatgataggcgagaaatgcatgtagaatacttacgacactggccaccagagttcaagtgctcagtaaatgttagacagctgcagtagtggtgctagaagtagaagataataaaactcagtgtgtatatatatatttttcttttgcaaaagtgggatcctgttaaatcacctgtcttaaaaactgccatttccttttatattgagcatttctccatgtcattagtctaccaaaccatcatttaaaaaatagctttattggtgcttaattcacgtagcatacttcatccatttgaagtatacaatgcagtgttttttaactatattcagagttgcacagtcaattttagaacatttttatcatgcaaaaggaagtcctgtaactgtcagagtcactcctcattttcctccaaatcctttactaagctactttctgtttctgtggatttgcttattctggacatttccaagccatgctttttaatggctgcacaatattctgttatgtggatataccttactttagcagctattccactgctgttggaaatttaatttattttcatgattataggaaatatttatattaatcttctttacccgtctcagtagagtcacctgagagtcttaatgaagattcttccatgttacttaattaagaagtaacataaaatcttcacctgtggtcttacatgcctgtgctgtgagatgttcctgaagagcttcaggctcctagagctgctatcacaccataacaaggtccctaacactggagccaagctttggtaacaccctacactgaggtccagttggagctgttcagggaataacagcagcagcttgcccaacaattttggtacaacagtttggtgggagaggatgagtgacttatttgagcggagccattggaagacagaca

SEQ ID NO: 131780 - DNA, 1803 bp, Homo sapiens
aggatggatctaagagcaagatgacattgtgatgtcaactaaccttccagagaatggtctaaggggtaatagggccctactcgctctttccactcgaaatagccatgccccctttccttaactttggagcccacaacacttaagattagctgacatttaatatgtgtgcctgctaggttccaggctctttttatatcctatctattctttatgtccatctgcttgggaagtaatcttattccctttttgcagctgggggaactgagcattggaaaggctggtctggccaatggacagctaaggtctttctgatgccaaagcccatttttggtacaccatatcatctgctactgagaaaaaaaggctagaagtggaaggaggtttgtttgtactttcaggagcatcccagagaatcgtagaattgggttcagtatattcttcatggcttcacctaaaattttcagctcggggcatttttataggtttaagaatgattatatgtaaaaacaggcaaaatttccagaaggcaacaaaagataaatgatagaaccctgtcttctgtccctttccccatagagatacctacacacatttaaactgggaaaggaaacaatgatccatcgtaaagcttacccgtaagacaaattgcctttggcaatataaaccttaaatgctcatgaaggcctcacatgagttaagtacagtttaacatgattctgccatttgagcacctactatgtgcctggtttttggtagatgactgagggaagggtaacagaatgaattagacatgctttctgtcccaaaggtgttcacaggtgaatggggtggtggttgtggggtgccaggttagctgcaatatagcatagaccggtcagagctgtgataattcagattgctctgagagcacacatgaggtcatgacaggttccaactggagaaatcttacagggtcctttcggacctggacctgaggaatagatgggtagaacatttcaggcagaggacaccttttgagcaaagacccagggtgagaaaatgcaaagtggaatggagactcccattagatgggtagtacggtttcatgcttactcagtttggtttgatgaagcaatctctctctctgtctttgtgggtttgtgtacagtacatgtgtgtctttctctgttaaatgccttttatgttttgttggggacgtgtgtgggagtgattcatttccagctgggtccagctgtaatgaaaatgtcctgtttgacaaattgaggaattagattacaactgtctctccctgaaagctgtgacactagctgtaacatcaaacatccctccctttgtggggcaggacaggagggaaatggtgattcagggctgctggatgtgttgactagaaaattatttgagtaaataagactgtgttgctccagttaattgataaacatggcttctcactgagccatgtggttttcctccaaggagaacttagaatggtgccatctgaggctgccctagtagagaagtgcaacacgtcataagtggtcaaaacatttttattggaagtaatgcatctgtgtgattttctgtttagtccctatttcagagctctttgttttttcttaaaatgtaaaatactctcaactttagcttgagaatacctgaagtgtttagttggacatttattatgagccagtaacatatttgcacaggagctctggaggagagcagtatcacttgtggaactctgagcgagttgtatagccacccacccatgccactttctacgtctgtaggactatagatttggac

SEQ ID NO: 131781 - DNA, 1038 bp, Homo sapiens
tcagtcattgacatattaatggcttcttccaggttggaaaattaataaagattatccttttacttgaagaaagtgataagagaagtagaaagaaaatcaggctgagattaactaaggaagcagcctttttattctactttcagccattcagaagagggaaaaaatccagagtttctaataagaaaacgaaaagttgttttgcattctggaatatttccaaaagcattgctattgatgttgaattccactttggggttggagattaggaaatttttggaagtgttgaagtaaaattagatgttctttgtattattttttatttgacagtgtacaaataatgaaactgtaaactaaagtacaatgacataatcacagaaatgatcataaaaatggttatttaacttgaagtgggattgaatattcaaaaagtgcaggtggtgtggatgggcttctgggtgaaattaggttttctctttcagcaggaaaaaagacagagttttcattatactccctgccattggtgatatggtgtagacctgtaatgataacaagcactcaacatcttcattgaaaagcaccagaaagatgcagagcagaagctgtaaacttcacaagtgccatcaaatcagactgtttcttcaaagttgaatggaaaatttcagatgttggtcatgaaatgtttactctgtgacccaaaaccaagttaacaggcctccaagagaggtgcttgctcttggatttgaaatagtagccatagtgataacttctcttctctgtgtaagccctgtaattttgtgtattccatcattctctctggatttagtggttctgagaaagcaaacctagaccttgggccgagacttcacacagaaatatttggggatctgctctatggttctctgggtttgggcctcagtttccccatttttcagcttttgtggattctgatcattctccccacttgatgtgcattgtgtgtttgcatgtgtgtgtgtatgtgtttctagatatgtctgtgaattttggggtgtatttttt

SEQ ID NO: 131782 - DNA, 1054 bp, Homo sapiens
gtctgatatgtatttggataatctaaagggagggtttatttatgacaaaggtactttgttagtgggatgatgatttttagtcacattgctgttttgtattattaaatggagagctgttggtatttgagagagatgcccagtttttccagagtctgaaaagagatttttgttgatgttgtagtataaaaagtactctgtgacatggcacatggctgccaaaagtgtgaaagaaacaggaaatcactacacacttgaaatataatagaccttttcattcatcttgtgtttttttccctctgaattgttaaataaaagtatattctgttacatgctacagctagaagcaagctttaagctatcagaatggttgtgaagaactgtagaataatatgaagataactgtatttgtttcatggcataaagttcttttcaaatttggttactcatcctgtggtttaaaagttaaaaagagaccatatatattgtctctgaactctagctgaatctatgtgaaacacaagtagaacttttgggaggctgtgaggtttgtagaagactttaatagaaatgaatgaagagctggcattttgtaataatatttcatcatgtgcttttctttttccgttacccaaggaacatatttgatgtgcttgatatttttgttgttgttgttacctgaaaatcaaagagtacctctttatatgtgtgcctcagcaactttttgtggtttataggataatgtccactctccttaacagctgcacctagagtcctctgccttctgctgctgccagaaggagcagaagcaaactggaagcctcttgcattttcacgtctccttgcctcctcctgtaccagatgaacacctactcatctttctggactgagctcagatgtcaccttctgaagagacccttcctaactactgcttttccctgttccccagtccccattagaagttggcagcccagtccttgcagctccagctgctctgtgcacactgtggcccaacacccatgaggcttcacggggttccctgatggctgtgagtctc

SEQ ID NO: 131783 - DNA, 1056 bp, Homo sapiens
cttcattttacagatgagaaaactgagggaaggagtgacttgacgaggatgtgcagtcaggggaagctggagtttgtgtctctgaggtctgtggtcttacatgatgagtgccacccttgccaatttgccttcttcatcctcctcaccccctaagacttcttgattgcccttggggtctcaggacattctcttttccacctcaccgtgaatgccctggctcaggaccgacactttcctttccaaagtctgctttcagctaactcttggaaggaaatctctcccatgtttcactcaaaggtataaatgcctgatgaggcattacagcaacttatgctgaagttagttttaggtgttgggcatggagatcctgtcacaccttacagggtagctggctgtctcttcccatctctcggtccagtgaacccttagaaaacaatgccaagagtctcctagtttgactctcgtttcttgctgctcttttacctcttatttgttaataaataattatataaataaatgcttttcctgtttctctttttggtgccaggacttccctaaagcctgttcgtgaaccattggtgactgaaccttggtcacttggtacgtgtccttcactgggctgggcagtcaagttgaagacacggaattatttaatctttgcaccagcctcatcaggtgatgctctggttcccattttatagattgtggaaacagagactacttaagaggtgccaggctgttgacacatattttatcctttgatcctcataacaaatctgtaatgttagtaatattttaattttcaagtaagggtcctgaggcttggcagtcagcagttttctgtcccaggttttactgccgaagggaaagaaccgaggtttatacaaagatctgtctgaccctcaagtctccaagtctctgccattaactgctctgcttgcagttcttacccaagatcccacaactgatgcttggttaagtcaactcaagcgcttagacactgtgggtgcttcatggagcttactgaaaacaaagtgagtcatggataggagtttg

SEQ ID NO: 131784 - DNA, 1021 bp, Homo sapiens
aggtaaagcccaaaagacgactgcattttggcaccaactattatagaaagcagagttggctaagtcaatctaggccacccctttccctgccagatgcgttttgggtggaggaaaatgtaagctcttcttagctctattattaaaatagcctggataccttgcatttctgtagcattgtacccaaaggctagggtcagaatggccttgtctccagtgcctggtatagcacccagcacgcagtgggctgtaagtatagtgaggactatgttattatgacgcacattctgtagaactggaaaaggcctcagagaccatctagtccaactcctctttttatggatgaggaagctgaggcctagaaaccccaagtgtgttaggctgttttattgtaagaggtcccttccccttccccagcaaaatgaaatacattggttaaagcaaaatggggacttattggaaggattcatgggagatattttatggaacatgaggggcaagaatgagggtcttctcttttgggcaaatggtagatgaaggcagctcgcaccaaattattcccagctccagtgccctacaccacattggtgtctgcctgattctgaggcgaggatatctgggaaggaggattggattggctccacttgggtcaggagaccacccttgctccagtcagctttggccaggatgagggggttatgtgatgggtggggctaagtcttcgtcttcagcctgggggtgatggtggtcctcagaggagagtaggaggatagggaagcacaccgtttatacccagatcacacagcaaagctgggactagattcagttcttctggcctcatcttcatttttcattgacatgacagttaaatgtaaatgatggtacttcacagctgttgggagaatcagtaggaatataagggaggcagatgcctggcactcagtgacgcttggaagatgttagtttctctgcccttccctctgcaagtgtcacctccccttgatcctttctgctctgtactcat

SEQ ID NO: 131785 - DNA, 1064 bp, Homo sapiens
ggtcgtacagccagtaagtattctgcccaggtcatacaaccagtatcagatttgtgattaatcgcattactgtcaagtcctcatgcaggccagtcagacttctgtgtgtgttccctcaccttccatttaagtttcagcctttatctatgtccttttgggtgtctgccatgctgatgatagagctcatcagtctttgataaatactgttaggtccttaagtgattttctgtgaaatcttacgcataggatttctgtggtcagggtttgacgtctgatcttgttcgtcagctccccttgctcaagaatgcaagtgcattacctcttaaattttaaaagctggtaaacttaataggaagtgcttctttatattgcaggtgctaaacttaaggagcccattaattacccccaaggagattgtagtcttaaaaaaaaaaaaaaaaaacccttaggaaggatttagctaaaatcaagatttatacttttgcttaatgtagagaaagtatgtttgggtctgtctctgacctcttgaagataatacaacaaaaggcaaacaaaccttcccataatgtttctctcccacacacaagtcaaggctctgtgcccaggcttttgacccagtctggaggtacttaggatgaggttttgtctggatgaaaccagcaaaggtcagtgagtgaatatatctgtctgtagaatcaaagggagaaggaaattgtatatgttggaactcatgctctttctaaaacaaggcacaagcctgttagccagatattccatgctaatgcttttggtcctgatatggtttggatttttgtcccctccaaatctcaagttgaaacatagtccccagtgtcggaggtggggcttggtgggatgtgattggatcgtgggggcggatgcctcatgaatggtttagcatcatcatccccttggtgataagtgagttcttgctcaattagttctcttgagatccagtgttttaaaagtttgggtctccacttttctctctctctcgcccctgctttcgccatgtgatgtgcctgctcccacttctcctcctgcca

SEQ ID NO: 131786 - DNA, 1022 bp, Homo sapiens
cctggctaatttttgtatttctaatagagacgcagtttcatcatgttggccaggctggtctcaaactcccgacctcaagtgatctgcctgccttagccttccaaagtgctgggattacaggcatgagccaccacgcctggcccagagtttagaaatcttaaaacagttgagacataaaataggtattctaaatgtctacaaaaacatatttcagtggctttatagggaacataggagactttgctgtcattgcaccttcaagttttggtctgattaaaaaaggtgcctaagttccttggaggcttagtgtttcttcatgtttatatttcagagttcttaatagtgatacttaaatatactattttttccctgtactttcgaagatttggatatgagttttcagatttaaatgtgggaactcatttgagtataatccgtgaacagcatttgttcaacacatttttggggaggccctgctatatacaagtcattttccaagtcctactgaggtattggggttatccagattgtattatggagaagctagtggtctttaagaaataaagaaataaggctaaaactctttaacagggtagaaaggggcagttcataggggagggaaatagtatagaacattcatcctaggaatacaagtgaaatcactcaaattaccatgtagtcaatatacagattgttcagtgcctcctatgtgcccagcagtgtgctaggcccagggatacaatgaagaagaaccctgccctcaaaaaatgcagcctaaaagttttcttatggaaactggaaatcaagtttgggtctggcattagaggcttttcttaatgtattcacctggtgtgttcagttatttctgaagatatagaaatgtttgatgaaatgaatgaagatacagaatgtagattcagtatcaagctctatctcataacagtaacattcctactacatgcaaaccctatacatactattatttaataccttttttcaccctactatcatcaatggctcca

SEQ ID NO: 131787 - DNA, 1048 bp, Homo sapiens
agccccccaccccaaggacggacctctgtaatatggggaagcttgggcttctgtgggccgactcatcttgaaatgagctttgatactcatgtttccacacacgtagaactgggattcagaagtagagggatcccaaattttaggaggagagagacttctgttagtgctgggtcccatctggcctgcttggtgctatgactgaatgtgtcattccggcatacttccagagttctctctggagtcagtattgggtgatgggactgaattgtgaagtgaatggagaaataccacctaactaggtttgtttgaaaaccagaggtaaatggattttttcttttcttttttctttttttttgtctttgtgaactgccagtctgttatactcgtctgggattaaacagaattgccaggcattgaaccccatcatgggtctgtctttcacttaattgtaataaattgaaacatgttgatacaggagcattttgcatcccctttctgtactaattgtatatacttctaaggatgtgacattgattagactgagtggttattttccttctagataagtttttcagtgcctcctaatagagctgccagttattttaacgttctcttcctgcacatttagatagtgttgctgtattctgtttgtgaagggtgtgataagattaagtattcggtgatgctgtttgtagaggtatgcgagcatattttccagcaaccctgtagtagagggttaatgttaaattacatgcagttgctgttgatgttagtttaaggttaataaatttaaaagcaaatatttttttttatgagaaatactgttgtaagattaggtagaaaaatagagttaactataatgcaagtgtagtcacttaggaacttggaaccaggctagaagttcagtgtcatgttagagtacattgatgatacccatgttctcaaaaatatagcaatgtttcaggatggcacaataattttacaatttttattctgaacttgaggaaggtattggccaggaaaacattgtctccggtcggcatatttt

SEQ ID NO: 131788 - DNA, 1003 bp, Homo sapiens
tgcgctcagtcagtcaggcccgcgccgccgcctgtcagcgcgtctgaggaggcagcgccgggcgccccagccgcccagcccgcgcacgccccagcggccggccggagcccagacccccgcgaagaccccgcgcgcagccgcgtcccctcccccgccgctgaggagctgccgccgccggcatgagcagagggaggcgggtcccggagagccccctgcctcgcgcgcggcttggagtttgaagggccccgcgccgagccccgccagcgccgccgccgcctgccttcgcccgcctccttccctccctctcgccgctgccggggacgggagccgcgcgccaggccgggcggcgggtggcgggctgcgcgccggggttcatgagcctccgggcggcccgcggccccgggagcctgcgccgtgactcaccccccgcccccgcttgtgtctcgtccctcccggcaggatgccggaccagatctctgtctcggagttcatcgccgagaccaccgaggactacaactcgcccaccacgtccagcttcaccacgcggctgcacaactgcaggaacaccgtcacgctgctggaggaggtaggtcgggccgggacccccgccgtccacgctcgccgctgccgccgcgcagctggaggatctcctctccgagctgggaggaaggggacgcgggggccgggggcgccacaccccctcagggagccgccgggtgaataagggacttcggacgggcggcgccttccccatctcctcgccctttctgggtcttgcgggttgaaaggcctggggactggaggtgggagaggactgagcgagctgtggacactccagggaggacagaagatggaagtcctgtccctggcatgcactgttcggcgcttccacatcttcgtgaccctcctgtaaccctcgaggtaggtggcgtcaggccaccgagggcccagaggcgaagtagtgcagccaaggtcaccagcaagggactaggagatgggcagt

SEQ ID NO: 131789 - DNA, 1047 bp, Homo sapiens
actttgaaaataagcgaggtctctgaagactgtttattcccaaatctgagatcccagacttcgggaattactgtgcagccttccccgctccctcttttttcctcctcctagtgactaatttagagatatctgagtcgtggaatgaaagcagatgtatttatagtcatctttcacagaaaaggggagttcaaagggaattcacattggttgattattcactatgcatcagcctacttatccatattttctcattttatttcacacaataatctgaaacatagtttagaaaagaaggtgaataaacaagaaagtagagttttaagctcaggtccatgtaataaaaagtgtgttcccttcccactttagccattgtcgtcattccatgagggcatcgggagcctgtgatgaatgctgtcgctggctaacactgtggatcaaagctccttgtggtttcttgggcccacagagcacctctgactccccacccacactcccccacctctggtttctggtcagtcatcttgcaaatgcatccccccttggttataagacagatggatgagagtgaggtctgcaactggaaatgtaactgagagccaattccctgatggcaagtgggtcgttagcgccattgctgttcagaagaataagccaccactgttcctgctgcctttttttcaaggcgacaaagtgcatcctgccataatcatggtgttagaaacctcagtcagcagtgctcagagtaagaggcaggcatgaggaggacaagagtgctgaacagtcttattataatggcgacaacagagatgatgcttgctttatataaagccaggtgcacacaaatatgtgtgtgcgcacatttttcctggctttggggaggatggtgtatatttcggggcagctccacacaaagaaatccagcatttacgttttgcccatgtcagtctctatttgctttcagatatccaggaatgattttcagagtatttgagaaaatgagaggtgcagatggttttcactgaggcatggtttcaaatttaaagagga

SEQ ID NO: 131790 - DNA, 1048 bp, Homo sapiens
attttatttttgcccagtgccaagggaacaggaccttcccagtcaggatagtataggaacagtatggagagtaattgtgtgggctgcaggctctgtgtccggttggaatatggccttttttctactcatgttaccttgagtaactcgctcaactttcctgagcctcagtttccatttatgaaatggatgttaattccaccctcataggtttgatctggaagctgaatgtttagacagggactggcacattggaaacgcccaaataaatgatagccatgcttgtccttattattaccattaaaagacatcagagaaaggaggattttaatttgtgggatgtatattgtgcatatctatgtctactttcaaagtcagagacagtagtctttctttagaacttaatttccctcctaatcattgggtgattgtttttctttgcagcatttcagaaacggctctctgcagaggaaatggttagtggctgtggcagacccccttctggtgaaatccgaaacagaaaacctcacaaaatttgggattttgctcctaatctgagagtctgggtgtagtggggagtgggggttgttaaacagtctggagcggatttacaaagtttgggaaaaccaaaatcaatctctgactgggcagagaggtcgggcagccaatgagtgattcattgtggtttcccacggaaatgccacatttcgggggtgtctacctggaggatgcagcttggtggttttgctgtaagtgtttcagattcctttgaaacccaatcagactttgaagagggaacaacatgctcatgagcgaaaacagaagcctgaaatgaacctgctgggaactgaaagttgggtaccagctcgtttactccaagtaaggaacagataccagttttagacccagcattgttccttttctgcaattctctctccgtggccagaagcagtaggacagctctgagctgggcaccaggagtcccagggtcctgctccaggcccactgtagctgccgtcccctctgcctggaagaacccttgtatggctgt

SEQ ID NO: 131791 - DNA, 1153 bp, Homo sapiens
ttttaactcctcatacatgtgtgggtactgtggattttgttttcttcacacactactgtgtgtccttaactcacgttcttggacttcgcatccagtaaatatgtccagtttaaatttctgttttattccttttggctggaggaatatcatttacaatcatcttcattgttattgccagtttagtacttctaaattcatgttcacgttattcagtgaatatctgagactagcactatgctaatcttttattttctgagaaaccaaaggggaggaggtaagcacctattgaaagttgaggcttcaagtagaatttattggtaacatgccagaattatcctgtgaaataaaatttttagttatgttctagggttatctagcttcacagagtggatatagtaaactcgtttcttttcaaatgttgagttcattctgcaaaatgattttaggatgggccatggtggagtttacatagttaagaatgcagatttcacaccctgactggaagacaagtgaaatgtttgttttatctgtcattgttaatatttgtcatggtacattttttatgactgaataaaaatgtgctgtggattgattgggggtaccagtgtgaggtgaatagtgttcatatttgccttttctctcctttggcagtcacagctgccgaaattgctgggatagtgcagtggacaacaatatttctttgaaattctgtttgtagaatatatatccaacacagagatggcaaaattgttattctctgtaggaatttaggaggaagttcacagctcttaggaggaaaactgtgctcagataagctaagtgtttttgtttgattggttgttttaatgttaaatggttgagaggcttagtgataagcccaagccagttaatccgtacgagttttaattaaaatcaaagggttggaggtgatcactgtggtctctcagactctacaattccgagagcaacccttgctgtaagtcatagaattattctactcttgctattttgttgcttatttggaatattggtactcattgaaactgttgttaataactagaatccagtgaagcatgcagtaaccccactggttaagcaatgatatatctcatgaatattaacagccacttcactagaattattttggagatcc

SEQ ID NO: 131792 - DNA, 1040 bp, Homo sapiens
aaatgctgctttgaactggtttttctttagcctgtagaaaagaactttgagttactggtcaagtagttttgaccatactggcttaggaaaacagcgcatcagctgtctgattgctatcatgtaaaaatctgtgaacgactttgagaagtcattggtggattatgttgttcaggaataggaatggagctttcttcctatcacttgtatttttttttttttttttttgaaaggaggaggaggaggaaataatttctgccttattaagtggtggtttaaatcatgaaaacctgaaaggttgagatgagtcatgatgtgggggttcagtttattgggaactgacaggtttttatttttctgttttttttttttttttgaatgatcttgtgttgtagagttgaatacagttctagggaagtatgatcacaaaatgaatgttggcagttcctcctatgattaatatgtcagacatgtcaaaattctctcatcatgtgtatttgccgggtttattcagttcttgaaatgaggcagctctcaagtatattctaaagcaaacaggaactactatttttcttctttccatgtatggtatcatattatcccttttgcatatgtatttcttgctctctgactttaggtgttattagatagtgtgattctaatttttatggaggaaggaaacactagtcaggtttttttttttaattttacttctgaatcaagagttttctgtattcttaaattaggcattaagccatttgctttacagtctttaagaggaattctgtccttctaaatgctatttttgtttttattcttagttggtgagttattcagctgtacctttttattgttattacctgaactccagggtatttctgctgcagtagttttctggataatgctaagtgttcttcacatccctgttgtttaattggtgtttttgaacagctgtcttggcaattagctaccaagttcccttgatgtggttacagttaactgtaaacgaatttcactcctgatgagccgagtgaagtgtaagg

SEQ ID NO: 131793 - DNA, 2025 bp, Homo sapiens
gccttcctatttcatattcttctagtgtatcataatcagagttctgaattccacatgctgtaggaggagaatagtggatagttttctcttttatgtgctggaattaatttatttttactgataatagtatttattgaatatttcctaggtgacaaacaccgcaaaggcactagacatacaattggggaaaagaactacaatatagaattaaatttaaaggaagaatttatattgcttagacttgccagttgttggagactttctgtgatatgctcatccccctcttttttttttttttttctttcttttgggaaagaggaagttgggaagaggtcaaaaatatattagttttgggacccaagtgagtttgttggaagggatcagaagctaggataaggaggaactaaaggaatgctttaaggaaagggggtgtaagtaggcttgctttcttatttaacctgtatgaaaaacctacttttattaagctagcaatataagtactttaatagtatcttatttaagctagttggctttgcttgcagaacttgatatggatattatcaagttcttgatagctttatatttgatgtcaatgacaagttaggtaagttacagtacttctgtgccctctgctaattaattagaagtaaagtgaactaggcacttgctgaacagtaggtaaaaggatctagagtcagaaagatcgactagaaaatagtctgatacaacatgaaggactatgttcaggtacctgcagctgaactcgaaaagccttatgaatttacttcaacaagggagtcacctacatttctatacttgagtaggtccaatgattttattttacttgttctgatatttataagtagaatattcatatttatttaaaagtctatatagtaatttcttttgtgattattattgccagttatttcaaccttacattgtctttgatataattttataaaaacctgaaattgtaaatgaaaaattttaacctatatgccttctttatagtgggtagttttttatttttagtaagtggtcaaaaaggtatttttgttttgtgttgggccttcctgagaaactcactgtgatcatttatttccctatatggcaatgcatccctcatctgttaggcacacacatttctgcaattatgttcattggtcatgatttatagaaagctaaaatatttaaagtaatttagaaatttgctggtacttgagtttagtgtggcagttactctttgaagtcatcaggtctgggttggaattgcagttcctcagatcctccccagctgggtgttactggacaaaattggcctctctaagctggtttcctcatttatccaatggagatgatcataaccctcagagagttacgataggagtgagtgaataatgttgtaacatccttagtacagtgctgtacacgtcatcttcagaaaatggtaattgtccctcctgctattgatatagttatggttgtgaaccatatgtaaaatttattgtgatttttaaattatgggcttacaacaaagatttttatgctattgggaatcctatcttaagggtccttgatcatcatctgcttaccctgattgtaatactcctcttactgcattactaataatagctaccattgtattgagtgcttgcttaataagagctttatatacaattttatttaattcttattattatgaagaaggcattattacatctatttttactgatggggaaacttgtgtgtagtaagacaaagtaacgcacccagcccagctggacggagggagactgattcacttcagatctgtctgttccaaagcccatgttctttaacccatggctgtccactagacacttcaccatttgcttatctgtctctcctggtaaacctaagcttcccaaaagtgggaactggacattgtttgcattccaaggttacatttatatttcaagctcttttaaactaaaagcagtgtatagtgtataacatcagaaatgttaatgtaagtgaaactta

SEQ ID NO: 131794 - DNA, 1042 bp, Homo sapiens
agttctatgtatccatcatggtgaatgttagcactaaggaggttatgtgcagaagggttctacataaatatcgtttaatccccaatccagaaagggaaattgtaaagcaggcaacacttaaaaatataataagcatgaaaatatagataatctatttatcttgttattgtttttaggatggccttgtgaaaactgatatggagaaattgacattttatgcagtatctgctccagagaaactggatcgaattggttcttacctggcagaaaggttgagcagggatgttgtcagacatcgttctgggtaaggaaactaatggctgctaaaatagtatctttggaaaattctttctagacttttaaatcattctatagattattttgccatttagtgagacaaagataatatatagaggataaaacattgtaatattatacaaagaaatatataatactccaatagatgctgtggcttttattactttcctggtggtcaggttttgtgagtagactatgttagttaactgagttactttttgcttgtgtctattgatttttgagtcttttctaatgggaaatagtagaaattgactcacttagtctatcagtgcaatactgtaatttaaaaatcagtctctaaattgaaaacaaacagaaagatcctgttaaccagatcattttttttcacacagcttcagttttacctctcggaggagtaataagagagaaccgtgttaggcttagatatcaaggcccaggaaattcaagcatgctgatttggaactgtgctagctatactcttactgataaatagaagtctaccatcctactgtattctctgtgctcaaacaataataactttgcaatttggattataaatactttttcattctgtcattttatgatccaagtttattggagtattctattctccaagtgatatattagctttctgtacctttgcgttgttaccacttagaacattttagtaagtgatggcacacatagctttatggttgattgttgaaggaaaagtatccaa

SEQ ID NO: 131795 - DNA, 1004 bp, Homo sapiens
tatgaaattaaatgtatttggttcacacttctgaagaaggtgaagtatattatattatttgtgttttttagtttgtcaaatttgcaaatattgaagaagacacaccatcctatcacagacgttatgacttttttgtgtctcgattcagtgccatgtgccattcctgtcatagtgatccagaaatacgaacagagtatgtattattttactttatgatctatagtaagtaatttagagattaatattgtgttcatatgttacataatgattaccagaggaaacaataatatgcctgaaatacggctttccattgctgttagaagctataattgctgactgaagtagcaaaatgagaatggttttccagctcactaaaatgcggtctttactgtagcctagaatgtctcttcatgccctgcttactctgtcagatcctgtccttctatcatttcttcctaccttcactctaatcctgccatgtggatctccttgccatttcttgaatactttagtcacacctctcctcaggccctttggacacattggtctttgtgcacagaacaattccctggatgcccacatggctcgttacctaactttgttcagatttctgctcaaatgacaccttatcacaagaaccctccccagccaccctttattaaatgtcacctctctcattctacccctagctatctttatcttcttatcatgtatctccttgtttcttgctcctctatggaatataaattccaggagcgtgaggactttggtttgaggactgcagtatcgcgaatactttgaatagtgcctggtacatagtaggctctcagttagtactttttgagtgaataagtagataaattgaatgaatgtatattactgaatcactatccatctgaggttgtcatgacaactgtcttggacatttttaaacatttcttctggatatatcctactaaaaatctggaatcaaatattttataaactcaactataggttgatag

SEQ ID NO: 131796 - DNA, 1009 bp, Homo sapiens
attaccaccaccaccaccaccaccaccatcattgtcatcatcctcgtcgtggttagcaacaaacaggaacagctaacactgagtgctttctgtgtgccagttattgtttaaccactttacatgaattaactcatttaaattgttcaacatttctatgctgtagatgtgacagttgttctattttactgatgggaaactgtagaattcgttttggggggtcatggctagaatgtactgattagtctagatgttagatctgaattggatgaagctgtgtagctatagtagctattggtagttaccaccaacactgccctttaaccttgagcaagggcaccgctatctgctgctgcaccatttaggctgctgtctcacaaggcatgataaaagtttcatcttgtttgttaatgtgctccatgccaccttgtgcttggccttctcatcacccaaggtgtagcagcaggtatgtaaagcaggcaccttgtgtaggaatgttaggcttgcccactgtgatagctgcacgagaatctctcaagactctttatgttttaaaaagcagcatgtatagacacggctttgaaataggcaaaatttgcctttgtgtcttccaattcatttttctcacctgttcagtatcatattactgccacctcccattgtccatctgctactcctgaatgcctgcattattttgccatggagatgtaaagcaatgtcacctccctccccatatcttctattctttaaacctatttacagtttttagaagacaatgctaggtaaactgaataaacaactaattggtgagtattttagatagcagaaagaaaggaagtaaatagccatcatatttgaccagaaggaaaatgttttgagactcattgggccaccaagttagctctgcttgagactttgttcttttgcagtttttagaaactgttttctagtcacttttcttctcattcttgaacctatagatttttattttcttttgcttttttaaagaagt

SEQ ID NO: 131797 - DNA, 2513 bp, Homo sapiens
aaatgatagtcagaattcgatcttgggcgagtttggctccagggcttatgtacttcaccaccactgtattatgttgcgtcttaaagcgattcatctgttaacattgccttaaacttcagtgtaagggcaaattttaccataggtaaatgaaacctcagtacacatgacttcaacatactgtattacgtcttctcactttccttcctttcactccatattcttttgtttaatacatgatatcattcttgagttgttctttataagtagaaagaacacatgctctggtttgcttagtatagtcgtactttataattattgataatacctccttcactctctgcagtgtccccatttggacagtaaatcaaatggctaccttacctataaaggcagactaataattgcacaaggttcacacatcagaagcatgcagcttcctggacaagaagttcagtttcaggttttgtgtgtgtcttcctgcctaacattcatctattttaacataactttaaatgaaacaaagtaaagatgaaaacacaaacttagtttttaccttgggtgattttaaaagtagatgtgtattatgacaaaaatttgagaaatacctagagatgaaatctgttacttgatagagaaggaggggaactttttgcttttgagcagagtaaccattatgcatagggcactcctgcttcttatcaaaccacacattccaaaggaaagaaaggtaaccagcctgaaaacagggcagaggggacctgtctgaagacaaatacagacagggagattgagagccacaggtgctttttacagcttggtggatgatagtagaccgatcgtgactcatgggtgtaagtgtaggttttaaaaaaacaaaactttgctgttcttcaaaaaaaaaaaaaaaacctattcactggagttaagaataaacatttttttggctatcctttttttgatttaggccccaatatcattcactatggttgatcaattttatttatatgtgataaagttgcctttgttaattgcacatcttttgagatctccttgatttaaattttgtcaggtacacatggataatattttcattttgacactagctcttgattagatgagtgttttgactctttagcattgttaggtgtccatgttaaatagtatttatctagtttggctatgggaaaatactgtgaatgtcataatttatgttttttacaaaattttgtcctattataaaagtttataaatgcactttgaaattacagagaaatataaagataatgaagttttctcataaatccctttctcagaggtggccagtgttaatctttttatatataattttaatttactttttaaaaactagattgaattttattaaacatagaattgtgcagtatgctttttttcactcagagtgtcataaatattttccagcatctctgtttattctttaaaagaatggctttgtattgtggctatttattgtctcataacatgaccaccagtcactaattggtcatttacgtgtcaggtgttttttttattcttaggaattctgccaaggtacatgtactttttatacatctttgtactgttttgtctccttcaggctcagtattctcaccatgtgatccaggagattctaggacaccttgatgctcgtaaaaaagatgctccccgggttcgagcaggtattattcaggttctgttagaggctgttgccattgctgctaaaggttccataggtgagtgccaataaataaaataaaatagtgcgttgatctggttcaaagtgtcctttcagtatgcatagcagtgtatgaagaactctttaagaatatttctacacatttttcggtgtacaataattttttttgaaatttgggttcatgcaattattttcaggcttctttagcacacagttaagtattttccttcacatcaattcctcctccctttccttcttctaataaaggtttttgagtattgattatatactgaacattgagagaatgcagatataagaaactgatggtgtacttgtgattagacagctccacctaatactgtaatatgtggcaagctttgatcacatatcatttaaaaagccagggtttacagaagggagggaaaatggattaggattagcacaagcaaaattttatgtggcccattttgggtagaatgtatggtgttagtttagaagtcagagaagtggctttaaaattaagttgtagccaaattgtggacatagttcttcagctgattaatagtccttaaagatttactgtaatcttcatgagaaatgtgctataggataatttttctggcagcaaaatgtagggcacattagaaataacaagtcagtgtcattgttatatccatgtggaaaagaacttgcccttgcatggaagcagtaggaatgacaatgtcaagttgataggatttgataatgggttaatgagaaaaagggatagttcaaaaattacgatattttacttacatgt

SEQ ID NO: 131798 - DNA, 1021 bp, Homo sapiens
tggatataaagcgaagacgattgttactgcactgccagggtctttcctggatcctttgttatcaccatctctcatggaggactacgaactgagacagttggtcttggaagtaatgcataatctcatggatcgtcatgacaatagggcaaagcttcgagggatcaggtaatgtgccattttgaaatggatctaatgataatgtttttaaattgctaaattagtgtatttaagtattgtgatttttaaaaatctagcatgttcaggttttattaatccataattttatttaattggtattgagataatttaatcaatatgttttaagataacaaatttttggagggcacgtatgtactcttcagaagcaattcagtagtatcattacatacaggcttatcaaactcctaagtataaatacaattttccatataagatgtgatattgtaaataagtgtgctattcattaaaaatgatatattgatcgtctctagaataataccggatgtagctgacctaaagataaaaagagaaaaaatttgcagacaagacacaagtttcatgaaaaaggtaagacatcttctaaaaaaataaatgtgtagtgtaaattacagccgtttgaattgttaggtggttttatattgatctgtgcccttgaaattaagccatagaattttgaatttgaaagacctcaagacgccatcttcagcctccctcaagtgtaacattcctgtcggtgtctcctccagcctgtatttgagcattctattgttgggctgctgtagtagttctaaatttcttctctgagtaaaatgtcttcctataattcttgccctggcagtcctctcccactaaaaacacacgtactgattcctcttttagcagctcttttatatagacagcttcaagtttctgaaaatagctatcaccatcaaataaattaactatggtgagtttttgctgtcttattagacattgttttctacactatttgggatataaagatgagttgggcaggatctct

SEQ ID NO: 131799 - DNA, 1034 bp, Homo sapiens
aacctgcagatgctcttctctgtacggctaacccacagcacagggattgttccccagtcaagagagcctcagtacatttcctctcagtacaataatctttatcattgctgaggctgtattgccaaagtgtctcaggattctgccatccatttcactttttttctcaagtcaatccataatttgcttttgttttttcaaattactattaaaaaacattttcattgttagcacaggaactattttttactggttatttttatttaaggtttgtcttcaactttaacattagtttgtagttgtatattagcatgttgtttgatatttataattgaaatttgactatctgatcaacttaaatttcatttccatgttaagctatataataacatagctacactgtaaaagtatatgcatgtgaaatctgccttttctacattttaagcaaaattacctttgtcctctgtcttttctcctcagaatgggcaacagctgtatcggcacatatatttgggttgtaaagaggaagacaacgttcagaaaaactatgaactactttatacttctcttgctcttataactattgaactggctaatgaagaagtagttattgatctcattcgactggccattgctttacaggtatgctttcataaccgttcactgcagaaaacattttttataaagcagacaacatctttgaaatgttgccgttatccaaggacatgaattttaaaagggaggtatctagttgtaaatctaaaatactcaagactatgactacattcttcatttattccttttacatatgttgcatgagcatcaactggtgtgctaaatatccttcaaggccatagggatatagtgtgatgaagcagacaaacatagtccctgtatccacacttcctacactgggggggatagtcattaaataagaatgacatacatgcagttgtttaattagagttgcgtaagtgttatgtaatagaaggacagtatgcaatggccatatatgcatgtccgtgtgtgtgtgtata

SEQ ID NO: 131800 - DNA, 1096 bp, Homo sapiens
taactcttacatggttatttgcatgacttaataaacatttcaatgcccccaagttacctagcagaaaaagtccacttttaaagacatctgtaagagagaactttatttttcttaaattggaagcacatcatttagtccttgctaaaatgtagacttgtagtgtactctaagaaacaaaactcatccattcattaatcagacatttgagtgaatatttgatgcccaccactagagaagtaaatactacaaaagcagagtacctctttgctcacagttcattggaggagccagtccacacaagtgcctggagaccttgtacacaggctgcaaaaggtaatgcagcaggtggaggatggtgatttgtaaagcgatttccaaaatagtgcatttgagaaaatagatattcttgctttattataataggcttaatcaaatgtaatgtgtcatcattttttgctttatatattattttattgtcacagttttatctgttaaattttaaaaataatagatgtgaaaacaaaacaaactttacatttgggctgtaaacttagcttaaattcaaaaacaaagtgatgttatttcttataaatgtttaaagttgtttttttttaagctgttttctgaatttttatagcaaggtactgaggggtagggtttttgatttttgttctgtttttgaatattttttaggttattgaaattcgaactatggaagccccttattttctaccagagcatatcttcagagataagtgcatgtatgttaattctttacattttaaggatggggtactgacttgataaacccatcagtaataattataaaggagtaaatattgttacaataattcctggtgctttatactaatcatcattttgtgtctgtcatttaattcatttaattatttcccttgttataaaagggcctgcacattatggatgttgacttatgcacaacatggagtcaatcttgaaaaaattttttaagaataagacttggccaggcgcagtggttcacgcctgtaatcctaacacttcgggacgctgaggcgggtgaatcacctgaggtcaggagttttagaccagcttggcc

SEQ ID NO: 131801 - DNA, 1949 bp, Homo sapiens
taaatggcttttttttaataacatggatccaaaatatatacatttagtacagtaatagttgttcataacagtctgagatgttaatgagtgcttttgcattttcttttaaattttatgctttaaaagattgtgttcctcaggaactccttgaggaaataaaagtgctaagaacaaaagattattagagctttataatttaaaatattaaaaaaacatttaaaatattttactcttataatttgaatttagctctctttccttcaagcaaaaaacctcttaaacccaggcacaagcacaaaggtaaatccagttgtcagtttggcctgccttttcccttacctgtcctctaggaaaatagcttaataaaatgtgccttttagaaaatggggccagtggcctgcatattttctataattagtttaattattattttcctttatcttccttatagccctagtttatttttacccctgttatttctttttaccctgttcctttaactcttaacaatttttaatgaaagctctggtactttcaaaatttttaacaaatggtctgcacttccctgattcctcccatccctaaaaaagatgtattctctcataatgcatctctaccaatgactagaagaattctgaatattttagtgtctacttaattgtataactgcactactagaaatcctactagatttttctgatttgtgaagactgatagtttagaacctatctgtggcattagtatcctaccttaatgcagaaacagaataaacagtgatattttatgggatactgaatctgtaattaaatttccttttgctgtgtaaccatcagatattcatttaaaaaattcaagggatttaagaacaatgtattaaaataaaaagcagaacatatttagtttgttgtgtgtcatgtagtacccatcatcatcacaatagtagctaccatttattatgcactgtgtgctaggcactgtgataagtgcttagtattcattttcttatgtaattctcataatggtttggtgaggaagatagcattatctttgtttacaaatgagtatagtgaggctaaaattgaattaaatgattaggtgacaccactaacagcctctccagttagttgcttaataaattatttgatttcactatttttcagggactcaaatattgttcaggcatccagaaagatccagattgatttttatcatttctttctctaatttctactgagtgcctacaatgtaatatatatcaagcactgttataactttcaaagggtagaaaggtgttaagatgcaattcttatcctcaaggaatacaatctagtgggaaaagcagatgaatgaatgaaacacagtgataactagatctagagaaagaatgatgatctacctaaagtttattgaactattgatgcctggcatcatcataatgtggttgataaatgttagctgattattgtattttacttatctcttatcaacctagaattcgaatgaatagtgtatgtttaggcctgtgccaagtactgctttgtgaggggaaaacagtagtgtcccccatctgaatcgttcagaggtaccagtggcttcagtcaactcatacagttatttaagtattaagcgagcacctccagtgtgccagctgctgtgcaagcaaaagccagaatgaacaagacgggtaggtccctactttcacaaagctcacagtctctcttaaatgtattgttcacttgaaccacaaaacacagcagctgatttggtattattctaggtgcataggaaataagttaatttcattatataatttttctctaagaagataaataaccaggcaattgtaatatgactattcagctattattagggacatttagggtcctccaatagcacatacaaatatttaatccaggtttggctggccagggatatcttccagaggaaaa

SEQ ID NO: 131802 - DNA, 1052 bp, Homo sapiens
cagagaagagacactgtctcaggaagaaaaaaaaaaaagagagagaaagatgaagtgttgccacatgatacagtaactctgctgttacactgattctagacctgagcttccctactgttttgggggaacattataggtgtgtctgggtactgttctccttagctcttcaggtagctggagagggcctggggcagtctgagcctgcaatatgagcaggcccttccatttatctctgtgtaccatgcatgcattataatttaatgtgtgcagtgaggtagaaaaccttgggaactctgcattaagcagtgggctgcatttgtttaacaattataattaggactgaaaatgatctgttttagaaaactctattggtagtatagaagggagaaacatactagaagacccacttgaaagctatactaagagtttaggtaagaaaagatgaagattttgaacgatgacactcttgaaaataaataggacaatgtggagataaagatggcttatttagagatgcggaattggatttagaacatgtcaaatagaattgattaataagaaactggaaatgttgaactcagaaaaggaggtgccggaatcctgctcagtcacacaagtatttatggagtacttactaggtgccagctgcaaccctaatagtacctgggaactctttgagagagttagaagtcctgggatgtgacctgggtgagtacattctttttaggactgggagtagaacagtagccagcttggcatcattgtcaccctttctgaattctcttctgtatcataaaggaaaaattggaactatgttttttcagaatcagagactgacaatgaaaagcactcagaaaaatttgcaagtagaagaggaaaaactattatctttgaaagacagtgtagcattcaaatgggtggagatcagactagaagcttccagagcttcttgagaattaccatctccatgctgcagactgagactatccgatggctagcctaacttttactcactcagctttccaagggttgaatcagcctctaattctata

SEQ ID NO: 131803 - DNA, 1041 bp, Homo sapiens
agctttcactgtttcgtgaaaatattagagatataagggcaatattgtcagttttcatttaggctaaatgtattaagtttagattatgtacttccttcatttgctgttacattgacttgctttttttaattaaactatttggtagtggttgttgatgttgctgtcctaaatgcccctttttgaaaaataaaaatccgataaccttatttcagttcacctcatcaattttactttttaatctgcttcacgaaatgtaaaagtccgagaacacgctgcttttatgtatttagaaggaacaaaaaagacaaactgtctgaattttttgacagtttttgaaatctgaaataagtagagtttataaatgaaaaccaacataacatttctagcaaataatgggaagaaaacaattttattttagatgaagatcgactttctagaagaaaaagcattgtggacaccgtatccattcaggtggatattttatccaacaatgttccttctgatgatgtggtaagttactgaaagtttatggtagagtactgtcttggtagacatcatttaaaagaattttttgccttccacactttcgaacaggaggaaatacaactctaaattatcctcaaatcaactaaattattagtagaaattaatctgatttagctttgaatttatttataatttattttactgaactcatttcagctgtctgtaaagatatataaacctaacattatatgttatgatgtcagatttcacattataatttagtgtaataaaaggaactgtaaagtataagatttttttgctaagaaactttatacaaagcctgtcattaaattagtgggccctctaggtcctacttatttttaaaaatttaggaaatgcaaattacagaaataaatagaactatacatcctcatgtgaagccaaatgctgactacctttgaaaagttttaaaactgcatctataagggaaaatgttttaattattttggatagtaaggatgttgtttaagctgtgtcagtgaactatgtactctg

SEQ ID NO: 131804 - DNA, 1065 bp, Homo sapiens
tttttagtagagacggggtttcaccatgtttgccaggatggtctcgatctcctgacctcatgatccacccgcctccgcctcccaaagtgctgggattacaggcgtgagccactgtgcctggccgacttgggggttcttgatgctaggaagctgcatcataattatctgaattaaggcaaacagggacaaaaagtgaagagttagtagggtaaggtattttagctctttacttacctgagattgacaggtgataagtaaaaattatatgtatcaagaatgctggccttctaacttctcccatgttctttttcctctactgtagttgtgtctcaaaagtcagaagctcctagccagttctaagaacaaaagcaatttctttttttcactgaagtactagaatgcttataagtacaaataattgaccagccagagcctaatcttacatgtctgctccgaatatctagaacaaaacaacagaagattcccaagtttaatctgacttcaactagaactatgaagctcagtagcaaaactgagggagtggaactcttgctgcttgatttccagctaaagcctttgtattgcagagaagctaaggtgcagagaatgacgtcttttgctttcattagtcttgctgccttagacttagcaaaagaagctcatgagctaaaattagggatgaccagattcccaggcaagtactcatgtatcgtttcttaatttttattcagagatactataggaactggatatattatttatcctaagaatgtgctgatgccataaaatgtattactgacttttatcataaagcggttgatttcatacctttttatgtatctcaaagcaagagagacttgaaagacataagttaaaaggatagtttcagagattataaattggtggttaactttagagaaatacttcccaaagtagtggttctaacttttaaatcatttaaaatcttagttttccttttgatttgtaaactgtgtgtggtaccaaaatcatagaggctgtaaagtacttagttgttttttatcacatggctaaaaatgtatttat

SEQ ID NO: 131805 - DNA, 2036 bp, Homo sapiens
aaaagataatatctgtatacatgaaataattttttactaatgaaacaaagctcacaagaatgggtagagtataatcgcatttaaaattgtatatacatattttccaaggaaaatgtctgctttagacttaaaaacagtttgacactactgcagtctgtttcccatgcagccttgtagctggccagtaactacaatggcattgatcactgcaattaaggagtctgactttgatattcgcagatagtagatagaatactcggtgaaatgaacagcttgtaagtacacctgctgacaatgtatttttgttcttttatagtcctcctcccagtccatcaggaacactgaccattacttctgggcatgcccaataccaatctgtcccagtctatgagatgaagtttccagatctgtgtgtgtactgatcggcgcatgaagacctcaggatatgatttgtaaagcctaaaaattaaggccaagctgagctttcagggtttacttaatgtgtattaacatacttcttgaaaataatgatggaacatatctttaaccaaatgtttggcataccatattagaagttttggagctatatataatttcgagtactttcaaagatagatttatgccatgttaatttgctttgaggttcctgttgcctttttaagttgaacatgttttggtttcactttattccactgttaagtagtatgttttaaacttttcacaaatgtaatgttttttaaaaagtaagccttcagaggattgaaactgtataaattgtttatctcttaaacatctacacagccgcttagatgtagaatttttgttgttgttttctgcaaaggcagatacatttaaatatattcctagtcctgggactgcaaaactgttcggtggctttttgtccccatgctttagataagctgggataggcaccttgctattcagttactataataatatgtgataggcattcctcatcttcttcacaataataggacatctgttgaatagcattcctcgaatataaccctaaaaacgccatactttaaattgtctggttcttgtaatattgtgtttcctgccaagagtttgaccattctgcttgagaagtgtagagcttactcttggagtaccaaactgtgcaatatttttacatcataagatgtattagtttacaggctgtgctttgaaattatagtagtattttgctgtggctccattaattaaatgagatatatatttagtgcagaaaaaagacatttaaaacagctattagttcacctgtgaagagtctgtacattttgatttctattaagagcacatttatttacatttgtatattattttaaatcctcatagtcaaaaaattctccagatggacttttaatttgtaagatttgaactgtgacttgtatacatctgtttagaatcaattatatttgaaaagctgcctgtgttttaacagtcaagtgtgctaaagtttgtcaatttaagctgcttttgatttcagctaccaagatcacaggtgcactctacacataacactgacagacccataacattacatacatcttagtgaattctatcacatggtaaaatgaacagctttctttgtaactcataaaattctcttaggacatttttataaagtcacctgtttatagttctatcttttcagattccatttctttttacataaaacagcatacatatcaaaaactgtagcctagaatacagtttaatttttggcttttgtttttgtttaaaaaattgcagtgaagaatgggatgtttgtgtttatggctatttgggcacctttagtagaaacagacaaaagtaaggaaacgataataggacaagcatacttgaaaatttctgaatacttaaacaaaagcgcaacatcttgaaaaccagtctagtcattgaaacctatgaaatgacactgaaagatcctgggctgcttcttaaataagtagatcagcaagacttgtttcagagtgacagtggagtcgttaccgctggaggactaaagggcc

SEQ ID NO: 131806 - DNA, 1296 bp, Homo sapiens
gtaaagccaagttgtatttttttaattgcccttttttccttctgtatttttaaagaaggatgttaatttttgactatatattttaaaaaaatctaagcagggggacatgcaaaaacaatcatcatccacttggatgtcattttatagattaacactgtgtgcttttgtatggaaaaaatatatataatttaatagtataaaaaataaaatatatattcatttgcacttacgtgaaacacaaactttgctctacaaaatttcgtgtttcttagtgattttaaaatgcatgtattgcatgtaaaggaaaaccattacaattaatgtttatcacacctttatcttggtctttgttgatttgggttttgttggggtttttgttactgtttttaaattacagtaggcttctatatatcctggatttctgaactggtcttgttgacaaggattcccaagaaatggatcttttcactggctgactctcccatatctgcaagagattctgcaggaactgggtgtgcacacggtgttgtagccagttcaggtactgaatatttaggatttggtgaagttcactgtattgctatatttttgtagataaataaaactcaataaattgttaatcattctctttttgctgtatagaattgcttatatcactctttctttcatgacattggttaacatttaaatgttcctcctgtacttgtgttgtctgtgaccgcttatagagttttattgttattggtgtttacctgaatacctatgcgtacacacacacatatttccttaatacttctgaactcattatcttttagaataataatactactacactttaccagcaattaacttctccctacccaaaatgtttttcttcctgtctgaaaatggaactaatttgtcttattcgtgcttatatctgtattaaatgcaataaagttagtttttgaaatgtaaaaattcactgtgcaattcatatgtcagcaataaaacatagattatttgtatataagttcatttttatagctattgttacatttaattaaatttattcaatatttgcttaaattaaaaatgaattgcttcttttgagcccaatagttcaaggctgcagtgagctaggatcatgccactatactccagtctgggtgacaaagcatgaccccatctcaaaaacaaaaactgaagagctttagtaaaaatcagtatgccaagtgaattcgttcccatgtacattggaagtatcagaatgataactgctagtcatgacaatgacaagacgtagtaaggtaaagt

SEQ ID NO: 131807 - DNA, 1865 bp, Homo sapiens
gaccatgccacagtattattgtatcactcttctcacacacctaggcactggttgtggatagttgccatggtgacaatcaagataatccagatgacctaaacaaatgtctgtatgcagctgacactgctattctccctcacagtcttgtcaagagccacagtagctatggcagacatttggttgatggtttcatcatttcctaatacgagagtctggcactatgttggagagaggaatcacttcctcagagataggttcctttcaactcacatgtcaacagttactgtacaaaaagctcagaatacagtaatgattagagcttgacccctgactttaggaacttagaaccaaagcccaaagtcccaggccaagggcagacattgtgagcagcagaagggtgttttttatggagagccccataaatggatgggtgtagaccttgaagtctgagatgggaaatataccagaatgctcaatgcatcagacatgaagccccacgggcttccatttgacatgctggcaatctgaaggacaaagggcatgggttatttgggccttttccccactccttcaatatggctgaaagtgccagtggggattacaacctaagaaaccctatgccccttcctgagggcttgattattgaatcctgatcttcctggaatctttcacttgagatgatcacctgcctaacatccaacatgttactatgctcttctttatgtacatgagttactggaaaccaacaataaaggagagtgagtcatactctccacatatgcgccaattaattttttaacttacttattagtattcttgaagaacttactatcttaagtattttaccaatagatgatgcattttccagcaactcaatggagttctaccttaaagtatttaccattgatccaaaattggaggaactaccttagattcttttaataacctagaaaggattggagcttgtattatttcctaaaccataggcaggcagtctagcttccctgctggatcataagaccaggacagcagagattgggtttgtattgatcagtagtagggaagtattgattgtctaacatctagtaagttgtctttatcagtatagacatagacaaaatacatgttttatgaatgaataaataataagaaccttaagagctgtttttttcccatttaagaaaacaaaaaggaaaagagaaaaatgatcttctggaataactctgctttgatattctccttttgttccccaaaaaatatattccagaaaggcaaaccaaacctgctcaagttgcctatgcacagacaatctcaacaatatggctcacagtgagcaagcagaaattcagggtctggaattgaatgtgagttatgggaagaaacagtgtgtgctttcacaaagatccttttgtcagacaagggaacagcatgataatccaatggaactggttaacatgacccaagatgacatgaccacagatatactagtcgttctgaaacttgcccaagaaattgcaatcgtttcagcagaactccatgaaatattgacaaattaattccatcatcaaactaggagtgatattatcaggtaaaactatgatctcatgtatgtatttggtctttctgggtcacaatgtgacatgaaaaattttaaaggtcatattttagcaagatcaaaatgaattagataaatcaacttcacaaatgttaagcgaaacatgatcctattgagctgagaaagaagtacttgagatcgtttgagttttgactatcaaatgtcagcacaaaagcaaatatcaaaagcttaagaaaaaaattatttcaggaaaagaaaaacacatcaaattgagaaagtgttgttgaat

SEQ ID NO: 131808 - DNA, 1079 bp, Homo sapiens
ccttgttactacacgcaataattttattctatagcctagatgcaaacccgcagagaagcctcattcccaagcagggtgttggcctcagcatccagggtttgcgcaggtgaaggctgaaaacatggagatgcacagtgtgggcagaaaattcaaagtcctctgtcacagactgtctctgctgttgctcctccttgtcctctcagtcacgtctgctcctgccagcttggtccccactgagcttgccacccacacattctgccacctgcctctttcctgcagccagccgagggaagactgcatattgcctttctattccaagcttcaaaacattccccaccattgtgggaagctccccagagctgaggatgaggaagtgagccagtcagagaacaaaagatgcatgagagactcaggccacattggcacagtgagaatgggacagctgagtggaatcctgcaagctcatttagcagtgcagagccccactgggtgaggcacgcagccttgactggggtagagaggcaggcacatatgaaggcagctgcaccaggaagcatgacaatgaaaaaacaaaaagaaggcaactcagtcttcatagaggaaaccaatacatccaaacagatcctggtttcaggatatcccacccaatgccctacttttctcaatgccagatagagagctgaattgcctgcatattcttagtcccagtttcttttctttctctggcctcctaagtagggacttaaatactagggctgttgagcatagtgaattggtatggggtttctttctggagtgatgaaaatgctttgaaaatacatagtggtaatggttgctcaactttgtgaaccactgtattttacactttaaaagagggaattttattttatatgaattatatctcaataataaaagaatgagtaagaggatgaaatgtgattggatggatggatggatgatggttggatgcacagatggatggatggatgtttggatggatggttggatggaagtttggatggactgaggattggatggactaataattaaatggatggataatggatggatggatggat

SEQ ID NO: 131809 - DNA, 1037 bp, Homo sapiens
tgtgattcaccacgagagtagcagatgcttcaagaatgaagaggtgagcagtcccagcagtccttacactatgttcagtgttacagcagggttggattgaagcgctgtgtgctgtggattcagtgtacttggacagaggcatcagcttgcaggaaagctcacaatgcccaatacgttagccctgaagaagtggccctatgctttctttgacatgcctgtaaaaacaaaaaccacatgtgtaagaaaatgtgtttatagtgcagtaggtgatgggggagaatacaagccatatctcatgatgaagaactacacataatctatgcccaatttattcagtgatgtttagatgtttatgactatacatacttcagaactattgaaacacatttattgtaaaatattataaatttgaaactgtagtccagcacttacagactcaaatgcctacagggattagcaagtatttcaaatgaaaggcatgactagggcaagacaataggaagtagtgaggcttgcaggaaactggtggcaaactctagtttctctaaagagagcaactactgcttctgctagctgacgctgagtagggatgataatttatcagatcttatttttcacaagagggagaatctggattttttctgttaactttctccatttctatcataccttgtcaacccaacaaaacacatccataggccaaattttgcccgtgggctgcctgttggccacctttaccttacttattgccctttctactctggcaccgcacctgagaaggcgagaattggggaaatttgatggtggtttgggtaatgagaatggggatgacgcgccttaaaaaaaaagaaaaaagaaaaaagaaatcaatggatggggacagagttggatttcagggggagggggaggtgaagacatggtgccttttaaaggagatatggtgaaagaaagagagagggtcatggtttgggtttgagctagaggcaatcaaatgagtttagggagtgttagagagatggtaagagatcatcatcctc

SEQ ID NO: 131810 - DNA, 1053 bp, Homo sapiens
gcgtgaatccgcccacacaagacaatggagggtgatggcaaaactaccagcatcttcacctagaaggagttccattcaacgccgtcgaaacaacatcagggccctggactgctgccctccactttagcctagtctatactatattctccctccctagtgtctccagaagctttgccagcttcccttcccacaaaacagccgttttgtatttggggcagctctaccatcagcaagtcctctgaggagtgcacactagagggaacagctgtgaggtgagacctcctcttctcccctcccagactctgtcctgcaggttaaacaagtctggtaggagaccctgtggctttggggtaccagtttaccttccagcctgggactcctgggagatttgtccaggcaaacatgaaggagtttgctcagagtttccagagttgaagcattagttgcagctcaaatatagtaagcatctatattccctcattagacttgcagaagagggcaaagaaatggcaaggcaagcttttagctgtgatggagagtggtggagagggttctagtatttccttgttctgacagcatcacctccctatcaccagaggcttttcagaggactgctgagtcatcccgacctttggaaatgctcccgcctccgcctctctaggctccagctcacctcaaagaggctggcattttctcagagtgaagtggcacttgcatgagcagaggcagaagaaatgtagccagagaaaaccagtgtggaaatgccaatctgccttttttggaacctgacagcccaagcagggtacccatatgtggcttaaagttccagacccacttgtagattagctcatatgagccctctgggaagagaagaaagggaaaagtgatggtcatgccctgacatagcatcactgccatcagcatcctcaatcaccatgattgtcaccataccattattatcaccatcatcatcatcgtcatcttgtcaccaccattatgaccattccatcatcaccatcaccatcatgaccttttcatcatcatcaccatcat

SEQ ID NO: 131811 - DNA, 1183 bp, Homo sapiens
taccagactgaaactcaccttctgattgttttgggctcttcctcttaaactctcatcaatttccaggaaagggtcctgattggcagactcagggttacatgtcaatccctggaccaatcactgtgacagagagtgaactattctgattggctcagcttgggtcaggggcctctccctggacagataacggagggacagcttctcttggactggaggactccttcagtcatcagggtggctgtgatggtgctggagtggaggggaggcacagaggccctggacagcatcttagggcatcttaggccctactagatatgtgatccttgctcaccactgattaacaaatagccttgaggtgtttttataccagtaatttatgcacattgagcctacagctctgcattaaggtaaaggaaagcatcctaaatcctgacctcaatctggtctagaggtgctttgtgacattttcataaatagataagctcttagtcaactagcataaagaacaaggaacatttctctctttccctagaggttttttgctgatatgaggactgttatagaactggtcctgttgctgactgctttctggggctatatccttagggcagtcgcagagacaatgccagggtgatgatctaggaaggctgctgggatgttgaacccatgtccctcaaacccatccccagaaccagtggctgtatactgaggactgtaaagagcagaggctaccagggattattgggggtgccccactgactccacaagcccagcagtacaggaaatgagactggccaggaattcagcctccagaggaggagatccaagatctatatggcagaatggctctcagtccagagcaagaccaagctgtcatctcacggaaggtaggaacatcttagaggcaataacttgcccatcagaagtagcattggctcaccatggaagtatggatatggggagtctgagaagcaggtgggaagtgtcctctgagcattgttcaggggagagggtgtgctgaccccagaatacgacctgcctggtcttagtggctctgtatccttgaaatggagatgaaaatgtcaggctggctagaagttcagggccatgaaacactcagataatataactaatgccccctgttttgattcctttcttaccaagccaatttctaattacaggt

SEQ ID NO: 131812 - DNA, 1051 bp, Homo sapiens
tccatccacccatccatccatccaaccagccacccatccattcatcgtccatccatccatccatccatccatccgtccgtccgtccgtccgtccgtccatccatttactaaacccatttgttaaatactgtataaaattgcctactatatgttaggaactgtcctaggtcctgagcctataattgtgagccagacacacctgtatcttgccttctggaatgtacaaaaaagcagcagtgacactccctccagcctaggctctcaccattttatttcctgaaccttgagatgataaacagaagtgacctcccgtggcatgatggggaacattttctcagtgaaaggcagattcaatggaaaaggcttaggcaattccacataatgtgggatcatcagcccagagcagtaagctatttgttatatagatgtattgccaacacttggagccctagattggggtggtctccactccctacccccactgaaagtaattcacagtttaaatgtttcaaattatatcttctccagtgttgcctttcacaatgctaaccacatcctgtgtcctaatttgtattctatctgccctgaaatattttaattcaatttttgccttatgttcgatgtgatgaattagagccagagaatcattgactaagtgtcaaggaagatggattgaggagttgaaactaatggcatttggggacaatattttcctgcaaatatcagggtcacaaatgaagaggtaaattatgctgctgctagccaagaacagaacacaaacttcaatggtacacatgaactttttaaaaaaagacagataattgcatctgagtttagatttgttgagagattgtagttttaaatacagggtcagttagggataaactagaacagcctggcttaaaattcaccagttcctgtcacaaagctgacactcagaaagtatgaaagagagaaagaaagtaagacaagcagaagaagcaggagctgtgggatgcaggagttccaatggaacttggttcataaaaacaagagtgaatgacgtgagcac

SEQ ID NO: 131813 - DNA, 1039 bp, Homo sapiens
ttgtgcctttaatgtaatgtctccttcttttatcctccagcctcctcccctggctaattcttgctcattttttaagatgtgcagctcagatcgaaaaataagaaaaacttccaaagttttttttatgaagcaattataatattgatcccaaaactcaatgaagaggtccccaaaatagaaaattacagtccaatctcacttatgaaattaagcaaacattctaaataaaatattagcaaagagagtccagcaatacattaaaagaatattccatgatcaaatggaatttgttctggtatgtaacattaggagatctataacatttttcacctcagtaaattgatataaagagaacaagcatatgatcatcttgatagatgctgaaaaggcatttggcaaaattcaatatagatttcttgaagattttcttagttaaattataattgatacttaattttacttggtaaaatatatttaccttaattcaaaagccagcatcatgcttactgagaaaacaatggaagaactcagagtaaaaaggaggggaattcaagtaaaaaaggaggttgaaaggtaagagcatctaccatcaacactattatttaaaattgaactagaggtactagccaatgttattatgcaagagaaaggaattggaagcaagaagattaggaaagaagaggtaaaattattgctgttttcagataacataattaatgcctggaaaacttaaatcaagtaaaatgtactactaagagagactcaataagggggcaaggcaaaaaagtcatatatagaaatcgatatacaatttaccatagtaatggtaaaactgtttaccaagtaatagaaaatataaaatacctaaggataaacttaactaaaaatgtgcaagagctatatgaagagaacttaaaaatactctgaaggtaaacaacaagagccctaaataaatgggagagactaacgggctcttcagaagcctcagcaagataaaggtgtcaattctgtctgtatttctctatatagtttatctcaa

SEQ ID NO: 131814 - DNA, 1051 bp, Homo sapiens
gactcctgggcccttgcagttttctccggtgacaagtggcctccttgacaggagggagtttgaggctctggtccatgagagctgcctggggctttcgtcctcccctctggctgccctgtggggtggtctctgatggcacccgggagaacatgcaccctgggggtgggggtagactcagacgctggtacccacctcggggagggtggtggatgctgatctggcaacatgactctccactgagggggttgccgtggcctgcaggggctctggaaaaagtgtgcaggagtgatgagcttatccttgggtggaaccaacctggggagctgggcagggaggactcatcttcagggcagctgtctccttgtagtcgttcggcagagctcactgggcacctgtatctgtcaggtgctaagctttgtccagtgggagagaagagcaaagacctgttaatttctttcaatgcagtcagcaagcaggggcagaattgacattgggtcttgggggctctggactttcactttgttcttacgctggttagctaggtgacctggggcattgacttaatccctctgtgcctcagtttcctctgagtcaaatggagatagtatatgcaagtagttaaatgtaggtaggtgagaattagacaaagaagtacatgtcaagctcttagatcttgtcctggcagagaaaaagcacttgataaacgtcattcccagcatcttattatatgattcttagtatgtcatattaatatctggtagcgttttaaggcccatctcctcatgtaattttcacagtgggtctgcgtgttaggtgttttattattgcccaatgatattaataaatatatggagtcccagagaggttaagtgacttaccccaggtgtaggtctccagggctctctctctggtctccctctctgtgtgttcagaccgcaggtggctgacttttcaatgcccatgtctgacgctggaggccctgagtgctagtatgacttgccttaagaggagccccctggtgaaaaaggcctgcatggggctgggaaagcgc

SEQ ID NO: 131815 - DNA, 1049 bp, Homo sapiens
gttccttgcagttgtaggaccgaggccttgttatcttgctggctgtcatccagggttggctcccagctcctagctgcctagtgccctttgctactatacagcccttgtggttacatggcaacatgctccccaacgttttgactctctgacctcttttatggctcactagatttggtcaggcccacccaggataatctccttgattaactcaaagttgactgggaacttaactacatttgcaaaatccttttggccacataaggtaaaaatagttgctggaatttcatcccatcatattcacaagtcttgctcactttcatgggagggcgctgtacagggtatgcacaccaggggaggagatcttacaagtctgcctagcgtagcagggcccatgtttaattcatccctgtatccccagggcacagcatcaggtagagagtcgaacaccagctggattgaaggtcagggggatgcctagaagaccagagcgtgcacagaagggactccagtacacccagaagctcactccatgtagtagaggcagaagcttcaaactctccacagcagtacttggcaaatagacttaagacattgctggattcttgaaagtatctccatggaatatatgccaaagctttccagggagaattttgggaaaacgattccatgttgtacatatagtccacaatgatttttttaaaaaaacgatgttacccgacatttatattctgcacaatactttttacagtcattggatacgtagcataattaattaggtggtgggtgggtgggtggctgactgaatgagtcagtaataaactagtaataaactagattaatttatgcactcactcatttcctgagctacccacccagcgacttacctttgccagtcagccagcatctacttattgaagcctccaccccatcatgtaatggatgaacgagacagagtccctgccctcttcgttagctcggagttccccaggatgtggtctgggggctgcttgagcatcagtgacctggagagcatgtgaaagatacagtct

SEQ ID NO: 131816 - DNA, 1082 bp, Homo sapiens
ataaatttctgttgtttataagctactcactctctggtactttgttataacagcccaaactgactgagacagtacccatgtattccaacgtgggagtgctgttcgttttatcctttaagagatgacatgttgacatgtttggaagaatgcaggttttccggtaagacagtactgggctcaattacaggacttatcagttgttgttactgatgctgaatatctgtgttgccttggaaagtcacttcgggatttttgagcctcagttttctcatctctaaaatgggctaataatattgaccatcaaagatttgttttgaggtacaacacctagaatagcacctgtatctactggctacatagaaaacagttctcatttttctgatctacagagagcactctctgagggcacaggcagcttcagtggtggagatgggtgtggctgtccattgtcttttctctggcccccatgatggttttcttggaaagcattttaaggctaagaaaggctctgtctggtctcaggaatcaggactcaggcactggatgttttttgtgtgaattttccatcagtgtattaacaatggtaagacagagggagataatgctcttaaaagcagtattaaatgaaaaatgttgcatttattattgcattttactagggtggctctatcttcaatgatgcccgtgacctgcaaatccagaaatccagacaaatggtctaatagttttcaaagtttttacagctgaaaattgagaggatgaaaggtgctgtggttaagccaaggtgagagaacactgttgttcagcagggagcctggcagtggaaggaatttctgccttcttcaaagagtgctgccatgccttagttcccgaagtattaggcttttggactggaaggcattgtattgacctttttagatggatctcttctcagtgatgttgcctcgcttttctcatgcttctcccatgtgctggagatcacttacatctttgtgtatcttatggtaggtgctgtaatgcccattttacagatgagaaaactgaggcttagaaattgacttgctttacgtcacatggctttt

SEQ ID NO: 131817 - DNA, 1054 bp, Homo sapiens
gtggaatgggcgacagaggcagaacagctgtgtgtctgcgcccctcagaggcagcagctgattctgtccctagttcactttgctgtgcttggagaaagccagctatgtggcggggggaggggtgtgggctgccattcggaaccagttcattccagtcagccacagcgatgtgacatggtggggaagaagagtatcaagcttttcatttgagatcattcagctgcaagttatgggagaaacatttaagatagtcctgcagcttttgtttttttttaaatcccagaaataatttttttgacctagttttggttgtgctcaggatgtggttatacttaactaagctgaagtacaatacgctttactcagtgtcctggaaccaccttcagagctgcttgtgtgctggggtctccatactgtatggtggggccatccgggtgaggctccacctgaaagctgagcaggtcgctgtggctcaaaggtcaggagcgtggggctctgggatgggactgcactggttctgccacttacagctgtgtgacctcggctgaattactcacctctctgaactccagtttacccaactgcacagtggggataaatgtgccttcctttgttagtgatttgctcatcggatcttcacaacagccctgtgagatagaagctgttagtgacctcatgctacagacgaagacttggccccatggggaggttaagtaactgttttgtggccatctcttatggccatagagtggccaaaccaggagtctggcttgagtctatgctcttaaccattgccccttcctgccttttcagatgatggatgttcaggagtaagtattgccattttgtggaggaagctcaattctgcccactctggaggtccagaaggaagagaggttgctagaatgtggacccaactcaatgggattgggttaaagtcctggaacaccaatgcctgtttggtgggcaactttattgtcgtttctcagaaatggttccctttggtccttactggcaatagtgacctgtcttggaagctgctgtgtcctccaga

SEQ ID NO: 131818 - DNA, 1070 bp, Homo sapiens
cttggagaaggttctggagcctagtgcaatcaaagatggaagatgaggagctgctcttagacacaaagccaggggattaccaggagattgccattgtccagcgtattcttgggagaagggaaaattggaaggagtgagtgaacccccaggttggcagccagagaaggatatggacgcttgaggaacagcaatgctgagcgactctattgagcccccttttactgacgtcccaaggagacatcagggacaaacatgttggaaggtgttgaggaaggacaaacggaaccaccactgagatgtgttcatttattagcttttgagagtttaaatggaaatatcttcccgtttctgtcctgtagggagaggtacactgcgctgagcaaacactttctgtttccgaaatagactcattgtctgtctgcatggggaggaactcctggtgatgaccggtttcctcactgctgcagaagttcatcttcaggaaaggagtggtttaaaaatggatcagaacttgcacagactcatggtctaggacagtcgggaaggccccgctgatggatccattagctcaacacttgatttcacacaggagaaaatggagcccagtggaaggaaatgacctgctcaacatcatgtagcaggttggtgggacacccagggctggcacagggacctttggctcctgactcagtgacctttctctaccacattattgagacatgacagaaatgcttggtttggtcacttctgaagggcctgcttgtgagaattgcttgggcccttttaaaatttctaatgccccatttttatcttttcttcaccttagagattattatttacttggtcttggatgggaacgaggctagtctttgttaaactaacttcacctgatgcttatacaggaagatctgggtggaaatctaaatctaaagcacacactaaacataatttctgtgaagagacagctcatgaaagaaccaagaggcctctctggttgagatggttttggaatgacagtcagctgctcagggaaagggcaacccctaggcctctctgcccagttcttggcc

SEQ ID NO: 131819 - DNA, 1053 bp, Homo sapiens
tagcattcagagttgtaataaatcctctggaaattacctggagttaactatgagttggttaagtgccagtaattagcattgcctgggaatttttgctgacacatagactcatcctggttgccttgcttggctttaattgtatcccggagctctagaattttggacctggaagaggtcttcccagtctagctctgcttttcagcttaaaggacgaagaacctgaacccagggaaggagggagtttgcttaaggacacacagattcccagcagccaaggagagcagagtccgggtctcccaagctcatgttttcagcccctttgatctgttcatttccaggcagggtgctctcaggtcaagctaatgtgtggcatgatgcagtttgccaagctgttttgcacagtctttccaaaattagttattaattgggtgctaatcttgttggccaccacgaaggcattgtctttagagtagcttaaggttggtggatccaggctgaggcatgttgtggaagccactgcagggccgttagcaataaacatgtaccaggaggtcatctggttctttttctgcttggagaggcaaacagtaacccagcttatcccttctgggctcccatctgataaagacctcagcctttgaatagacacagatgattaaatacagttcagctctgcaaatgcccatggagcacactactctgtgcccagcattgtgcaaggtatcccgggcatatgggcatgtaagatggacttcttgcttggaaaattataaagtgtttaataggcagacagatagggatgtagagaaacagctgagttctagcctcagaaacagagacttgagatgaaaccaagggtttactaaccgtatgacctagcccagttctgtaaccttggtgagtcttgattttctcatctgtgaaatggggtagttgtgagacttgaataggattctgtatgggaaatgcctgacacatagtaagagctcagtaaatgatattaataataatgattttttgtgtgtttttttggggtgggtgggtggggctaat

SEQ ID NO: 131820 - DNA, 1249 bp, Homo sapiens
aatctagctatattacaaataaatgaaacaacctcattgaaggtgatggagggagaaggtgctgacctaagcaactttggcaatgaatggagtttctaagactaaaaacaaaaggcctagtacgtaagtgctgttgtttcccatggggtgtgggtcaatgattctcatactgttatacttgtgtactggagtttaacggttaagcaaaatatggcagtggtgggagctaggtttctcaccactgaagtgagagtttacagaaaagtaaatggagtctagagtatccatgtagtatggatttgagttggaaatatgcatgtaaactcatgtttaacttaatacaaacatagatggttatgaatagaaatatttataaatatgtgtatatgcatgggctatatacacacatatatatccttgcgctgtcagctcattgagcctagaaagtcaaatcctgattgcagtgagcacacctggcatccagaccttggtttctaaaaccattctgcacaaaaaggatacagggatccctgaataaatggctgattctaggatggggcaggaaatatatacaaggtgagccaagggcatcttatagtgccagaaagtaaaaaggtgttttaaaaaatcccatattgatgggagtatgtcaaaggggcacataagccaactgaaagagcaccccctggccaatgtgggacaatttgagacaaaaaataaagtaatactggagtataacaaaagtataaaataaatatccacaagcccatactgatatataacaaataaatgagtgaataaatatgagaagaagagagaaatctcctgtaagaataattccaactaatttatgtagatattctaccctcaaggagagggagcctagtgagggctgcataagtgacttccttccaaagggtatgaaaagggaattaaaaaaaaaaaaaaacaagaaaaagaaaactttataatggaggaacctgtaaaacacgacctcaagccaggtgttatagtttggatatttgtaccctcaaactacatgttgaaatttgatgcccagtgttgaaagtaggggcctaatgggaagtgtttgggtcatggggttagatccctcatgaataattaatcccctccctgtgtgctggggcataagtgagttctcattcttattagttcccgtgagagctggttgttaaaaagagcctgacacctttcctctgccttgcttcctctcttatcctgtgatctc

SEQ ID NO: 131821 - DNA, 1086 bp, Homo sapiens
ctcaaaaaataaaataaataaataaataaataaataaatacataaataaatgtacaattcagtggttttagtatatttacaaggtcctgtaataactcgttgatttttatggtttacacttgctagtgttagtcaagactaaaatggtgctataaaaagctgtcattttgatcctcgatttttctcatctgcaaaagagtagttgtgaaagtttaatgggtaaaagacatggttaagacaatgaaaagacaagccactgacttggagaaatatttgccacacacctatctgataaagagcttgtagcaaacatacaaagaactctcaaaattcaacaataaggaaaacaattcaattaaaaatagacaaaatatttggacagacatctcattaaagaagatatatagatggcagataagcagatgaaatgatgctgaatataatttcgttagggaattgtaaattaaaacaacaatgagatatcactacacacctatttgaatgggggtggctaaaatccaaagcgaggacaatgtcaaatgttgacaaggatgtagggcaacaggaactgtgattcattgctgatgggaatggaaaaatggtacaggcaccctggaaggcagtgggtgccttttcttttcttttcttttttttgagacggagtcctgctcttgtcgcccaggctggagtgcaatggcacaatcttggctcactgcaaccttcacctcctgggttcaagcaattctcctgcctcagcctcctgagtagctaggattacaggtgcccaccaccacgcccggctagtttttgtattttttagtggagacggggtttcaccacgttggccaggccggtctcgaactcctgacctcatgtgatctacccgcctcggcctcccaaagtgctgggattacaggtgtgagccactggttacaaacctaaatatagtgttaccaatagtgtccagcagttgtgctcttatttacccaactcatttgaaatcttatatccacacaaaaaccttcatggaaatgtttctaatagctttactcataattgccaagaacaatgcaaccaagatgaatg

SEQ ID NO: 131822 - DNA, 1050 bp, Homo sapiens
taagactttgtgagaagaaagtcagttacctagctaggaactatatatgcaaatgcatatatatgcaaatatgcaaatgtactaattttatttaatcctcacacagtactattagatggaaattattatctccgttatataaagatatgaaaacctcaagagagaaaatcacttgtccgcgatcacacagctaaggttcctggagctcgcatttgaatgcagtgggttcactctgtttctgagccaagattccagttctgatgctcttccaacaattgtgggaccctgggtattttgctgagcgtcactgggtgcccctttccccattgttaatgcagggccatgagtaattccttggcctccccttgctagctctcagatggcaaattgctagaaatgagagtttagaatcaagttgggggctggtcagaactcaggaagccacagtgttaggaaaattgaggatgaactggggtggtggtgggattgcggattctgataaattgggagctacacaggaaaacctgtgttgaattcccattgagctcctaatattgaagcatacttacttagtacatgcatagtacattctccctgcagcttaggagacagtccagtcaagtgaacataattgaacctttccttgatgattcaggattttgcattgaaatttatgttttcaagcatccattatcttgttctgggctgtggctaatggcacaatgggcccaggaaattgggcttaccataggcctacaatctagtggatgctttttttttttttttaaattaaaatgaaccaggtccatgatgagattattttttttctccttcctaaaggtagaatacaggaaatatggaaatcaatcaaacccttaccttgtttcttttgcctcaaatgctgtattagtctgttttcacagtgctataaagaaatacctgagactgggtaatatataaaggaaagaagtttaattgtttcacagttctgcgtggctggcggaggtgggaaggggtggtctcaggaaacttacaatcatggaagaaggc

SEQ ID NO: 131823 - DNA, 1048 bp, Homo sapiens
ggggacaatggaaccacatggaaagagaagttaattgagtgaatttgggaaaattatttagcatctctctgtgattagcgtccctatttgtataacaaggctgataagacctgtcttataagactggtttaaggatgagatgagacaagtaatctaaagcagctcctgatcaatcacttctcatcatcctgttgaggtctgtgcaagcaacttctcactatctgagcttttcctagtttgtttatttgtttgtttgtttgtttacttgcttattatctgaactcaccaaactagaatataagatatatagagtctattattcaggctatagtataaaaaatgaactcgtctctgtctagaaagcccttcccttcagatattttgtggccaactctttcaccctttacaaaaaagcactaaatacgctgcctagtcattcttcttaaaattgcatcctagaaccccctctataatcgctggcttcccattctgttctatttttctttttcaaacagcacttaaaacctctaacatactctacataagctttagacttatttgtttatcctcttgccctgctagaatgtaaattgcattagggcagggatctttgtttttttcactgatgcatcacaggtgcctgtaaccatacccttttcataatggaacaaatgaatccactgggaaggggtaggacattgagtcagaagggtggcaggagtcctttgtaagccaggataaacagtttggatttttttttttccaaaataagataaacagtgtagacttttatgagaaggtatgacatgaactaaatgacatttttacgtcattctggctgctgtagagagaatggaatagaagaagtcaagattggacaggacatgagttaggagagagggtgatggcttggaccaaggtgatggtcctggagacaaagagaaatttgcagctttcagatgtgtttttacatggaaggaagaactgaccagacatgctgatgggctgaacaagagggtgagtgagaaggaaatcgaggctaactcat

SEQ ID NO: 131824 - DNA, 1169 bp, Homo sapiens
tatgtttgttgttctattttgtctattatgaattgtgacaaaaccattataaaagatgacaagtgtgtgtgtttctttttttctttttaaactgtagggaacatagtcattagtgatctcaaataccgaaagacattttacggatctctcctcgcccctgataacaatcaatttacattcttaattatgagttatgttttgattaggttatctcaaaatgtattcatattcctcacatacccattagtgaaaaagaggccacctcaagtgtgctcggtggccactgtggcccaaaatatagtactttgcatgtgaatgacctagggatacataggtactcctttgcagtttttgttctagcattacaaccacttttattatcaatgtggacactgtctaaattgaaatatagtagaaatactcagttaacaaaagcatgttattattgcttgttgaatgtaaagtataagaaagcagtctcttttgtaatactgtatgttaaattaaaattattgaattatgtgctaccaaggtgggagatcatgggtaatgaaaaatcctaatcccaagaggaattagtggtatcttcactggcagaggagtgtgcctactgtttcctccatctttgtgtgctgtagggccttatctagtgttttgtattatgaggcactcaacaaatatttgttgaaattaaaaattgattttgttctcaagaatttcagtagtcctattccagaacactcagctgtcttaatttttcaaaggcaggaaagcattttcagctctccccgtggagaattttcttgggtatctggaagctcaaatgtaaagcatttttagctattaacaatttttaacagtccatttactcattctttttagatagttttctttgttctttttcttaaatcattatcaagattgcctgcagattgcacagaactttatatagagatgttggtaatactccttcaaatttcttaacaatttggcaagtatttcatattctcatgtattgttttagaaattctgtttaattttaatttgacctgttcccttatactctacttcctatgcattttctgcattggaatctaacttttttctttctcttgaggtagtgaaaagagaatactgaagaataggatctcaagatgagtaaaaagccc

SEQ ID NO: 131825 - DNA, 1047 bp, Homo sapiens
atgcaacagaaaatgccagttgaggcagcacttgtctatcttggttctcatttgaccaagagaagctttttactccaaaggcatactactgaatgtctgtgtgatacaagggtataagaaataatacttgttacttctttgatattactcttaagtgatttatttattttttaagttactgactttgtgacttatttaattcatattaatatattaggcttcccaactgacggtgttgcagttgagctagcttccagttttggagaaacacatagttgattagttctgtcagtaattttcagggatattaatataactttgatattagtgagaaattttctttcagtagtaaaatgttttctaacttaggagctgttaaatttatgatccagtagttcaaaagactacaaaaaagaacttttaaaaccatgcttgaatgtacttttagagtattctgtgtttttagaatacttggaatttcagagaacaaatgaaagttgtatcttcttgccacaaaattcatatgtgcttatttgagcggtgtcatgcaaatgtactcactgatgaagtttagatttaattttaatgaccctggtaataatagttctctttaatggaaataagcattagccaggataatcacatattatcactgaaacttgttatcagttttatttttataagctgatttatataaagattttggcactctgtttcaggtggctccttatttaaaaaaggattaagaatattgtatatatgtattctaggtaatttacaaaaataattttcttatggtaattttgcttattaatgtcagtagtttcaagaactagttaggcttaggtgccccttaaatttagtattaggtggtgtgctcttggaccaactatttaattactaagatgtattgaattttatatgggacacaaaagttctgagattagtgctcttaacattttatttataaataggataataaacttaattcttcatattattccatttgtaaatgaccattttacatttcatggaaattctgtaaat

SEQ ID NO: 131826 - DNA, 1035 bp, Homo sapiens
cagagtttaatagaacagtataaatttgaattggcaaatgctgttttcacacatttgaagttttttgaactgtatggaacatttgcaaatgtgagtttttaagatgttcgtgcagaattttaatagtataggagaattaaggaaatttacattgtagcaagtacaaatacttgttaatttaaataaaattatacattttctgaataaaaagttactttttttctaattagatttaactattcaaaggaaaatgctactagagataagttgtgtcatctatatttagagtaggagaatggtcctaaagtgtaacatgtagatcaaatatagcattgtaggaacaccaggtgaatacttcaaaaatagaggttcttttgctaatattaatatgcatgcagtttttgtcttttcataatttgggattctttcagtttgtctatacatagaaagtaatgattattattttgagtcattacctttgaaaaccaatgccagctgtagacttagaaaaaatatacagttgtatgtatacatcaaaataaatgaattacatactatggtcataagttcatagaaaacgtatacatgacctctaggttaaggacccttcttgcagacaattcatttgaaatctgtaagttttgtttaaaaattctgagataatttacatttagatagtcacaaattttgaatcttaaggtcaaagtgaatcatccagtttaattatcaagcagatttgtaccagtgcacaaacattttacttctttaacttttaaaatttccacaaaagaaagccccgtaaattcctttgaacaatgctaaatataagaaagcttccctctacccctccaaaaatgtgaaaagcatgatttagggacagagaagacttatttatttgaaaacacacctggtttcgggttgttcttgctctagtgttcttcctttttttatgttaattcgttttttatagaactctttctggtttataagctttttctgcttatcctagtttttttgaaaaacaaaagtattgga

SEQ ID NO: 131827 - DNA, 1051 bp, Homo sapiens
atacttttagatgggtaaataacacaaacttgaggcagaggtaagatagacaaaaagtcataggtagttcaaaactgctggctactagaggagaaaatgagaaaaatgtagaaaactgaatataatttggaaaaaatatagaggtttgagctatttggaatataactatattgggcatgaaaccttttggctcccaatatagtgatctctccactataacccattgtcttgcatagatttcctaaagctttgcgcctcagttaactaaatgggctcagtgttcacgggccaccgtagtttctgaccaattgtagttgtgagtatatgtctggcatctagaagggccctgaaagtctggcaagcctatgccactctttttcattggaattagagagcttgagcaaggtaggtaaatttcaagtttatccatcctagagagctttcctcctaaatttacttcataatcaaacctccaagctgatgatttcttagcctccttcatcaatttataatgagggtaaagtccaggaatctcaggcttactgtgctgtgctttatgtgtgtgtgatcgtatagtggcaagggttggaacaagagaaaagaccgttttatttgcttatctgacatttggttgaagtccagccatcacgtatcacacacatccagctccctatttgttacatcattcctgccgaatgttattatgtattatgagatttcacactgtcacatcacattagataatggtttattttttagttgggggttgatgaaagccactagctgggaaacagtttatctgttgtggtagttaactctactaaaaagaatgttttgcaattctagttttgctgagtagacagaaatggcatctgcagatgcttctgtttttaattttggttttaagtgatttcttttaagctgagggagaaaatactagttttaattttaagttttgaatatcagtagtacaatttttaaaagaaattaacggaatattgaaaagacagcttagttctgctgttcttcattaaggtcccagttttttagt

SEQ ID NO: 131828 - DNA, 1029 bp, Homo sapiens
ttgttgaataaatgaaatgaatgaggactgtcaatttctaaatttacatgaattagacatcctattggcttatccatataaacaagaaagtgattatttaaaatacataatttgaataacttattgaggcagtttataaaattatgttgccattttgattgatatggtgcttattcaaataattagttaaatcctaaatcttttcgtgaattctcatggtctttagggcatttggcagcatattctggccctgcttggtggattgcaacctgtcattgaggtagttatcaactctatcttaagtgcaggagattctaggttatatcagttaatttcccttgtcattttctcatggttgactttttttttttatcaatacagatagaaatctgggtatatattttaaattagaagataaatcagaatgaattccttaaatgcaaatgatgtttaattgtattaatgttcctatgttgaatgcaaagaaatttttaaaattaatccatcagattatatttctggcatagctgcatgcccaccattgcttccctcttttatcctaggataatgaagcgctgacagtttgagttaataaatcatcttgtctttcaaaagtttttggttttgtgaatgtggaccactttgaaaatctgattaaacttgggaattctcacctcaaaagaatacccatatacatctacaccaagcacatagcattttgcatgcagcctcagggaattcagtctcctgatctagtgggtgagtccagacctgcccatgtaaagcagttaataatgtgagccagaataagaattcactggtaataattcccattttagatttctgtaaaatatgtaaaaataaattttaagcaaaacatatttatgttttgataacacttaagagttgatacaacagggaactgataatgtatgtttactgtatagctaacctctttggtcagtttctgttcttatgagattatggtgttagtccagaatctgtagatactgccactctctgaagagt

SEQ ID NO: 131829 - DNA, 1275 bp, Homo sapiens
taatatttaaagggtaagagagctctatgtagaattttggcactgagaaatcctacttttagtgaagttgccttctctccatctctttctgttgaacccttgagagatgtcagctatggttattttcttttctctttatctctaatcattgttatcggcatcttatctctgactcttcaaaatctgaaacttcagtcttccacttcttgaatatttttccaaattactcataaatgtctgggattgtgcctaatcactattctttaatttaacagcttcctatgattcaacctttaaaaaatgacaaaacaacaacattaacactacagcttccaaattcaatcagaaaaatcttatgtttaattcacagtcaattagaataaaacataaatagtgcatcaaaatcatattgttgtagttcagtatacagaggcatttgtgaatacatttgtgttcagcagcgttttttcttcactgtatgtatcaaaacattactatgagccatctgctagaaataacttcactgtgcaaagctatatgttaaattaccatttaatgcatttcacgggtattgcaaagatctcgatattacgatttttttcctctcgcagtgtaactggtaaccaaattaagtaccaactttaagtcactccctgttttctgtagaataaaggattgtttcattagtttgctatttcaaagcccttcaagtttcaaccaggctaacaagtcccatctgatgtcttactagtctcctttacctgctttactacttaccatgtagtctagccaaaaggactgttactctttcctttaagtgctcctccaatctctgaacatgaggtctttgaggacaaataaccatatcctacttatcttgaaatcctccatggctgcttgcctaactcagagtcatgtgatggttttaagtaagtgaacattgagtaaatgagttatgctctgtgtatacactttgtgctgattaggtctatattctatatgtcccctagcaagtctaacttaagtaacatctcccgagaaccttcagtaaattcccagattttctatggactattaaagcatcttatatacagtttttgtatacacttaccagttttactatgtatgaaataatcacttagatgggccttatcccatttctccttttggcatagattacagacttttgtgccacttagtcttggtttttaatactggctgcaccatgtgtattcttagacaggtcttcatctgttaaatgtacactatgttttc

SEQ ID NO: 131830 - DNA, 1082 bp, Homo sapiens
cccagtgcaatggtgcgatctcggctcactgcaacctctgcctcccgggttcaagcgattctcctgcctcagcctcccgagtagccgggattacaggcatgtgccaccatggccggcaaattttgttattttactagagaccgggtttctccatgttggtcatgctggtctcaaactcccgacctcaggtgatccacccacctcggcctcccaaagtgctgggattacaggcatgagccaccgtggctggccgagttgtttcgtttcctttttatgtaccaatagtgcctagcaagtgccttagtcttcttggatgttcaaataaatgtttaatgaatgaacagaaatttggacatttttgataatggtaatatttttaacacctttaagattcaaaatttgattagtgaacatgataaaaattaaaatagagaagaatcttgggtatctgtgttacttaattcttggccttcatcccaactgtacataccaatttctagatatttatgtagagagtacagcatgctatgacttaccctaaagaggatccccaaaacataattttcattttggttgatgcgtcaggcatctcagccagaataatttaaaatattttagaaaaaccgtaagtcgctttaaaatgcaatccagatttaaattatttgaactcacttagatactgattctttactgaattaagtcatgttgtgaaaataaagatgtgtttaactctgttactgtggactattctcactttgagaaatgtttcaaatatatagagttgtatagatttagaatatgagggaacctaaagaataaactccttatttttttattcaaaatgtaaatgataggacaaattaagcacatgaaattagaggctttatgttttgagggaaacttaccaatttttacaattgatagaatatctttttatagtacttcagtggctagcgaatgttgaaaaataaggaacaaccttgttctaggtttttcttaatactattgacaatttttatgttttaaaaaccagggcaacaaaaacaaaaccagagcaacactgcaaaagacaagtattacag

SEQ ID NO: 131831 - DNA, 1406 bp, Homo sapiens
gtaaattctttgtaaacaccacattcagtgactacataatatttcattcagtggatatatcattgtttgtgtagctgtagacagtcttcagtttttccaaccatatatttagatggtttccactttatttgttattataaataatgttttctgtatataattccagaattggaattgttgggtcagaaagtaggaatatgtttaaggttcttgatgtatgttaccacattacttcacaaaacagtgcagtcatttatatttctactgggagtgtatcaaggagtttattcagatcttgaggacgatcatttataaagacaataaagcagagttttttggttagttttaaaatatggacgtatttattgttttcttcatggttttaatggtaagcaacattcagctaaatctatgtataatgctttgtataaacaaatataaggattttctctttatatgaagcattttgatttttgaggtatccatcacgaattgaaaaaattgactatgaggagggcaagatgttggtccattttgagcgctggagtcatcgttatgatgagtggatttactgggatagcaatagattgcgaccccttgagagaccagcactaagaaaagaagggctaaaagatgaggaagatttctttgtaagtagcaagttttttctgtttgctagttttgccagctatgtaatgacatattttaaaaggattctgttaaattatacaaaagcctgtttttgttaagaaatgcttatttaatatacatggaattgatcttaaaagttgtttaaaataggattttaaagctggagaagaagttctggctcgttggacagactgtcgctattaccctgccaagattgaagcaattaacaaagaaggtatgtgtttgaaatgatctgagacttaaaattagattaatagtaaaatttcactgtattttaaattttaattagtgtgtgttatgtaatcattacgtataacttttatattttctgtaagtattctttttcgggagcatttgatttgttatgtgttatcgagaataaaatgctatatggtttgctacctaagtagtgtttaaattagtagacaaaaatagttggttaaaatttttcaactttcaattcacaggcttatatcatatacattttatttctacttctctgtttctagtttgtggctaacttatatttatgaacatctacccaagagtgtgaggaaaggttaaagatttaggggaattcaaatcagttcaattcacaagtgaaatacataggatattttctgaggaaagagtatggaatttttaccagttcgaggatttcccttattgtgtctctccctgctgtcctgtcattaatttctacagataattgagttaattttctagtatctttt

SEQ ID NO: 131832 - DNA, 1050 bp, Homo sapiens
tgttattactaaagaaacaaacattgagtgacagcttcttggcaagaagggcatttaatctaagtaaggggacatttcctttaaactgagtcttgaaagacaactaagttagctaaagtagtgatcaaagtgcttttctggtagaagaaatatgtggaaaataacaagtgggagaggcatgccatgtcattttaaggaactgcaggttgcttagaatgaaagattcgtttataggtgatagaatagctagagtacaggttggagagaaaggcaaagattggtatatgaagtgtcatgtaatcttgctaaagaattagaattttatatggaggtgatgggagccatggaagagtttttaggctgaggatttaatctaacaacaaacttgagagaaaataggaggtaagagaagatagaagaggaaaacagagatatattaaggaattttaggtgtgaaaaaataaatcatagtagtctagctagaaatcatgatataactttataaagaccttaatccaatgtattgtcttaatgaattgaaatcatgaatatggctatggttttcttaccactggttacccctacagaaagagttgagagacatctcagttgttaggtgtgcaggctgtttcttcttttctagtgggccctgtatttccctgtacacttacacttctgtggagctgtgttatggagcttacattcccaagtcttattcacattggcttccgagtgtctagtccagagcctagcacatagtagacagtcagtaacaatttgtggaagtaaaggaagaagtaaaatctcttctgttgggtaataagatgtacccaaaacaaagtgaaattaaacagtcattgccctctacattaattcataacagtttcttttaagagctttggggccttcgttacatgcttaaagttccctgtgtgtgtgcagatgcaggtacacacatagcgcacacactcagaacaaaaccaccctcattctttattctatccctttcatctacaggcatttaatacagaaaattcagcttaccttagt

SEQ ID NO: 131833 - DNA, 1045 bp, Homo sapiens
ttgcttctttggtttagacctgctaaagttataggtcactagtttctgttccaggtgaaatcccagcatccactaagctggtgttgtcctatcgacccagctggatcgtgtaaccagtctatgggaagtgaggtaagagccttttttttaaaaattttgttttgtttttcctggtatataatgtcatttagaaagttaaaaatttttaatataaaaatttacattgagttcttatcttcttctttccttctacaaatcatagtcattcatcttcctttaaaaggcgcttacctgacactctgtaggctgtttcagatagggctctctgagtcatgtgatggaagcagtgtattgtatgctttgtcactgctcaaagcaagaatggatggtaagcattggaaggagaatcttgggtggaggtaaaaaccacaattccatttgttggctatgttttctgaaatactggaaagaaaggtgccattagaaatttaaaatattttcttttctattctgctgttatttgggattttcagcacctggacctacaattaattttaagaaattgaaagtagtgtgtaaaaatgtctaatatggaaatatgctacgtatttgttccataccatgcggtgaaaactgtcattctgaaatgtattgaaattacctggtcagcttcagtcaagtgtaaacatttagtgctctagaaatgtatatctaccacattaaaaaaattattcatgaagaaataagtgtgattgttttaaattgcctggttttcaaaaatttagttatgaaatgattagcaagcagatttcttctaattaatatgtaaatgcaatttaaaatgaaaatgcttttgatcaggaagtggctttgtgtcttcccacatgtatgtataaataaagtgttcttttaagcattcagtggtgtgatttcttggttactacatagattgattaaaaggttgggaacattgtatatacctgcttaagcaaaagtctcaatttttttttttttttttgctttaaaacaattattttgttattct

SEQ ID NO: 131834 - DNA, 2175 bp, Homo sapiens
atttgagccctaaaatactaaggtagaatgtcatgtagtattccatatctgccataggtttcctctgctattttagattttattcctgtgaaaatatatccatggaatacctgttattgaatatgcttcctattttatgagaggttatgcaatctaactcatttgattattaaatttgataacctaccatgttcagctatcatgtaaatattgttatctctatatttatgtttatgtagttacctgtgaaagtagctttgaaaatgtgacacatatttttattagtgtaattacattttaattaatttttaatacttcacatgttttgtgtttttcctttggaggattggatagctttagtcaaagcagctgctgcagctgcagccaagaacaaaacagggagtaaacctcgaaccagcgctaacagcaataaagataaggataaagatgagagaaagtggtttaaagtaccttcaaagaaggaggaaacttcaacttgtatagccacaccagacgtagagaagaaggaagatctgcctacatctagtgaaacatttggtacaaaatacattcttacgttaattccttatgacactggtaaactcatgtagtaaagtcaaatcccttggcttcctttgattttgaatgtataattaaatttgtaggcttttgaccctagcataatatgatggctaacttttttagcatcttacagttagacctgaaacttaatagtctagtgtgggttacttgatattggatgccctcagtattcttgaatagaaataggttgagattttgatttataacttcttgatagcaggtttttgtttgagattttttcttttgttttgtgttttttcttcaaccttttaaatgcttctgtgtatgcttcaatatataatatggaaaaagcagtaagttattttcttcctgcttttctttaagaataactgctttagtagtcttttatttctaatatattagtctggagggatttgtgtttttcaaaggtctgtatcaagtagtagattaaaaaaactaatgtgcaaagcatttttactattttgctgttaaaaaatcatgtgttttaatttggattctagataaactctcatatatgtgttctgttgaaagtaggacttcatgtagagaacgttccaaagatggtctttccacagccagagagcacattatcaaacaagaggaaaaataatcaaggcaactcgtttcaggcaaagagagctcgacttaacaagattactggtaaactacaatgattttttttttgagggggggaaatggaaggtttaattttagagtaatttatttttaatgaagtaaaatggttttgatttagtgtcatggacctgttaataacaaagacaattactttgtggttcttcaaggtcaatgtctttcaacaccgtcagctttttctgttgtaaaatgtgaaaaataccacatatcttctacctacctcacagggatgttgtgagggttgataaggacaaatgctacaaagctcagtgatttttaaattacatttgtggtagtagtagtttctagaagaattattttgtcaacttacggtgacacagtttctcagattttaaatttttttatacattcttctacttgaccagtcttacttaaggatggtgccatatatattggaaagatgactgtctgacttacatttacttcctgaatctgttaatttctgaatttctgatgtgaaagtatttctataagttttttttgttttttaatttttactcttcaggttggtcacaagaatctgggcttatttatttccatatgatttcttatagtttagtttaggaaatagcagtgttaggctgttagaaaacactgaaaattctagcctggttcgtgttcatggaagaggggattgaaggattagaattggggccagtcatactacatcctgccatttccacagtctattcagcctagtgattctagtcttcaaaagaaattgtgaacatatttaccttttctgagtatatgttgaaaggggagtttaaatactttcatgatttagtcatatgttcttattaaaaggacagaatctttttttagtgcctttggcctaataaagctgtaaaaacctttgtttgttggcttcaacttgaagaagcttgatttcat

SEQ ID NO: 131835 - DNA, 1900 bp, Homo sapiens
agaccaagaatgtaaccactttgctctttctttgttcccctttcccattccagggagctctgggctctgttctacttattcgtattggcaggaagagaccagctgtgtattttatagctaatatagaatactggaaggttgtaactttattggtgggtggaactgatgactatttgatattcttcttttacctaagtttaaataatttcttgaagcagtgtaatgcattcttattgggcaattttatcccataggggtattcttctagaagagggcctgttagtaatacataggtaattaataggtacttgcttataatttcctttcagttaattcttctcattttctatggatagtgcattttttcctggaatattagcaggtcaagataacagattttggactgcctcttaaggcagaagtagtcagagttatttcttcaagtacctattttgttatttgttccattttattgtttatatttaataacttttgtaagttgatgtgaatgtaaagcatgaaaaaactttattaatcatatttgggcttttaaattctctagataaccaagtatgcattttaaaatctaattttaagtagtttttcttaagtctcattactttttatgaacacattgcaatgctttatttttccttctcaaaccattaatggaaagggattttaataaactgggtctgtaatatcctaatgtaaatccatatgttatgggtgaattattttgtttcttttactacttgtggtaccttattttcagctttttagtttgtgatctatttcatctattgagtattaaaaagtatttctaccacctgtgtgaaaggaaacaaagtaaaagatataattatataatatattgaatagcaagatttgtcctgtttgaatagtccttagaaatataactctactcagtttcctgcaaaagaagaacttgattttctaattatttttatttcaatagttcattgggccttaagaatgttagctggagaataaaaacctaatgaatgtagctttaaatgttaaatattcagtactgtatctttttcagtaatgtaaaaatatgttcagaatataattaggattgaagctgtttttgtaaaattgtttatatacagttgatgtggtatgagactgtaacaaactatttagttttttggtttttgcttttttttttttttttaaatctcaaactgggacaaacaccagggttttgttgttgttttttacttattttttaatatagagatggggtcttgctatattgcccaagctggtctcaaactcctgggctcaagcaactcacccagctcggcctcccaaagtgttacaagcatgagccaccgtgcctaaccttaaataccagttttaatactaatcataaatgtatcaaaatcattgtcttacactcggccttttttattttaaagtacattctgagtactaggtaccttttgcttaatttagaatttgtttgagtactactttaagaagataatttttttaatttatttatctatttagttatttatttagagatggaatctcactctgttccccaggatggagtgcagcggtgccatctcggctcactgcaacctttgcctcccaggttcaagcgattctcgtgcctcagcctcccaagtaactgggattacaggtgtgtacgtccacacccagctaatttttgtatttttagtagagatggtgtttcaccgtgttggccaggctggtctcgaactcctgacctcaggtgattctcccatctcagcctcccaaagtgctgggattacaggcatgagccactgtgctgggcccaagaatataattttaatatgtgaattcctacctagatcacttaacttctttagggtagctgtct

SEQ ID NO: 131836 - DNA, 1062 bp, Homo sapiens
ctaaatgaacttaagaattggtagcttttttagttactaaaacaacagaaaatctttttttatgttctggatgtttggaaggatttcttctgtcttattctgtttttatagctgtatagacaaaacctgtattataagtattagcaacctgagcaaccttaatgtagacattaagacagaattttaactttttacagaataaatgtgtgtgtgcaagtgtgtgttttcagtgatttaattgagtaatattaaacaacagacacacaactgtataagcaactctcaagttctgattcagtcccttggcttattattaagcatatttgtatttttgaaaagaaaacatttgagattacttcctacgtattaaaaagtataggaaatttcaactgctaagatttttgcaaagttaattagggtgtaaatcagtattttttctaataagcaatttctgtacaatttttctcaaggtttgttggcatccaaagctgttggggttgatggtgctgaaaaaaaggaagactacaatgaaacagctccaatgctggagcaggtatgaaatggtagcatttgatttttttcaaggttcccactggaatgatcacggagctctagtatctacgtaattgaaattccccttttgatcagatatgggaataggaagctaattaattgatgatatatttttaactctgccttctccaaggtatacagataactacagacttcattagtgtttgatttcatagactggcattaaagcctttgtctccaaaatttgaaggcctggagacaggcatcccagggtataagcttccagctggatcacctttaactagcttacaaaaagacccttacacaaatactttccatttgtgagttaaaacagggttttttgacatcgaataaagcttcttttgtaagaagtttcttttatattgtaacaattggtgttgttagactgactatgtgttttatgaattgatcaatgagccatacatttttgctaggatgtatattttaataactacaaaaaaagagagtttaaaaaactattaaggg

SEQ ID NO: 131837 - DNA, 1013 bp, Homo sapiens
taaagctcttaattacatctcaattggtatcagcaatagacctaaaggagaggtattgattgttactaacctctgtttcctaatgagttaaagtaatgtcactcatgacatagattgataacaggcctgtagtcaaaacttactgtgctaatggacttatttatattttttaaaaattcaaactgtggtcttgaaccccaattctcagcttattaattatagattatttaattgtattagggatatgtcatgttatatttacttttggataaaacttgcattagatgcataataactcagtaagttttaaaaacaatgttaatttttccttgtttagaagttaagcaccttatcaagatattaagttttaaaatcttgttttataactttgtaacttgagagtaatggatgctgtagtgatgtctttcacatatgtgaagatgaacaataaaattgtttatttacaagtaatggctctaattacttttctggcaacaccttttataataaggttaggaatactatccatttatgaagtaccttttcaaataattaatctgcacttatacacatttataatgagtaaattcaataatagaaatgatgacaactgaatgaatgggacacttgacaccaggccttttatgtggtatgtccaacatgctgtctatagagcattgaaggtgccctacttaataccaaatatgcacttttcttccccagcaaaatttgacttgtatctcagtgggaacagaattatttatttatttagtccccagaaaatgatcgttcatattccagagaactgcagacagcagacctgatagttattctccacaagatatggaagtaaaaagatttcttggggacaagcatgttgtttatagtgctagcagtctgattctttataaaggcctatggtagaatagattttcaaaaaatgcatattatatattttgctctcagataagtatatcagaaagagatagaagtattgcagaaccatagattgc

SEQ ID NO: 131838 - DNA, 2447 bp, Homo sapiens
gcatttggatgtgtattttaccaagctgatattttaaatctaataatatctattcatgtttcccttatgtgggtgcattgttttatttagaagtttttaagaattataacctgatctagaatacacataaaataaaaaggccaatactagttacaaatgcacttctggtaaattactgttggaactagatgtttgaaggaagtctgaatttagtttgttgtgagttggagaaaaacataaggcagtttgttgattcgttaccaagggtgttggtgatcattgtgtttacaggcgtcttccctgaaaccattttatccattttttggatgaagcataaaatgaaacttattcttttctggtgatggcatgtattgaaataaaatgattgaagtaacataagagacatatacttatttttattaatttttatctttatataaaggttgaagttactttgtacatgataattctttatcatgtttaaaaaaataaaacaatacccaaatgtgaatatttgtagattttgaaacatttcctgtagtttctcaaatcagatctattgtcttttgactcttggtctttccttaagataattaatttttcttttccacttttccacaagatttccaaattgtcattgacccattgagatacttttttgataaaggtcttattcggttctttaacgatctggaatttgttaccgtactgaatatatgaaaaatatgttaaagttataaggttgtatatacattgggaaaattattttcaaatgtacatgtgaaaatatttacatttttctttaaaagtattctaatatttgtaacaatattgaaatataggccaatataagtaactgtgtaataactaagagtcttacattaacagattatatatcataaaatatcaatgtagtgattgtgcatggaagtccttgacttcgatgattttgcttctaaccagattattaacttcctcttttcagaatttctagcatatttgtggcaatgtggctgactaccttagaggaaggcacacgaatattctttccctttttaaatattagcagtaactattggaaaagtaaaataagtaagatcgttttctgggaaagtaaaaggtagagaggagtttagctataatttgaatttgtggaagagtaaggattatctggatatgatgagcttaatagtacagtagctgtcaactttaattgattatagcaaggaaatgcatagttttaattgttaattactgaagatttattagagggttgaacacagtatttgaatagagggaggtgaaattctcatttgtttctgtgacctcttaatttttagtttttgaggaaagtagtgcaatttaggtcatgttctgactgaacaccttttgattacaaccttgtgtgcctgtcccacgtgcattgaaattctcggtggtctctatgcttttctccttaacctttttgttattcaccctctcttgactattttgcagtatttgttatgcttctgtctgttccccaagtccttttacatctagagccaaagtgccaggtttttatgtttttatttctctgatacatatgtacatatatgcacatactcatacacacatgtatgttttgttggtgtccatattataaaagtaaattttcttactgttgaattttaaaactgataattgaaaacattctttacagttcgtcagagacattttctgagttatttttgtcaaattgaaactcttggggagtttagaatgatgagggtgttagttgctaactgtgaaattgttcaacatggttaggtttttacttttgggggagcaagataaattcacactgttgagtttagcatttgatgctgaaggattgatgagatttgcagatagtccaattattatatacaacttttcttaattgttttccaatagagataatgaacttgcaataatctctcgtatgttcttctgctggggtggatgcccacatgtctagccactgttaagaatgctattgctgcctacattaccaaacaagtaattggtatctttgtaaaaattgatgcctttgtttttattttactatcaggatgctttgtcacagagccagccaattttagataaggatacagcctcagaaaatcttaattctgttagtatctgggaggatagagtaaatcaagttttttgaaaaggggtcttttgaaaaatactcttggttcaggttctcacaggcaccttgggccaacagttatctattgccccttgtcaacacaattctctttaggtgggaagcacagtgtgaacagatgtggaatctgccttctggaaacttagagtctagaagggacacaaagctaataactgaaatacaaatatttaaagcaagattaagtgcctgaataggtgtaaagtactcttgggtgtaaaggaacaaaagattg

SEQ ID NO: 131839 - DNA, 1253 bp, Homo sapiens
aggcatttgatagagtctatgtttattccaaaaaaagattatgatgtaggattatttttgcttaaaaacgtcaattaagatagccttagagatgataacttattgtttgtaaccactgtgaagacaaaattggcattagtaggttgtatgcatataattttgagccattttaaaaagttattcttgtattaaaagaaatacctttagtaacccatcttcattttttttttattttttagcaaattagtaaataagtttcaaggagcattttcctgttttattgcagcatgtcttagttagcatggataggaatgttggcttgacgtggccatgcagagtgtacctttatgtaacgtcaggatgtccatgagcaggtcccctgagttttcgggtagcattcgatgaaatgcatcaggctttgcttcagtgtcattcaaagtcatcttagtttttgaatgaaatgtagatgcaagtaaatgtatttacttattacatagatacttacatagatactatgatactatcatagatgagatagttggactcttcttagtgaatattctgtagagtgttcatgaattatattatcgattggttaatataatccattttatcaccagtgaaaaacagaagtaggtcatggggttggtctaagtatggcaaaaaagcatcttgtcagttctacctcatctgcctgtggtgggttttgaaatggccttcatttttattccaacatctcacatcaactttacatttactatttaaaagtctttttgttttaaattgtttttcagtttattttccagattcgttcaaaacaaaactacagctggagactctgttgcctccaccctcataccaaatgttcatggcttctacagagcctggggtttctatggagagtctcagggattgcctctctttttagtcagaagaatctgtaatgtttagcataccagaagaggcttgagaaatcactctacattactagttttttgagttgtgtgcaggcaggcatggttcagagatctgcctctctgactctaactagagtagctccatttgtgttttggtttttgttgttgcgttttgtattcagctgccagataatttttttttaatgttctgttgctaaaatttagtttaaaaattactattctacaaactaatgttctggtactttggtcaccaaattctagcacgtggtaaaataaggacgagatcgtgaacttcttgtaaaactaaacttattt

SEQ ID NO: 131840 - DNA, 1468 bp, Homo sapiens
atgactgcatctcttctgctgtgttaacttccgtgtttctggtgcagtcgttcataactgttttatttgtcttccaagtacctaaggggtgcacacattccattcagtaaaagtagcctagtaaggcagttcctttaatctgactccctgtccccactccaggagattctaaacatcattgttccaccttttccctagagatccagtgctccagagatgtaagaacctaagaggcaatgatcactgttagcaatatatctgaatgtatctgtactaccactgaggatttggaaagcacatgcctcatggtttgcattgtaaatgctttattgttttcaaggaaattgcatcaaatttataaagttctaatagtgcagcaagtagtaaacagaagggatgcatttcttcaacagtcttgctaataagaaaatttaattgtatttctctttgctgtgatatccctttcattttttctgtcataacaaatggagattattggtattcttatttaggtttaaacttacttgctagagccttattggcacttgatttgagtggtatttttatatttttattatatttaaatgatagaaaatatttgaagtaagatgaatgaaatttcagattttttgatactgttgtagaatgatcttaaaaaattaaactggtaaatggtgacattaaagcataatttaatagactaaaattgtattttaaatgtactgtagtatttttcttagatgaacactagccacaaatagatattagcattgggaatggttgaatatgaattgattaaatgtacctgtgtcagctgcacagtaattaaaggtgcaatattggtttaaaaatgaattttggactattaataatacctatgttttattggaatatttattgagattgaatattttaatgtataagtatgtctttgtattttacatttatatatagaacaaaagtggtttgcagaacagttttattttggctattatcattacctaacagtgcattcatgatggagttcaaaggtacaagtttgttttaggcacaagagcttaaatgttagttttaaaaatgtgtacagattgttgaaaaccagtatgctttaatatggagtttaatatttcatttggataatccagatagcattcatgtcataactgtcacagaagtagaaatggtacctggaactactactcagatgaatttcagtatcttttggattgccgaaggctgtggtgctagagtagacctttactgatggcctagtacagttaactttttctttatggttagacccatatttatgctatttctggaaatagtgtagtgtcaaattattaccctaccacaaaggagaaaatgaaaaaaattacgtatttaccagtctttggactagacatcttccacattttgactcacataatccttataactgcatgaggtatacagacttattcctgtt

SEQ ID NO: 131841 - DNA, 2069 bp, Homo sapiens
taagtggtggaaccagatgttgaacctgagtagtttgaataacaaaaatcacatttaatttattgttttggttgttttttaaggtaagaaatctcaccgctttgttaccagttcaggcagtaaaacatgtagaccgttaggagaaaaagagtcttacatagagttttatgagcaattgtaatgtaaaatattgtcccatacttttaagtttttctgattaaacttacatatttttcccctaacccacaggaatatcgaaaacagaaaaaaaagtgaaattggaagacaaaagctcaacagcatttggtatgaacagaaagtaatctttaagcaaaagactataaagcttgacagagagggaggacatagtctgccccttactctttaccagttaatgctaccttaggtgtaagtgatcatctgttttagttcctactagtgttagtcagctccagatacatgatttattaaacacatatcttgttttatatgtaacttttttgtcaagagagtctcttgctttctccaaaggaacttttgtgtttatgatcatccctagtcaaaattatggctattcaaaaatagacctcgatttaatattgttgagactttagagaatggatgctagattaaaatagtaattttttcacactttcttcttcattatagtttataaaaatgttattgagttttctgctatactattttctgtgctgtaatgactaaaagtcacaaaataatggatgatagtcttaaatatactgtagattagttaactggagcttgaatcactgaaagttggtcaaatatgttggataaattataggctaaaccattgtgagttggagcaatagctagtaggatatgtgtgatgatttaatttgaaatgtaggatactgctctaatatttatttttttaagtacatatgattggggaaaagaatgctttacaattttggaaaaattagtttaatgaaatatatttttttttcctcgtgttcttagccttcattgttaaacacacaaagaatgtaaataaagactggaggagttgtttatgaattgatttaattatttttaaagcttatccaaagcaaaaagtccatcaggttttttttttttaaatctcctaatttattctctcattaaattacatatggaaatgctgagtctcttcattcaggtcctttgtaaattatggagtttaacttcttaccacatcaggaaattgagaatattactcattgaaggttttaactactgtctgtgttaactttaaggtatcaggagttgggatttctcagcactgctaatgaagatcccctcttatagtccaataagcttatcaggacttccagagtcatgacatgaacagtttaattgaacccatccactctgggcaggtgactggaatagctgattaaaacataaatgctgcttttaggttaaccacaaaggaacaactcaggatcagtcgtgattgctaaagtattcacttttatcttttaggtaagagaaaagaaaaagataaggaaagaagagagaagagagacaaagatcactacagaccaaaacagaagaagaagaaaaaaaagaaaaagaaatctaagcaacatggtaagtacactgagatgattattccctctttttttaaaatttgaagtttcctttgattccccttttcttttacaaaatggagtcatgacacgatccccgtgtcccgtgttgagaactgaaaggtttctgtagctttcctttgacatgaaatttcaaaaatatactactctgtttcactctggcctataattgttgcactctggcctttaattgttgcaactgattagacatttttccttccagcattatggtagactcgatgccctgaccaagcaccctttagcatgctcaagtaattattctcagtctagaattgtagagttccttaagttagctttcaagaatgagagtgaaatagatatttttagaagaatttgagaaaccaacagaatttggtatcagcaaaggccatgtgaagatggagcagaaatcagagggatgcagccccaagc

SEQ ID NO: 131842 - DNA, 1009 bp, Homo sapiens
caggtaaatgtgtgccatggtggtttgctgcacagatcaacccatcacctaggtgttaagcccagcacgcattagctgttcttgctgatgctctcccccacttcccacaggccccagtgtgtgttgttcttccccatgtgtccatgtgttgtcatcttgcatattttactgcagacatagttgtgattataatggagagaaaatgtgaaataatcctttttcacctctatagtacttcacaaaagtttacaggtaccagttagaacctggtgccccctactatgtatatattgtctggggtatatttgtttcccaagtgttcttgctaaacccagttcatcagatccatatgtagcttttcatggatgagaagcgaaagtggtagcatgattatttggtgtatcctgaaacatgactttcgttatttttatagtgaccttaattatctgacactttattaatatttctttctgtatcttatgttgcagactattcagactatgaagacagttccctcgaatttttggaaaggtgctcttctccactaactcgatcttctgggagttctctggcttcacgaagcatgtttacggagaaaactacaacctatcagtacccaagggcaattctatccgttgatcttagtggtgaaagtatgtgtaaccatgtgatggttaaaacaagacttacaattcctaaatgtgtaactgagaataaaacgtactctgttaagagcatgcgatttaaaaacttgttagctaaactaatatgaaagtcttgatgtgagaaatttgagctactttttaatttatataaagttaaattggctttatacttattggtggaagagagtcataaggaaaatattactagtgtatatacttctgtaggtttttgcacatatatttttatattcttcactatcaactgacagagtaggtattattcacatttgatatataaacaagccgaaacttacagggtaagtagcttttcggcttagctagtg

SEQ ID NO: 131843 - DNA, 1094 bp, Homo sapiens
tttttttttttaagtgatttttcaaaaagcactttattaatccaaaaaagaaagaagaaaaagaatgaagaatcagtggtgtgctagagccagcttgtgctggctaatgggggcttactacacacacctgtccccaggtccacggacagtggtgtcacactgatactatgaaatcacaaggggacaacacagggtttttatgagggtcagaagggataatgtttgtgaaagtgtatggaaactgtgcaaatttattgacatcagccttagccataaattctgtaagcatgaagtctaaaagacactttgagttacttataatagtgtatactataagatataaagcagtcataattacctaagcttcaaaaatcttttgtttccatgtccagagacaagtacagtacagtattcttatttgtttgctccccctttttaaaatgtttaatagcttatgttcacttctcatagctcctttctttatgaaaaataacatgaaaatagaaaagttgttctaagtatactttttgtatatattctagacttatcagatgtagacttcctagatgattcttcaacggagagtttgcttctgagtggggatgaatacaatcaggactttgattcaaccaattttgaggaatctcaggatgaggatgatgctcttaatgaaattgtgcgatgtatttgtgagatggatgaggagaatggcttcatgatccaggtaattggttaacctctcttccctataatgagttagttgtttcaggtgctcagcaaatgcatcacggtgttttatttctttactgactgtactactgaagatagtggtttctaacttactgtgtggaaaatacccatagtaatgattaggagatttcctcattaagtaaagtagacaatgttcttattttagcatctctcttccttttctagggtatgtagttcagtgccttcaaactgaaactctttagagtgattagggtggtaaaccctcacacgaaagggcaggctacagcaacctttctcttcctcatctgcattcatgtgaattattataataataatttatagtcacccttcacttgtcagtg

SEQ ID NO: 131844 - DNA, 1016 bp, Homo sapiens
ttctgtgaaatcacagacatgggggaagggttcctattcactcagctagaactctatggttcatccagttcaaaacaaaggttagtgagagaaataacccctgtctagtttttatccagccctttgagcctttttagaggacagatgatgactacaaaacattgaaagcagtacactcaaggttccctttgcaagtgtcatctgccactgaccatgtccttaatggtgtttcttctcctgggtgggcaggaacgctgaaggtgtggaggagctcttcctgcaccagttcctcagaacgctgtcttactctttttgaatctgctcctagtgctagagcttgccttgcttaatgagcaacgttagtaggttagcagttgatgaaaaatccgagtaagtgcagtcctctgtgatttaatatcaacttcatctgcaggtcagaggtggagtgcaaaatatcgttatgataaggagtggttgaataatgggagaatgtgcgggttatcatttttcaaagaaaattattctcatctcaatgccaaaaagatagtttctacacatcacctgcttgctgatgtctatggtgttacagaagtgctacacgggctacagctgaagattggaatactaaagtaagtgaagggcagcaaagggagggtcacacttcagtggacgttttaattcaaaccaacactgttggccttttgatggtccagagtaacagtttggaggagagaacaggtatttgaataaagtttcatttttaaaaataaggaaagattaacaaccttttggatgcgttggtgcttcctgtctattctagaatgtgtaagtgtggttaaaggtagatacggcatctagtatttcaacacattttagctcctgtcccactgttttgtatgcttaccgtatgtgcaaaattaagtgcagttgctgtggtgaaccctatacgttgtgtcctccttcaggaatgctatcaaatgaaatagattctaagcagggtgagtatttttttttat

SEQ ID NO: 131845 - DNA, 1038 bp, Homo sapiens
tcatgggatcctttaaaatagggcttgtgtcctattcatcattttgtctctaattgatagtgtagggtaagtactcagtaactatttgttgaataaaatttgcttcagttttttatcataagcctgaatatgaatttgttttttaaaaggccatgtaagtgctaagacttaagggagggaataatttattaggtctttttttaaaaccttatttccttcttggtatcagtatgagtttctctgcattcataattttgccaaggattttaattggccctttctgtttcatatacttataggccctctttatgttaatattttaaatcataatatctgttagtatgtacgatttattgaaagtcctacacgtcatgtgctttcatgtgatatttcatttaatccttatcataagctacctcatttcattgttgggtagtgaaagagattttgtaacttgttcaggcttctctatggcacagcagaattcaaccccttggactattggactgcagtgccagcttttcttctactatgccttttactgattgagtgttttagtattttctgaatattaaactactagggattcaaatgataaaatttataatttcagaaacaatacttgagtattattggaagagaactaatttgactcagtatgtatctaatttggaaattattaatatgcaaacattattgagccttttgaaaggtttatatctcccgaatgccctttcacttcagctctgatgattggattcctgttttacttactgcagaattaactgtacaatatcatgcttacatgttcagtgaggatgaagtaaatgggcattatcaaagattgttgatggggttgtaattagtataatcccttttgaggtcacttgggtagtacctatcaaaataaatgtgcatgttatccagcaatcccatatctagaaatttatctgactgaaatattctgacttgtgtgcaaagacacacacaggtacacaaacatataatggtagggaattggttggctcgactggtaca

SEQ ID NO: 131846 - DNA, 1114 bp, Homo sapiens
catcaggagttatcactttttgactgaataaaagtttttaaaatatgctcacattaaagtttttcaaattttacaatgaaaatgacaatgacaaatcagtagaaaaagaaatgcatgtatcaaatgatgatgtgaactatcaacacaattaaatttgttattgcttttctgagtattatttctttaattgagaagattcaaattttggatgaaatcatggagggagttaatttaaagattacctttgcttttgtcttgagtcctagatgtcctcctaacctaattctgaaatagatcattgtattcagcttgttaatagatttttttttttttctgaactgctgtttttccaactttgttttaaggaataaacatcatcctgaccttcatctctgggcttgttccgggaagcgaaaagaccaagatcaaataatagctggggtggagaaaaaaatagctcaagacacagttaatcgagaagaaaagaaatatgtacagaaccataaagaaccacctcgtttgcccctaaaaatggaaggaacttatataacaagtgagcatagctatcaaaagccacaaagttttggtcaggactgtaaatctctcgcagaccctgggagctcagatgatgatgatgttagtagtttggaagaagaacaagaattccacatgagaagtaaaaacagtttacagtactcagcaaaagaacatggaatgcctgaaaaggtaaaactagttcatttttctttgcttggaaactatgagagaagaacaaaggaaaattttataaaataaggcatactgaattcccagattttagttgtatttccaagttccccagtaccttgttaaagtaaggagatttttttgttttctctacaggaaaacactggccatttgaacatttgattatctcctaattcagaattgtagtaattcaataaactgttactctaacaaaagtttcaattgtataagtacatttcgatgcttctaaaaaatgaaccacattgtattcaaaacgaaaatgtcagtgtgtaagaatgtgaaagtacatatgggtgtaatgatttgtcttcctctttatgtgagttagataaaaggtggcactcta

SEQ ID NO: 131847 - DNA, 1031 bp, Homo sapiens
ttccactcttatgtccacttatatcaccagctgagattaattgaggaagaggccagtctaaattaatcaggaattctaattacacaatagaattagtgacttcatttatttagcgcattttattgaagccttcttgcctgtgtagcaccatgcgaggcatagtggagggaggtggtgggtgcatcagctcttaagaaccaccagctggaatttggttatgtagcagtacttctttaaagatacccctggagtcagattggatctcactaactgttaccagtgatgaggtgtttcctgtatccttaactcaatgactgcatttcatcccgttctttgtgtttattttccaatggtcctttggagaagaatccagctgaagggaatacagtatttgtttataatgataaaaagggcaccgaagacccaggagactcacatcttcagtggcagctcaatctccttacacacatagaaaatgtgcagaacgaagttaccagcaggatggacctaatagaaaaagaagtcgatggtaatttaagaaagaactaaaatacagttactatagtgaatttattgttactatgaagaagttacttaaaattcttaaattatgggatgaaaactgcagatactctccataccgatggggctttattactccctttgtattgtatttaacacatttgggatcttttacgcttaaaacaatgtgaccgggtatgaccttaggttgtttttacttttttaaggtggatatttattaaatactgtctatttgccaggctccagatagatcacttatggaataaattgattagtttcattgaactaagctttctttggaagtcaacataaggaatttaagcatgtttgaaatgtgaaaacattttgaatattttttactttggttagcacttgttaaattaacaaaaacttctacaaagttaagtaggtaaaccttaagtggttttcttttatattttaaaattgtgtcatcacacaggaggcctgaaaagtgggcaagaaagata

SEQ ID NO: 131848 - DNA, 1872 bp, Homo sapiens
agtccatgtttgaagaaaagaaaatgcatcttgatactatttcatattattagggtagatttccaaaggaaacattaataaaaactatagaatataatcaattgcattctgcctacaattttaatacgcttgcatgtcttttaaaaagtagtgttaaaatagtggaactgaaaagaacactgagaaattgctacttccttttctttgttaagaagagcttctggattaaaaaatatgattaggtatgttttatgtagagatgacgagtctaaattaatagaaagcttgagcaaacatagggaactgttgttatcttattccagaagtgagtaaaaggagaccttcaaaatgaagttagtgtgtgtatatgtttatgtgtgtgtgtatatgtattttcccccttatatataaaaatacataattcctatatatataaaggggaaaattatcttaaatgacagataaaaattgccaagagggactagaactctgtggggtgggatgacaggacgctaacctctcggaaatgtcttgagtatgttggccttctaaagatggggaagtgaacccttaactccatcacagctccaactttctgattgtttcattttctgactgttcttccagttgcagtttaaatttgtttatcttcttctctcttttagttctggaaagctggcttgatttcacaggggagttggagccaccagatcctcttgcaagattgccccaacttaaacgccacataaaacagctcctaattgacatgggcaaagtacagcagatagcaactctttgctctgtatgacaacagtgaacacttaatgaaagaatgtggctttcttcagtcaaagcatttttattatccacgtgatggctaagtggataatttaaaagcttagtaatgtctggtcattcactgatttgtgatgtcaataggatggcaccttggaaagaaaaatgaagaacaactttatcaaggaagctagtatttaaaaacaaattcatgagcaagctgcaaatgagaatgtgttatatgccaaggaacaatgaagtagaatataatgtatactaagggatttcaagttctcagaatttttgagtagttgcttacgtgaagctcaagatacctgtagaaagaaatatggtatatttgtatagtttttaatagaaagatctatgtttataaaccagcacttggccaaaaacaaaattgtaaaggaaatttaaattctggagaattctacagggttgctctaagaactgtcttctcagcagttgatccagctgtacggaaatttagggtatttaaacttttaaaggatcatgagctgtttcttgggcgatgaatgttctcaatcagaaaactgacagtagaaatctcacttctggggaaaacagttgtggaattcttacttcattatgaatgtatttaaaaaacaaacaccaaataattggaatatattgcaggcattaagctcattaaaaacaaactggcttgcagaagggtccgatgtgccaagtgatcatgattctgctggaaagaggattttaaatattgtgggagttctcccaccctaagtcttacataatgccaccagtccatccaaaacctatatatcacctatactatatatatcatatatatagttgaatggcagtattcaggctcaacgtacagtttgatcctgagtatgcttggtgtttgccttcagaaaaaaaaaaatacattgtaaataacctcagctgggatgaggagtgacagaatatcaaaataatttgtggctgtggatttttttaactgctagtagtggaatactggaaaagcttcatttctgaagatgaattttatttttaaaaaatacatgcaca

SEQ ID NO: 131849 - DNA, 1023 bp, Homo sapiens
gacttccttaggcttcagcagtgaggagactcatccaggccacatgaaaggaggaggcacgcctcacctcccatgctcctcctcgtttgaaaattatgtgtgtcctggaccagtaccccagatgggagggtatagtggacccagatggaaagagaggatcaggagggcaaagccatctcatgccagggccatcctgaccctggctgactggaggagctacaggagccagcctgggaaccccttccagcaccaactgcaagactcatctgccagctaccactcccttgccccatgaaacttactcttgctttttatcagcagaggaaagtgggcatggggacaaaaccaaaaaacaaaaaacgccaacatctgtgttcttctaagttcacttcctacttctgaataggaatgaaacaaaatgaatgtgctttgccaccgagacacctaatttttttctcatcttacttttttctcttctctccctcactgctgttcttcagacaaaacctgctacaaccccctcttcaactacgaggacatgcaggagatcacccagcactttgccgtctgccacgtggacgcccctggccagcaggacggcgcagcctccttccccgcagggtgagaggcctcttgccctatgagctctacagggtggaaactgggtgtcggggaggggttcaggtgctttgctcttttaaatactttttaactgtggtaaaatataaaacgtatcatcttaagcactttttaaattgtgggaaaagatacataacataaaagttagcactttcactatttttaagtatatagttcagtggcattaaggacatgcagacattgttgtgcagccgtcaccaccatccatctccaggactttttcatcttcccaaactgaaacaacatacttatcagatactatctccccattcccccagccttcctgcaaggctggcgttacgataggtgtgctcagcctggacaggacttcagtggaggaggacttgacaccaccaaatagtg

SEQ ID NO: 131850 - DNA, 1027 bp, Homo sapiens
gaattctgtgtagccccaagccagcagatgttagtcacaggtacagtaacctgtggggccagtggggcctgagggcaaggaagcaaggaagcgcaggcttgatggcctgttttccagatggagcaaacagtccggggcagagatggtggcgggcaagccctttccccagcatttggtgcatttaacagcgcagtctgagccaggcctctgtcccctgcctcctgggagtcccctcctagccctggtccttggagtggcttctggccagagagagctgctgcccgaagccggggctcttatggccagatgagaagagagcttcctcaaaacacagttggaaacaggctggctgtcttcagccacgcggatgccatgaaccccacatgaccagcccactgtctgctgtgtctcctcaggagcaggacatcgagactttacatggctctgttcacgtcacgctgtgtgggactcccaagggaaaccggcctgtcatcctcacctaccatgacatcggcatgaaccgtaagttctgaggagctctgattccctgtcagccggttcccaagagagtggcggaaaaaggcagccgagaagggctgatggccgggagctggtggtttctttttgcctgggacttcctggggctgttctgggaagaactcttgccacagcctggaaaagccagaaatgcgctgcatgtgggcacggagttgtctgtgtgcccggaggcgctgggaacacaggaagctgtttgctatctgtggcagtgacttctatattaatgcacgcatatggttttcagtcttttcacagaattgtgcaacgatcagcacaattttggaacattttcatccttccaaaaaatcctgtaccttttatctgtcaccccaccctcagatgactgacccttcattgactttccttttctgtgaatttgcctgttctggaattttgtatacattgaatcaaataatatgtgatttttttttggtaactggcttctttcttagtgctttcaaggtttatc

SEQ ID NO: 131851 - DNA, 1063 bp, Homo sapiens
ctcctacctcagcctccctagtagttgggactataggcgtgagccaccatgcctggctaattttattttttgtagaaaggaggtctcattatgttgcagatgctggtctcaaactcaaagttacaggtgtgagccatcacacctagcctatgtttgttacttaatggaatggatcattaagatgaatggcactgctgtgtctccacctcctcctccatgggcataggcgatgaaccaggaaaatatagggggaggagtgtatcattttatgaaaagatggtggggagggggcaggcccctgacattctctcttgagcctctgttcccatgatttgcctttcttgctgccatgggccttgactttatgctgatgagccatagtcagcttcctggacagctgttccagagggcaccgtaactgctctggccatgcttggaccccacttgctagactgagggagggtcaccaagcccaccaactgacttagatcctgggtatgcggtgatcctcttagagcctagaacggtcggcatctgcccagggcctgctgggaaggaggggattaccaggggcagcggggagacagtcacagctggcctccagagcccctccggatcatccagagagttgacttaagccagtggggctggccctgggagcttcacactaatcatctctggagcggttgtccataacaactgacatggagggaaatgctgcagcttgcaaaacacattcaggtctgtaccatggttttagtcttgggagcatcttaatggagcaggaggccttgtcattgacctcagcttacaactgatggcagggattgtcagagaaggctgataacttggccaagggcacgtggtggttatatcattaggataagtattgctcaaaaaacagtgctgtgccaaggaaatgtttgctattctcaccaacctagaaagctaacaccccagctatgaatgtcacccagcccagctggagttagtccttacagcttcctactgtcacctgagcatgcggctttggtcctcagattggtaggatagccaccgaacc

SEQ ID NO: 131852 - DNA, 1083 bp, Homo sapiens
ccttcaaataaggactcaaaaactggtatccatgagaagtcaaggctcccacaggtcaagggtctaagccaggttagcttccagagcaggagctgacagggcccatgggaaacaaccagaaatggtggctgggcctgccttgggctggggaccactcatcttccagctgctgtggccagacacagagctgggcgtccaggtcttgatgtagccaagaagccagggactaccagcagccctgaacccctcttctgtaagcagccgcccaggctttcttaagctgtagatttccaggacctggcactttcctgccatcttctttggcatgtctgcaggctctgcagaccctgcagaccccgcatgttcaaatgggtctcctccccaactggccaactggcttcccgtcatgttcttttccttggcctgcctctggaccagccgtctcccccatcctgccttctccccatgtttctggcccacctgtctgtgcctcatctcctgtcacttttcttctccctcccttggctgacatggctggcgatggcctctcctgctgctgacccgtcctctgcagggccctgctaatggcagcttggagcactcccacccctgctccaagaccttctgtgactttttctgacacacagctggaaaaaacccagcaaaccaggaggaggaagtagtttacctcccaaaacactcagcatgaattaatcccccagcccaggaaacccaaaactcaccctcgaaattccccttccttcctgacagtccctctctctcctccccaggtcttcgtcacactcggaatctctccaatatacctcatcaccacttttctgctaaatggctatttgtgtacctattgatttaactccactcgactgtagcttaaagactttttcttatccaactacataaacatgataagtatcagggccaatactcagaatattaagccccctgcaggagcatcctgactgaagagaaggcctagctgttggattaacagaagtaaaagagataaagaagaatcagatggagattttagaatgaaaaactataaaaacttacataaaaacc

SEQ ID NO: 131853 - DNA, 1053 bp, Homo sapiens
gcgccgatgcagaaaggagcagggaaacaggctccaaaggaaacggacttcccaagtcatgctcatggagaccgggccactctctagactcccacagggtgtcctgtgcacccctctccagtccagccacgatgtgccagttgcaatcactactgtctgctgctcacaagccagccgggctcccctttgccttcagtccccaagtccacgttcctcaggacttccacgatccagctccacccacagcagcccctctgaagggcgccctgttttctgtaacataccagcgtctccatcatcaccaccatgtgcttttttgggcacaggcctggtttaccctccccctctgccctcctccatcagtgctatgccccctgtctccatggccacctgccttacacagccttccctctccctttggttgtcattcacctgccacttgtggatcactaaggcccttggcatcatgtcttgggaggcactggttcctcctgagcagatttatgcgtgtgaactgccctgggctagatcctggagccggcctagtgtgcggcttcgctatctagcagtgaagatacgcatgccgccagctgtgttcttgaagcatcgcaggcatgcttgggtacctgggtgaggtacggcagtggagcatggaagagcaggctcaggaatcggccctcaccccttcctagccatgtgacctggagtaagccactgatacccaagggcctcagcatccccttctgtaaaatgggattatggtgtcacctccctcataggacctggaactgcactttagctagtccctaaaatactgcgtagtctctcaaagcccaacttccttctctgcccaaagagcaaatgcctgcccgaagagcccctggggactttcgccaggcatccacacacaagaaatgtattagctatggatgggtcaggcatgcacagataagttggggagggagtgagttggagagaaggaggggcagaccagaggccactagatctagttagagatattccatgggcttttgtctgcaggcttatcaaaca

SEQ ID NO: 131854 - DNA, 1054 bp, Homo sapiens
tcagccagtgtacaaccttgggcaagtcacgccccctcctggagactctgaaaatggaacagaaaggtgtggtcatctgtgtgttcctctgtgatctggaaatgctacaacctttgcttctaaggcaggtagtagccaggcatggggacggggcttctgtcagctcccctttgattttgtagacctctggctcttagcaaagagatgtcctaggaaggaagggcagtaccttggtgatcctgtcttgcacatatagactggagcttcagcccattctcacctctccttcacctgagacctgtggctgcagaaccagaaactcatttccagaagcagcagaatgtctctctttccgcagggctcagaagtatgtattaagccttccattaactgcatcttactcagctggaaaaataatactcaggatgcaattttatctgatttctggcctgtaagctcctgaagggttctcttaagaaaggctcaaaaaactcctgcgctgtgtgactcggagcccagccctgtagcctccctccaaggagcaggcagctcagtggttgaccagcaagcccatcatcattcagcactactgggttatccatctgtccgtctgtcaattaaacaagtgcttatgagggcctggggccaggggcacataccgagattactaagactaaataagacacagcgtgtgccctccacagcagttcaggcgcaacctgaccactttctctatttggttaaactccagaaagttcttgactttattattcgcagttcaaaagcagcatgagcttttgtgtctgctccccttcacccactaagtgtcatgacgagcaggcagaacgcccatatagatgccacacatgctatgggttacgatataggacaggaacaccgagcttggggtatccaccatcttgtggcagacagcaagcaagccagctttttgtctcagagagaaacattacctcatgtctcaggattggttgctgcaaacccaacccaggtacagagcagtcagagccttgcattctttgtctacccagcaaga

SEQ ID NO: 131855 - DNA, 1043 bp, Homo sapiens
caggtgtgtcagtttgggcaggctgggccacctctcccccatcagcaatgggggtgataaggtaacaattgctgagaggcacgaacgctccttgtgcatcagggacttgcaaaaaactttctgttccttgagtatttgcttctcaggacagcattgggaggggtgggtgttatcatccagtgcatagatgtacaagtttatcaaacaaccgtagtgttagaattactgggataatgtttgtgatgtgctcagcacagtctctggggtggaggagaggctcctgccccacctaatagcgctcagacatgaacgtgaccttgcgacctggctgtgcaacagcaagtttgagatgcgttagttgctctgagttttgcatttttgaggagagagtgactcattgtataacctgtatctatggggctaatttgacaaattaatttttcttgtaataagtatttaaaattcattaactgtggtcactgatgattttccccttgttcttcagttccatctttcaaggctggagaaaaaagaccatttgattccaaatccatctcccctctccaccccttttaaaattcaaaatgaactgtccatcctgcccttggatgaaatccaggattccatcagtctacccacagtgggaatacttttaggtcatagtgggaaatctttgggaatcaattaactagactaatactctgctggaggaaagggaaaaagtgctgagggggagacttaatttaccatgcatcacaacattttctaagtacatcattttcaagtcagctcagcccttctgttagccatgatggagacatgtttgggtttgatttttaaaattctaatctatcactgtcaccattcctgctgcaatttaaggcttcggtggtttgtggtagataacagttgttatacttcctgcaggctaagaaggcagtgatggtttggtttattaactatcacaaagcagacaaaagggagaagaaaggtctgtgtagacagaagaaggttgtgtcaggccagaggcggcgggggaacca

SEQ ID NO: 131856 - DNA, 1066 bp, Homo sapiens
cgtggagcttgccgagcagcaccacctggtggtgtcctccgacgacgtggagggcattgagacggtgactgtctacacgcagggcggggaggcctcggagttcatcgtctacgtgcaggaggccatgcagcctgtggaggagcaggctgtggagcagccggcccaggaactctagaggacatgtggcatcggatggccacagggcggggctgccaggctctgcaggcacccagggtggggaggccacccttcctgccctacccgcagaatggtgctctcctttgccctccctgcccagcagcctgataggactctcctagtccaacttggggtgggcaaggcagtcagcatcaccagcaataccacaggaccctcaccccagcatagacacacaccccctgacccttaccatctgcttcctgaaagacttcagtgtcagctcccctacacacaccccacaccttcaccccttgcttcaagattcaaacagagactcccagtccccctcagcatcttccctgaatcacagccccagctccttgacccccatctaggtgccaaatgttcatctgcaaccgctatgcagtctggtgagagggagacagccatcacatagaaagtgaccgtacgggtttttaatcactgctgggtggggtgggggtagggggattgtcctggctttgtcgacaaagtcccacttccccgagtattaagggcccttggtatcaagtgaggtaaattcacccatcacagggtctcgccctaccatcctggaattatttcacttttaagataaatgcactatttcactgttcgcctcccattctaaggaggtgaggtggttggaataaaaacagttcctgtctgaatgctttggttcttcaggcgggatggcttacatttccccttcccaagttgaaatcttggatttggggcccacccagaaggaccccatccaaacccaggcccttaaaatgcagatggtgctctttcctctgcatttaggtttgctttggaaaccttttgacgttaatgatctcaccttccatttcctggcacccagcat

SEQ ID NO: 131857 - DNA, 1030 bp, Homo sapiens
ttcatacgcattcaaaaccgtgaattccagatcagatgttgggaagctgagctagtggggcccagttgccctgggtgtgacttgtgctgagcagcctcatgctctccaggctggcagtgcataccctaccacaggagctgcaggcctctgggacagagctcccctgccccggatggacagcacaacgggttatctctggagaagcccgtttcatgggagtcaccccagctcatgtcacagtggatggaggagtccttggcacagccagtggtgtagcaaggggctaaaagacagccagactgtttgggttggatctgtcacataatagtgtgtgaccttggacaaaacacttctcttctttgaacttgtgtttccccatctgtataatgggaagatcatggaacttactccaaggggctgttgtatgcattatacctaattatgcaaaatgaagccactggccctgtgcctggcacgtggctgagtcaataaatcttagctcctgtgatcatggaaacagcatagctcctttcctcttactgtgcatgtagaattcagccacagctgtttctgcttctggtcgcttccatttagcaggtgagtgctgatgctggtgttgtctaggctctatgcttggcatcaggagtccagggtggataagacaccaactttttttttttctttgagacagggtctcactctgtcaccaaggctggagtacagtggcgtgattatggctcactgcagcctcaacctcccctactcaagcgatcctcccactccagcctccagagtagctgggaccaaaggcatgaaccactgtgcctggctaatttttgtatcttttctagagacaggattttgccatgttgcacaggctggtctcgagctactgggctcaagtgatctgcccaccttggcctcctgaagtgttgggattacaggcgtgagccaccacactgtgccaggtaccacctctcatggcagagcttattgcttggtccagggaggtaaacacatagttacacaa

SEQ ID NO: 131858 - DNA, 1080 bp, Homo sapiens
gtctgccatcatggtggttattttccagtggggaaaaggataaagctcgaataaaccagtatgacataaaggatgtcagatggtgaacaagtgccaggagaaaagtaaagcaagggaagtgggagaggagtggggtccaggagtgtgggttggggtgattttgtaaagggttgttggggaagatctctgacatccgaggagagacctggaagaggtgtgtattactagagttgtctgaaattgactaaatttgttactgaattgtgtaacagaaaacaaaaaggagacgttaaacagttaactcaggaagggggttagcttttcttggcactaacaaataagatatttcttaatgaggcactcacataaggacgcctgagtgatgtgtgcctggtgacctcatgagccaggaggggacatcccagcgctgtctccacaactgtcccctgagtgtgcccagggcacaatgcaaagcatgaaattcaggccaagtagttctctgggggaattagtaagtacattcaggttcacctcttgggtttcttgacctacggacaagacttagcatatctagatgaatgtttggatcacatgtcctaaaatccctcctccacagtgtgatttctctcaggagtcgagctggagagtaggcagggggatgcttcagtctgtagcaacctggtatctgcgttggctgagaaaagattcatacacttccaggctaagtacctttttagcttttcttggtgtttactagattgcagtcttcagattgtcttataaatatcttctgaaactcctcatttgcatcttgacatgtggagtccccagctggacctggtactttaggaagggtctctctgggatggtatcaggaggactttgaatgtttcatacacgcaaaatccttttgagagtgcaggaaggtgcttctggttgtgacttgtgtcttgtttctgagaactagattgatttgctgctgctgggagacatgatttattgagcctcgcaggcaatgcagtgatacacgaggtcacaggggttgggttatagcttagatatgctttgaggcatcagact

SEQ ID NO: 131859 - DNA, 1031 bp, Homo sapiens
gtcttgttttttggaccatgataagaactttgatgttgcattccaaatgagctgtggagccagtttatatcttcctcccaactctaggctggattctgtcctgaaagctctgattaaataacttcccttttgagatctagtgtcatttgttgtttgcgagtttctgtctatgatttagtttgcctagataacatttaatctttggagttgatatttaagtcccaaaacctgtatatatttagggaatcacaaatctgcctcatttgccatgtattcctgggggtcagaggacagtcagaggtcagtaaatatatgcttcataaatgaaatcttgagacttgcagttagggatgctattccctacctctgcctgtgtccttccctgcatcagccccaggagaattccctgctggcctgtggcagtgcctcacaggtcagaacttgttttgcttgaagagcctagatgaggctcagttcccacactttgggagagaagatccccagcagaaaatgggtggtaattgacttcatatagaggttctaatggatgtgaagggtagaagcaagaccaatgaaggaaagagtctgggagatttatcttcctaactccccctgcactggtcagcagtgaaaaggctgctgggggatgttttgaaccccctgcatcaaagcagaggctaagtagatagcagactgctagagaggctacagaagaaagtctttcatggagggaagatttcgccaagtcaagtgtttctttcaactctcagaattgaaaattttgatagaaattgctagctcaagagactgaatcctcatttgggctcacacacacattttttgccaatatgcttacattttggcaacttttcttctcgttagcaattctgccaatggatgggcatggggaagaaagcgagctgaactcacaggaagctgtttatctgctttgctgcaagaagggtgaaattggctctcaagtctgaagctgggtttgcaggaccatttcttattttcatcgccctttttct

SEQ ID NO: 131860 - DNA, 1014 bp, Homo sapiens
ctttataatgtgtcggtgtgaaagggaaatggttgtatgtacaaaatacacgaggcatctgagcacctagaatgtataaggggcttgggtactcagttgaacaaaggtgatgtttggatgaggtcagccgaggatgtggctgtgtaatttgctcctagtttccaatctaaactttgtcagcaaggaagtgaaagcaataaaatgatctcaaataagcagattgtttggaagccacacatttataaatagttcaaagtaatcgtctcagagtctcagcaccccctcagaatgctgagtcatctggcattgcttatggcattgcagttttatttatactacaactcctcctgttacctagaagacgttttcatctttccacaagaaagttccaccacaaggttgaatgtttaaatatctagcattagaatgaataagacgggtggactggtttctttgtaatagccatgtgcttggcattacgcaggtgttttctgtgtattaccttattttgccctgaaaaactctaccaggtaggtaattaacatccccgttttacggattaggacactgaggcccacagtctattttagtaatgtgctcaggagtaacacaatttctatgagctagagttgggattttgatccatgtctctgtagtgaaaactactctctgcgcgttagtccacgctttctcattttcaagtgaagcagaggaacttatttacccctttgtcctttttcccctcactgctatgcctatttaagcctgcagctgtatgtttagctatcaagactcgagcaaaatcttcaatcaaaatgctgatggagtgtaaagttagcagccagaacattttccaggttcagtggaaactactgaaccaaggggcagagggaaagaagtaaagcatagagtttctgttggtggtgtttgtcttgcttttcagttccaaatttgcaagaaaatgaggaatctgagattacacatggttttcttgttaattttgaacgtggcggg

SEQ ID NO: 131861 - DNA, 1010 bp, Homo sapiens
taactcttgatccacctgcctcggcctcccaaagtgttgggattacaggcatgagtcactgcaccggctgagaagcttttaccaggtatgtctcccacccagagttcttaataaacagcctccttctaacagtgaatgtctctctcctcagtggccctgcccttcactgctggacctgctgcgtatgctttcaaaaagtgtgattctcctgcagaagggccttgccctgcccttgccccaccattctttcctcatcactacctctcacccattttttgcatcgcacaggacatgccacaaggccccagcactggaggaagtttgccctttggctcattcctctgtgaagctccaagtgcaccaagagcttttcctggtttatggaaagcatgtcaaaatttggtgtgtgaatgtgcaagtccacaaaaagggaattcaggtctgaaatccacagtttttgaaatctgtgcattttggagattcttcagtgtgacttcatgctgacccttccttcttactttagacgcttttgcttctgaaacagaataaccctctctgctgtttgacaaatagctcagatcactcctctgtccctgacctccagaaggtgagactggccttctcttctgtagccatcagccttttggtatagatgagtatgctctttcacaagggaaaccatccacgccatcatcttgaaaagacactatttaaagtttatgtttgatgtatctctaaatgcaattgaatcttcaaaaatgtgcaccatgaagctggagaaatctattgcctgttgtcagcctaaaatttgcataactaaaagtattttcataaaactagtgagaggcaagggagatctcaatcaccgatttcattatcattgagaaacttttcctgagaatgccatatagaatacatgataccacaatttgacattcagaattttaagaaaaaacataagtacaaataaagtgctaactattcatttggttttttgatgcaaagcatat

SEQ ID NO: 131862 - DNA, 1085 bp, Homo sapiens
ggtcaatctcacctcgagtaaatactaggttttgcagttgactctgcttgtaagtctcagaagtctcttgatagaaagccatctgatggtctcaaagtattgctcttttatgattagtcatgaatctgcatcccattattttaattaggcagcaaataattatgtcagatgccctcccaggcctgtttgataggtgctggcagtggttgctgaaaacattagtaatatttattgccagggctctgatgcttcagtaagggatggcttttagcttctgccttcttttcttgtctcttgcagagccttggaagtacatccataaaaggctgactcttgatttcaaatgaggcagttccatttattcattttaggactcttttttagctcttaatctgttactctttgacccaagtgtttgacaatgaatgacagaatatttatcaacttagagaatggttccatcagctctgcttcccccactctagtggtgaagaacacagcacagttttgcccaggctgcccagaataatgatgctgtatgcacatgagccatgtgtcagtggagaagtgtgtttaactgagattcaactggaactgtgtagaaatgtgtggccctgtgtttgaaagaagatgttactgtattttttttaagttctaattgctctctaattgtaacttgtgtgacttacaagtgaaaaagtttccttacactttgggcttgcagaattaataaaatttagaattttgggttcattcacctggaataatagatacaactgtggtattaatatttgtttccttttgctgctgttattgaggctgatgttcatataagatgtacaaaattttcactcagttcagtttaatgaaatgcatggaatatattcagtctgtgtgtgcactcatgtgctggggtaccaagatgagtaagatgtagtccctgcccatgggcagctgaaggcagccctgccttgtacaaggcggtagaggtggggcatagactgaagcaagtggacagtgtgtagggggcctatggagggctgcctcttggcccaattaccagagtgttcaatttgagttctgaa

SEQ ID NO: 131863 - DNA, 1066 bp, Homo sapiens
attaagaagtttttgggtaaaatttgaaaagaattatccaggcttcaagcactcttgtaatagacaagtggagagttgagtatggaaattaggtttgagtggagtaagtaccctttttttctgtcccttcttcaatttatgataagagatctcatggctgcaaattaaaatattctaggagatctaagtatggagttttgttttgttttcctccactgtcctctaaaaagcaaagccactctaggataaagtagctccatggccttttgcttctaaaaacagaaccaggaagtaaatagaaaatggtccctgagcacctagctggattgatcttacaaggttaacttgcgagacttcagtgagactggtctttccactgcatccttttcccttttgttcctcctcctacttgcccttggagaaaaggtgaagaggcaggtgtggaagtgtggctactggatgaacatggtagatttctgttgcttatcactgggctggagtctgggtggtgggcaggagaaggcagggctaatttcagggcccacaaatactgtttaataggttcaccctgttggtgttcatatgtagctctttttctcaggtttttataaaccacaagatccactgggaataagtgggcccatactataaaatgaactacgcagcttactgagcaattagcttagattgatatacagatttaactttttaatgaggcttggccacctaaaacctcaccaggtagagggtctcagctgcaaatgtctggcacagtgtctgtaactttcatctagccctggtgctgtgctctgtcctttatgtggctttgtgctgccttcggtttctttccacctctgtcttatgctgatccatccctccttatatcaaaactgatgtactaattacagagaatcatcaggccctaagtctgcagttgcttgaagttcagcctttaaagtacagagacttctttaactgtatttttattgctgtagctatttctgttcgatttgccactgcataaatcaccacagatgctagaactgtgaagatgtgtgctttgcaa

SEQ ID NO: 131864 - DNA, 1277 bp, Homo sapiens
aagacaggcagctaaactgtaagagacttttaacatttttgattttacttagacaggttgtgtgagggacttgtaaatacttcatgtaacaagattaataaactttataaatgtattgttatttaccaaaattatatataaaaattggagtttactatagaaatcaaaattatttcaacagtgatttttaatttcaaaatttagtggatgatatagctcttaagttctatctttattttaagattgttctgaaaatcaatcctgttgtgtgtgtgggggttgggcccttggcaagtattcaggtgagctcgagggactcagtgcaaaggctgaatacttggctgggattcatcagaattaaagatcaagggcttgcctaaggctgaaaaagagccagagccataagtattaaaacttaagcagtactctctctaaaaaaaatccataatcaaaattaaaaatacaatgacagtaaagcagtcatacttgaataatgaaagcattaaagtcatgtagttttttatgattctacgcctccacaaacaataagccttactgaccgctcagctgcctgaacgtttaggcaagaattacatttcttaagatgatgatagcacataactactgcagtccttcagtaatgaagagcagctgtccccagaggcagggaagcctggagtatccagtaggccacggtgacagggtcaagaaggcattcacaggcactgaacagggttctgtcgtctcatgcctggttctgcagtctgggcttagcctttgagcagatagaagccatttaatttgtcaggccctggaccaactgatatagagggatggggtcggtgtgagtagttggtggtatcacgggtccacagcagcacactctgcctatcctctctgtcatgattctctgagttcttcggcaggaaagggagttcagatggacaaagatgtcttgttgtcaaagcaggaatgcaactcctgaaaaggaatggtattcaaacattatgaagtattttctaacaaaacattgggaatttgtattgtttctctttctttctttctgctgacatttttgggagggtgaggtatttgtaaagtcatgtctttgttttcagcacttttcagttctctggtaagaagggcatccaggtcgggcacagtggctcatgcctataatcccagcactttgggaggccaagggaggtgagtgggttgcctgagcgaaggagtttgagaccagcctgggaaacatggtgaaaccctgcctctaccaa

SEQ ID NO: 131865 - DNA, 1052 bp, Homo sapiens
gtttggcttactactaaaaattgtctgcttcattactatgtgcaggtttgttccccgccctctttccccttcccccggccccagcccctgtccctatagcacatcacacaatattgtaacggcctgtttacctgtctgcatctcccaccggacagtgaaggctgggattcactcttctctatgaaatttcctactatgaaaataggtcctcagtagacacttagtgaatgaaggagtggtgaatgccaagatgcccctacagtcagagtcaacagcccatcaaccaccagttggtaaagttcgatttgttttacaaagtaaatgtgcttccacatttggtcctggtgcctgatcccattgagtttttgcaaagggccttggtgcctttgtgtttagtctaactcagttcaattgaatttagtgactgtctgctctgcaggttgctcaggatctctgtcctcaaggagttcccagactgtggggagagggcagatatgaaggactcactgtaatgtgcagtgaacgtttcagctagtagagagttacaggagttgggaacattgatagggaggcagggaaatctaccagggaaggtcagagaaagctgcagggtggaggcacctggtataccaggaggcaagggcatcccaggacgaaggcatagcctggggaagaacctggcgtggaaagtgtgtggtgtgttagggccaagcaagtatactgctgtgttcaaaacggatgttttatatatacatatctataagtgtatttagatatggatatatatattccttcagattcacacatatgcataaacgtatgtaaatatatagagatatatacatttttcccttggcaggtgtgaagcccttcaagtgttctttgtgtgagtatgcaactcgtagcaagagtaacctcaaggctcatatgaatcgtcacagcactgagaaaacccacctatgtgacatgtgtggcaagaaattcaaatcaaaagggacactgaaaagtcacaaactccttcacactgcagatggtgagtaaatggcccaagg

SEQ ID NO: 131866 - DNA, 1038 bp, Homo sapiens
ctctcacgttttcttagaagttgtaagtttaacttcaatcttttcccttactgatatttgcagttcttccagcagaaacgcttttaaaggtgaatgtgttgccgctgcttccaaagccagccagcgctggctggaggccccctcctctacgtgtcgggcattgagattttcaagtaggatctggtccctgccttcagggtgctcttggttttgtgaagggggagctaaacaataaacagtaatggcaaaatggcaacgtgagagggacagtgacgtcaatacaacaatgtactctccgcccaaaaaaaattttcctggaaagggcctgggaggaagggttctgagggctgtctggaggaaggggttctgaggttatgagtagatttgggccaggaaagagagtgaggaggaaattcccagcagagtcaacagcacaaaccaaggggaagctatttgtatttactccaggttattgaattactgaacattttccatgaagcaggtggaccatattgccaacatagtaagatagcatgatttatgaaaacaggctccaggatttttagtttagacatttgtcttttgagcctgcaaattatttttgtaatgaagccaagggtaccaagaaaatgttgacgcagtacaaaaaaaaaaaagatctgctttcccttaatgaagactcttttgatctgataataaagttgctattgcaaagtgttttaaatagaattccgtattttcaaggacagttaacgtggattttttttggtaacagctttactttatcaagatatattttacatagcatacaatttgctcattaaagtgtgaaatcaaatttttttttttttttagtatatccacggagttgtgcaattatcatcaccacagctaatttcagagctttttcatcatcccataaaggaacctggtacccatcagctgccatccctcgttcccctccctgagccctaggcagccactaatctactctctatatctgtggatttgcctgttctttctttcatatgaaatttc

SEQ ID NO: 131867 - DNA, 1922 bp, Homo sapiens
gaggctcatgctgctcctgagaagcccccagacatgcagcacagaagctcagtccagacgcaaggtgaagtgatcacactactgctgtccaaggcccagagtgctgggtcagatcaggaaagccatggcgcccagagccccctaggggaagggcagaacatggctgtgctttcagctggtgacccagatcccagcaggtgtctcaggtcaaacccagctgaggcctcagacctcctccctccagtagctggtggtggggacaccatcacacatcagcctgactcttgcaaagctgcccctgagcaccggtcaggcatcaccgctttcatgaaggtcctgaacagtttacagaagaagcaaatgaacaccagcttgtgtgagcggatccggaaggtttatggagacctggagtgtgaatactgtggtaaggaaaggcagcgccggtgcgtggccctgtccacaaccatcatgctgtggtcacctcgcatttgatttgagctcatgtctgtttgcaaagaataccttctaagtgagccatcctcctccattgtagataggaacggtgaccctgtgtggccgttagcgcttggagtcttgtggaggtggccgggatggctgcacagttgactgtgttggcctggtcaggtgtgtgtgctgagggttacccatgacctctaccagaactctaaccaagaagaatctttcttctggcacatgacaagtttaaagttgagctttaaattgtggccaactactatatcagccaagagaggttatgaaagtggctgcagctctctgtagggaggtcccaaatagcaccctgcaactcacaatgaaagcatggctcctggaactcctggggagctggtggtcaggatatagaaaatccagctccagacctgctgtcccaggagggccggtagaacttagagatttgtagatttatgcatgtgcatcatggtatttggagccataactggttctcagtaaacactggcttcctcctctctgggccctaacatcatgcaaaaaatagtagcacccttaatatttgcaacctcccacctttgaagagtaattttcagacagaaatgtggtgaaaagtatgaagggtgacccggacaagcgcaagagggagatagatattgtagataaaaaataataataatttaaaaaattcaaaatcagtcaaaatgaaacttccttgttctcatgtgaaaatatttttttaggcaaacttttttggtaccaagtgcattttgatatgcatgtccgcacccacacccgggaacatctgtattattgctctcagtgtcattattcttccatcaccaaaaactgccttaaacgccacgtaattcagaaacacagtaacatcttgctgaagtgtcccaccgatggctgtgactactcaactccagataaatataagctacaggcacatcttaaagttcacacagcactggtaagtagcaagcccaagcggcagccccgtctcccctgggtgctcattgctttctcaagtttatgcttatatgtaggtgtctctgctgcaggtcagccctgaaaacatagagagatccttctccttacacagctgtgcacgtggcagaggcttcccaggttcctttcacagcaagagtctctaatacgttgaaaaaagagattagatggaataaattgtttcctgtgcaaatttttttagcatcagataaagtctacagaagagatatctatagagtagaagtaaagtcagaatttctcaaatgacattttaaagaataattaatagcagagataacagtaatagctcctactgaacgtggttgagaggttgaattagataatgctgtacagtgatgagaacagtatttggttcagagtaagagcatagtagatgttgatgaccactgttgtcacag

SEQ ID NO: 131868 - DNA, 1097 bp, Homo sapiens
tgatttatttcttagaatataaatcttggagaccttatcttctgtgcagtgttgtttattaatgattctgaagtctgctaggcctcatgaagacaagacaagacaagaaactatgtctgcttcacccaacagtgtacgcccagggcctaggtgatggcctgtggcggggagcagtgaacatgtactgaatcgagtgaagcagtgaagagccaccgtggtacctacagtgattccgtggtctgcgtggcactgcagaccaaagagctgtgtttcctttactgtcccgtgaaagagtagtgtttaccctccaactctgccactgatataaaaggataccttatgcatcttggtatttgctccttaggtaacgagtctgaccttgaactagaaaagaagtgtaaggaagatgatcgggaaaaagcctcgaaaagaccacggtcacagaaaacagagaaagtccagaagatctcaggaaaggaggccagacagctttctggggcgaagaaacccatcataagtgtggttttaactgcacacgaagcaattccaggtgactgcaccaagcgggaaaggaaaaggcaagacccttggcaagtctgtgccaagggcagcctgatgtcacagtctgagtcagaacacagagctggtgcattggtggggctctccatttaatcacccactaatttgagaggatgagacttacttactgcccaggtgttgtggttaatggatggaggagaagctgtgagggctgctgtgagggccgctgctcttgctgtagtcccacagctccgccgtgctgctcctgctggagtagtggttccgggagcagttagttttcttcgtcccctcacccagctcttctcctgggtgtgtgccttcccctcctgctctcagccatgctgtcctgcatgtgaggccagcccattcagccagacgcatgcaggctgctgctccaaaacccatgctaactctgcccaccatctgttttgtatttttttcctctctgcacatagaaaagatgtaaactgacatagatacccactgtttccatctctcaaaggttagagttctattctcatttttcttttctttta

SEQ ID NO: 131869 - DNA, 1048 bp, Homo sapiens
ttctgcctaaatcattggattattgtaggattagcaagaagcacattggaaacaacttggcctcctataaagaaaaatgtattactctaatctcttcttgttcgggaagcattttgggttccttaggaatagaacgtttcctggaaaaaaataatatcgattggcagtatctgtgagagattttcattggcgaagcaatgttctgctttgttaaattttgatttcatgtgttgttggtaggaaagaattctctcaggtcgttacctccctgctaattcacggagaaagtctttctgtgaacccagggaggggcttgctcctgggactccagtgccttccaagagctccaccttcatgccagcaaggctgggttggcctattgcctttcctcatttcctctttctggtaggagagttttactgtaaagaggagagaaatgggttgggggagtggggatcaggagttgttttcattttaagatgggagaataagagtatgcttataggccaatggaaagatctagtacagagggaagaattgatgacctggagaacaatcatcagagagggtgagttctgcacgcacaagccatcatgcaccctttgtctagtagccttctcacacagggatgtgggagcatcttcctgggtgcaggcaatcaggcatgcgctatctttagagaatttgaaagtaatgatcacacaagtgaagtgttggtctgcttttagtatctccatgaaccagcaattccagacaatatcagagatatgatagccctgctctggggtgggccactgctctcacccgcacaccttgtgtccccctcactatgcccaccttcaaaccagcaggagcgaggtggggagacagctgaagacgcaggcgggctggaaggggtggcagaggcagttgttttctggctgcttgcagtgagatatgaagcaaggtcagctgttgagagtgaggagcgaggaggatgagatacttgctcaccatcaccagagagcgcagagcttgtatgattgccatgtatttgtccagcatcacc

SEQ ID NO: 131870 - DNA, 1084 bp, Homo sapiens
gagaagtgtaagacatatccctaccctgtccagtcaaacatctaatcaacgtcaaggagaaataccaggaacccagcagctgtgtctagagctggcgtgtccctatggtgtgggcagccctggccttgatctcggtcttgaatgagtgtttggtcctgaccaagacaagttgacgtgtctgaggcccaagctgtctggggatcagtaagtcttcctcctgtaagatggagatcttattattttgtcacttgctatcgctttatttctaacacccatgtaagtgtttttttaaatttaatttttcttggattacacatgtaattcctgttgtgtaagatgtgaaaaactcagagaaaatctccaaactggaaaaatcacactaattgtcatccacttacccaagccaggcactggtatggggtgttagggagctgggtggatgggcagaaggtgctgggtcgtctcctctgtccctttcaatgtccctgtactctctctttctcgtggtctgtgtgtctctgtttttttcagaccagtttccttggcttttcccctgtaagttaacagctttcccctagtcacccaagtggaaagctttttatcagaagttgcaaattggcaacccgtaggccagacctaacctgcagatttgcttagtttggtctgcaggggctgcagaggtttttttcttttcttttttttctttcccagaaaaatcttatttgatggccagtgcttaaaaatcaggggattccaactacaaattcaatatttgggcctccattgactagacctgggaggcagctaccccatcagacagagcaggctttctaagtgccccaccccctgtctccagacctccaggatgggcctcctgcttgcggggcaggagcttcttgcatccatttcctgtccaggtaccggtctgtggcggggggctcttggtggagccgccacagctctcagtgtgcctgccctgcctttaacctgtcctctttccacactcaaggctcttccaacaggcaaggctcttggttctgcccccactggctgtgtggcttccactcccttctcctttccttcc

SEQ ID NO: 131871 - DNA, 1051 bp, Homo sapiens
tgcctgccttctacctcagtgtgatgttagtaaactgcagaaacagggaaaagggcaggcagcaccttcatctgctgtgtgccaggcactgtgcttggtgcttcactggaataaactcctgcattttgaaaaccccaggaagcagagtggggaaaccatggctggacacgtctcatgaacaaatgggttgaatcccacctcctgcagctctcggttccctgaggctgcagcaagctcttatttggtctcttccttctcttgatgggttgaggatgcgatgggatagaaaatgcgggtagaatttgaggcccctgagggagagggtggaagtcgaaggtggcatgtgtgggaccctgaacgagtgttgtctttccagagctggaactgggtgacaattccctgctccctcccagggctcctgacagctcctccaagcacctgctgtggctcaaactctggaaacccaagtcctggctccttttcttccttttgtttcctccaccttccttctcccctttctcgtggctctttcttttctcagttcttgggatttggatccctgatttccactttctgtcattattgttgctgtgttgtttatattgtctctcaaaaagcttctgaattgcctgtgtctttggtttccctgaagaaagtgtatgtttgtgtgcgcatgtgtgctgtatgtgcatttgtgtatgtacacacgttttgcgggtgcatgtgtgcgcatgtatatgttttatgtgtgtgtatgtgtatttgtatagatgtgtgttaaaggacagcagaagcaactagggacccagtaggtagctttagctgtctggctgaacgtttctggatttaaaaaattctctgttctcttcagcatcgacaccatctttagcagtctacaaagcccttttttcccagtattcccctacataacacccccaccacaagatcccccccaccgcccatcaatcttaccagggcagctgtggttatctccatttttgagctgagtccctacagattcaggaagggaaaggtggctccagtcacactg

SEQ ID NO: 131872 - DNA, 1050 bp, Homo sapiens
ttaagcaaagttaatacatgcttgcatacatatatatatttatttattaatgatatgtggagaatctttgtgcttcatagtcactagacctaaagtagaagcagttgtcaagaatgtccaactgctattcatctttgtggccaaagtaaatttcagattttttttttgtaatggttttctttagtctctttattaacccatcatcatgacaagtctgtcaagtgacacatgtgaaaagcagatgtcctttcttattcctggtgcttcctaaggaggcagtgcaatgcaggagaaggaacattattagagataaaggaaaaaaccagaagtgctttctcctctcacattccactcaacacttctctcaccaaatgtgtgtggggatttctctccaccaacaaccagcagttctttactgcagattctccagtggataccagccaggtgtcctctaattcagttcaattctgacattatctactgggagatagtgtcagatcccgcaagtggagggctcagtcctacaagactaccccttacttcagatgtcagtcacaagcagttagcggtttgtgattctgaccaactggctagaggtccccctcctcaagtgtgattaatttgctagagcagctcacagaattcagggaaacactttatttacatttacccatttattataaaggatattatgaaggatacacatgaactgccagaaagacaaggagcataggcaagatactgagaagggtcacggagcttctgtgccttctccaggtgcaccaccctctgggaatagtcagttcatgtgttcagctgtctcgaagctcattcgaaccctgtccttctgagtttctgtggaggcttcattacgttaaggttcagaaatcaataccccaaaatatggggctttgacatgctgaattaaagaagcagcctcaaggcctcttggccttctccagctctcctcacccaaatcctgtctctcccaaagcacaagatgaggctgttcaccaaagttcccttatttacctagaaactggaccttaa

SEQ ID NO: 131873 - DNA, 1001 bp, Homo sapiens
ggaaaacccactctattcattgtcaactaaattaacgcttttttaaataaaaggagtcatttttaacaataacgtcagggcagcaggcatccatgaaatgtatggtcactgatcattagggttatcattctaatgtgtttactattttgaaactctagggagaagaaaacttatttttgcatatgttggaaaaatgtatcctcatgtaggatatcagggtaatatctttaatgtttcatacttaccaagataaatttgtaatgcgtattttcttttaaaattagatttatttaggagaaattgcacttggtgaaccactttctctttaattattagcattaactttatcatttttgtttcaagatgtcacagctattgttcagcactagaaattatataaattattagctgaagatgatgactggcaacatttatgtctgttcctcctcttaaatttcttgttcagaaagtctgttgttgtaaacatccccgactggaagctgtaagacacagctaagctttcagtcagatgtttgctgctaccggctattcacagacatcctcttgatataattctgtcccggagtggagttgaggaggctataaaatgtgtgggaaaacctcagaaatctttagctgcattcttttactgcactgacagtgcacgtattatgatagttgaatgtagggtgctctcctaataacaggatatgccgtctcgagcttcccagacttagcgtgctgctgctgggccttagagaatttagttaaataaaaagtgtcaccgcctattcctgtttctgccctgtcaatgaaattttagtctttataacctttccaagtaggctggagtttaacatcccaacaattcaggagactgattttctccattgtaaattctgtggaagttctggagaataatttcatcactaccacccagcagtatgcaatctagaaatttcagctttccctatacttaaaagagatgtgtgtgcaacatt

SEQ ID NO: 131874 - DNA, 1121 bp, Homo sapiens
tgtgtgagttaaatacagtggctctgataaaaatgtcttttgatcagtctttaaaaaaattaaactgaggacaggaaggtaaattaaaggggagatttggagacttgtggtaactggtttattgcaacttaatgtgcagcatcctcattagtcaagtatcatgtgcctacctaggcatgaaatagctatttttttcctgatttaaatctggaaagtttcagttgtagtacagtttgaatagttgttgttgtaaatagccactggactttttaaaaaagtatttttcttcaaaaacagtgaaggtcatcttgtatccatagagaccacatgtactttcctcattatttccagcattatttatataatgggtagagttatttacaacattaaacaaaaagtatttcagagagcaaccgttaaatattatcacagggtaaatatcagcaactgaaatccttttctcatagtttctcaaaaaatttggtattaggaaattaatagtctctcagaatttgtatattggttttcttcagtagttattctgtagagtgtgtgtgtacatatgcatgctcatgtatgtatgtatgttcatttcttaaatcatttcataaatcactgtgacttaattgtggactttaattgttttcatagtttttttccccaaaagaaggttactttacatattttattttatttttatttttattttttttgagacagggtctcactctgtcgcccaggctgcagtgcagtggcatgagctcagctcactgcagcctccacctcccaagctcagggatcctcttacctcagcctcccgaatagctgggaccgcatgcaccaccacacccagctaatatgttgtatgtttttagaggtagggttttgccacttagcccaaggctggtcttgaactccgggactcaagcgatctacccatccacctgcctcggcctcccaaagtgctgtgattatagacatgagccactgtgcctggcaattttacatattttaaattaaagcaaatcttggtttttgatggaatgcagatttacttatatttcacttagtctttttcctttctttcagaaaagtggtgtggaaacaaaatggttttagta

SEQ ID NO: 131875 - DNA, 1056 bp, Homo sapiens
agggttggagttcaaaacattaatagaattatactattaaggttgcatgtgatcactttgctgctgtgagagactctggatgctgtgtttgctggtcatttcaaaggctgaagagaaacagacatgcctgtccttgccaaatacattgtttcccctatcattctgtcactatggaagtacttgttttttctgacctgggaataatggtattgtggttattggcgtttttgttacctttcttactagaaattatgcagatatccccaattatatccagatgcacaccttatattccaaattttgttgcctgggattgactgagtacccttttgagttccctgcatcagagacgtgtttacagttgtgcttcccagtcttcagcatttatggtttcatgtttgtcaaatttgtttgaagtataaaaacgataatcttaattctgttactgatcattccttcattctctagctatttgtcacatcatctttcttttgaaacgtttagggaattaagaaattaataattttatactcattctttttccactcacatatctcactggctttgttcagaattaaattgtttttggtccctgtgtactatttccttctattaattaactgacggttgtttctctcttctgtgtttttgatgcttttttttttcttttactgtttaaaactttttcagaagatgtagcgagtgactcaggtgctagctagtgttactgatttcccccccatgttagttaataccatgtcaaatataactgaagaactctgttgtactcacagattatgcccctcatggtcagcagactattcagatacagactttcagggggaaggttttcaaaaaagtgtggctgcaatctgtaaatgcttttaacatctgcacattgcattactgttttcaaatgtttttgtaccacataattttatttaatattcacaactattctgtgagagctttattcttttatgttgtagggttttcttattttacagattgggaaactggtgtggagcggttaaatgacttactcaagattacata

SEQ ID NO: 131876 - DNA, 2032 bp, Homo sapiens
atatgactagcagccttttcatttgaaattaggattaccctctatttttagacgtatcctttaaaaatacgaattttttaaagaaaagtcctaatgttgttacttaatctctcacttttttttttttctttttactggaatcatctgacagaaatggcaatttcatttcaagagtcttgtcttatttttctgggccatgttctggttgtttttttcatcacaggattgtaacagtccttaaatattttagagattaaaattctaggtcaatttagagcataattggcaaaatagacatgttaccaaaaacagagatataggaagtttgggagagaagttaaggttcatattttaggtatgacctttatgctagtctctttctttgataaagtcatttaatttctttgagtcctagttcctcatctgtaaagtagagtaatatccacctcctgtggaattgtcatgaagttaaatgagatgctttgtgtaaagagcctggactagtgctgctaaatagatgcagctccctttactatatttttatttattcagtaaatatttgacactcactatatgccagacactgttccagactctggaattagaggagtgaaaagataggcaacattcctattcttacagagcctctatgttggctgttctgacagaagaggaagataaacaaggaaaggaataaactaaacaatttcagattgtagtaagaagtgtaaagaaaatcaaagagtgcgtggtaataaagaattgctgtggtgaaagcccacttcagactaagtagtcagggaagacctctttaaaaaggtgacatttgagtagaaatgcccttaggattttggagaaactaggcatgtgaagatctgagtgaaaaagtttcctggcagagagaagagatagtgcaaagcctctaaagtgagaaaaatgtgacaaattgagagaattgaatgaagcctagaggtgctgattgcaagtagtggagaagtcagagaggaccagctagtgtagggtcttacaagccacaataagaagaatggattttattctaggtgcagagagaagccactggagggttttaaaacagaggtgttgtgatcattagatggaaatgttgctgtggactttcagaaatgtgaacttagctgtgaaacgttagcaaactaaatactagcaacttggatttctagttggccaagaaacatgagggtaaacaatttattttccctgattaaaaaaaatcccagcaagtctctagcaaaagcaagtctaggttatctagagcaaataccattttatatctttttaattttactaagacttgttatgcaattatagatgttacagatgttttcaaaaatagtgctttgtggattgttttccttttatgagtccatgtggcaattgactagcatagcagtaaaaagtacaactctggtttcagatacgagcatgatgattgatcacatagaagcattaagttaatattaacaaggatctattgccagaatatatttcattataggattttgaaattatttagctgaatggaccttaagagttggtcttttttcctttatagaagagggaacttagattcaaaggggttaagtgattcacattatttaaacatttaaaaaataaacctggattttactattcttctagttgtaggatgacaggttcttgaggcaaaatgtggaatgagagaagatagtgacatctgtttgctttgtatctgctgccttctctgttgctcatttattttacatctatgctgtttcacacttatctttggacttagggtattgggatgtgtcaaacagttgctcccttagtgtggaaacagacaagtaaacacagttgctacacaagttgcaggcatcatatgataaaggcaagcttagtgtgttgtggagggcatgatgggtgtgtctgttaagtgtccctgtttagagtctgtttacatacagagttgaatgtccttggcttctcatttcaatttaatatatattatattgcc

SEQ ID NO: 131877 - DNA, 1280 bp, Homo sapiens
atccctttctcttttgggaagcatctgttcaaatcttttacccgttaaaaaaatctggttggttgttttcttactgcattctgagggttcttatgtataaatcctttatcagatttatgatttgcaaatatttttccagtctatggtttgtctcttcattctcttaacaatgtcttttgaagggcaaaggttttaattttgatatctaatttatcagttcttttatggattgtacttttggtactgtatctaaaaatgttttttttgcgtaattcaaggtcaacaaaggttttctcctgtgctttctccctgtagttttaggttttctatctaaatatagtgatccattttgagttaagttttgagtatagaaaacttttctatctggatgttcttaagacaccatttgttgaaaatttatcctttttctattgaattcccttttccccctgtgaataatcagttgactttatatatgtagtagttctattttggactcgattttgttccattgaggtatttgttgatcttgacaccagtgctgcactgcgttgattattcagtgttgaaatcatgtagtcttccaattttctttttttcaaagttatttttgctagtctaggtattttacatttccttatgaattttagaataagtgtcagtttttttaaaaagcttgcttgacgttttgattggaattgcagtgaatctgtaggtcaatttggaaagaattgacattttaaaattattgagtcttctgacccatgaacatggtatagcacttggtttagggcttcattaatttctctcagtaatgtttggtagtttataggatgcaagtcttttatattttggtctcgtatatgcctctgtaagttgggttctgcagagaaacaatcaataagggtgcgttgtgtgtgtgtgtgtgtgtgtgtgtgtgtgtgtgtgtgtgtgtagagagagagagacagagagattgattttaagaaattggctcgtgattgtggtgggtggcaagtccaaaattcatagaattggcaggcaggatggaaccttaggcaggatttctcttacagtcttgagatagaattccttcttccttaggttatctggttttgctctgaaggcctcatttgattggatgaggcccacccatgttatggaggagagctctttttcttaatgtcaactgattgttatcgttaatcacatctacagaatagcaatagctagactagtgtttgatcaactgggcagcatagcctagccaagttgacaca

SEQ ID NO: 131878 - DNA, 1049 bp, Homo sapiens
agttccttattaatcagagcttttgtggtgtgttggggggcggggggggggggtggtaaatccggcagttctcatggcgtttcattgtgattccttggaaattaccaaatctgcagatacatttaatgtcttgggataatatttttcttgacctataaacatgaattaaaagtgattacttttcttttgctgtctccttcctatcttggactttgatttttcttttaatccgtatccttcacagattaaaagatcattcttttttttccttttttttttccttcacccccttcctcttccccttcccactcccagaccgattcaaggcaggagtaaaacaattatgtaggttatctgttagcagttttattgcaagtaagtaacctggcttttgtttgttgttgttgagaatgtatttaagtctttttattgtccttaacactttcggcaagtctctatttttattgaaacaattttattgacatatagttgttatacaataaatggcatatattacaatgtgcagtttgttaagttttgacgtgtttatccatgagaccatcaccacagtcaagacactaaacatatacccccaaaagttttctgatgtcccttgataaccctcccctgcattctctaggcaaccattatctgttttcttttactttacattggcatgcatgtcttagaatacaatatgcactccttttgtctggctactttcacccagcattatttggagattcatccgtgttgtaccatgcaccaatagttactctttcttattggtaagtagtattccattgtatggatataccacattttgtgtatccattcaccttttgataatctatttgggttgattccagtgtttgacttttaaagtaaagcttctatgaatatgtatgtacatgtctttgtatggacataaacttttcatttctctgggcatacacctaggagtagaatgactgaatcatatggtagctatatgttctatacctacctagtttcttcttaaactgccagtggttttccaaagtggcagt

SEQ ID NO: 131879 - DNA, 1046 bp, Homo sapiens
ctctatccttgtgtttatgatctggtgtataaatactaccaattactaggcacttttcataaggaaggcactgtggtagactattatttcaaaaatatttattgcttctctctatcagggttctttctgtagtcggattatacttcttattctgttgacatcaggtttgaccatttggctttccttgaccaataaaatgttaaagtgacatgtcccatgtttgagcagatatttttcatcctgtggttctgccagtggcccttgaccctctgtcatggaaccagcatgacttagctatggctggtcccagaataatggagcagagctgaagccaatctgtgataagcatataagtgtgagataaatactgtgctgtaaggcaccatgattttggacatttgttaccatagcagaatatagttcaagcgatgatactggcatcactcaaggtgctgtatgatgatgataagacttgggcattgtcctaaaggagcttacagtcttggtagatgtattacatttccacaggttattgggagttgaggaaaaggagagtaatattacataaggatctttgaagttgaggatctttcctgacctccatctcatccctaggctgaatcagtcaatatgttttaaaccctgggtttgtgatccactactcactgtcacaacctcttattgtccaaaatttgataggcatattttctatgccctcattcaaatcaccttttttaaaacaaacatttaagaggatgaacttctacagaattgtgattataagcttccttcataaatctattaatcagcatttaatagcaagctaagaatatacccagttaaactgtttctctattatccagaaagatatcatgatgtcctagattctatgtgaattttatttgtgagcatttaaatttcccattgtcatgtctatgtgtgcttctcactctgcatgggattttaaagaaacaaaaccttggctgggattccaaaaggaatctttttttttttcttccccccgtgagaagctaaggaatacatac

SEQ ID NO: 131880 - DNA, 1021 bp, Homo sapiens
aatattaacaaatttttttctcaacagccatcgtaggaacttttaaaataggttttgcatttcccctgaaaatggtgagttaggtcatattaggaaaaataaattctagaataaatacaattttgattaaaccggttttctctataaaaacccaagacgctgtatctatctttaatgttatctattgttaaaatttcatttccctcaacagcatgcatttccatgtttattagaccaaacaacttcttgttttacttcttacctttgtttttccttgttgttgttatttaattagaaaagaaatgctgtttgggccttttcatatgcctcaaaaatgtttggttacacagaggagtgagttagatttataggactcacacccaatttgatctcctcaagtgcatttctaaccatgttttcatccacttttccttgttttaggtttctcatagaaacagcttttcattgagctaaatgtatttcctctcttactcgttcttggaaatctaggactatgtatgtgaaacttcttattcttgtacacaataactcttaagtatttgaaaatgactgttctacttcagtcttcttttttgccaaactgagggaaaaaattcttttttttttttttaaaccgcatgcatgtgacatggtttacagacctttccccatctatatcgctctactcatgacaaagtttttgtcagtttacctctgaaaatacagtggccagaactgaactgactacttccgatgtggtctgaccattgctgaatacagtgaagctattatctaggatactgtgtttctattaatgtagtctgaaatttgcattgcatttttttggcagccacattaccctttgatcacattcagcttataatcaactaaaaccttgtctttttttcatgtgaattactttaagtctaatctttgtcactctttacttgccagttgatgctttgaaagtaaatgtaggatattatgtattgcattactataaaactttaaatgaatttat

SEQ ID NO: 131881 - DNA, 1047 bp, Homo sapiens
gcactgcactgtaccagttttgaatattctgtgtccataaatacactagtatttgtccaaccatgaattctgacttttaggttagaaaatgtgttcatttaaatgatagttttaacttgagtgaaaaagctggtaatttttatcttcttttttctgtattataattttttgtcattaattttgaagatctcatgctatatgattagttctgtatatgactacttctgtaattgatgaacaactactagaatgaattattgtacttgagcacttagaatcatgtcaggagaggcatgaagtaagtagaacatatttgtgtagagataataattttactttctaaagcagtgattttgaaactcttgctgagagtgtgctggaggaagtcaagcatttcatcccggtttcaaccagtgctgttttattttgattaattttaagcgtggaagtttgcatagtatttcagttgagcaaggttctgttgtttaaaaatacgatagcctctattgttaccatatttgctcttatcacttgcctgcttaaatccttgctatttttttattgttattacgactgataagacttttctttccctagctccaactttattctttatctctgatcactttttcctttccatgtaaaccctgcattctaattctacttaaattgtttgatgttccctgagaggaaaatgttatttttacatctgcatgccttcgcacatggaactgccaccattctcacttgagctaggcagcactcaattcccttggaaccttggtcatctttccataaaagcagttattacattgttttgtaaccgtggcctcccttgagagcagagaccatctaatttatcttgtattcatactacttggtgtttattcagtattcaaatgtctgttgaattattgcatttagaatttgagaagtagtaaaattactttaataaacactaatgtgaataaaatatcccagatctagttctgtgcaaaagagttttagtgacagtgtccgacattatgctaaatatataaaaggcac

SEQ ID NO: 131882 - DNA, 1013 bp, Homo sapiens
gagttttagtcatgggtgaccctataaattgcaatttctttttctccctaaagggttttctttcactattacatgtttgtgttttcctgattccactcatgctactgttaggtgttggatcatcttacctatagcgtcaatacaaagttcatttgtaaaaactgttccgtttattttctcccagctgtttcatctgagaattttgtttgaatttcagttgccaaatgtagtttaatcggttactctaaatagaaaggttattgcaattttcacaaactaggggaaatataaatttatcttaagtttatgaacatttttatattcctgtggggacaactaagcacagtatgtataatttaatatctctgttggcatttgttctaagttaaatttatttgctgtattgttaaaatcaatgtagtaaggtgtacagtcttttaaaaacaaatctgtttctctgtggaatatttttcaaaaggacctgaaaaacatgctcttaaatagatggagtggaaattttactattaaagtgaatgtatagttaaatgtgtgatactggtattgttttgattgtttttattttacatgtgaggattttttacatgtttctgtggaactacttttaagtaggttttaattttgatttataaacaagcttctctaaaagaaaaaagttgttttgttcttcgtgattatatggtagtcctcagacttttgtagttgaaagaagtagaaatgagtgatttattaagctgtttatgtaaaatgactagttggagcaggtgatgtaatttatttttactataatgtgcagagatgtctttatcccaaacaaatttatagctgaatcgtttgctattttttgcaaatttagggaatctggaatgtgcccagaaatgaactgattgccaagtgttcgattgagtaaatatcatatggaaatggttttttgcttgtaatgacatattgttactgattaaggaccatttcttttctttttttttttttttgag

SEQ ID NO: 131883 - DNA, 1037 bp, Homo sapiens
atcccgggcccggcggccggcgagcatggaggagaagtacctgcccgagctgatggcggagaaggactccctggacccctccttcacgcacgccctgcgcctggtgaaccaaggtgaggcgccggccgttaactgccggccggcggcggttgggggccgggtggaaacgcgggggcccagggggcccctccgtgccctctgctgtcagcggacgcggcggagacggaggcccgggtggcccccggggtcgtttgcacggggacctgggaggctgtgggacacctaggggaagaccctgatgtgaattttggggacttggaaggagaaggctggggcgcatgggtgagacttgaaggaaatctttggggactcgggcacacccaggggaaacttctgggtgggggacagcgaccatctgggggcttcgttgggaacgaggttgaattatgtcatggaaggggagcgtgttggactcggggaagtagggcgtttggtttgtctaaggtactggagaaaaagctggaggaaaatggaaggacttgagggactcaaatgcagaagaggtgaagggaacaggtgcttgcattgttagcgaagtttggggaccttggaagagggttggggtcagaccccagcacctgagaggagaggagctccgtggtcccaggggaggagcccagttccccctcccagccctttgtctctcctgtgtccaggctccaacagccctggcggggcagtcagccctcccaggggatgggcagcccatgccaagccttgcaggctggcccttggagaagtcagtaggggagaagaggccggcaaaagagcaccgttccggagggcgttgggttgggtgaccctcattggtggctggcttgaggttcggaatagtggtgaagggagtccttgccattttcacacgactccagccagctcagggtgtgaaagatcctaggaagtactgcgggtcagggatacagagatttctggaggcacgcctacccgggacagtgttcccctggctttttcctcct

SEQ ID NO: 131884 - DNA, 2238 bp, Homo sapiens
gaattactgtgcactgacagtctgtggttccctagatgaatcggatctgctgctcttagtgctcgccctggcttttttattgttggaagtgaaagatgaggcagacatattctatttgtatatagatacctatattttaaaacagtgacctccagtttttgcctgtttcaaccagttcttcagagtagagtgtgtgtgtggttgaccgatggtggaggagagactctttactgtctccaagaatttaagaatatttgaattgttgaacagaaatagacttatggagctccctcattttattttaattgcaggcttatttttatttctttaataaaatgggcttgtgaaaaagtgaatgggcatgcattcctaaataaaagaaaaaaaattaagttttatttctatgccctctgaacagttctgcagttgagtttgtactcctgtgcctgatgatttacatgtatcttttattgcctgctgggctgtcatctctgtgaaagaaatttcttcatacattgcatgagatccgtggcattggaaatattctggactgtggactcaagtgcatttttcctaataaagtagctgaatcaaagttaggttgtactcaattaaggaacagttaaactgaaagtacagtgcgttatcttattttaaaagtcagaattattttctctgccgtgttgccatagtattgtgttgctaaaacgtccaaaattcttttggattctgtgtttttaccagtgttaatggcttccagttacttgaaacagatatttactggggaaatgttgccatttagtgttttttaggtattcaacttgataaacttacttttcatagaagtaattcttataagaagtatatttctcacatgtgaaggaaggaggaggtgctgctcagaatcttgtcttactgttagtttagatgacttcagactgaaacatttttctcttaaatcacaggctgatattcggaatgcagagctttatcatttaaaacattaattacacgcttatgtaactgcaaaattacaagtgttttaaatctgaagctacatgattgtgaggaagctttgattttaaatccaaccatcttgttatgggctattttttcttatttagttatatttgtgtttgcctctaatgcaactgtgttttcagcagttattcacattggagttggtatttcagcactaaattgtagaatgggccagcatggcaaaccttagcgtgccatgtaatagatatgttttatggtatctctaaactctaacaaggccttacatttgcatagtattttaaagtttccaaggcactagttttgtcctcacacttgcattccggtaaggcagatgttcatgtcttctcttttcaggaaggcagctgaggatcccagctatctaagcttttgggcaactgagatttaatttgaaatctcaggtcttctgtctctgaagaggttgttctttcttattttggcttcctaaaatgttggaatgaaatacttctcacttgctaacttcagaccctgcagaaatcaatataattagtatgattgtttccaactgacttaaatgtgtaggaaatagtatatatcctttaggaagtttatcctgatttttacagaaagtttctgtctgcacttgccttctttgaagaagcaaacattcacggtagatttatcttccaggattttgatgctgaggccaagaggcagttttgaattaaagccctcctgtgactagtgtattagtttaataatcaatgcattatgataatgaagcagtttatagatgaggtgtagtcgttctttaaaaattcagtgttcgtaaagattgatcaacttcctaactgaattactctttttctttcttgagctaggatgacaataagagatatactcctgtctggtatacattggcttttatatttttccagacttgtgtttcatcgtgggcactgattgctgattttattttcattttaccagaataactggttctcctcctccacctcctaaatgaatttgtttcccgaatatttatttatttatttttttgagacgaagttgcccaggctctgttgcccaggctagagtgcagtgacacaatctaggctcaccgtaacctctgccttctgggtttgcgcgattctcccgcctcagcctcccgagtagctgggactgcaggtgtgcgccaccatgcctggttaatttttgtatttttagtagagacgg

SEQ ID NO: 131885 - DNA, 1666 bp, Homo sapiens
tattggacattagtaacaggcttatagagaacctgccatgctggttctctgtgttgggtcccaggggtagggaggaaaaacagtctgcactggtgagaagctcctgctctcctctgtgtgcgtttgagaatgaattttcggtttgtagatgccctctttcctaaggaacatcttagtccttcaactatgctgaaatatttaatgattggatggcttagatttactgttaataaatcagcttgtggacatttttgaggcacttgttggtactgggtcatgtttgtaatctcgatactggtaacagctcagagatggagaggttattagcctagtttttcagttgtagaaaccaagattctgacagctaaagtgacttgcccatggtgacatgcttataataaaatgtcagagtgaagggtcaagctttgttcttttacaggtccattgttctttttaccatgtcctactgactctcagtaacactgagagtctaaagggctaagttactggccaacctgtgatggtataattagtgaatgatagaaggagaatcaaaaccctggcttttttatgtgcagtttgtttttcctctagcctgtgctgaattgaaagataaattatatagcatccattttcatacttcattcttcacatttctgccctaagataagtcctctgacctttttcaaaatgggttggattgcctgttttctggtgtcacataacacctggtgctcttacggtgtgatcctcatcacactgctttgtttggatctttgtctttcttggtaaagagtgagttcctcggaagacagggcctggtctttcctctgtatcttcagcacctagcatacgtctgagcacagggcccttgggaactcctgtcttcatttcagtgttacgtgttaattatcattaagggtagcagaatcagaaagtatatttggaatttagcagtcagtaaagagctttgcttcttacagctttagaggacctgaattggaggtggggatgaagtcaacagttctgcccatatcaatgaaagaaggttctgagtgaaatgcagggttgaacaagcagaaaagcatcccagtgctctttaaatgtggttgcacagtagggatccttctctaggagataatgagaagatgttgtcagatctgctttgaatcagatgtttatttacttttattctttcttaaggaatttatgaaatcactgcactctcatcaatttgctctccttctctaaactcctaatgatatttctcatgacagattaaaaacagaattttggaagccctagtcacatgccaaataaggtttcttacctgagagagttatccgcagtttcagatgccaaagggaaactccgaaagccagaggagcgattgaaaccgcaaattgagtgccaacagcaactttgatatcaaaagccccatttgcctgttgtcaccagtcccgctgagtgaagatagaatgacttatatcttctaccaaaacaatagaaggagagtgttccttggcgttggggatgatgattataaaagccaccaatttgaggctcttccgtgccagctgctttctgtgcattctctcccatccccgcaagatcttgcaaggtaggaggttttattccctgcgtgcctcctttatttttttcaaat

SEQ ID NO: 131886 - DNA, 1025 bp, Homo sapiens
aaaggacagaactcaacattgttgtttttaaataaatgtttcattatagcagaagcctcttaggaatttccattggtgatgaatttttaaaaggggttactgaaaatgtgttttaccaaaaaggcaagctcacttttttttctcctgtgctctccggcagtcttcagtaggcattcaaagtaaggatttttaaatatgtatatatttcagtgaccaaaaagaaaatagaaaaatattccatatagaaagccagtgaaattcttgctgaagttctgtctcttgagggagcctcctagaggtgcagtgctctttgtattttaatactttgcttatcacaaaaacagtcgagagtatgatatcagggatttatagtcagtttatggtatatttgtgaattcttcattctctaaaaataggttcacaaaagaaaaaaaagtattcccacagataatgcttttggctttctggaaggggggaatatgtttaaatatacttgccctgcagttgctaatgatagtagctaccatttatcaagagccttttctggtttacgtgctttatgtatgttatttcattgaattagtttaacagtcttaaaagagtaagtcattttaccttattttatagatgagaaaaccgaggtcaggaaggtcacataatttgcctaagaacacatagctagtaactggtgaatcaggattcagatctttgtctgcccaacactatgacactatgtagggcacctgttagcatcagatagaggtggaagctttgagtatgtcttgtttttcatgttttacttttgtggggaatttggattatgcagctcttcaaattacatgcctagtattggactgggtgagcagggcagttgcgtaccatacagagggcacacaggggcatggcaaaacggcataggaactttctgaccagtggcaacatctggtaggtagcatttacttgggaaacagtgttaactcaacaaggaatgagctggtgcagaaagagccatgtgattacaggtg

SEQ ID NO: 131887 - DNA, 1037 bp, Homo sapiens
attattttagttttccaatccaggaaatattgaaggagaaattcagtctttaggaagcttctttcattaatatcatgcacaaaattagcagcagctctgattgatttttattatgctattcaagacacagcacctgaagcttaaattaacaaatgaagcttccataaacagttttaagactgcatatcttaaaacatgtctggacacccagcagcctctttccacaagcacaagataccttactctgaattggtaagctgtaaatttccataattttttacatttccataatttttcgtcaatcagcccctgctgctattttaagaattttaaaaggtgctcctagcatattattgatgttcttcgttgatatgataaagggcaagagtatgtgagggcacccttttaaatgtctgttttcgatatatatcttacacttggggtcactgttgattcgtgctcccatgggagaaaatatagaaattatgatgaagataaggggcagttttcattttcaacatttttccttgttctttctctgcttcaatgtttgtgccgtttgtgctctgcttttcttccactagatggcgctccacatagctaggttaccttctttctttcgcattggtagctatttctgaactgagtcttgatcaataaacgtgcattgcttttgattttcatgcattggtatttttcatattattgatctcttaagaggcatacttgctaatcaatatttgcagaaagccatgcctttttttgtagccaccattgctcaagcgcctgaggtatgcctggcactgtagctaggttcttcacacatttcttcatttaatccatgactttcacgtgaatttagttttgttgttctcattttacaggtaagaagtggaggttagagggatttataacttgttcgaggtcacaaagctaacttatattatagggattagtgtgccctaaagaaaagtatactccaaaaacattaaattgaaagcttttgtcaaataacttgttaggatagtctgacttac

SEQ ID NO: 131888 - DNA, 1073 bp, Homo sapiens
ctgggattacaggtgcccgccagcacacccagctaatttttgtagttttagtagagacgaagtttcaccatgttggccagggtggtcttgaactcctgagctcaggtgatctgcttgcctcggcctctgaaagtgctgggattacaggcgtgagccaccccgcccagctgggttttgcttcttaaatgggcgaaggatgtgttgctacctgtggaaatagtaagcttgaatagcttcagtttcttcatctgtaaaatggtcatgagagaatctgtgtagcatgtctggtgtatctgtaagtactcaaaagttaattaggtgagtaggacaagttttcttgttttcctccttcatggagcccagcatggaatactaggcccagaattgatactcgttgtatactccttgaaatgttaacttagaagaatgtgcgtgaattcttgtctcacctgtcttaggtagggcaccatgttacttccaataaaaggtccatggcagaaagtagtcttttaggtttggagagtgaacattaaggcaaaagagtagcataatctattcaggcttcagacttttagaccctttcaggaaatcactatttatagacttctgggggaaacacccctaagactggttgggtgtctgtttctccacagtctttcctactggattggagaagttgctgttatttctccccttgttcagtaaggatcacatgcttaggctgggctaagtgctgggatgcagagcaagctaatactttatccctgcttaaagagtgttcagctcagtggggaagtggccaaattaaaagacatttatattgtggggtggaagggctgtaataaagacaagtgcacacggcactgtggtgctgcatggagctttgttattccgatctggtgagggagtgggcacttgtgtgtgactcctcacatagtggtagaaacgtcctgggctccagagtgtgatggaactaatgcaagttcacttctcagagtctctctgcttagtattaaaccatggcatctctgagctcgtagggctccctgtctggcttacagtgtgcagtgaat

SEQ ID NO: 131889 - DNA, 1057 bp, Homo sapiens
aatgcattgccctgactttgaagttgtggctgaggatgagatcactcagggagtgtgtggaatcaaaagggaaaggacaggggagggatccttgtggctctatcaccattgaaaggttggtcaaaggaaaagaatccctcagttcttcctttccttgcttacttagcatgactaaataaaaagtttactgaattctgtaaattacacctaaaactgtttatttgaaaagtttttttttttttttggtgatgcattttttaagtaggaatcttaaaactcattacttccagtgatgcttacctgcatgcttcttgagccataagctgatgagaatttggaggagagacctttggtacagagagctcagcaagtgtggtggagtagctggggtgtcacaggctcctccgtccggaaagcttcctggctcctcaaagcttctcttcattggtgaccacgtggcttccaaattgacttggacttggttcacactttccatttagacgacgcgctttgtggcttcccatccacaccagcacatgcatgctgaaactgctgctttcgttctgaatgtttttggttagtgttgctacttctggtagtggttggacttagatcttcatgtcctgaatatgaatcctgttgcttgatgagggtctaggtcatgcctcgggggtactctgaggatatgtgtggagtgcagagacaacattctagacagatatacactttttattattaacaaactttggccacaacctttgatgtataaattgccggatttccccagtcctttcattgtggctttggacaggagcaggctcacttgtctgcttcaggctgcctttctcttgggttgcacctcagttcttacttatttatttattttgagtggagcataggggcctcttccaaaatgggtagagctcaggggctttcttattgaaatggtcacatgataaaaacgggctgaaaaaggagagttccaggagaaaagcccagaaaagggcccctcctcagaagacagcctttaagcctcttgcttactgaaggaagcccc

SEQ ID NO: 131890 - DNA, 1053 bp, Homo sapiens
agactatataatggctataattaccttcaggagtttaaaatggaaaatcatgttttcctgtttagtgattttttcatatcattaattgaagaaagtatatcactcatcccagaaaatcactgcagctgctgatagacttagcccccaaaacatggatttcaagaggagatgaaagtttagctcagaggtcagaggtcagtgagagaaaattcagttcattgtgaggtgtcataagccaggatttggtagtttggttcttttttttttttgtaactaaagtggttagaagtaatagagtggagcacgtactgtgcttcatattgtgtctcttaaagttttttgtttccaaagaatagaaactgactttggccaaacaacaaaacaaatttatcagaaggatttgaggaactcctagggctgatggaagacaatggaagtagttttttaaatgcgagaacagaggctactctgaagaggaattatctggaaaggaagcagaagttcaccttactctcttcagggaaggcagttagctcttaactatgggccttggctgggctgggtgggaagaggcagggagctctgaagatacttcctagaagaaatgaaaaataaagctcagaaaacttgtggtttagttaaggtcactcaactagtttatgacaaaaaccaaaagagatctcacatctgctgatggtttaagattcttttatgtattcatttcttcatctggtacttgccacactccaggtgctctgctgagggctggcatttagccacgagtaagacagatctaaacaatttatggtaaatgctacaaagtagtatagggtgaatgcttttgaaagatgagtaaaatgattaactaggaattagtggaaccttatattaagtatatcgtgcttgaattaaatattctcactaaaggatgtggtgaccattgttttagccaaaaaacatggaccttttatcagatacagattcagtacctacttgttctacttaacttgatagggaaaaaaatgaccctcctgcatttgtttccttcctttg

SEQ ID NO: 131891 - DNA, 1001 bp, Homo sapiens
ggtgacagaggagcactatattgaagcacagaaggcatttggggaattacaagccatttaatttgactagacagatttttatagaagacataaatgaagttgtaagggagcagaatgtgggtggcattggccaaaggtcctgcaaagttaaagtagagaatgacatttgaactgttttagacgatgaggcttctccaggtgcttaatgatggcaaactatttcaggagagggaatgccacatgcatagtcatgctggagtgaaagaatgcttagggaccattttaaaaagtgagttgtaatatgacattaaatacgttatatctctatgtataatgctctgttttaagtgtctgtgctataatattaagtgaaaaaagaaaagtcaagatacagaaaatccagaatccaagttggggaattatttgaaaaagcgaaccagaatcttaatagcagttgttttctggagtataggttttcgtgatatttttctactttacacgtttctgtacatgaatgttttaataacttagtgtaacctttattaatataaaaacattttccattttttgggcaaaatgtgcctgaggtttttactcaggaggtatttttgtactgtgattgtgattctcaaggtttagtgtgctatgttaagtctataagtttaaattaggtttattaaatttattaatttgataattgtccttttagcctctaagcattctcatctgtgtacatactatctgcagtaactttgtcttaaccagcaaaagtttcttctgttaaaagtttttctagaatctgaatgttgggaatgtgatatatttgttctcttcatataaatggttaggtcaaggatctttgagagataaaacatgtctgttcctggtgtttcagggaaactttcttttttgaagtgggcttgcattttttccttgtagtatgtcatagacaatttaaaaccctttaaattactacttggtagaagcctattccatggaaa

SEQ ID NO: 131892 - DNA, 1051 bp, Homo sapiens
tgagggaattgtttcctttaaataaaagtgtgcgtgcttagtgatgggattcccagtattctggcagctgggcttacacctcctcttaagagattgaggagtttctcttcagggaagtgcctcgcccaagtgaaacgaaatacagatactgatatttcagtagctcttgataaaataactcagctgccatatttgcaatgaagactgctgttgccaagtcccatgtatgaaaacagaacttccagtcagcaatccggaatttttaagaacagatagtagaggattaccagacatctgaggaaatcccataaaagagaaagagaccagctcacaaaatggggaaggggagactcttggaagaagcagatactttaaactccaaggcggggacaggctgctgtcatcaatatcttcagaaaggatgagaaatttaattgtttccacaaagtgtaacaaaacaccataaagaagaaacagctgtaagacagtcgtattcgtaaatatttgatagcaaaaatgaaggaatcagtaggtatataggaaatgtatttaaattctccagaaagtaaaacagagagacacaaacaataaaagagaaatttagagatagcagtccatctcaggatgtccaatgtccaaataataggattttcagaaagataataaaagtaaatggggagctagaatcaggtgggattgtatgggtcagtacccagtcccattcttgctccccatttactccactttttcactctgtagtagtattagactttgtaaactctgcaagtataacttttatgtttaaaaatattttactgaaaatggcattttaacaagcaaaaaataattacatgcaaagattaaaaatatatatttgagttttggttgaagaccaataaaattaaaagttggaaggaaaaaataccacttagattttttaaagtgctaagtacttatttcaggaaaattacttcaattgccatagttaggtaaattgaggaacaattttctctcagaaacagcagcacagcagtggcatggatcacggaag

SEQ ID NO: 131893 - DNA, 1042 bp, Homo sapiens
tggcacagagaccgtggaacttccctgaactcatggagagtgagtgctagagctggcatgtgaacccaggcagtctaagcactctgctatactacctctctatgtaactgttgttattatgagtttaagtattatatccagaaactattatagtcttttctgagaacgtctccagtcaataaaatcccaacaaataatctgaataaaattatgcatgccattttgataccttatttgtgcaataaaaagttgttaaaggctcatttaatttagattgtttagagtcctaaaatgtgtcagaagcacagacttgaggacagagctctaagttacttgttgcaggttgacttgtaatggagaatgtcggtgcctgaattccccagaatcgattcatacctcattgttagactcacagctttagaaactgaaataatattcagacatgttgtggatcatatttttcccttgtatttgtcatcatgaagggatatgttccttttggaaggtaatttatgagtgtgcattgagagccttaaaaatatttgtgacttaggagccaatatttttgcaataagtgcctgaacttacaatataacagtgagtgtctgacagtgcgaatatatttaagagccctttaattgaaaagagtaagcaatttctggaggagttctgggaaggaggaggttaggtgataaattcagtttctcaacctgttggatagatagtaatataattaatttaagtggcagtgagatttaggaagaagttaataggttcatttgggatgtgttgaatttaggttgtccacagaattgtaacaattacattaataattgatataaaaatggtttacatactaataagtcattatatcaatggtaactatatttctctcctagtttttcttagtagttacaaaatgtattatggttagatttttaccccaattttagtaagtaactgagttgtagttttattttttgtattctctttcattgatgtcttaaagtatgtgtacccagtgttttgacatggttaatct

SEQ ID NO: 131894 - DNA, 1050 bp, Homo sapiens
tagtgaaaaacaggtggtgttgaaaaaaaatctacacttggcattcggagtaactagacttctattctgattccatgtattctagccatgtgacttagacaatgtctaaactttatgcctctgattagctgctttcttattactaagccagaatgaatgctgttgttctgcttggaatgatttttttcttcatctttgtctggcttttctgttgtcaattgaagcatttcttttttcaggaatcttctcatgtcccccaaaactggttcaggtatcccacctctgagttcctacagaactctgggtttctcggtatcatcatgttccattccccggttgacacttgtctcacttgtacactagactcaacatggtttatcacaaagaccaaatcttgttggctgctgcattccaaggcccagcatatagtgggtgctctgtaaatatctgctgaacagatgtcgaatgaaaaagatggtctctgaacctcctaatttcatactaagattattccacaaaacacagtagaagtggtgagagcttgttttcttaaatggcagaaaaatgttgtttttaaacctaaatttatgaaatagacataagagctttattgcaactttattttaaagacgaaagataaattgcatagaatacatggcttataataggtatttgataagtgatatctattattagtgtgatattaaattttatttgcatgtctttgtgtctcatgtgactgtgacctcattgtctccacatgcccatcatctagcatcagatagtagtagttgcaatagggtcatttctaaatcagtcttgccagaaacttccagggcacatgcttccttattgcttcctctgagtaatctgtcttcctgagttttcttacacagaaggttgtactcaagctttgtggagaataaaataagagaaaaaggattctgagtgtctcatgagagattaaggttaaacacaaagcaagaactttctggcagacctgttcgagggtattactgtgacaggttattcaggtttcatccctagaag

SEQ ID NO: 131895 - DNA, 1044 bp, Homo sapiens
tgatcaccagccagttttttaaataacagagttttgtttcgtatgacacatcaaaataggttctttggggttaggtaatacaatttaaaatatatctgaaagttcagtctcttatcaggtgacaagaatgcaaggactctgccagggtggacccctaggaactcataggttaatatttgaggttttatgtaaaacaaggcattgccatgctgaaatcactccatgaatatcataatggatagtagtgtaatcatcattaaaccagttaatcatttgtctgtctttattgaacacaaatattttatgtccttaattttaacgattctgttttgcattgttttccataaacgtccttatttctattaagtgtccacttgcctgaatcctctaaaccctgccattcccaacagagcatatggttattattaatttcttgatatatacaaatatatttcattttcctctctttcaggaactttccttctatttatgcactgcttaagaaccgtcaactcaccaacgtgcctagtcagcaaatgaatccacttgggaacttgaaaaacatcttaattaatttttgtttgcataattttgtgttctgtgacatgtttttattatatggtatgcttttaatttggagaacctacttttttaaaaaacggaaagaaaatctatcttattttgttgactcccaataacaaaaagagaatgatttgtatagtagttaataaaggctgcctattgaaatctcttctactttaaacctagaaaaacaaagtcttgttatttcagcacagctctaaattgtatacacttgaaaaccatgtacagctgcaactcactgcaagaagtcaagattctacacatattccacatttgaaaatgatttatccatctcagttatggactaataaatatgaaagtattatgcaaaaagtattctgtcacataaaaggttaattataaaggcttctgcgggaagcagagtggcactgtcagaatagaaacatgattttcatgcctcagtgtaatttgttatggaac

SEQ ID NO: 131896 - DNA, 1023 bp, Homo sapiens
caacatctgcagacctggcagctcctgtcctgttccccttgtaggtgaggaaactagagcataggaactcatcactttcctaagttaacagttaataggtgttgaaaccagaacttaaatccaggcctctgacacccacgtccacactgttaactatgcttgaaggcaaaggtcttatctcggtcccctttaggctcctcctcccacatccagaaggatgatgtgcaaaatgtaggtacttggcaaattattggtgaattgataaattaatttatgggtgatttgggatctaaattgaaatgtgggtgcatgcgcaaatctggggtatagttaggatgagggtctgatgtggtttgaagaaagcatggtagatttggacaatgctcacatggggagggccatagtgttataatcacatttagagccatggtcaaggttggtccgggagtggtcgtccttgaaaggtatataatctgagttggtggctgtggtccctgaatattgggctgagtgggatgatgggctgcctgggtagactatagcatggcccatggaggccaggtggcaggagaagcctgcagtcaggattctagaagaagcatgattcattttgtaccctagccctctccttcctggcactgacctccttgatcttatttttctctctttctagggggatcgaggagctcctgggatccctggttctcctggcagccgtggtgacccaggcattggggttgctggccctcctgtaagtctttatttatccagctcttacttgctttcaggacatacagccatttcctgttggacctgcctgcagaaacactcttttctttctttctttcttcctttctttctttctttctttctttctttctttctttctttctttttctttctttttttttttgagatggagtctcgcagtgttgcccaggctggagtgcagtggtgcaatctcagctcactgcaacctccgcctcccaggttcaagtgattctcctgcctcagcctcccgag

SEQ ID NO: 131897 - DNA, 1005 bp, Homo sapiens
cgtgacagcatgctccaaggaagatgcttgtgatagtttaacccacaaaagtaaaccagtggcccccacttttcccaagaaacaactgatgacagaaatcccctatccttcccattgaacaatcctttctctcatgaaatattcccaaaccacttgtctgcccctttgtatccagccaaggatggacaggtatcctggaatgagcatgtctcccgccttccaaaaatcacccctaaatacaacacttgccagtctgagactgtctcagtgtttcctcttttaaccctagaaataaggttgattctccaactaacatcttcgaaccctctgctgaaatgaaagcaatggcagcctggtctccatcacaagtttaagaatgaacagcccttgttcattttgtcttggacccagttttaccctagatgaggctctgagaagcagcagtccctctccctgcatgggctctgggctctgggctctgagccacagcaggtccttccatgcccttgaaaagggtctggtaggccagggcctcatggagaatcatcaacaagggcatgagtaagccttcaagaaaacccactgtaaaggaacttgcttcacttggtttaactctgcacttttttccacatagttgtttgatcaaagaatccccatttcctttggaaatgctctgggaagcacctgggaggattttaatacttaaaacaacttttcacagtggccgtgtgtgatggttaataccctcaacttgattggactgaaggatacaaagtattgatcctgggtgtgtctgagggtgttgccaaaggagattaacttttgagtcagtgggctgggaaaggcagacccacccttaatctaggtgggcaccatctaatcagctgccagcacagctagaatataagcaggcagaaaaatgtggaaggagagactggcccagcctcttagcctccatctttctcccatgctggatgctccctgccctggaacactgaactccag

SEQ ID NO: 131898 - DNA, 1042 bp, Homo sapiens
tttattcctgagaaaggagcccatcccatcaagacatccctgcctctgcgttcagctgcagggttgcccaacccaccagagccagaagacagactggtcattcgagggcgtgccatcgtaagtgggtgaccaacatctcaggcgagtcacccccagcggcctgattctggagggaggcactatctagcgcatgccctcagaggaagtcctcatccttttgtgatgctgcctgctataggaaaatctatcattgattcctagggttgtagggatgtgtctcatggactggtgtccctggaaatggacatcatcatttgcccaggttagtgcaagaggcaggtaggggttggagcatggaccttggagacacaggctgtgttgggagctgagcccactttattgctcaccaccgtctcctggctccacgcagagcttctccgcctctgaggcagtcaaatgagtgttcctttcagtatccccaggggagcagggctggtggaggctgaagaggaagggcagaatccctggagagggagagctaaggctggatgctaaagtgtgaactaccccaacctgcctcactctgccatgtagactccctggtagccatgagaaagtcatgcacctgccctgtgccccagtgtgcccgaaggtagggtgaggatagcaacgcttagcttatagggctgccccacaaccagggaactgatgtgagttcggacactattaagtgttgtgaagatgttcggaagcacactctagggcctggagtctggctcttctataagcactgtaactttgggcagattaaatctaatctaatcagctgattagattagagctaatcagctgtctgtgactttgtttcataaacactgaaatggagatgatgattctgtctctttcatagaactgttgtggggaggcgttgaatgcagtgatggatgtaaagtgctcagtgcctggcgccttgtaataatagataaactatcctcagcaacatctgtactatcacattaatacactatgattaatattactc

SEQ ID NO: 131899 - DNA, 1046 bp, Homo sapiens
ttcacctctctgagcctcggtttccttgtctgtaatctgaaatgatagttcccaatctggcagatagttaccaagttgtggtttttactgtggttcttgttatcatacttaatatttttatggcaaatctatataaaaaagaacatgccacaaatcaaagtgcttggcagtaacgtgactgtatctgagcaccacgtcacagagagggagttgagcagagtcgagaagttcatctgtcttgagttctgcatggggaactggtccattccagcagggaagaccctccctgatcgaattcaaaggacagcaaactacagcccaaaggccagatcactggccagaaaccaattttacaaattgtgttactggaccacaaccatgtcaacttgttaacgtattgtcgatggctgctctcacactgggatagcaggttgagtctttaagacagagacgcatgatccaaaggctatttactatcgggccctttacaggagtttgccaacatcggataatatactctgaggtgatgactgagaatctggagttgctgccaccagctcccaaggtgcccttggataggacattttgtgggggcctcagtttcctccctggagtgctgagtggtgtggctcctcttagagggtctctcttctcttcccttccatgtattggtcaaaatgcatgaccagcggcccactctgtgtgacatctaatgaaagatattcccctgcctcccatttttagaggttagccatgtattcttaaaaaaccattacaccctcctaggttttggacatgaatccatgtcccagtggaactagaaggggtttgaggttcaatatgaatcagcgctgcctggccatggggccttgtaccagccacatcactctgtccctggtgccatcccgagtaaagtggagactgcagcatataggtgtgatgatctcattgactagggtcatgccatgcacaaggcttcagctcatggagactctgcatttcacatgggggtttttgttttgagttgagaaagagatgaaatatag

SEQ ID NO: 131900 - DNA, 1002 bp, Homo sapiens
actgtaatttacacaggactctgggccctgcagacattttacctgtttccttcaaccacctaagaagcccacggtagcctcaccccaccaccttccacattttctcctcccctgctcctctcagcccactctgagtgaggcagacatggcttgtgcattgggcctgcaaccctggacacatgcacggcagaaactcatgctcagcaccaccctagacagaggaaacccgcctctctagggtgcagtcaggcaggtctcttgaaaagtccactgtggtttgaaatctctgctgtacactgaacctgagcccacaggtggcggctgttcttctcccacagatgcagcatttcagtgaatgtttcctgggtgccaggagtgtctgccagctgcctacccccacccagcctgcagatcagagttgaaagcaaccgtgcatgctgggcccatctgacctgctggtcctcatgtcctgaaggtctggtctccatctggccccatctcctggctccctaactcctgagtccatcctgcctctgcccgtggccgtgttctgggtccatagcttgcccaaagtttgggtcctgaccctctctggtggcccctgacttgcctggtccctgattgcatgttgtgttgtgctgtgcttgagggaagagacttccagcttcagccctggcctgctgtctggccccaggctccaaaatgtgagaaactcctgaaatatggaggtcaagggcttggagttctggagggttctcatggcttatggacgttgcaagcaaagaggactgcacagaagggccattccaaacagctgtcccaggctggtggggcgaagctgggctgtctgcacagggagcagtgagcgccggcagcatggccggttgggggtagatcgggagaacgcacgtgagaaccgcagcaagatgctacttcacctccaccaggatgggtgaaccagagccaggcaaccacagtgccatagaaggcgtggagcagtca

SEQ ID NO: 131901 - DNA, 1074 bp, Homo sapiens
ctaagcgtgagaactgtgggcagtgcaggtgatgtagaaggtcctctctgcactcagcccaccaggccccaagagaccaggcctcaagaatgagacaggcctggccagtggcgtcagaagtgaatgatgcctgggctggggggactccctctagatggcactgacaggcactgccagagcagccactgggcccactgcacagcccacttccagggcccctgcgacatgccatcctaatacccacgccccctggctcctccggcgacacgctgtccccatacccaaaccctggctcctcctgtgatctgctgtcctcatccccaaaccctggctcctcctgcgacctgctgtcctcatccccaaaccctggctcctcctgcgacctgctgtcctcatccccaaaccctggctcctcctgcgacctgctgtcctcatcccccaacgctggctcctcctgcgacctgctgtcctcatccccaatccctggctcctcctgcgacctgctgtcctcatccccaaaccctggctcctcctgcaacctgctgtccttataccccatccctggctcctcctgcgacatgctgtcctcatccccaaccctggctcctcctgcaccctgctgtcctcatccctaaaccctggctcctcctgcgacctgctgtcctcatcctcaaaccctggctcctcctgcgacatgctgtcctcatccccaaaccctggctcctcctgtgacctgctgtcctcatccccaaaccctggctcctcctgcgacctgctgtcctcatccccaaaccctggctcctcctgcgacatgctgtcctcatccccaaaccctggcttctcctgcgacctgctgtccttataccccaaccctggctcctcctgcgacctgctgtcctcatccccaaaccctggctcctcctgcgacctgctgtcctcatccccaatccctggctcctcctgcgacatgctgtcctcatccccaatccctggctcctcctgcgacatgctgtcctcatccccaaaccctggctcctcctgcgacctgctgtccttataccccaaccctggctc

SEQ ID NO: 131902 - DNA, 1025 bp, Homo sapiens
gccatgccccaggaccatgggccgcccgatggctggctgtgcctggagggtgctggcaccaggaagggccaggctgggatcctccgcagctcccgctctccctccccagcagccgccatccttgccctgcctgatagttaacagttttgacaggccaggctatttttagaaacctgttcccactccttttccctgtgggaaaaaggaaagcaagttaaattttaaaattaatccaccacccttcccctcctccaacatacactgacacacacattagccacccaggacctgaagctcagcagagtcctgggccacaggaggggctgccctgccaggcgccaagaggggcatgtgggtttttgatctgggaggcggtcctgtgggacttagggtgttgtcatcattgtccccagcagaaaccagtgcagtggggaagtggcttctgggctgaagcctggttggaattcgggttcctagttctgagtccatgccctttgtagtaccatggttggcagtggtggaggacgccacagggtcagatgcccgcggtggggttcctagtctcacttcccacaaccccgtgccttgcaaagctctttcatgcccccacccgatttggtcctgacagtagccctggaagacaggcccaatcaagattttcacccaggacacatctggaggcctggcgatgaaatcaaaattgctcaaagccacacccctgggagccgtcttcctgtggggtctggtgagcacccagtggtctctagacagaaacacacccaggtgctcattggcaggtagcaccgaccccggacagggacgttgaaaaacagtggtgttagcttgaacaataaatttaaagtgaaagttaatagtcgccagtttttaactattaacctaataaccatgtagaaagaaattctgtgtatatcagcgtccttagcttggttcatttacatttaagctttcggtgaggcctttttccatattaggctttgaaagcgtctgcagggtcggggcagaag

SEQ ID NO: 131903 - DNA, 1087 bp, Homo sapiens
gcaatataaatggccaagcagccacgaaaagatgccaagcattattcattagtcatttgggaaatgcaaatcaaaaccacaatgagatactgcttttcaccagctaggatggctagaatcaaaaagacggatagtaacaagtgttgctgaggatgtggagaaactggaaccctcccactgctggtgggaatgtaatagtgcagccactttggaagacagtctagcagttcctcacaaagttaaacataaagttaccgtatgacccagaacttctacttctggatatatacccaggagaatatatgttcacacaaaaacttgtacacaaaccttcatagcaccgttgttcataataaccaaagagtgaaaataacacaaatgctcatcagctgctgaatggataaacaaaatgtggcatagccataacatggaatattattcagctctgaaaaggaatgaagtgctgacacatgctataacatggatgaaccatgaaaacattatgctaagtgaaaaacgccaggcacagaaggccacatagtgtatgattccatttatttgaaatgtccagaattgacaaattcgtagacacatgcattcaaggagtggttgctggctggtggggatggggaggcgtctgatgcatcattggatcagggtctctgggcgggaaccaactacctaccaggtaaagtgaggtcagctcctccccctttgctggtgagcccagtatcactgagtgacctgcctaggccctcagatagggcagagcagggctctgcttaaatggactgagttatatgaatatgtttgtgaacagcgccgaagggaagcctcttaagcaaaatcacctcctcctcctcatccttctcctcctcctcctcctcttcctcctcctcttcctcctccttctcctcttcctcctccctcctcctcttcctcctcctcttcctcctccttctcctcttcctcctcctcttcttcctcttcctcctccttctcctcttcctcctcctcttcctcctcctcatcctcctcttcctccaccaaacccatttcatgctcttaccaagggtgcgagattctt

SEQ ID NO: 131904 - DNA, 1060 bp, Homo sapiens
cacgaatctgttggtctctactcagaagccttaacaagctcacgggtcccgtgcgcagtggtggctggaccgtcatggagcctcaccatgggtgctggtttgtagtcgagaaagcactttaaaaacattgattacattttttaagctgtaagagtaatctctgcttattttaactattgaaataatgcaaagcagtatagaaagtgttaatcttctctgccacctccattcccatccttcggagaagcccggtctggaccctggggtaggaccttttccacatttctccaggctcacattgatgcatatggagatgtattaacatacaggaaatgggtttgttttacagaagcggggtcctgctattcttagattcctctgagacccgcatgctgacattttgacctgtgccacagcatactctccaagtaccaggctgcagcatccacgtggccccagcctgggagagcagcccctgggcctcgcccttctcagcactgtgcacattcagggacttcatattttgccatttgccatccaccgaatgaaacacattgttgctgctttcacttgcttttcgctggctgctccagaggctgggctttgctcatgtgtttctttgatcatgtggatttctctccttagatgccctgttcacgttctctgcctcttctatagaattgtgtggctttttcttatccatttgtaggagattgtgacctggagtaggaaaagactgcctactgcagatacatttcctggtgctgcagatacatttcctggtctgttatatttcttttgactttgttttcatggcttttgccacataaaatttgttcatttttctgcaatccagtatatcttcttaggaatgtctatatatataaaacatatatatacacacatactctcttattatttttaaaatttaaaacatctggaattcatttgtgcatatacaataagatagatccttgttttgttttactttgttatgccaggaccagttgattttaaaaaccatcaatttttccttgaattagcatgccacctttgtaat

SEQ ID NO: 131905 - DNA, 1012 bp, Homo sapiens
ctctctccaagaccttctgtgccaagggtgggtgagagggcctggagggagcaggtgtgggcttgaacaccatcatgtggccgcgagaccccagctgttcacgttttattatcctgaggatgcccatcaggcctctctttgtggcagcgcagttgcctctgcaggccccagggatgttcagagctcagcgtcagccccatacctggaaagactggcacctctgctgcagggcttcccaggaacactgtccgtcagcagacaaggctttttataggtctctgtttccacctgggagagacccccgtgcatccctcttcctgggcatggcagctcctggagcacaggcccaagtccagggataaacaggggcatctgctggtctgggtgggtcactgtgaccctgccagagtctctgatggttgcaggagacatctgaagtccttggcgtggcatttcaagctctttgtggcatgttttcaggctcctcaaccacccacaccctgggcaccttggtctcttctctttcctgtgaacccactctgcattcgggcaccaagcctctgcttgcttgagccccttagcctggatgtcaactctcggtccccacctgcttcccccacttaaaatcacactctttctccacatcagaccgctgggcacctggtccagctcaagcactgccttcctgtgacaatcaaagctcctcccacctcgcgcctctggggtgactgggcactgggaagggtactggtccgaactgaatgtgtccccccaaaattatgtgttgcagccgtaacccccagtgtggttgtatgtggaaatgagacctctgagaaggcaactaagcttaaatgggggatgaggatggggcctgagtcaatcaaattactgtccctgtaggaagaggcgccagagagctgcacacacctgaggaaaggccatcttgagctcacagcagcaggttagcggactgccagccaggggagggccctcagcagacatccaccctcct

SEQ ID NO: 131906 - DNA, 1060 bp, Homo sapiens
cctaaaatgtataaaaccaagctgcaccccgaccacctcgggcacatgttctcaggacctcctgagggctgtgtcacgagccatggtcactcatacttggctcagaatcaatctctttaaagattttacagagtttgactctttgggtcaacaggtggctcacacacggggcagctctgctgtgcggataccttcctccccctccctggaccaactgggttctcttgggaccccatggcttcaggctgagttgtttggggagggaaggggtggcctctgaccttaggtccctgccttttcctgtgacattcccttccctgccgtgtctccatagctttccttgccattcactcttactcattcttcccggcctaggtcaacggtggcctggtctcaaacataccttttgctttctcctctctctgctcccatcccaggggtggctctttctcactcccctttgatgatctgtgtctgtttcaccccctctatgaactcacaacacagagtgggtacaaagtaaatgcttgttgaatgagtggtctatagtaagccttcaacaaatacttgttttgtgaatgaatgaatcagagagaaacagtccgtctcctcaaggagtcctcaggcgtgttgaggagaaagtctgtcttctgccagaccagaacgcatggacatgggacctgattccttctgctgtgggagagccacctctgtctatagagatgcctgtggctcttgccctgagagcagccttctgaaatgctttcttcagaccccatggggacagccttagttgtgatgatggcttcttttgctgggcctccttgagtttttcctctgccgccacctaatcacagcaaaatcaagagaatgtagaccgctggcttgaaccggtgctaatgagtgcagatgtgaatcaagcccaggtctctgtgggattcttagttccaaagtttcacgtgagcttccgggcaatgttcagacatggttcctgcggagctcatggcgtcacccttggacctggtgatatttattctcctcatcttaggatgctttcgac

SEQ ID NO: 131907 - DNA, 1030 bp, Homo sapiens
cctgtaatcccagcactttgggaggccgaggcgggaggatcacgaggtcaggagatcgagaccatcctggctaacacggtgaaaactcatctctactaaaaaatacaaaaaattagctgggcatggtggtgggcgcctgtagtcccagctactcgggaggctgaggcaggagaatggcgtgaacccgggaggcggagcttgcagtgagctgagatcgcgccactgcactccagccctggtgacagagtgagactccgtctcaaaaaaaaaataaagatagactgtttcaaaggacccactgactgtgtggttttctatctgatttcggcatagggacggctgagttgacacacaggtggggcagctttgtcaggttcccaaagacctgccaggaagccatgggtggagagaggctgctgctttattgtttcaatgcaggaatgtatttcttatccctaattgtcaatttcatatcattacagacattctcctattcatatttcaatggttgtggcattttcagtattaagccagacacccaaaagatttttctggctgagttgatctcccacaaggagaactctgttttcaaatccccgaagactcagggccactgaggaggtgtctctgtgcatctggtaatgcatttcacctgtcggcgtcctgagccacagcgggcaccagagcgtgtgtggagccctggtggcagctgctcagcgatggctttgtcaagcgctggccagagaaggcttcattacccatgtttaacgcgattagaaaccgtggcggcagcggtaataatacgtgacatttgcgtccgcatttccgcttcacactgcgccttccaagtgttttcattcactgccctgccgtctgccaggagcacttccagaaccgcctcattctaattctcttcccttcctctccttgctgcctccagtgtggacgacgctggtctctctgttggcttacattgatcctccctctctcctggccccactggccccagcaccggccctgccacctcggc

SEQ ID NO: 131908 - DNA, 1039 bp, Homo sapiens
cagagtagacgtgccccatgagctgtcacattcgcgagcacttctgtatgcaatgcgcttagaaaaacaaaagctcagctggaatgccagccgttgctgggtggatgctgcccccagcgtggtgcaggtggtcggagactggcaggaccacctccactagagctctggtgtgctgagctcatcctggatcagacgctgggccacctactgcatgtatgagtttgctctcattttttttccattgtgggaagaacatgtaaccttgagatggtttttaacaaatttttttgagtgcaatacaatattgctaaccacaggcacaatgtcttatggcagatctctaaacttactcaccttgtataactgaaaacttgatacctatggaacacaactgtccgtttcccctctcccagtccccagaaaccaccatgtgacttcctgcatctatgagtttgaccacatcccttaactaagcagaatcgtgcagtgtttgtccttctgtgactgctttatttcctttagcataatgtcctcaagcctcatccatgttgtagcatgtggcagggtttcttcttttgaaagattgaataacatttcattgtatttatcgaccacattttgcttatccattcatctgtccgtgaacactgaggttgtttctacctcttggatattgtgaataatactgcagtaaatgtggaagtgtacatatctctctgagatcctgatttcaattcttttggataaatacccataaacagaattgctggatcatttagtagttctatttctgattttttgaggaaacttcatactgttttccatagcagctgtacctttttccattcccaccatcagtgtccaaggactccaatttctccacatcctcactaatacttgtcattttgattttgataatagtcatcctaacaggtgtgaggtaatgtatcgtcatgtttttgatttgcatttccctaattacttacgaggctgagcatcttttcatatgtttgttgacatttctatgtcttctttggag

SEQ ID NO: 131909 - DNA, 1023 bp, Homo sapiens
tggtcttaaactcctgtgcttaagccatccttctgcctcagcctcccaaagtgctgggattacagatgtgaactattgtacccagctgattttgtggttatgttttctatacattatataaatgttatttacattttatgtttatgtcagatgtaattacatctatgtcaactacaaattttaactggcgcatgatagttgcttgcatggatgaactcatagcagcttggatgtggccttggtgagggctgtgtgacagtaggcgccgatgccaaggccagccttggggtgccacggccgatcttcgtgatcgtattcagacctcacagtgagtggcctaggaatcgggtgttgtcatctctgagtttcagatgggcacccagaggggatgggccccatggcctgagggacacagcgtggaatgcggatggacacacgttggctcgggaggcctggcgctctcctctgcactcttcctttgacctcactttctttgatgtttgatcctagctagatcctggctttttcagaaagaacagtgtctgtggactttttactttgtgaagcaaggatgcacgagttgtaaagcaaggatgcagctctcacggtggtgtcactggagagtgtcaccgaaggcccactgacgagcaagggccacacacacagcagccaggggagggcagctcttttcgaggctctccggggtgccattttggcagtgatgtcatcaagtggacatttataggccatgctgtgttccacacatgcaaatcagaaactctcttccttatgtagactcgtcacagtgctgctatgtatatatacagtgcttaagagtggttggacagcttgcgtctctccatctccccacctgtaaaatggggatcgtgatagcacctcctctcaggactggcctgaggtttacaagaatcatgtgcaaagcctgcaggaaagcaagggcttcctgttagctgttattattagcactgctcttctcgttatcgttgcattagaagtgggcta

SEQ ID NO: 131910 - DNA, 1099 bp, Homo sapiens
ttcctgaaatgctcctccctggttatctatgaggctgaagtcctcacctctttcaggtctttgctgaattagaaccttctccataaggcaaggctgatgctgagcaccccactgaaaattttcctctctcccaagaccctcttctcagtccctctacttggctcatttcaggtgtctagcacgtcacgccctttaatacattttgcaagtatttctccacgagtgtgagaaagtggttttctttggtgggggttgatttttcatggcacataaagggcagcagggtttctttgggtcctgtctggaggcctgaaggtcacgctgggcttctggggagcgggtccccttcctgcagcctccctctccacttgcgtgtttctcactcctctctctccctgggaagtgttgcttgataaagatgcagcttttaattaatgtaactgttcaagattacagccggtcatcagctttctaaccagtgcctcacagctctgctggaagagccttgctccggtgatggttgatttgccattctctgtcccagcccagagaagctcccctcactgtcaacgtgccatctgtcaggtgcatgttataaagctgtcatcatgatcagctcattcacgcaccagctttagctttgaggaactgccggccatggcgttgaagacctgctgaagcctccagccagacatctgatgttcaggtctcagggggtccttgctgcttgtgtagcctgacaggtgtggccacggcaggcacaccatggtttggagtttggaaagaagagaccctgtgttattgtagagtgaccactggattgggcttctggaaatccaattctaatcagacttgggttatgcatttactatttcaataaaacatttatggatggactctggtaatcaacagccatatttttgagtacccactgcaggtgaggaaataaatgtactaggtgcgatatacatcctcatgtgctgtgctcttgatacaaagccagtcgggtaggactattggtcctgttttgtagatgagggaacttagacccagaaaatgaaggaagctgcccagagttacatgctgggaaatggtggag

SEQ ID NO: 131911 - DNA, 1033 bp, Homo sapiens
taatgacgaacccaccggctctgacctgcagtttcttctgtaaagatggggacagttcatagatctcttgagaggatgaaaaatcatgcatctccagcgtccagcctggtgcctgacatgaaatggaggcttactggtcgggagctctgacattatctggaattctccattactcttctcacacctgtccaccatcgtctggaattctccattactctcctcgcacctgtcccaccatcgtctggaattctccattactctcctcacacctgtcccaccatcgtctggaattctccattcctctcctcgcacctgtcccaccatcgtctggaattcttcattactctcctcgcacctgtcccaccatcatctggaattctccattactctcctcgcacctgtcccaccatcgtctggaattctccattactctcctcccacctgtcccaccatcgtctggaattctccattactctccttgcacctgtcgcaccatcgtctggaattctccattactctcctcgtgcccaaggcaaggcgagccaaagcttcccgttgacatgtcagtattattattcctcctctgtttatgaaagtggccaagttgatgaaggagaagggctacccaaagatgttcttttctggagaaagctgtgaatattttatgaaacataccaccaagtcctgccatggcgcctgcgcctgagcctcctgcaggagtcaccttattaaaatgtccctgttgatggagtgtgctggcgcatacagggagagcttgcctcttttcagaatcactcaaaagccataaatattttaaggagttttatctgcccactgttttctgtatgttaatctatcacaccgatcactttttcaggacaaagtatcttgccttgttcttaacagcgagtcgcaaatcctgctgtcagtgtctttcctttctgctttacctccattttgaaggaaagttctatgttgtcctcatacacacattgggactcttttaatgaatgcatgactctcatccctgaga

SEQ ID NO: 131912 - DNA, 1046 bp, Homo sapiens
catggatggcttgcttacgccagagctggagctggtttccatgaaaacttgtgtgtgtgtgtttgtgtatttttctttttttctttgctccaaagtaaatgaaaccacacttgggctgtctcaccaccgagcataattgtgatggaactgttctatggtgatctgaattaggctgcaactaaagagccacaggaaagtaagataaacatttgttgcctttggtattgataaaaacaaattaacacaattgtaaattctaacttttgtatatgccattgtctgtgctgtctttgtttttggctgaaaagccaatttagctcttcaccatgaatcattttagtaaggcaagtagatgctatctctgttggtttataactcaccctgcaaaagccaccacactgcttacactttcttaatacaggtgaatttatgctttagaatttatgacttcaggttaatctagtaaactcactttagctcttatattcttggggactcatttttggcaagaaagaagctggtagagcaacacaaatttgtaaactgagacttttagtgtcatggttttagtctcatgctagtttctgtataggagcaatgcttttggatatggtagctatttcctgtgatgggaatgcctttgcaatcaagaacgtatctcctttaatgtttgttgataaaatgaaattatttctggaatatgtatttttgttatcagtgaaatctgtggtttataaaaaaccctgcatccttaacatgattctaaatcaaggaggccaagagatacttgtttctttagctccgtggatatttcctgagggcctgctccatgccaggtaccaaccttactgctgggatagggtcatggatgaagcatggccactgtcctcaagatgcttagcatctgattgaagagagctgtatgataatgcgttttatagggtatgatgtatgattaaaatcaccaaaaataaatttaattctgtttcttcctactctaacatagttggttgtgtatgttcatgattctgttcattcatccattc

SEQ ID NO: 131913 - DNA, 1067 bp, Homo sapiens
cacaatgtttgtattaccgtggctttgtagatacttttgaaatcaggacatgtgagtcctctaactttgttctttttttcaatattgtttttgctatttggggtccttttgcaattctgtgagaaattgagggtcattttttccatttctgaaaaaataagctgttggaattttgaaagggattgagttgaatctttgttttgggtagtattggcatcttaacaataataaatctagtatccatgaacgtgggatgtctgccatttatttaggtcatccttttttttttcaagcaatgttttgtaatttgtagtgtacaagtcttttacctctttggttaaatttattcctaggtattattccatatactattttaaatggaattgctttctaaattttcttttcagattattcattgctggtgtgtagaaatacaacagatttttgtgtgctgaatttgtatcttgcaacttacctgaatttattagctctagtagctttcttgtgtgttctttgagattttctaatgtaggctcatgtcacctgtgaatacagagagttttacttcttcctttctaatttggatgccttttatttctttttgttgtttaattgctctgaggaagactctgattcgggattgaatagcagtggggaaagcaggcatgctgtcctgttcctgatcttaggggaagctttcagtctttctctgttgagtatgatgttagctgtgggtttttcatagataccctttatcatgttgaggagttcccttctgtttctgttttgctggttggatttttatgttttatcgtgaaaggatgttgaattttgtcaatatttttcctgcatcaggagagatgatcatgtggatcttttccattatattaatatggtacatcacattgatttttaaaaaatgttgaactatccttacgttctaggaataaatcccccttggtcatggtacatagtccttttagtttactgttcagtttggcttcctagtattttattgagggttttgcatcggtatccatcaggaagactggtagctttcctctttt

SEQ ID NO: 131914 - DNA, 1172 bp, Homo sapiens
agtgtggatgcgccagataagggcggatgctggtcccaggagggagagagcagggcggtgagagattcatcatgctactcagaaggcactcaatccaaaacttacaaattgtttatttccgctattctccacttaatatttttgaaccacggttgaccacgggcagctgaaaccatgggaagtgaacaggggaaaagggaggacaactatagtctaataagtagacttacgaattccccatgcttttaatgaactctcccatgaggaatgccatgttagaaatgtggttggttctcctgcccacaagttgcttatagttaagtatgttagcatgaagaacaaaataattattataaaaagacagtagaagtgctctgtagaaatgttgaaaagctgccatttggacatctcctcgggattaactatgattagtattgcgagggaaagtagtagagaagtgactggctgaggggaaaactgaccgtgcagcccattggggtggtgattgtagcagaaataaatctctggagggatctagtggaagttgagcctggaaagataacatggcgcttgaccactgaaggccaagagcaccttactgaggaatgactacttactgaggagtcactgcaggtttcggagggaagaactgacttggtccaactttgctttacgaagatagctatgtgggtaatgtggcaagatctgggaggcagaaaggcagtgggacatgagggatttatgggtggaattctgaagtgcatacaattgttctctctaaatcactgtatgggaggatgctttgttgaattgtttcattcgctgattgatgtatagaagagacacttcgatgctcttgttcaatgccagataacaccaagcatactggggaaagcaaggtattaaatatccaggccaaaacaaaaacaaaaaaacccaccgaaaaacccaccaccacacaacaccagtaggaaaacagaagtttcttgctctttagaacttctcacttaatcggaggacatgcatctctggaatgaatagcctatctgaacaagttaaatgtaatttataaacatgcgaaggagtggtttaaggaagccaaagggctgccactgggagctgggatgtctgaattctaagacaaaggagagagccgctcctgattcaatgag

SEQ ID NO: 131915 - DNA, 1116 bp, Homo sapiens
atctatcttagagattcatggcattagggttgacccagaggagagatccagacatcgaaagaggttcttgccaatggcagcacttaggctttcctggatttcctgcattggttcacgctaacgtgtgcgttctaagaaggcagaaatagtctaagaaaaccaggaaaaggcaggaacaacaaagtgggtatttggctgttcaatgttgtagggtagagtaaaatatgaaactggaaaatgagaggaggcaataatgtagaaagaaaagaagatgctgctacttttagtggcaaaaactgcagttacttttgcaccaagccaatagtttgaatagaaatgttgacagaaggaaatgaatctttattgagtgcgtgggtaacaggtactttcacatactttttcacatttagttattaaaatcatattggaaaataagtgctcttttccctgcctttttttttttttttggttagaaaactgaggctcatagatattaagtaacttgcccaaggttatagagtttataaaatgacagagcaagtagtttcacagcctggcccatgggacactgtaagaagcttatgagttacattcattatgaaatattagaggcataggaagatgagagactcaggcaagagccatctcattaaggtggaggtcacagttttaaaggaaaatttaaaattcaaattaattacaaaatgtcatagttaagaaaagtcttttaaagtagatgtggtttccaaggttcatgctgttttttttaaaaaatggagatacataaagtggctgaaatagaagttgaattagaaaaaatgtgtatatgcacacaatcacatgcatataccaccctccccacacccagcacgcatggttcccactgacaaattctcctcaaggttgagtgtgggatttagttcctggccaaatgcgacttggaacctattctgagtgggcagataggtgtctgctgtggccactggcatccatgccggggtggcccccacagctgcctcctgcatgtgcagtggcatgtaatgcatttctgaaccaggcagagaagatatttagaaagtccagcatgtagaagaattgagtatctggtgaagaatt

SEQ ID NO: 131916 - DNA, 1047 bp, Homo sapiens
ttagtgtaactaagctaactaagccgagtctagaatgtgggtgtgaaagtcaggtgaaatgtggtttactcccgtgaatgaatgatgaatggaaattagctctgaaaatgtggaataacgaccgagagcatcattttttattaaaatgatctgggtgtttacatacaaaatgttcaggatacatctgactccttctggctgtctgagggctgtccctcctccctgcacacttccctagccctgggcctcatgtcctactcggtgggggcttcccgtgtgcgtgacaagggagcacggagcacaggctccaggaggctagggtgtgtctgcttcactgctgtgcccccggggccagagccagtgcctggcacacagtgggatctcaggaagtgtttctcgagcaggagaataagtgcatggctgccttcccccaccactgagttccagggagaagcccagcacctccgtgtgcctggcacgaggtggcaacgccttagacctgccgggtctggtcacaggctccatgtgcttgtcctgagccgccgccgtgttgctttgctgaggtctctacttcggctccagtgtcatctgtaaattaactctctgtggcttattttgagaatcaagtaaagtaatccatacgaaaatgcttttaaaaccgtgaagtgttattaattgaacactgattaagctgtgtctgtctaccactgtctatcactgtcattatgctcattgaagccagagtgatgttcactgaaacataactgtaatcatgttgctaagttctgatttaggctttgatttctcatcttcttgcgctgaagttatccatgtataataaatattatggctacttatgagaaaggcattgaaacaggacttcttgtctgacacggccagctcacctttccagtgccggccaccgcacctgagtcttcatgccgggaacaaggcctcacctgcggaattgagacgttcgtgagttgtgaagttctgcctgtgtgctaggagcgtttgtgctgccctcactcaacaaaggaattcact

SEQ ID NO: 131917 - DNA, 1078 bp, Homo sapiens
ttcgttgtagattctgaatattagcctaaatagggcaggaacttctaaaacaggggccgcagactattttccctggcggcgtgaggaagaggaacgtggtcgatgcggtggcaggcgatgtggaacattgcagttcatctgtttggccacacagggctgccctttctcatgaaacagtgctttgcaccactgtgggcaccttacacaaggcctgtttcagaaataggattgagaatttgatttgggttttttttgctcctcttttacatgtaatgctcgattttctttggatttgcagagagacttgacttccttccttactttagctaaatgatttggatgagattcagaagacattctggcattatctatgaaatattgctttatttaaaatgcagtactctctttcttccttgcctaatgtgctgtatttgtggacatgatttggaggtaggtaggtggcagacctttgcagaggagacatcggcagatgtctaaggagttggagagcagtgggatacaggggaaattgcatgggcgatggtcaataattcaacaattacctcctgagggcctgctctgtgcaaggcactattctcagtgtgtgggataaatccatgactggaagaaagaaagattcctgattccgtagagcctgcattctggtaggggtgatagtaaatgtggtaatagatttaggcattttaaatctaaattttctgaagtggaattttaggtattaggtattaagaacaaaagaaaaaggcagaggaagagacttgcaggcttggcggcggcgggcgggggaggttactgtgttgtgggcagcaggacttaggcacccagcctggctctccacttcccgggtccgtccctggcagggaacttccgccaagggcagagactctgtcttacacatgctgcaacttcagtgcctacacttcagcgtctggatgttcataggtgttcttccagtagctgatggatgatggatgaatacatacatgcatctaagggaagtcacttgacattcttgagctctcatttgttaagttgtaaaatcgtgtcaaataagttc

SEQ ID NO: 131918 - DNA, 1039 bp, Homo sapiens
gtatttttattattttattttgtttttatttttatttcttttgagacggaatctcactctgtcatccaggctggagtatagtggtgcgatcttggctcactgcaacctctgcctcccgggttcaagcgattctcttgcctcagccttcccagtagctgggattacagacacacgccaccacgcctggctaatttttatatttagtagagacggggtttcattcaggtgaactgtccacctcggcctcccagagtgctgggattacaagtgtgagccagtgcgcccagcctagtactcattttataaagggagtgttggcattgaatctgtttatccattaaaacatttggcacatttcctagtgcatagtaagtacttacacataaggcattaccttattacgagcaaggccaggtattgtggccccatcatcccagcagcctgctcatgctagactagagagaggcaggggctgctgctggtgggggtgagagatgatgcgggcttgagccaggagttaggtatgggcaggagaggctgtatacgggggacattcaggtgataaaatggacacacatcagggattggcaggacatggcggggtggattttggttcctgacttgtgtggctgtggatggagggaagagtggcaggcccatgcggagttccacctggactcgctgaggctgtgggcctgtgctgcacggaggcccaggagaccatgcctagctgtccagccaagtctgagctagagacagagacatggctgttagtaccaggcaggggagaagacagccacagaatgtcagcagccactcaaggcatgatcctgtgggagaggaaattgggccattgctgaattctgcatcccagcgtctgagggatgggaaaatgcagagctgttcacagaagagcctgaagaggaagaaggaagaaggatgggtggcagaaaccaaggcattgtccagaaaagatatacacgattaatagcagggagacccagcaggagaaatgtgaaaaatagcccctgaatttggc

SEQ ID NO: 131919 - DNA, 1687 bp, Homo sapiens
tcatagacttaaatataagagatataaagcagtaaagtttctagaagaaaacattcaagaaaatcttctcagtcttgagatgggtagagatttcttgggacaaaaagtctaaaacacaaaggacaaaatggtaaattagacgtcatcaaaattaaaaacttctcttcaaaagccacttttaaagcaataaaaaagcaagctcagccttggagtaagtatttgcaaaacatgtatctgttaaaaagacttgtatccagaatagacataaagctcttacaaccaatagtaagacaaataactagattttaaaaataggcaaatgatttgaatagctaattcaccaaagaagatacgtgcatggcaaataacatgaaaagatgctcagcatcacttgtcagtaaggaaatgcaaactaaaaccatgaggagatttcattatgcgatccatttgaatgactaaaaagagtgattattgcaagcattggtgaggctacagagtaactggaactctcctatattatgaatgagaatgtaaaatagtgtgactactttggggaaatgtttagctatttattgttaaacatatacttatgtgatgacccagcaattcctcttctcccctatgtaccttaggaaaatgaaaacacggattcactcaaagacatgaccgatgcccatagcagctttattcataatagccccaaactggaaacaaaatgtccaggaacagatgaatggataaacacactttaacatacccatgcagtgcaataccacgtggcagtggagagaaacgagctaccggtatgcccaacacacagatgaatctcagaaacgttactgtctgtggaagcaagacacgaaagaatgcagactgtgtgattctgttcataaggaattctggaatgtgcaaagtgaaactgtcataacaggaggcaggtcactcgttgctggaggctttggggtgggacgttagatggccagagaggaggcaggaaggcacttttaggggtgatgggaatactctacgtgttagttgtgcaagtggatacaccagtacgttaatttattaggggtggttttgcatacacttggagtggcaacattttgttcatattaattatttctcaataaaataaaacaactttcatagttcaagagagatcgtctttgactgtctttccttacctctcagcctgtcgatgtgttcagtggccctgtattttcctttgtcacatcacttagcacacactgagttgcgacggtttccttccctgtctcttccatcagactctcagtttcttaagaacaaggaatgtcttttacgtgtctgtcctcagggcatagcccgatgtctggcatgcacattcactgccgaataagtgtatgttcagtaggatggcttcaatttattgattgcctacaatgtgagatagttgtagatgttttgcatttattatttctgatccttagtaaatgtttgctacacaaataaagaatcctcactgcattccagaagtcatggtacacggttgcacactgtcatggagtgtatagcattggagcacagcacacagagaggctggatggtttaaatattctgttcaatggcagtgtcaggattaaacccgtggatgtcgtcagatttcgttgttttacatctaaatcttcagctattgtctgcacat

SEQ ID NO: 131920 - DNA, 1034 bp, Homo sapiens
agtagagacagggtttcaccatgttggtcaggctggcctcgaactcctgacctcaagtgatcctccagcctcagcctcccaaagtgctgggattacagacgtgagctaccgcgcctggccggattagtggtggttgttattatagccgttttctatagagttttagtaacttgttcacttctggtttccgaccagagctcctggtataggacagtggtcaacaggcgcttgttagctttgatttctctgttttctcagttcggttgatcacatctttatgagtatttgtgcttcaaaacttaccaagaatgtggcaatgcctaagatagatgagagagctatggaggccgtgcgtctgccctgtggaacctggctgttattcccggactggcatatgtggctgctgctgaggaggaggagtttagtttgtgtgcatgaggtgtggagaggaggggaagataagaccatagagagagctgaaaaccagatggcttgtgctaagagctgcaaatgcgaagcaaaagatttgggagattgtttttatttgtgcttatttttttcctatcacaaagtaatgaatgatccttgtaaaaaaaaaaatctggaaacttgggaagactctaaaggagaagggcaaaacattccccaaaatctcactacccagaaatgggtgctactctcattatggcctatttccttccagtttttctccacgcatctctttaggtagctgaaatcagaccttaggagccgtctaggcctctattttactaaaattatgttataagcattttcttatcctatgcaagcttatttttaagttactgcttggtagaactgtaacgtgatttataaaatgcctcccctcttgttcgaggcttgggtcgctagtttttcccagtgataacactttggcaagaggagctggtcttctgaaatagtgagctggcagaacttctaaggcaaggagttgtgtatctgatcttttagggcggtcacttctgtggccatgcggaaacgaacctggcaggagg

SEQ ID NO: 131921 - DNA, 1125 bp, Homo sapiens
taggtgacattattagtttctaaaaaatccaaagcagtttaaatagagacaacgtcaaacaaaaagaattctatcccccacccctagaaatatctccactactgaaacaggcagaatgaaggagggaaaaccttatatttatttggcttcaaacagatctgtaatgaacctcagctttttacccgctttgttagagtggacgggttacttcaggccatctttgaaatggagaccatccttagtatgtcaacaggagttcttatggtgaaggaggttgcacagaacccaactgcagggaatgctccgcttcctgagagctgaagagacgcacggctcctgcctgccttctccaggtgcagtctcatcatcactgggcggagtcgttggcactgtccttgtctgtcaccccactagacttcaagctccgtgaaggcagaagtgctttcctttcatctttccccatgcgtagcagactgtctggcacatgacgggtgctcgacagatgcttgttcccactaaaagggtcacagacggcttgggaaggaggcaggcaaaaaggcgcagggagtggtggaaaggcattctaagccaaaggaccagcctcagcaaaaacaaggagaaacgggctttttaaatatatatatatatatatgtatgtatatgtatgtgtgtgtgtatgtatgtatgtatttggggcaatattgttgaagtagggccataaaagatgaggtcagagcatgtaaggtgagaccacaagtgaagaatcctgaatgccactttaaagatccagactccttaatgcagactgtggagccaccttaagaccgtaagggagtaataacactgtgactcacccctagccagaatttattagttttgtaaatcaaaacttgaatatcctagatttttttccttgttctgccaaggaagacaggatacagagaattttctgacattcatttcaaggcataagatatcctatgataaagaaaattattgctgtataaataatagcccctcaggaaaattgtaagacaagaaagaaaagcaagaaagcaaacgtaagactgcaagcagaaaaagaattagatgttgtttagtctttggctgactttaaaagcagtt

SEQ ID NO: 131922 - DNA, 1074 bp, Homo sapiens
ctaataatcttcatcctgtggtcccacccttaaggaggacaggatctgatgggaaaggtccgtgaagggccttctaggtaaaggtgctgtgccacccacggaaggagcgtgggtgcgtcctgggtaagagggagcagttgggtttgcctgagatccatcagtagtgaatgtggtggatttcaaacctgtgcaatcatgcggcattttctggttgtcgaggtttgtcttctgcgggacggctgagcctctctggggaccggagcgggagctgtgcaagtgaagtggctgacagtgctgtctgtggggacatctattgctgtaggggcatctggcaccatgagcttgttacagagcccttctccccgaagcaggaatgatgtgatttaattggaatcgtgctaaacctataaaactatcaccgaggaatggtgtagtcatggaaacaagtaattcagtgaaagctgctcctagggagcaccccgagaagtgggaaagataacatgtgtttctcaggttttccagaaagatgccttcctccatttagctagagtgactgtgtctgtccacgttcatgactgtctttcctgcgtgcctcaggaggaatcttctagggttgaaaatagggactgtgtgaattggatgcatcttagaaacaatatttatgcaagccagcaagacagtccagcttttctgactctcagcatccccctctgtaaaattgaacgacaatgcttccttcataggattgttgggaggcttaaatgataaaagagcctggcaggggaaagaaagaaggttggaccaagttaggaaataattcattggaacttcattcttgtatgtaaggaggaaaatgagatttggtcagtgagtccaggtcagtcacagtcctgctggttgttaacaacaagagcagctctggactaggcaggggtgtaagggcctctggaacaggtagatgtcgggtcccctgagtagctgggagtctggtctttgcccacatcagctgtgggcctttggccaggtacttagtgctgcctagcctggcttcccccaactgcaaagccaggctgg

SEQ ID NO: 131923 - DNA, 1083 bp, Homo sapiens
gatcatgccactgcactctggcctaggcgaaacagtgagacttcatctcaaaaaaatataaaaaataaataaaataaaattgatgtggaagatcatcagacaaagaacatccaaaaagctcctgaacaatcatctagtagggagacttgccccatcagacctcaaaactcatcatcgcagggaacagagaataagcagcaactaggtctgcctggagaaacccagaatttggaacaactgccttgagattcagagaatgagtaagagtttttcaagaaaacaagcagaagacagtctataccagtggttcccaaactttgctgcacattagaatcttttggggtgctttgaaaaactgtaagtccagttaaatctccaaatttaggactaggagccaggcagtgttttttaaagacccccaggtgattccagagtgcagaaaagctggagaaccactggtctattcttgcagtaaatatgagagcacggtgcaactaattcagaattcctggaatataaaccacaggagggaggagggggacagggaggcagcagcaagagcagagcgggcaggccccaggaaaggttgtcctgagggtgacgggatgccaccagaagtcacccaacagaagaggggcacagtgagattctgccttagaaacatgactgcggtgacaatgtggaagatagtggaaaaggggacaaaattagcagccgggagcccaatccaaaaactactaaaatggcaaagatgagaaatgacaagggcctgaatcagagcagtgacgcggacacgaggagaaggcgtgaaaatacttagaaaaccaaattggcaagacttggtgtgatcaacacgatgagctaacagtaaaccaactggtagtgatccgtagaaatcatccctttcctctttggacaaaaatactctgaaatccctgtcctgaacacctagctgacttgtctcacggtgagtcaccgccagcctgggcggaaagggcagtaatgagaacagccagctcagtggtccaggagacgtcggttccggctgcctgcaatggggatcacctgttgctgatgaatgac

SEQ ID NO: 131924 - DNA, 1061 bp, Homo sapiens
cgggagttccagtgtttccaggtaaagaggaaaaggaagaatctccaactgaatgggacagagagctgcttctgaggcagtaagaaaagcaagagtattgggggaggatgcagccaccaggcgctaggaacaaaaaacaagtaagactccggccctgcccgcgagatgagggtggtggagtgagaaggaccaaagtgcaggtgtgcttccctttgctcgggactcactggcacggaggccgcatccacctcctcacggccgtggaggggatgcgtgggaggcgcctggacacctacaccaacacaccgtgcactccgccaggtcctctgctctcgccagcccctgggctctctggcctcaggaaagaacccaagtttccatgaaatccctggccttcttcttagtaacacgtttgtgggaaaaactcaggcaaatagaaattgcaaagagaaaaagaaatattatggcattaagattccaatcacctttgtctttgaattctgggtaattcaggatgagtcactgttctttaaaaaataagactacgaattccaaaaattagtatttattttcaagagcagtagcagatgaggacaaagacactgaataactgtcccaatttcagagtacaataaggggggaaggggcaagttatgaaagtgaatataatgcgttcaagagcgatggctctcgaataaaattaattcctgaccacaatgataagtggaagcatccgttatcattaaattgtgaagaagccaaatataatgaaatgccaaatagacatgtttttttttcaccctagtctccagttctgcacaaagaactgaactgattccaacttcccacaggcagtttgtctttcgcctgataaacatgaggcatttcaggcaaaaagaactgcatttttctagggggggacagaagagattctaatgggagctcacgaaactacttgacctgctactaaattgtgtaatgcaaacccagcagcgtccaatggtgacagtgcgcaggggctccgaggggaggactggggagaattctgacccccccaggct

SEQ ID NO: 131925 - DNA, 1050 bp, Homo sapiens
agcgagataacatagaagaacgtgctcagaagctgataaaaattacaaaaacccataatgagctaaaagacatgaagaagaagtacaaaagaataacataaatctgaatgagaaaaactcagagatgagatggatataactcaggaaagaatttgtaatagaataaatttttttttccagcattgtagtttctagtgagttatatatacctgccagatacattaagggaagcagaagatgaaaagagagaagaaaaaagaatcgagagaaagatgattaaagagaaagtgacacacttagaagctaggcaaagaagatctaacgtacatgcatgcatgcatacatatatacatacatatatctgctatgagacaccagagaaggaaacggaaacaatggaaccacaacatgttaaaaactataattcacagaaaactttctgtaattaaaaaaaaaaacccttgaaactgttgcatgaatgggtacactgtatacatgagaatcttgacttagaatgagcgggacatattctagttatattactggacttaaagtcttttgggcttttagacccagatagcaagtgatttatgaaataaagaaaatcagattatcattggactttttgacagcagcagtattccagaagccaatagaatagcatgtatctagactatgtctagctactcatgtaatgaaaatttaagccagagatttgtaggcacagccacactaacttttaggtatacagggcttagacaaattgttgtcaacacgcaagactggaagaattaaattctcatgatttcttgaggattctactagggaagcacagccaaagtaactagagagacgttgtcataaggacttgtggtgaacattaaacatatcgttgcttgtatagctaagaccaaatgagcattcaaagggagaagatagtatgtcatggtaatctgctcttacagtatccatcacaataatttaaaacatggggggagcatgggaagtcatatgcaaaagtaattttttttttttgagacaaagtctggc

SEQ ID NO: 131926 - DNA, 1082 bp, Homo sapiens
tattacggactttcagtgcgtggcagttttgtcagagtttgaatgtgcatttatgcgttttttcatggtctaagttttggatcagctggagcagtgattagccagtctgtgtggttggttatcagagccattggcagggtgtgtgtgttaacacagattggctgggagcagtggctcatacctgtaatcccagcactttgggaggccaaggtaggaggatggttctaggtcaggagttcaagaccagcctgggcaacatggggagaccctgtctctactggaaaaaaaaaagtagttgggcatggcggtgtgtaactgtagtcccagctacgcaggaggctgaaatgggaggattgattgcttgagccctggaggtccagactgcagtaagctgtgattgcaccaccacactccagcctggatgacagagaaagacctcatctcttaaaaaaagagatacttttcaactgtctgtgcatccagatttctccgtctttaattcaaagatgctaaactgttttggagtgagcagctgtagaatttaactttttttttttctaatttagctatctacttttcttcatttttcttatattttagagaaatattatatttttgatttaatgttgttggttgttgataatgaaggcccttcaaatatgagtattttcttggaaaaaaagtatgtctctagctcagatatatgaaatccatcttttgttctaagcttattatttcgaagcaggctatttttgaaatcaaatcatgtctttgcagagagagaagctatagtgtaatgcctgtttttgctgtatgaaaaccatgccaactttaaagtacttttccagggtcattaaaagcagaggaaatattttttgttgctcttggagtttggtggttgaggcatctgtcttcaaattgccaagttttacaacttagattaaccgtatttcctgtaccctctccaagcacttttgtgatgttttgtaacttccatcgcaggcacgcacagaggctgggctgcggtccagatgcgtttgctccatgaattggtctacgcctcccgaaggatggggaaccct

SEQ ID NO: 131927 - DNA, 1070 bp, Homo sapiens
tgctttgttttcattcttacttttgaatgattaaaactgaaaatggatccaattactttagacagatgctttataaaggaaaatccttggtgcatgcctcatacccctactccgggatatgagaaagtaggttatgtttttaacaaacttttttgatagacatatatggaaagtttgtataattttgaagatgtattttctctccatgtaattatggctggaaatagccggagagaggagcagagtgtgttttcaaacctgggaatgtgtggggcctgctgtttcccatccggcattctcccacggtcatcatttagttgagtgcggccaccaggctgcccctacacatctgtcactgacttgttcttctgatcactgcaagtgcccacgtttgagaaggctgatgagggttaaggcattttctagagcatcagtggctggttaacttggggttagaacttgtggtgtcaaaggcattaactaacagtgatatttctgtttcttgaacactcactgagagttttaggcttatgctcagtgtttgcattatttcattgagtctttttgacaatcgtaattagatttgatgatccctgtttcttagggatatgcagatgtggccctggaactcaggactttacagctccaggctgtattcctccctctccatcctgccagagacaagtcctgtgtctggagtttccctctgatcttgtcactttatttcttattaacagaataaagcaggtctaaacttactttctacttggaaatggaatggtgagttaatatttggatccctcagagtctgccttgtgaataaagctccttgtcttgagtagtcttggagccactttcgttggaacctcacataaacatctgggccctgaacttggacttcgtgactgtgcagcctattgaaagattagaacaaagatgtgctgattaatatgccctaaaagagcagcaggttggaaatgagtttggggatttcatctcatttcaagatttcctgaggatcttggcctagctttgccagggaccattttgtactccccggctccttgtgc

SEQ ID NO: 131928 - DNA, 1110 bp, Homo sapiens
gtaacctcattagcctgtttccaagtctataaaatgggaatgatagctgggtgtggtggggggcacctgtaataccagctactcgggaggctgagggaggagaatcgcttgaacccaggaggtggaggttgcagtgcgccgagatggcgccactgcactccagcctgggtgacaagagcaaaactccatctaaaaaaataaaataaaataaaataaaataaaataaaataaaataaaataaaataaaaataaaatgggaatgataatattcacttctttctagagttgctgtaagttgtgaatgatagaataatgcatataaagtgctaagcactgtgcttggcttttagaaagcattcagcaaacatgtctgcctcacggctcactggttgtatcaaagggatgcaggcagctcctgtttgttgaggacccattaacagacagtttacaggcttgtgaatttggttattttctttaatccttataattctgtgtttccagtacagatattcttgtttgtagaggaggaacctcaggctaaggaaaggttgtacaacttgtccaaagccagaccataatttcagaggcgaagggcctctgggaggcgtgctggttctctctttcctgccctcactcacttgttccacaccaaaggccaggcactcggcgctgtgtccgtcgtctgctagccttgagcgttcagcgggcagcaaaacagacgtggtctcatgctgactgagcttcaggtctacagggggaaatgggtactgagcagataaacataaacatagataattgtgaatttgatccaaggaaaagaacatgttctgccttgtagacctggggaattttctagtcaggcctgctctagcagtattaatcctgtaaaataagctctgttggcacacaaaaaagatgaaaaggcagaacctctccattatcggataagctgaaactcattgataatatgagtgattaagcagccagcttgttgcatgcatttagctagatgcttttcagatattggccataatcatcacaacaactttgcaaagtagtttattacgctccattttaaggatgagaaattgaggagaggagtttgccgtg

SEQ ID NO: 131929 - DNA, 1096 bp, Homo sapiens
aaaacaagggtaagaagtgagctgcacaggggatgagggcagtgtgagatgcacgtctttggccttgtgaggttatacagatgggtggcaggctcatccctgagcctcccaacagtgcaagggaaacaggatttgtgggagatgctcactctctgtaagctaaacaagtggtttcatagaagcccagctttccctgctattgagatttaggagaatattttttgagtgttctgtgaagtcaatgaatattttatctttattttttttctgccagagttctctgtttagttggttatattctttaaatggaagttgctccaaaatgcttgtccatgtgggtttggtggctggggaatcagatgcttctgcttattgataggagttggtcagaaatagaaaaaggcatagaaagcatactatcatttataattttttttttcaatgccgtgtggttcagaaaatgcttttgcgtagttgacctcctttgaggatgcggggtggtttcttgctaacatgaagagcttcaagctatgagagaatgtgtgctgacttcaccattgccttcaagacaattgagctagttactgtaaatatgttacttttatgtaatgcatttcatgttcttcaataaaaaatttcaaaagggaggaaaacttattttgagttaaccaacatttaatacaatgctttgatagcaaggctattataggaagcatataagctgtgaagactaaacacttacattatttaaatttcagtagggcatatttaagttttgtcttattcatgctcctctttaacaaagaaataatacagaaaaagcaaaagattatttcttttcttcctcttggtttgcaggtgccctcaccaccaatggcatcaaccctgacaccagtactgagatcggacgtgctaagaactgccttagccctgaagacataattgacaagtataaagaggcgatttcctattacagcaaggtgattttatggctttgtgattttttttacacagttgtgttgtttaatcagaagtttccattttacattgtgtaatgctgcagtgtctcttaattatttatttctgtaagtattca

SEQ ID NO: 131930 - DNA, 1039 bp, Homo sapiens
gcactttgggaggtcgagttggacagatcgcttgaggtcaggagttcaagaccagcttggctaacatggtgaaaccccatctctactaaaaatacaaaaattagtggggcttgctggtgggtgcctgtcatcccagctacttgggaggctgaggcaggagaatcacttgattgtagcgaggaggggggttgtagcgagctgagatcgtgccactgcactccagtaccactgcactccagcctgggtgacagagagagagactctgtttcaaagaaaaaagaaattaagttgatcaaattagccctcatgactggagatgccctttctttaaaaggtggagggagcacttgttccttctccgtcggggggatttccctcttatgctttgatcatttactcctcagagaagagatgagataccatgtgaagaatgaaaaacccacctcattctgacccgcccccccccaccatttctccaagggaaaaaaagagagtaaaactcaacaatgtgaagataattcattatagctaatgaaataaatcaagactccttgtcacttattaaatattaacttatgctagaaacaaatgtattataagcatgaaaagcacacaaagcactacacttctgtcgttaagaacataggcccaagatggcctcctacttggggtcaccagctctgtaattgtgagaactagtaaggagatttaatctctgtaggatcttgtctcctcccctgcagagatggggtacactaagaatactctcatagagttgctgtagatgatgacacgtgtggatgttcctgacgtaggtcctgcttccgctgagtgtgaaaaaatgtcgcttttgcccctatggcattataacaacctgtgtgaatgctcactgctcgaaggggtgcctggtacctgggggatggagttctcaattctctacccacagtttatgtcaccgggtcgtgctgatttggatctattctttaaaaagtgcatatttgagatatatttttccaagcatgcccttttctattatcat

SEQ ID NO: 131931 - DNA, 1040 bp, Homo sapiens
gtttagggtatgagtaatagtagcttttcttttctcttttcctgtctgaagcaaaaaggcaccaaacttgtaacatactgttcctcagaattgcttttctgatcagatacaagtcagatttttctctaggctatgtgaattatgaaatgtgttttagtagttatttttaaaagtagttttgttttccaaataaaataccataatctgttctttcttccaggggcacaggaagttctcattgatccaggtacatgatctatgtgtttagtttcttttggttatttttttaagtgcttgtttcatggtgatgtgaatgaatggttaaaatttctggatgatgatctttggaacattctgatttaagtaactttaaatcagaactgttaaaagcttgatgattgattggtgggtccttgcttgatgggcaccccgttgctttatgttgtctgttgaagaggaggcttcttcctctagcatggctaagtgaatgatttgagaattgtgcctttaattctttgaatgcattgagcatgtttgtcctgttaattttgaattcatttgtaatcacgactttgctctgatttgtggcttgtgctcccttccacgtgagttaattctctactgcatttcgtctgtgtgttcttaacagggaaagaaatctcgtagtttttacaaaggcaggtttttcttccccttgtaatatcttctgtaattaatacagcaaaaacctcttttattacagtgcttaattatttcatgatgagctctattattttctgacttaatgagaaacaatgacagggtaaataatacaaaatgaaaacagtctagaattgaaatcagatggctgtgcttacacagcctttgtgactaacacattcgctttcatcgcctcgtgcatcttggctctgaaatgaagttgccccaggtttgcaggcgttggttttaacatttgcgttcactcctttctctaggccgtggctaagtttcctgatggagtttgtggaatgtgtagagaaaggacaacaaatgcttagttt

SEQ ID NO: 131932 - DNA, 1029 bp, Homo sapiens
agctctattgaaacacagccacctgcattccttcatctagtaattacctggctgctttcgtgctacaacagctgagttcagcagcagcaacagagactataaaagcccacaaagcttgaactatttactgcatggccctttccagaaaaaaatttgatgacacctggtatagggacagagaatagcttgacggttgccacggtaaaaggtggggaaggagctgaccacagggaatttactggagggtgatatagctgttaattgtggtggtggtagtgacttgactgcatttgccaaaactcagaactgtacaccaaaaagtagattttaaaatattttattttaaaataaatgtcaatgaacaagagggacagaaaacaccagtggttgctagggggcaggagaagagaggaacagaggaacagaggggaatgtcctgggtggcagaactgtcctatcgattggttacaaaaccatgcatttgtcaaaattcacagactagacactaaaaagggtgattttactgaatgtaaattataaactttttcatttttaaaaaagagataatgaaggccaggcatggtggctcacgcctgtaatcccggcggcactttgggaggctgaggcaggtggatcagttgaggttaggagtttgagacaagcctggccaacatggtgaaccccgtctctactaaaaaatacaaaaataggttgggcatggtggcacacgcctgtaatcccagctactcaggaggatgaggcaggagaatcacttgaacctgggaggcggaggttgcagtgagctgagacagcgccaccgcaatccagcctgggcaactgagtgagaatctgtctttaaaaaaaaaaaaaaaaagataatgaaatgagaggagccaaacatttaccctaagtggaaaaaaaaaattgggcttatgataggttttctcttatagacagtaaaaagaagtgccaggaatttaaagcaaagaacagtaagatgagagagatctccaatatacaaaatgtttc

SEQ ID NO: 131933 - DNA, 5120 bp, Homo sapiens
tgagtgagttgatcccaagaacaccccacagcaccaaccagcagggcacagtgcaagcgacttcatagatcggggtgctcgtgtaggggtccggggctcctttgaactctgggagttgtgtgcgcagtcttgggtgggagacggcaggtccctctgtcccaagaagctggtggtgccaaggccttcctctgtctccatcagtgccagcctgatcgcgttctggaagacccagtctcagactctgtgcctttaaagtccggtcctcagtgtcctttcagaatcatgttggggctgcgtttctctggggaactaagcctgtgccattccacaaggcaggcgtggacctccagccttggaagctttctttccgctcctcagcccctgacttgtaaactgtgatgccatgcagtctggagccgcgggggacgcactcggtctcattgcggaaaacacttggttccagtcgtgtggtttctcccataccctgaccaagtccacctctgccaggattgcaggagattggtgcaagacccatctcttatgcattgaccatgaccatcagcaaagcctggtggtcttgttctcatagtcactcgagaagaatatttattgtaatggaagtagattttttaaaaaaggaattggaatcatgtctttgtagaatgtgtgtgtgtgaagtcctcagctgtaaggtgctattcagtcctgtgacccttattttggaatgctcttcattactgttgctctgttttgtgacttcctgggaaaccgcttactttggtgtggtgtcaccttgagctgtgcacataggacaccagttttgacttaacctaacaggcagtttttatctctagctttttcaagccaggtattgagcagtttcttggccaatggcctgagaaaccacctgtccctgtcaaggggtgattttattggttttaagtggggaagtaatcccatgtacttatttcttaaatacctaggaagttcttcttggtggctcctcttggccctcccctctttctcccccaacccaccatcctgcaaggcaaggaatggcctctccctccacagaggcaacggctgcagagggagcactgtggctgccatcccagttcctcttcaaagccaaacagacacgcgtgactcaaatcctacagtatggagggtggcgttgcattgaaattccaggcctgagtttgatagtggattttaatgtagttgttaaaggtatgaattcatgttttataactgtagaggcaagcaagtttttattttttaaaaagttttgagagaataatttataagtttctgtgcagcaaagtggctaattactcattaaatacaggaaaagaatgtagtatctaaatccagctttttcttacctctggtacacttcagattacttacctaatacatattgagggcttttaacccttagttttatcaatttttctagttttattttatttttataaaataattgaaaaagaaccaaaaatgaattcagaagttccatagatggatttttgccccttcttaattttctcccacaatgaaaacattttagaagacattttgaatcaaaatgtattatgaccattgaaagttctctattttctaagaagctgagcagctccaagggcctcgtttcaggtggtactctatgtattgtctgtgggcttgtttctacctgtacagtggaaccatgtgaccatgtcttgtgcttgcaatatagaaaccatgcagtgctgttttgtgaattggcagtttctgtataaactcttatttatatacattggcctctctgtatgattttccatttgctacatgaattgtaaaattaattataaaattatagtacctgctaaatacaattctgaggcttcatgtcattgtctttagttgaataccatgctgtgtgtcttgaagatgtccacgcttgcatgatgctaggtggcaatgccactttaaattaagccttaatcagatgttaaatttgtgagtttcagagtatgcaaaaatattaggcagagtgagtgtaaactgttcagatcaagatgctgtatcataattcaagttatttttttctggagttaaagggaagcattcagtgatacacctctctctctctctctctctctccccctctcccccctccccctccctctctctgtctctgtctctgtctctctctctctctcttgtctagcttggctatggccatagcttgatgaaaatggaccattgtgcatttctgtgacagtcaaaaagacctgttctaaaagtcttgcgactttttcagggttttttttttttttcatgtttctttttttttttcccctccagtctgagatttctgtgtggctgatggagagtgtgatttgggcgtaggtcttatttgcaaacctgctcatgttctaagctttcttcaggtagtaccacctgtcatcgcttctgcatatgatttaaatggatttttgtttttataaaagtatcataaatttagagataaaatggaggggacccagctttctttacaatgtggatctacctcagttaaacagttgggtgctattactaagtctgtcaaattaaattggaaaaagtaaccaaacagtgagatacaactccacatgaaacttgaaattgtaatttccgtttatttaatgatatttttatttatttgtgccttttatgttgaaccccaatgcattgaaaaaattcagtatgaaacagtacatattttatttatattacaggtgggagaaaagtccaattggtcatggaatttgatagacttttccccagccaactgctacagtgtattataatcccgactgcccccctgtgaaaagaaaaaaaaaaatgtccaagagcaaatttaacattttacaaacaataaagtccaaactcctctatgcacatatttatagcttatcacttcattttctgtgccagtgaaggggtggccagaaaaaaaatcccaagtaccctcatcattgcttttctagccattcatgccccctcttcctctggcacattttctaagagtttatttcataagcagcaaacggactgttgtcgatttcatctctcctgacctacctggtggaggtgctaatggccatggacagaaaggggcgagccagagctcgtggctttgtggaggcagaggcctgcattcagcagcggccctgtgtgcctgtaagttaggaaggctttctgacaggtaagaaaatgagataggttgatgacttaccatgcttttatatttggcagtttacaattctagacttttcctactatggcgatctttttttacttaattctttggaggtaacaatattttggagtcttaagaatttgattttataccaataagaaataaaaattagggatctttcctgtagtatatagttttactattttaaagagatctctgaattttacaagagaaccaacattccttaatggcagaactttgaaagttgatttgggaggctttttgctgcaggatctcaaaaatagagagagagatgattctacttaaatgtttttaattttctaacttccatcaggttgatacttaagctctattttgtaaagagtaaatcatcctttagtatgctgcataagatgatcagcattcttgcactttctcagtaataagacgtgccgggcaattggctccccaggacgcattgtgtttttaacctaacgagaggactttggggcaggtgattaaatttatataggtacctcaagaaaaagaacctgaatatgctgcattttctttctttagcttttacatgtagcattttgttttgcttttgttatttttgttttgatatatgctttttggaccccaatagactgttgaaagaaatttaaaaattactcttgtagggatatagtatccttaaaaaataaaaatttaaaaaaatttaaaaaaattgctgcaatatctggctcgaaggttgccctatattagaataatactttagccaaatacacctgaggaggcagacactgtgtttataagcagacaataatgttctgaatccttcctgttcatgctgctttcttaattcatttctccatgtcatcaagaggttggataacttatttctaagctcaaggttaaaaatcatgtcacctttttttttttcccccaacacagacctcagaaaaattgcgattgaggaagtagcatgatcctaaatgtgttgctgaaatcaggcagcccgagcctctggtctctccagagagcccgtcttcacatttctctattcctcagcactcacccgaaactgaacagatggggagtggtcttgattgtcaagataaaactggtgaagaaagctaaatgctgagaaactgagcatctattgtcgtgtttaagcttagctgggtcctttctagtttgtttttacagcttactaggtgaagtagtttgcactatttttgcaataaattcatggaaaacctaacagttacttgttttgtttcttactgtgtgtatataaactaatactaaaagtttggcatagtgttttttcacctccttacataacccctaacatgcacagaatgctgtaaatctgataaaatatgatgtgaatgatattttataaagttattttgtatggtgtcaattttgttttgcctcatagtatgtcagcaaaaaattaaataaaagtcctcctatttacagctgcctcttccaaaaatcttcaattcctcacctacttctttaggcacttccttctgcacaggttatgattccagctcccgaggcagaagcgtgccttcagggatggaagtccagagccctgttccacaaacagagggctgttccttgaagaatgtacttggcagagctgggcattacccgaggatttgggtttgggggatgagaaccacaggcatgagttggactagtgggagcagccatggtgtgtcggatagttggctctttctgctcctgcagcatgagaaaggatcaagaagccattcagctaagcccgtcacaagcaaagtcctgagttccgtgttgagtgtgggaacctgagctggcaccgtcctggttcgcggcctggccagccactttgctactc

SEQ ID NO: 131934 - DNA, 2619 bp, Homo sapiens
cctgtgacctctctctgacccatctctcacgctcatgagaaaaggaatgtacaataaatagaaacagaaacttcctcagtgctcatgcgcctcacttgcagaacgtgagtatttcatttatgtttgaagcccttccccaaagtgaccgaggagttgcactctagctgccgtgccagcagtctcgtctgctgtgacgcttctcggtgcggatgcagtgcacctgtgactttgtcatgggggtgcccctgttacacacacacacgctgactcttttttatgaggaaaatcttcgactcaaaataattgcactgattttttgacaacttctttttacgatgtcccacttcgcatctgctgtacttgtttgagatgattgtaaatagatttgtggtaggagaagtgacatgaatgcaacacgtggctctgttgtggagacactgcctcgtattcagtattatgtgttaaagttgtgtggacttaactctgttccgccctttagcttcgtgtctgttgaccatttatgaaggacaagttcgcctcattttctttttcttctgaagggaagttctagatcggttactaggagaacatggtctcttggtgcctgatgatttagtcctaagcagactcgttgcagtcttgtgaacactgttgtggtctgtttgattcctcgtcgcttaccgtggctctccaaagcatggtctttgagttccacccagcctgggacagtccagacgggaggcatctgctccgcctgctactaggacgcaagggcctccttgcatctctgtggtcagagtcatcttaaagccatgaggttactgtcgtgtcaaagctgtcatttgtgcccgttattttgctggagtagcagcgtgtgctgtagcccccgtgtgtcactctgtggtcaggctaccctgtgtcacacccagcaagaagtttttcagccccagaccagtctgtgtgtgtgtccgagtcacaccagtgccattacggtgccctcgcttatgcttctttcagtatgttttgccatgttattgtctaaagtgaatgtattggcttagccaaatcactacagaaggtggttcctaaataccttttagtttaaaaaaaaatgcagataaaggctacctctgaattctcaatagattcatcatgtttgctcttaagtgtagctgtccacactgaaaacagccaatatgttgcctgaataaactgaattgtgaacatctatctgttcagttctggcttgaaaatgtgtgtgccatactgtgacccacgggcagcccctcctcctctactgtgtcaggtggaccagggtcacctctgttctgcgcagctttgagattctaggattctacggccggcacgaatggcatgggagggttctctgcacgggacggcataacggcatgccatccttcaggctggcaggagcctgcgcaggtgtggcaaaatcttgaaacagcctgtgtcctgcctggcttttcactttcctatttaatataagaaagcacttttttttctgctttacctacaaatgggttgaaaatggcctcctctgtcctctcctctcttttatacactctgtaaaatcacaaaggtgcttcaacaccgactgtcatgcaaataatacatttaaaatagttgcatggtttcaaagacaatgcagacgtaattggcctttgactttgggacctcgggttactctcactccctactgcaaaacaaactaagggttgaaagcaaagcattctgttcaaatccagggccctttgtttgaaaagaacacagggcccacagctggtgttttgaagtagaagttcccactagtggcgcagtggaccgtctgatgcagacttgcaggaagtcggtcctgggaggctctgaacacccctccctgtgattaaccactttgctgtcagaaatgtcattttcccatacactgtgctgtgggcccggggcctccttcgcttctttctttgggttccatatgttgcccgatcttgaggttagcgctcgccccaatttctccatgagtttactctgagttgacaggcgatgatctgacagttggaggtgtctgggtgtttggaggtggccccgttctcatgttggctgctcatcagacattgagtttggccccggcggttctactacgtcactacctggaagcaattgcctttaacactctgctgtttggggtttcgatgctttttatgctgcgttgcgtgctttcattccggaagagctaagtgtcctttgcagtctctctgagaatgttttgtaattctgccgccacgctgttctgtgcggaccgacctcaagaggcttgggcccccgtgggtgtcccactgcctgccggcccagggtacaggctgcttgggtccgctgggctggccttgggctgtcagaatctggtccagggtgtttcgaggggacactgcacagccgctcgcccctcgactcagtcatgggagctgcagcacgcagatccaccgcaagcttcctgcacgcgcatctccggaatgctgcgctgggccctcccaccatcttcgcgtttgtgagaatttactcagaagtgagagaactgaagattcctggtgcttttgttaacacgtt

SEQ ID NO: 131935 - DNA, 4971 bp, Homo sapiens
ccatttactatatgtagttatgatgctttttttttttttttgagacagaggagtctctctctgttgcccaggctggagtgcagtggcgtgatctcggctcaccgcaacctctacctcacgggttcaagtgattctcctgcctcagtctcccaagtagctgggactacaggcgcatgccacaattgtctagctaatttttttgtatttttagtagagatggggtttcactatgttggccaggctggactcgaactcctgaccgcgtgatctgcccgccttggcctcccaaagtgctgggattacaggcgtgagcctccgtgtccagactatgatgcatttttaataatacaaatataaatcttctccacagtatccttttaaagattttatgcgagtccaactgtctaatcttctgatctgctttaggggacaagcaggccttcgcactatcacgtcctctgggacgacaatcgtttctcctctgatgagctgcagatcctaacctaccagctgtgtcacacctacgtgcgctgcacacgctccgtgtccatcccagcgccagcatactacgctcacctggtggccttccgggccaggtaccacctggtggataaggaacatgacaggtgagtggcatgcctggctggaggtcacagcaggggtggtttttgccacgggtattggcagctgcttttctggaaggggaaggggcagggccccagcggctggagccggcaccccagaaggcctgttaatggcacggccgtcagcgtgggactcttccctctcccaggttcccgccatgccatcccgacttagtgatcgacgcactgcctcatcgtgcattaaggctgcacattctcattctctctctctctcatccctgcagtgctgaaggaagccatacctctgggcagagtaacgggcgagaccaccaagcactggccaaggcggtccaggttcaccaagacactctgcgcaccatgtactttgcttgacatgttttagtgtttagcgattgtgtaccgagtgggattcacgagaccagctacactcagaccaacagatggccagcccttccgtgacagccagcatcgaacatgagacgtcattgattttattagattctccgttttccagaatgccttccgtcccagatttcaaacttggattttgaactgcagacctgtatgagaacccaatgtcataggaaatatggtttgctaaaatctataagctgcttattaaaacagagtcccgtgtgtcctaaaaatctcctaaaaccagtctatgaactcagggctttaaaacatttttaatttatttggtcattcaatttacttgtttttaatacatgattctctatgaaattgatgggctcaaactagctgtgaatcttctgagagtgaaagcaacacaaaacacaagtgtggttttaaagccttgaacattctgatgttgtcactaaagttgatttccaggcgatgctcgtgtgcccctggcgtggctcacccaagttcctcgactgagggccggtggccatgcagaggcgtccgcaggtgccgtgttctgccagcaccgcccttcacccggcctgaactaaggagcagtggcagaaggtgggccccgtgtgtttacagcatttccaggtccagagaggttggcagacaagtgccattttaataaaaaatgtatttaaaaaaagaaaaaagacaatatactgacagtctaatcatcagatttgtcctataggactgtgacatttattttccaaagtttttaaagaatacgggtctgtggtgataaatacagtacaatcctttttcactgttatgtctttaatgtaagagaagaatatatatatctggtttgcagtattaatgtgatagatagatgctgttttttcattttattgactatggggtgcttctgtgatctgtttggcatatcaagagtgttttggagcctggagatgggaccgcctctcagttcttagtgcttaaggacaggaatatgcaattgacttaatgtgacagcaacccgcttcccccgtggagactgtgcagcgtgtacccatgggagggacggatgtgccctccgcgccgctcgccaccctccctgccgcctcatccccgtgtgtcactcactcagctgatgaagcacaagtggaaattatttattcttgcattgctgggaaacattgatgtgtggggactcactcctctccgtgtgctcttttgtcagatgacttccatagatctatgcactgagattcgtagaaagctgttggtggtggctctgctgggcgtgaggccgtcggtcacagcgaaggagcttgcctggccctgggaggcccaaggatagcagggccagcagagggcatgggccgttcttctggggtttgcatttggggccccagacttgggtttgccaatctagaaactgttgcactaagagtgacaccacggacgattttgaaggctaacaacagacaactctgtttgtgctgagtgggctttttgtctctgtacacagttttagtaagactcaaatccatgttccgtgtagaggcgtcaggaaggaggcgagcctcccctagtgctgctgtgcgctccgtaggtcccctcttcctgctgctgttccctccccggccctgcgcgacacttacctcggcactgtggtggggtggggtgccaaaggagctgcctcctgctcagcggcacccccccccccacctttgtgctcagctgctttggaggcagcaggaggggcagcaagccgcaggtcgggggtctcccgatacctcgcctggatattggcggcaatgacaaagggatgactattatttgtgaagatgtgtactcagagtggtgtgtgtgtgtgtgcatgcgtgtgtccctgtgtgtgagtgtcttattaatggcattagtctcttctggctgtatttttttttaatctttttaaatgacagaagctcccactctaagaaatggcagttccttttgttttagtggcaagtggcactttctcctgttttcagaaggatacagacatgctcgtagcttaaattaatggatgcattcaagctaaggagggaatcttgtgactaataacttttcaaatctgaaattagattagtttccagccatttttacaatcatctggaaccatgtgtctcaaaggtgtgtttcttccacctgcgtcaggctgtctgggggatggcggttcttgtttaacatgcagatttgtgggcctgctgccacctcctgcgtgcggtacttcagggatggccagggcatctgtgtctaagcgatggcctgcagccctgggctccctggggtctgaggacccagctctggtggcacccagcagggaggaggtgcttcctgagcagatgcctgagacagactgggctggcagaaaagtaggactacaatttttgttttttttaatcattttgaaggaaaactttcatttttagtgggccagagtacttcgaaaagggtacttttttatagccctatgcttgttttataaaacttttaatactaaaaacattaatagaccaaacatctccagctgggtcagctgcacacctttgtacatgtctgatgattcagagtttaaatggctgtagttacaatttctcaggtaaacaattgttttctcaaatttttaccaatccctgcattattaggataaattttgagacagtgtaaaaacctcaaagtacagtagggtaagtcccagccctgttcacgtgaaagccagaggtggcccttccccggcatctgatcgtctgatcatgtgggtgcctggggccttgccacccttccctgtccactgctgcccccctgggcctgtcaagatttgaggggtgcccactcgctggctttgtccccatcccactgttaagtaaggtgtgccttgctttaagcaaactgaatgtgaaaattatgtgtagaagtctgggtttgtttaaaagaaaaactgggattttatctcatctctttaaaagaggtctcccaattcgatttctgtactgggactcttcctggtgtgtttttacatgttcactttttaaaaacattgatgtactcccatccttttaccactaccctatcacatttgacaagttcttgctgtaatgacgacgcaattaacgaacaccaggggagcggtggaaagctgccctcgtgtgtgagcccttcggtgacgcaaagccaccgtcctgttgttttgtgtgtcctaagctcagattttcctggtttggataaattttgtaaaactgggcatagctgtacttttagaaagggatcgttttccttaagttttggttttctctggttcaagcagtctttacatgcagccttttgattgcacatcagggtctcccttttcttttccagatgatgttgcttttcggtggtggtctcacactcctttgaatgaatgtttgcactctagaaccacaaacgatgcgtgaccattgtacagcttgcccaagagggaactgttggaagcaggcagtgacctccacgctgtttgtttgaggctgacctaaactgctatcactaatgtttacccccgtgacggagtgcccattagaacagatcatgtcagttcagttcctgtagtggggttagtaggtggggggttttattgttgttgttatttgttacttttattgctgttaaatgcaaatattgctatttattttttcctttctgctctggtttggtttggccgacacagatattccagtgcatgtggtacctaatggatatgatagaaattatttccccaacttttataaattgcctaatgtttaccttcaagtttgctggatgatttatttttgaaagccacaaatgtgatttttctggatgaattgtttttcttatatatgcagcaatgtaattttacattgatctgcggggtggtttaaattttatttttacaaggcagttt

SEQ ID NO: 131936 - DNA, 1045 bp, Homo sapiens
tgttggccaggatgatctcgatctcttgatcttgtgatccgcccaactcggcctcccaaagtcctgggattacaggcatgagccactgcgcccagcccaaagcctgccctgagcttctgcaggagcttggcctctgcatgtgccttctcagcgcagagcccagcctgcatccctggcgttggctgcgccccttgcacacacacaacctcctgggccctccaggggaagtgttcttcccattcctgagtgccaagcccccgcttcctgcatccagtcctccctgcagagaggatggtttctgcccccgtgttttcacctccccgtgaacacactcattgtctctcagaatcaccacggctgggtgttctcaacccagaacccgcacgtgggaccgttgctcacatgcactaccatctttaagcacaacctcctccctcccgtacccctaggttctccaccacgagttgctggccatccgtgaggcctgtatcaagctagaaaaagactaccagcccgggatcaccttcatcgtggtgcagaagaggcaccacacccggctcttctgcactgacaagaacgagcgggtgagtttctgcatgactccaggcagggggcacggttctcccctcagccccacaccccgagcacactcacaagagaacctgctggccacagtgccgctgtcccaggctctagggtgactctgtcctctaaggggcttcatggggacccaggtttagacactagagaaggctgtccttgatttggtgaagcttttttgttgttgttttggagggttttaagatggggtctggctctgtcacccaggctagagtgcagtggtgcgatcatagcttactgcagcctctatctcctgggctcaagtgatcttcccacgtcagcctccctggtagctaggactaaggcatgcaccaccacacctggttaattttttttttattttttgtagagacagggtctcactattttgtccaagctggtcttaaactcctgggcttaagccatcctcttgccttggcctgcc

SEQ ID NO: 131937 - DNA, 1026 bp, Homo sapiens
cggtgcactctcaacccgggaggaaggtgctgtcaccacctccgcctttccccggagagcccgaggcccacatgcctgtccttgcccctgtgcgtgctgcctcccagggaagtccccactgggatatactcagggtctgaaagttctccatggggtggttttgctgccaggggacgcgtggtcatgtctggagacatgttggggtgtcaggcttgatggagtgctactggcatccagtgagtggaggcctctcagcgtctgcccatgctggggacagccccctaccccaacaaagagcgagctggccccaggcattggtggtgctaagggtggcggtgagaaaccctggcgtgggtgtggctgcagagggagtagagggtagaagggtgagccctcctgggcctgggcctgagccccagcctcaacagctgtcagctcctggcccatctggtctggagtacactccacccaagccccccaacccgtggctattctgaagcagatttcagaccttgtgtcatttaatctgcagggtttttagtattccggttaaaagataaggattcttttcaaaagcattaccatgatacactgaccacctccaaaaggtgatggtggcacctactagcgtcagaggtccaggcgtgtctcaccgtggcccctgacgccactcctctccgcaggccgccggtgttccagcagcccgtcatctttctgggagcagacgtcactcacccccccgccggggatgggaagaagccctccattgccgccgtgagtgtcagcgcttccccatgggtcttccattgacaacatgcaggacgctgtcgaagtcccactgtcacagcgtggccaggggtccttcctgaaaggcatggggtctcactaagctgcggtagggacggccggggtcttgtgggagagaggtgtctggaggggacactagaatgacacaaaataagttctaagaagcagtcagaggtggggcataggggctcatgcctatccagccctttgggaggtctg

SEQ ID NO: 131938 - DNA, 1144 bp, Homo sapiens
ctaatttttatattattagtagagacagggttttgccatgttggccaggctggtcttgaactcctgacctcagctgatccgcccgccatggcctcccagagtcctgggattacaggtgtgagccaccgcgcccggccagtgtaagtggccttcctaagcagggagccaagtcctttcttttagttgggctctttctctcctgccctggggccctaggtgaggcatttaaatcgttttgttgataaattggagggatgagatagactcactcaacttcccttcctgagggagggaaagcctggcctgggcgaggcgggcacagccgtgctggagtctggactccaaggagcttggcgtccccctcgggaccagggaccctcttctatcaccgacctcggacagagggggacacgcaaagctcagcacagctgccatggctgcacttgccagatgggggcaagagggctggtggcagctgctgctctcggggccagctgaggaaggggcgccggcagagctgtgtgtgcctctcatgtcccttagccgaggtcaagcgcgtgggagacacggtgctggggatggccacgcagtgcgtgcagatgaagaacgtgcagaggaccacgccacagaccctgtccaacctctgcctgaagatcaacgtcaagctgggaggcgtgaacaacatcctgctgccccagggcaggtgaggcccggcccctttacctccgcctgcggaccagggcacagtgggacgcttggcagggtggggtgcagtatgcagggggcaggggggcagggtcccttcacctgggcccagcaccgtcctggccacagcagagcaaagatgtcagacatagatctggctgctcacgctctgctggggaccaggggcgtctgcaggagtttgagcactgtggccgggtttccagacagagaaatttgtgcctcgaatcccagtgggcaaggcagagcagggcatgccttggatggccaggagatggagatgggcttccctggctcagcagcagcagcagctaccgtgtggaccagggccctctaccatgcttcccacaccaggctagtcatggatgctgcgtcgtgctgggactttagactgaaaagctcctcatgggagcacactgtt

SEQ ID NO: 131939 - DNA, 1034 bp, Homo sapiens
cctccctcactctgacagtgcctggcctgcacgtggggagagcttcacaagagctccaggcgctgctcagcagctttacggggacagcatcgcatcactgccctggggccgccacagccgcgaggcagcgtgagcgcggtttaaaggctgctgtgttacggtggcaagttagccgcatgtgacttttgagtgcacttacatgttacatgtatgtttagcacacttaacctttctcatgagttagtatgtgttaggagatgtagctctgaattctggcctcattcaggactttaagaacaattttgacctcaatgaaagtgctttgggctttgtaaaaatgacgcccttgtgttagagcctctggtcggcctgagttctctgccattcccagtgcccggtagtgaacggagccttctcctgcaggtccttcacagagcagctcagaaagatctcgagagacgccggcatgcccatccagggccagccgtgcttctgcaaatacgcgcagggggcggacagcgtggagcccatgttccggcacctgaagaacacgtatgcgggcctgcagctggtggtggtcatcctgcccggcaagacgcccgtgtacggtaggtgtgggcgctcccgctggctgtggggagccgtcgtggtctccgtgggtgtttgttcctgcctaagcccctctgtgtttctgctgcactgagaaaggtgctccttttgggcctttcaggaggctgaggaagaagaggtggcttgtcatcactgccacttctgatcactgtgttcagggcctccccgtcgtcctgtatgatgccatggtcctgggcagtcagcaccctcgggtggcacaggccttggcacatgggtgggcaccccgcccatcatacagcatgcgtgttggctggatgggggaacgtttgtttaacgcacagagcgttgcaccagggtcacctcctgcccgggactcagcctatgtgtaaccactctgtgcccacctcagaattttgtggagtttcgccaaagtccatgccagg

SEQ ID NO: 131940 - DNA, 1007 bp, Homo sapiens
gcatggactttggcgaaactccacaaaattctgaggtgggcacagagtggttacacataggctgagtcccgggcaggaggtgaccctggtgcaacgctctgtgcgttaaacaaacgttcccccatccagccaacacgcatgctgtatgatgggcggggtgcccacccatgtgccaaggcctgtgccacccgagggtgctgactgcccaggaccatggcatcatacaggacgacggggaggccctgaacacagtgatcagaagtggcagtgatgacaagccacctcttcttcctcagcctcctgaaaggcccaaaaggagcacctttctcagtgcagcagaaacacagaggggcttaggcaggaacaaacacccacggagaccacgacggctccccacagccagcgggagcgcccacacctaccgtacacgggcgtcttgccgggcaggatgaccaccaccagctgcaggcccgcatacgtgttcttcaggtgccggaacatgggctccacgctgtccgccccctgcgcgtatttgcagaagcacggctggccctggatgggcatgccggcgtctctcgagatctttctgagctgctctgtgaaggacctgcaggagaaggctccgttcactaccgggcactgggaatggcagagaactcaggccgaccagaggctctaacacaagggcgtcatttttacaaagcccaaagcactttcattgaggtcaaaattgttcttaaagtcctgaatgaggccagaattcagagctacatctcctaacacatactaactcatgagaaaggttaagtgtgctaaacatacatgtaacatgtaagtgcactcaaaagtcacatgcggctaacttgccaccgtaacacagcagcctttaaaccgcgctcacgctgcctcgcggctgtggcggccccagggcagtgatgcgatgctgtccccgtaaagctgctgagcagcgcctggagctcttgtgaagctctccccacgtgcaggcc

SEQ ID NO: 131941 - DNA, 2890 bp, Homo sapiens
ggggctggcacttggcaggtgcccaattctatctgcgcttggggacacaggccccaagaggtgaagagtagacagtgaggacagtaaggcgaggcaaagccaggacagggagtctggaccagaaacacgccaggtcctgggggcttgtgatccacctgtgcggtgtctttaaacgtctttcaccatcccccagtgaggccacgggtcccccagcctgctgctgtcacagtgtcccacacagcaggccatgcacacaggctggagtgccgtgtggtaaacgtggatttaaaaggaggggaaacggaactctgatgagggtgtggtgggcgcaggcgaagcccacccagaggcagctgttccttccggaagacacatctgacgggaggcggggtggggtctcttggttccaggtacacccccgtgggccgctccttcttcaccgcgtccgaaggctgctctaaccctcttggcgggggccgagaagtgtggtttggcttccatcagtccgtccggccttctctctggaaaatgatgctgaatattgatggtaagcagcgccctggggtcttcactgcagggcagggttgggcatgggctggggggtcaggaccccggtcggggggtggcatgtggccagctccacgcatggcctctgtcagagccagcgccgctgcgtgacacctggctggtctcacctgcagtgttgggtgggttacggcagtggctctcaggccagcgtgaagccacgagatggtcgcaccctcagaggctgtggtcaggggctgaggcgggcctgaggatccggggcttccttgctgctggcctcctgtaggcctgggtttgactgtagcctgggtgtggcctgtccctctcttgggaggcttagtcgctgctctgtgcaggacatccgctgccctctctgtgaaaaagacgagagtgaaggccagcgaaaaggatctgtcttctcatttgggagctgattattatgaaaagctctagaaagcaatgagaatttgatcttgctcagttatacatttattgaaaaagaactacataaaaggaaatggtgaatttcagaaatatctacaccagacggtaaccagaaaatcctacaacactggcttcattctcggagggtgactttagtctttaactaatcagccagctcctttctgtcaccctgaccagagggaggccagcagctagggcctgggcttgtcactgctggcctgcccgtgtctgggcctgaggctagcctcagtagggagtgagaaccccggccgggtgtccccaccatggctggcctggcctatgaggcccctccaggactatgggcccgtccagcagccccacagtcatgcttaggcctttgcctcttttctcgcctacagtgtcagcaacagcgttttacaaggcacagccagtaatcgagtttgtttgtgaagttttggattttaaaagtattgaagaacaacaaaaacctctgacagattcccaaagggtaaagtttaccaaagaaattaaaggtaatgaactgtcccagcacacctggctgagggctgggaggccccttcccggtccgcctccgggaccgcattttgcagttctggttcttgtgcgcatttggggaggtgggggtggcagaatgtagccatcagatgaggtagcatggagatgagttagatccatttcccagagcgggagtgggggtttcctaaataaatacaaccccatggggtgaggatgaggttggggagtcagtcacgtctgagtcatgatctcaggactagaagcagcagcgtggctgtgatcagcatttcctaacgctggaacctaggatgcgttttcttttgtcttcatttaatccttacacagcccggcaggtgtctgtacccagtcagcctgctttctactccaagaaactcagattggggggggtctaggacttacccggggtccttctgcccatcagcaacagaatggggggcccacccctggctccacaagccctgcccgctgaacccgtccttttggaaggccatttgcagggccatccaccgtaccccgtgttatcacgatgacccatggggggcgcagaacagcacgagggtggacaccccatgctctaagctgagcctcccctccaccacgtggtactcttgtaggtgagacggacccggctggggtggcctgggggtgacctgtgggtcaccctccctaggggagccctgcagccccccataacttgggtccccagccacattcctatgaaaactgattctcgcaagtggcgcctgcactcaggtcgggacagccccgatgccgatgcctgtgttctgtgtccccaggtctaaaggtggagataacgcactgtgggcagatgaagaggaagtaccgcgtctgcaatgtgacccggcggcccgccagtcaccaaacgtaacacgcccttcctttcagactctcttggctggggcccccactgtcactccgacgggcacactctggagccatgattctgtgcccattctccagaaaggaccatttcatgctgtttttcaatcccaaaattgtcccttacatggctcagtagattccagacttcacctaagaaaataaactcagatcatgaaattccccctgggtgctagaagggccggcccaggctctctctccctcttccttcctgagcctcacagaggagagaagggtcttttgtgttcattgtcccatccttagtgctggaggtggcgggtctgtggccctgacccacgcccccttccctgggccagtccgcgtgtcccatcattacggcaagagcacggtttggtacgcaggccggagtggggggtgagagtgcaccgctgtcctgggttgtactggtgtttctttg

SEQ ID NO: 131942 - DNA, 1050 bp, Homo sapiens
tggtgagctgatatcgtgccactgcactccaacctgggcaacagagtgagactcagtctcaaaaaaataaaaaataatctttacacatactttaagaagcaaacacatcagaaaccaggagtttaacaactatgagaatgaaaggctgattccctctgggaacaacatacacagtttgctttttaaaccctgagttcctgagaaagaagccagctccgtatgcaaagggtctcaagttgctgtcagggatgtctgttttagtgggagagcaagtggcctgcaagcagctctctctacagacgttcagtcttcttccttttgcttttgagacagggtctggctctgtcgcccaggctggaaagcaatggtgcaatcacgcttgctgtagccttcaatttccaggctcaagcgatcctcccacgtcagcctccagagtggctggtttttcattttgatgataatcttgaaatgaataagctcctttcagcctttctggatggtcagcagggcccagcaatctcagtgcccagtgatgctccttcaccttatcacgctctgacaaagggagaacgtgctgtgactgagcagagaccgagttacgatatagggctctgcataaagcgatctcatggttctaagaggggcagtggtctgtgcgttgtcactgccagcccagggtgatagacgttggttttcccaagaggagcaagtcctagaccaaatgcacatcagtcaagcacgatcaccccttgcaaactagtgtgctgtggagctgaaatgtagtcattttaaagttctgtgcttaatttgcatttgtttttacttatagttttataagaaagaaaagcataaggagtttgtgcacagttttgtctgtatatgtttatatttacacacaaggcgggcatcagggtagtttttctgaaaaggggctgagggcgtctatatggtatttgatatttaaatttgagacctgtcattgtggaaattaactgtgcacaaactctggggtaaaactagatatgggtgtgaggcctggctccacccttc

SEQ ID NO: 131943 - DNA, 1050 bp, Homo sapiens
tggatcacttgaggttgggagtttgagaccagcccggccaacatgatgaaaccttgtatctactaaaaaaaaaaaaatacaaaaaattagccaagtgtggtggcgggcacctgtaatcctagctacttgggaggctgaggcaggagaatcacttgaacccaggaggcgtagattgcagtgagccaagatcgtgccactgcactccagcccgggcaacaagagcgaaactccgtctcaaaaaaaaaagaaaaaattagccgggcgtggtggcgttaatcccagctacttgtgaggttaagggaggagaattgcttgaacccaggaggcagaggttgcagtgagctgagatcacgccattgcactccagcctgggccacaagagcaagactccatctcaaaaaaaaaaaaaaaaatagcgtcagaaaaatgtccttgtatgccattttctccattttattgacattttgcccgacttttgtctttgtttcagggaaatcgtggaacacatggtccagcactttaaaacacagatctttggggatcggaagcccgtgtttgacggcaggaagaatctatacacagccatgccccttccgattgggagggacaaggtaagctcgccgggatgcccttggtggagtaacatacggtgaagtaaagctcacacatgttgtaaagtctgtcatgcctgttctcatacacgaaactatttcactgaggaggagagagcagttcactgccacatgcttcgtcctgagatccataaaaactaccttctctgtgttgtggctttcagtgatgggggtttaacttgtctaggtccagacacggatatcgagaacttgctgaaaccaccaaactttaagtacaaagtacacatgctaaacacaagccacaaaccaccgccagacaagagcttagagtaagcaccagtattataaagacctacagaggccaaggcaggaagatggcttgagctgaggagttcaaggctgaagtgagctatctcagtgcgccacgaattccatcctgggtgacagaatgagactc

SEQ ID NO: 131944 - DNA, 1052 bp, Homo sapiens
aaggagctaggaatacaggcacacgccaccacgaccggctaatttttgtatttttagtagagacggggttttgccatgttggtcaggctggtctccaactcctgacctcgggtgatctgcccacctcggcctcccaaagtgttgggattacaggcatgagccaccgcgcccagccaattatagaatttttaatttgctacgcttccaagccttgccaagatgataactttgtgtgtaactttgtcagaatgtataggcttagtttggctgttcttttcacattgtgctgaaggcatcaacttttggagaatgtttagtgagtccttaatgctgtggagaggttcttggaaactgcgtttttaagcaaaacaaagtacatcaggttcttgaataatgttgttttgttatgatgttgattaggaaaaaaatggatttgttaaacatcatgtcacttaaacttgctgtttccaagaactgccaacagtgttaagtgaactgcatgctcctcgcttgctctcgcagtaggtggggcctccatgctcctgcctgcaagttcttcctgcgctggaaatgggtggaggcatctccctgggtcccctccttaggcatcagaacctacttggtttcttcagacaaattaaaatgtcatcgatgccctggaaggatatacttcagtggtatttcttggcatatttaattatggaaaaaatcttaccttacttatagtagacctttctaagttgcaaatattttactgtgagcatgattgatttataattacgaaaaagcaacttagtctgcataatttgttgatagcactggtcatgttgagtatatttggagcctcgaaggcatggaatattgagcagagtgcggaaaataaagcggtttttgacaccgtgcttcattttgcaggtactaactgacttgtccatttgctaagcttcatcccaccgggcaattttcctgcacagcagctgttacagtcccattctcacctggcccctgggccagttcggaagcctctgagcaggtttgtagctttctcctcc

SEQ ID NO: 131945 - DNA, 1045 bp, Homo sapiens
ctgtgacatctaagacttgacagttgtctaaataggattgtgactttgagaagagctgaacttcactgtggtttatagagccatttaactcctcctgccccctctcccccttccctcagtggtccccatgaaggtatggccacttctcccaatactggtgcccatctgccatggcaggatatcaccctctacccgtggggcagttgacatggccgaggccatcgcggcatggctgggtatttgtgcagagtcccccttgggtctttgataaaccttggggaataatttaagtaagtgcataggaaaaaaagatgtaaacgcttccaaactcctaaaccctgtgcaatttgaagaagcagaattattttttaacttctagtttccatgtcaaaagtttccacaatgccagttgggcttattctctgtgtgttgtacagtgaatgctctcctgtaatggtccagtctcataaaatgtggttttgtttcacgaatcgttactgtgaatcttcaaaacataacatttgagttttaaaaatagttaatattgtgaaataattgaaaagacataaaagtagagtgactcatttaatacccctccatttatccattaggaagctttagcagtcatcagggttctccacatttgcttcaaatatgccccttttctttgtggacgttttccaaagtgaattgcagacctgtcattttacctcgatatttaaatatgcgtgtctaaagcaatggagacgttttgaacataccccagtgccgttatgacagttaacagtctgtgatcaatttctctcatattctcagaagtgtgtttccagttgggtgctttggatcctgaattttaaccaaagttcacacacacatttgggtctctgccttccgcctctaaagctagcccaccctctctcttctccctgcatttgacttgttatatttacgtcttcttttttttcttttttttttttttgagacggagtctcgctctgtcacccaggctgaagtgcagtggtaccatcttggctcactgcaacct

SEQ ID NO: 131946 - DNA, 1010 bp, Homo sapiens
gatattgaggggccgggctcaggaattgaggctgctgcagtttctcctgaatctatgagaattcagatgggcacttttcagtaattaaaaccatatgtcctcctcctcctttctttttgaagagctctcattctgttgaccttgcactgctgctggattgttcctcgggctttgcatgttccctgcatttgttttgtaactgagcatggtgcatggcagacctctctatgcagtatgctggggcagtgagcaggtggcacagtagccacaccctggcaacagtgagtgagagctggtgggcaggcttggaaactagctcctttttgttctgctcatgtgtttttatgggggatttgtcttatgcctttattaatattgtttttcttttttccctttctctgataaattcctttaacttttcctcaccttccgttcgacaatagccatggagggtaagcacatcgtgtctttgtgtgtctgtccagctctctctatcacacccggctctctgcatgtaactttggactggaaagcaggaagcccaagtgggagggcacttcggcctgctttgtcacctctcatgactgacagatgccaaaagcagtgtttatatatgcaaaagaatgagacatgtacatctttgcagtaaatgaattattcttgtgcttttctatctcatacccagacttttggaacaaccaagaattaatctgttccagattacttaggcaaaagcacccaagggttcagaaatgggaacttatatttagactgagcactggcatcaggttcatgattaaactatatgtactacaagttggtcttttttaaaaagtgtatatatatatatatatatatatatatatatatatatataccattttatgctggtgtaattctaaccagttggaatttttaaatactgctgaagatttcccaaaggccctcatgttattccaccatcagtactcaagttatcttagtaacatttgttgatgtctcttctgtgc

SEQ ID NO: 131947 - DNA, 1072 bp, Homo sapiens
ctgttgcttttgcatccaaggatggcctgccctcattattttagtaaatgtgaaattccaaagaaacagtttcttgttttctagtatatatttgcactagctctctaatgcagccataacaaatgtcctttcttgagattttagctgagagtccatttccttgccttatcagcttctacagggcacctacatgccttggctcatggtccccttactccatgttctgaaaccagaagtttttattttctttttttttttgagacggagtctctctctgtcacccaggctggagtgcaatggcccgatctcggctcactgcaagctccgcctcccgggttcattctcctgccttagcctcccaattagctgggactacaggctactcctgaccttgtgatccgcctgcctcggcctcccaaagtgctaggattacaggctagagccaccgtgcctggcccagagccagcagtactaactctctctgacccttcttcagtggtcccattgtccctccctcctcttatgcttccctcttgcacttttaaggacccttgtaattacactggactcactcagatatcccagataccctcccatcccaaggtccttgacttataaccacatctgcaaagtctcttttgccacgtaaggaaacatattcacatgttcaagggattagaacatgggtatctttggggggccataattctgcctaccacaatattctctgtaattttagtttcctttgtgtgtgaagcagaactgtgcagatgttatagttgaacattaccttgcctccttactcattcacaggtttctggctaccctggttcacatggaatcacagccatggctggcagcatctatccaggtcaggcatctcttttggaccaaacagattcatggaatcatagacctcaggagatagcaatgtggcagcccaatgtggaggtaaatcgggtgtcttgggcttcagtttgttaacttataaagcatggcaaagctgggcatggtggcttacacttgtaatcctagcacttttgggaggctgaagtaggaggattgcttgagc

SEQ ID NO: 131948 - DNA, 1255 bp, Homo sapiens
gagggcacctgtctgttcattcagcaaggttgcactgaatgttcatctactctgcctggtactattctagggactgggaatatgaagacaaataaagtactcttttttctcatggaaggagctcacagggccctttgtcagtttggattactaccatttccataagtgaagaagccaaaaccctgacccagcacaagggtcagagcaatgggaagtacgtaggtggcctaaagaaagaaaccccacctctatgattgctgagagaccctgacctctggcagacaagcagatgggccccaggggaacagcccgagtctgtgcctggctggtatggaaagtgaactggccctgagtgggaattgaataccagcattgttttgagaaaacatgcagcacctgcttaatgagacaagctgttagcagagagacagttctctttgtgtcccagcaggcctggtctgcggcactgtcaagatttgaaactctagtacgtgtttgttagtggctgtctgtcaccagtgcagtggaagcccctgagagtggggacttgtctctaagggcttagaacggtgtgtaaaaatgagtaaatagagaattaagtaaaacattgatttttttcattgaactaatgtatgattaacctttcccaagcccaaattctcctctcttgtaaatgagaccaactatgagacatttcctgatgttacttcatttttagcctaaagtgatccttctacatggttactattatgtagaaaactgccttagaccattttaaacctccttgttgtgaaaattcctaaatgttttctggcaataatacatcccttttcaccagaaatcttgatagagcattttgcatttagtagcagtttttattattattttcattcaaataaactgtgagaactaactatatgtcttacttgaagattcattaatttcatattgtccatatgaaattttggtataaattaatgcctagagacctaataaatgcacaaaacctttgttgaaggatgtgttgatatttggaaatacggttttggctgtgctttatctcactaaaaaattaactgacaacacccaccatacaacactagcctaatgaggtgtggaaaccaatactgattctgttctctttctcttgattgagagaaggaaccatgtaaagaaacccatcttattttccctctgccttgaaatttttctctatgtccaactgaatgtcttctctctgccttagtcatcattg

SEQ ID NO: 131949 - DNA, 1049 bp, Homo sapiens
actggcctgattggttttcaactcctggcctcaaaggatccgcccaccccagcctcccaaagtgctgggattacaggcatgagctaccatgccctgcccaagatatactcttaagttttcttctaagaatcttagtttttaacttttacatttagacctgtacctgtaattcattttgagttaatttttgtgcatgtgggaggaagaggtcagacttcagtttttcacatgtagctatccagttgccacagcatcatttgttgaaaagactgttctttccctattgaaatgtcttagcatctttttatcattcttttcaagtaagctctattaggaaaatgtctttttcgattcataaagtacaggtttgtcaaaatcaaaaggttcattcatatgatgctctcttgattttacagcccagcagaccgggttatcccagtccgaggtccagcgaaggattttatcccagcccacagcacatggtacaaaccaatcattaccaggtatgccagtcattacagatataaactgtgttattttattatttagcgcttttggggtagagcggtacattgtgcatatttttatttatgtacttatgagtatgatttggccgatagaaagctgagaaagtggttaccctaatcattgaatgatgttgtcttgacaccccacgcagaaggcgtttgtttttcactccatcttcgagtgggcaggaccagggcctgctgccattcttaggcacgttttcatccacttgctgtggtaaagggcaaggtgaagccagtgggcacacacactgcagagggagtactgaactggacagtttttatggaaggcaagaacaaaattcaaaattaacagaacccagatgaaataccatatggacaagtgtgaaaagtgttagatttatagatagatatcctgtgcaaattagaaaaaattatccttcaaagaaaaggacttgacacaaagtaaacaattcatttgtttttgagaaaaagttattaacttttactggggtataccttacaatgcacaggtctttg

SEQ ID NO: 131950 - DNA, 1020 bp, Homo sapiens
atatttatagtttgggaaaatatgcttcagtttgacctccttgatactctgcacattctagtttgttactgtggattcttcagcagctgtaaagagaaaagttcagtactgtctccttgtgccctcctactccatctatggactagtcttcccattgtaaaaacagatattttttatgagttatttatattcttggttcctctgagcagcaaattatggtttctcagaaacgttttgacaggctattttgggtatgagaatgaagtagtgagattgaaggaacttgcttcccagttgtcattatgttctttgaggaacaactcggatgtttaattaaatatcaaagtgtctataatatgcaagtgatacttagcttacaagagaaattagattcatgtctgacaactgtagggagtttacaagctaaattccacaacatggcaatatgtgattaagggctgaaatgaaacattcaggcagtaaattcagtgggtcagagaataggggaagtgtgtgtaggtagaaatatcagggcagatggagcctgagagagtcttcttgtggcaagggactccacagggtccttttagagatgcttggggaaaacagtaagtagccttaagatcagagtggcccatttcacaaaacaatctgtgtgaaataacattgcctgatgagaacccatttaaaactgagttcccgttgccttgaagaatatgtcccacttagccttctcttagcttgcctttattttaattatttgaaggagtagaagaaaagacacttgttttccccaattttttttcttgatttttatggactttttacctgtttaaaactaaaacttttacaaactctgactgagggtgtggtgtttattttaagggtgaggcaatagagagcagggcactgtaaaaccactaaccagggatgtgcttctctctcaggccagctaggccttctttgctcctggtctctgactggtctcctgctcccagtgaccattcgcaggtcctttcc

SEQ ID NO: 131951 - DNA, 1030 bp, Homo sapiens
ctctgataccagttctatcaccccacctccctggcatctctttctacctcattgacttgccatctctccacctttaccatgaatattaaccaaatttctgttttcagcctcttattttctcccattttctctcattactcttcccaggatgtctgacccattcacatggctttgctgcttacctctgtctgtctatagttctggtcctgcccttttctcaagtcccaaacctacattttaaattgctggctgggcatcatgtttatccagaaagcaagctgttacattctcttctatgccagcccttcctcctcacttcctccaggttggaatagtgcctttatcttcggcaccatcttggagtcatgcttcactccttgtgcctgccccccaccctccatcccacgctcttttcccatctgtctggcatgaccagcttagtcaatcttcctgaaatgtcactggaaaaataactcccctggtcaaaacaactttcagtggggttttgtcaccttttatgtttgggtaaaggcttccacagtaacatttaggcctcatttcattatggcctgagattgtcttctcatccctttcacacacagtagctaaactaaccctcctgtcagcccagaatgcctccttcttcatttggggagatcttacccatctttctcggcttctttcacgcactgggtcttctgtgacttcacagctgactagccttcaccctctgagtctccaaagctctttgttcttcttgtcaggcttaccctatgctgctatagatggctgcaacccgtgttcaattcagttcgataaacactgttgagcacctacagtagctgagcctggtgctagtcactggggcaaagatgactaaaacacttttcctgccctcgaggagctcacagtctagtatgtctcatcccctactagactgaagctccttgaggacagggatggtcatactcacctcggtgttgcccaaacctccaggccagtagcctagctagctagatacaggaagagt

SEQ ID NO: 131952 - DNA, 1027 bp, Homo sapiens
taagacttatcctaggattttctttattggacctcaggtcagctgctctaattataaatagatgagaccaaagtggggcggattaaaattcagcattttttgaactactgcattaagccacgaagtaccactgtagctagtgggtgattttctaatagaggatttctagagaaaaaataaacctctgagaaaaattacagcatttttcttgataataatttaacatttcattatttacatcatgttaaatcgttaggttattttatactagagttaatataatgctgctttggtagataatttgcccattacctcccagctggtactcgagtgcctagaagaacaatgttcctggaacctgggagttacattcttcatactgagctcactgttgtgttttcattcccacttgacaggtgtgtgtatgtgggagatactgatgcatggtgtgaagccttttcaaggagtgaagaacaatgatgtaatcggtcgaattgaaaatggggaaagattaccaatgcctccaaattgtcctcctaccctctacagccttatgacgaaatgctgggcctatgaccccagcaggcggcccaggtttactgaacttaaagctcagctcaggtaggagttggcgggagagagggcctgggggtgggggcagattatgctgcttctcctccttgcagtaatagcattttaaggtcattatatcagtatgtctaaggccgaactatttttcgttcaaatgcaattacttttaaaattgatttgcatttctttgtaccttgctagagtcttaagtaaattatatctttaaaattttaataaagctccaattatggtcaaatctctctcccctagcttctgacttagcatggcttacaagacccgtaataacttagtcccggctttcctcactaatctcatctaacacaaccctccatctctgtctccctcacactttgtgatccagcaatacctacttataattctcctaacacagctcactgcgttttcacatgctgtc

SEQ ID NO: 131953 - DNA, 1144 bp, Homo sapiens
ttcttttgattcatttgacagtaaatagcctgacatctactgtgcatcagcttctgggcacagcttctgtaagggtccacagttctaattgcccagctccttccatcactcttcctttttgttcccctttgctgtctcttctttcctcacagggggatattttgcttatttccttctttcttttctctctctccctttgccatctcattcgttcctttcatatgaatgacattaaacagtaaacacttggcccctccaacccggaagtatctaaaattctaccttgtctctttattctggagtccagcctccttcctgacctatctcaagacttggaagtttgatcctttgtcttctgtagcttctgcttttttgataatctcatttgttcctcctcacctgctgcaaggtcatcattctcctgctctatggttattgcagttccttctagctggtgtagaagtgtggctctcatttattctttgctacttatttaaactactttatccaaatttttaaattactcactatttttaacatgaatggcacttccctccactctactctccatttttcttggtgttattccttctacccagaataccttatcctgataccttcttcttccagttgaaatcctacctaaccctcaaggtccaccttaaatgtccttgaaggcttcttcctttctttacctttcctacactttctctctttgtcataccactcatgttgatcctgtgaatagacttgtggacatgttatctctgctacattagaaactactttggaggagatgccctgttaagattatgtaccttttttctcctataaataaaaataacttgatccagtatgtgttcttatttttttcttctgtttacttactgttgattcttaattatcatttaatgcccccatagataactaggtaaaggaaagaactttcaaatagaacaggatatggcatgacatgattagaaaaagctctgaagtccagttgatgtgtgttcaaatcccaaggccttgattattatctgtgtgatccacagagcaagtaacttatcctttcagagaaatttcatgtttcaaaacttctaagatgcctatttttttacatgttaacatttctggaactggagtg

SEQ ID NO: 131954 - DNA, 1044 bp, Homo sapiens
cagagcgagactctgtctcaaaaaaaaaaaaaaagaaaagaaaaactaagcatctaaaaaaataagctgcatcagcaaaatcatttacaagttttcagaaggcaacttttatttaatgatatctctttagtaatggcagtgttataggccccagttgtatatcactgtcagttaatgccgttggtagtatggttttatgaacagtaataaggattttcattattttagaatgtactttgccatcattcagaataatcattgtattaatgggtaaatatctggcaaaaagaatatatatgaagtaaattttgtgtgtgtgtatatatgagatttattatatatatcctataataaatatcatataatctgctcgcattgtatataagctgtctttcaaagtgcctattggtatgtctttatatatgagcttgtatgtttgtttttcttattttaagtcttattgtctcaaattcttctttatcagggacattgctgctcggaatgttctggtgtcctcaaatgattgtgtaaaattaggagactttggattatcccgatatatggaagatagtacttactacaaaggtaagaaatcagagtagtacctaagaaataggcttggaatctttaacgtatttctaaaaacagtatgttctaatatgctcacctgatctttgacagagatataaaatcaactaaatggaggaagcgacagccttctcagcaatggtgctggagcagttggacatccttaggcaaaaaatagacctcagtttaaacctctgaattccatttcagattaactcagaatggattatagactgcattacaaaataataaatttttagaaaaaaacacgagtaaatatttagcatctagggctaggccagggatccttagacttgacaccagaaacaaggattcataaaaggaaaaagttgataaactgaacctgataaaaattataaatttttgttctgccaaagaccctgttaaaaggatgaaaagagaagctacagagtagaagattcgtgccagccacac

SEQ ID NO: 131955 - DNA, 1039 bp, Homo sapiens
tgcacagtacttgacacctagagaacacctggtagatgtttgtcattctggtgtccttcattatatgtgcatcaaatgaatgccttctgttttccattgtaataaataccacccaacagtccaataaattaataattcatagagtaagccatgtggtgactacattaattaagtcttagtacatccttaatcctattcctgaaactttgacttaagtacaagagaaggcctggccaatgacttctgtcttgactagttcatttctgcatagcacctaggccaagaaaacagaccacatcagtcatcatcacccaacaccatatctgccttacctttgctggtattcttgtgcattttatattttcaaaaatgaaaattttaaaaattggttatcttttcctaaaattctgaacagttactatgttgtgattttgtaggactttggaattgtcattacaaaaatcagttatatagttttataggagtagtcaagtcggactaattgttttcttctctgagaggttactcagcagttatttcagggaaatgtgatagatgtagtgtatctaaacttctgtagggctttaccaggctatatataagagaaaaaatatggcctcgatcaggaattgttaaactttttctttaaagggccatatagtacatattttaggttctgcagactatgcagcccctgtcccaagtattcagctctgtcattgtacatccacagacaggacagaaaagaatgagcaagaatatgttccagtaaaactttatttacaaaagcagatggcagcccctgggccttagctttctgccccagatgggtaaataacaagggaaactattctatgtgttgatttttagttcagtttgggtagagtttcctagtggccacaagactctcttagccttgtgctgttttgtgtttctaataattacttctgaggaaatatgaaaggcttgataattatatgtgagaataacataaaaccaaaagttataataaatagttacttacagtaaattgaaagta

SEQ ID NO: 131956 - DNA, 1472 bp, Homo sapiens
acctgcaacccaaatataagtaattcctagacagctttgatacatccccagagattttatgtacaattcatccagctaaaaaaaaaaaagaaagaaatttacaggttttctcttgtgattgtatgaattaattgaaatgtatgcaacatgatattttccacaatgtgtgctagcctgatatatattagcctatttattttactccttcacaattattttagaggttggtatctctactgaggattttataaaatgagacagtccttgaaggactgctgtcaaaccaaaaagattggctgagagtatcagcacacaggaatcctaaatcctcaactgccaggtccctttcagagagccctcagaagaagcaaaacaatcagaggagttactgttgcttgatgatctgttatgtgtagggcacatctcaactttctgtcatgtctcctgtaatcctcataacagtgctacaaggcagatgatgttattttacccacgagggcacagctgaagcattgccaggtgaagtgactttccaaagctcaagcagttttccccaaatgggcttgtgtattttgtcacgtgtattgcagctctaccattcacttctgtgctgcctcacacagattaaatcctttgcctcagtttcttaggggtatagcgttcctttactgattgttgcagtgcattcattcttttggtttagcatgtgtttcttgagggaccttctctgtgctagacactgttttagctgctgaggacacagtgttgagcaagatacgtgaaggttccactctggtggctgttccattctagagaggtgggcatacagttcacaggaaacaaaattatatcaggttgttataggtaatgaggaaaatgagtcagggaacatgattaagaacagtgggatgggggcaaattagtctgaggagaggtctctgaataggtggctaaaaccagaattggctctaggccagcataagctttggtgcatggtaaagccctcagttggaggtcactgccactggtgttagcagcagctttatgcccttcttcattaaggcagtagacacctgtcacctgatagacttgggcttctgaacaggcttttaatgaactttgcagccatatgaagctgtggtgacaagtgcaaaacatctgcttcgtaacaccatgagctacgtgcagggttgtagagacttttcagcagtttggataacagggcagctggggaagggaagcagaggtgcagagtttgagtggctctcccaaaatcctgctgcagcagggccaattcatgtgctttactcctaaaggcacgtgctttatatgaaaggaagcagtgagggtgctagggctgttgtgtggaaagacagctttagttgcattcattttctgaggagagtatcacaaagttgagcgtgttaaactatggaatcaaaagagaaatgattgcaaatggccatttgtgt

SEQ ID NO: 131957 - DNA, 1344 bp, Homo sapiens
taattatcaaaatcaggaaatttaatactgaagaaatgctcttatccgcagtctaaattatttcataccagtaatgttccgtatcgctgttgcttcctgatctttcccttccccagcctccagtccagaattcatcctgcatcacacagtgcatccagttgtcaggcccatcttggcgagacagggtctccctctgtcgccaggctggagttcagaggctctgcttctgtggtccaggctctacctcctggctccagcagtcctcccaactcagcctcctcaatagctgggcccacgggtacgtgactccacacctggctaatttttgaatttttttgtagagacagggtcttgctatgttacacaggctggcaggcccatcttcttaactgagagaccagtttatgctttcctctagggccatcatatacaaagtccagaaatttagtgtgtgtaaaggtagcttttaagtcaagcaataagatgaaattgtcagtaaatgttactgggatcggccgggcgcggtggcttatgcctgtaatcacaacactttgggaggccagtgtgcgcagatcacctgaggtcaggaatttgagaccaacctagccaacatggtgaaaccctgactctactaaaaaaaaaaaaaatacaaaaattagctgggcttggtagcaggcgcctgtaatcccagctacgcgggaggctgaagcaggagaatcgcttgaacccggaggcagaggttgcagtgagccaagatcgtgccattgcactccagcttgggggagaagagcgagactttgtctcaaaaaaaaaaaaaaaaaatgttaataggatcaaagcataccgtttgaaaaatattactgaagtgtacatttctgttctcatttctgttgctaatatattgacaatgtcaataagattgttaccatcttgatgggcaaacagtcctgacccttgttcttgggtccatacttctgatctttctttatgataccccgtgagtatgcagttaaatgttgatgttacctgtgtctgtcatttgttaatgactgctgcatcttaaagggctacatccctgcatccctggctttgacttcactttcacacttgtccactattgccattaccatactgcagttgctgcttattttctcattttgctatatgcttctggagagctgagatgtgttttatcgatccagctttttgactctaaaatgagctttgagtacatgaatgagtgagcaaatgaatccgtaatgctagtagaggttttgcaacctgtgttttcaaagatcctcatcgccagtttttatgttaaggtaatttatgtaaagtatataa

SEQ ID NO: 131958 - DNA, 1091 bp, Homo sapiens
taaattttattaagtatttaggcttaatcaaaaggttttaatttttcctttaagttctatgggggagctaaagaataatcataatgttgagagcctgttgttaaacatttgcttcatatgttattgctaatctttacaagaacctgaaaatatgtggcattctggctattttacaagtatgaaaattaaagagaaataatttatgttaattttcttgtttatttcctaattttatagtgggcatgttgatctacaaaactaaaagaatcgaatagtaataccaaaagaacttatataattttatattctcagccaatttgctaggaactggggactaagatatgaatgttaaaatctaaacaatcagatacataggtaaacacacagttatagctgtgtggtaagtgctttcagagatatttacactttccaagacactgaagaagaacagtgagcctaagaggccactggaatagagagggtgaggcctgggctttgttctgtccctctccttcttctccatagccagtcccttactatttcctccagttccatgttctaaatggatccatctgcttcactgccttcccactgtgtctcccccgtgtttagctatctgggctacccaagtacacttctgtgttggggttccccaagatctaggagtcacaggactcagctatgatgtattacagcaaatggatacaaagcagaatcagcaaaggatgaaggtgcatggggtgaagtccagggaaaaccagatgcaagcttccaagggtcccttcccaatggaggccacaggacactctgaattccccagcaatggattgtgacgacctgtgtgaaatgttgcctactgagaaagctcattagagacttggtgcctagggtttttattgagggttctttttacatgcactctgtgcctggcatgcatccaaataccagactcccagaaggaaagcaagagttcagcataaaccacattttttgtacaaacattttaggcatagtgtaccatacctgtcaggggatggtggcaactctgcgaaaatccaagttcccagatagcaggcaagggacaatcatgt

SEQ ID NO: 131959 - DNA, 1855 bp, Homo sapiens
tatcttcctagcagaagtgctgaccatttcctgtgtgatcctcattcttccaacaagtattattgagaacctgcttggtgccaggcagtctagaggtttgagatacaataaggaacaaaacagaagtcctttgtctttatgtagcttatagttgagtgcacaaaataaatatggaatacatctgtgtcatacaacaataagtaccgagatgaaaagtagaacagtgtgagggtgggtgtactgagaagggcatgctcccatttagatgagtgttcagggaacatgattctaggggcttcttctcaggccttgcactagtaacatttcttttccacttaacatagtgtagtgatttgaactttttacttaatttattcataccttgacctgtacatataatttcctatacatatataaatgtgccaaaccgtgtctgacctgcttttttccaagtgtactctggtttccattcccactctgctcagctcctgcctctaccattcttttctcttcagccttctctgtaaccccccaccccctgcccatacttaacatgtaagtgatttagtaatcttctgtgtttttcctcatattcctgttttgttattcagaaaaggggtcatcatcaggcacactgtcctacttggttatttcactctgtgaacctggtagaaattttttcaagccccgcctttctttgccccttcctccctgggggccagatgggattctgtgaagggcaattactttgcttttagatttctgccccaagacaatgacataataaatactcctttatatataatctatgtactactgctttttctccttgtggaagagatttccaaggatggaactgcagggttcgtttcaaatagttgtaattttaaaagaagctgttggattgcttttcagaaaagctaggaaacttcatattgtcactggcagtgtgtgagagtactattttcgcactcattggatggcagttttaatagctcttttaatttttccattttaatagatacaaagttattcttgtaacttttttgctcacttagatgtaaagcaaggacctagtaactttaaacatattttcatgtcttgactgtttttcttctcacctctgtgaattaactgctcatatcatgtactttgcctattttaccaacacaattgtccttttaaattaataagtccctttacacatcaaggaaatcagtgtgttttcctgttaccttttttatgatttttttccccaaatctcttgttggctgttgactttaaacagaccggcctcccttgtcccacatcctaaggatgaccactgtcctgacttctgccatcactgattaaatctcattaaatgctgctgtgtcagctggatattcacagaggaaaacagaataaatttttgtgaaattttgtgaaagtgctttttttttgatattgtgtttcaggacttcttttatacccttcaataagatctcaatctttttcagataggtcttccatattaaaccaattcataagtattttatagttttgggccttatgttgaatgactttttggggtttttcttgccacttacaatttaaaatttatattgtgagcatagaagatattcttgattattgtttaacatacagtctgcaaccttattattgattgaacaggttttttattagaattttggattttataagtgtataataatgtaatcagcaaaagaataattttacctttccccacatacaattttttccttcagtcacaagaagctcaaagatcatgtttaataacagggcagtagacaatattcctattttgttttagattttaatttatcaattaaaa

SEQ ID NO: 131960 - DNA, 1013 bp, Homo sapiens
tttgcatgtatctctaatcatttctaaagaataatgtcctggaattttattttatggataagcattgtggtttttttaaagtttttgatttgtgctttccttcagaaagatatactgtttttttccctcctaacagtggaatgtgcaagtacctttatacctttggcctggtgttttctgagtcatgtgcacatatagtacaaacttctgtttaagaaataaaactctatatatgaactttacagttaaaaatggttaagatggtgaattttgtgttatatgcattttgccacaattaaaagaataaagctttgataaatacatttatagttatttgacaagtatactttttggcagtaatttgaatgtaggtgttagtaagtagttggtaggaaagaaatcttaccattattgttgtggtctttactcattgctgatttttacaagatgttttggtaattttgtcatgcaggccaaaacactaagaaaactgatccaacaaacatttagacaatttgccaaccttaatagagaagaaagtattctgaaattctttgagatcctgtctccagtctacagatttgataaggaatgcttcaagtgtgctcttggtgtaagtatgggaatatgggaaatagtgggctagtttgattttactttttcttgtctcttgctgtatatctaaatttctgatgaaaaaatgctaacttgtcccatttttttcaataaaatgatattttttcattttaccatgtgaaaaatagaaaaagaaaataattaatgtgagaataaaatcacctttttaaaaacagcatgcctagcttcatagttaggtttttaaaattttatccctgtgatttgttaattgttctctaagggctagtttacctatttagataatcatcccagagaaacccttggcatcaggcatgctggaataagcacagtgcactttgtgcaggcttaacacatcctgggtcaatgaagttataaatattttatcttatttggtt

SEQ ID NO: 131961 - DNA, 1379 bp, Homo sapiens
caagtttgtcatattaattgatttggtggtgttatttgttaatacgcttctttttatatttcagaaaagatgttggtttaaagcgattttttcctaagagtttactggattctgtcaaggtaattagagtctcctttatcataataaaataacaaaattatgccaagaccttttccccagtggtaaattgcttttgggaaagtaaaatgtagtttccttccttacatgtaaaatatataatttaaaaagctgacatttattctagtcacattaatggcaaataggtttttagtatagctttctcccataaaacatggttttacttcttaattgtgtttgatactctgctaagcataaaactaaaaaagttatgtgcacagttattcctgtcatctaggtcttcacaggctaaaatattttgacatgcagaagaaaaggagcaatatgtaaaataatcgtggtggtggaatcattaatattgtgtgtgtgtgtgtgtgtgtgtgtgtatgtgtgtgcgtgcatgttagtgcattttgaaggtctgtcttttgtttcaaccctttggatgcttccccgcattagtagctttggcagagcctcagttcttatccttcccatatccagcgtggagagcaccttggagtgaggtgggaggactctgaatgtgtgattcccccagctaatccagagcacacatcaagattttcaagcgcagcaggggatacaaactttagggttaaggcagagtctggctcagatgagctctgccattttctagcctcagggtcttgggcctggtttcttatttctacaatgaagaaaatagtattttgtagggttgatgtgaatatttaacagattagtaaatatattacttaccacagtacctgtcacatagcaacagtggatgttactgctcttactttttatttttcaaagatcttattctacatcccatcagctgaagcccaagcaggagaagatactcattatgagaaaatgtagctaactttggataagttatttcatcttttggtatttcagtttacacatccgtaaaatggggataaaatccatttctaacacgagattaataagaggattaaatcttagaaagaccaaaagagagagaactgtcgacgtcatgttgattatcattgggccggagtgttggtataatttatcagatgcaatctgtgacaaaagctctgtattcagatatctgggtcctgctctctgtcaaacccatccagaataggactgtaaggattagtcactgtttccctgagtccagaaagtaacagtatcccttcctctctcacatagcttcttgataatctaatgggaaaaatagatataaaggtgttggctttaaaaca

SEQ ID NO: 131962 - DNA, 1064 bp, Homo sapiens
aatgtgaattgtattctaccctatctgtatgtgaggccaagataggaaaatgaaatggtaactgaaagatagagtctatgtgagaaccagaggtatacaaaggaatgaagagagccagacatactgtcaaaaggatacagagttacaggaagagagatacttgaaagaaatttccatgaataatacattgacatatttttaacagccaaaacagttaaagaaagaaaagcaggttgtctgtcaaggtgaattagtgaatggtatgtttggagagaagaattttaagttcaagatctgtttgaaatgagagtcaaattttgcactgaagttagtgtaaatttggcttatttctggaaattacagaacttcagatgatcagagaagaggtgaatagaagaggacaacttagggctttaaccagtgttaaaggctttcaaaaccttacgcagtttttgtcaggggtcagtgaaatggagaacatgagaattgctatacataagggcttgtgattattattacttgaaacaggagagctagacacagcataagtttgtaaattagatccttcttagaggattgcatggaaagttgaatgatctattgttttgatatggctgtttcatcttagttaatttatatgtgtgatatttaaagtaagtaaatatgatagttaaaagaaagaggaatctttagtttattgtagttctaggatgctattgtgcttattttgctgtcccctctttctaaattcctgtgcttttgctccactgtagtgattcgttgcagttatacaacttgtgtgaattcagcaccctatctccatataagtagattagttgagtgacctcttgaagcagaatatctgggttcaagtccttatcgcaccttgactattctatttgccaaattttattagtaagctcttggtgtctgtttccaaacgtgtaaaatggggataatggtgatacctacctatatatgagattgtcgtaaggagttagatgagataatttatgtcaagagcttaatacctcttgtacccaacactgaataaatgtggacta

SEQ ID NO: 131963 - DNA, 1092 bp, Homo sapiens
tcagtgaaatactgaataaaatttgagtaaattatgaactattggtttggtgcaaaagtaattgcatttgttgctgttaatttttgtttattattcagatgcctctcccccagtttttatcacttaacaacacaaacattccttatatatacatataaatgtatgtcttccctgattttaggcgatcatactgggagatgcggggcaatgcactagaaaagaagtctaactatgaagtattagagtaagtattgtacttacaatctatacctgcaaatatgcagaactaaattcttagtttattttaaaattaaatactgattctgaaacactgctatttctaaaattttatatccagaagaggaaaaggacagaatccttgatgacattaattgtgttaataaacatttagatttgttgatagatgtcttaaagctaacattgtatatggcccattaacatacactttgtgtagatttaatcattgcaagatgatatttttttctaatttatattgaattctacagctgcctataaattgcttataaattattattcatgttctctgtataagttactacagattgttttgcacaaatagagatacggaagttactgctcatgtatcagaaaaatctagaataactagaaatttttccaataatgaaattaatgtgtgcatcagactgttatattagattgtattaaattaacccaacgtggagtttatgtcgtgggaggctagaaaccctatacttcatctttttcataattaattcagcaaaagataactgaacactgagtcctttgtagctaagtgccagagattcggaaataaaacaaaattttaacccccaggaagcattccactaaaaggaagactctcagacaagtaagcaaaattataacataatgtgctagaaactaaagtggaagtatcagctgggtgtttacaggagaatggtacttgatgtgtgaggtgttttcacatggagatgttatttaacctaagtcttaaagaatgagtgattcacaaagtgtagatatgtggggtttgttgcatgggagccaggaagccagtcaagaggataa

SEQ ID NO: 131964 - DNA, 1038 bp, Homo sapiens
ccatacatgctgcccacttaacaacatattctctcatggccctcatacctaggtaggtacagggcaagagtcagttctaacacttaacctgtccattgctccaggagaaatttcaccatctctagggaacattccctgatgacctcattcaaaggtgaccttctctgaactcaagggaacacatgttagaggcattagatttgggagtatttaagattgcttcataataatttttaaagagcaagtaataataaactgattaggcccgaattcaaagaacttttcatgtatttccagtgtcaccagaaacgtagccttaactgtgtgttcctgaatgtatgtttttttaaaaaaatgattatgaatgttgcagcctggtcttgaacagtatgatctccctgtttttgaaagtataacccctccttgggtctggaccttagaaagtagtaactgaaagatagctggtgtgctttgacaggttggggggtgatgacagtggaattgcagaaatgtgtttttaagtttacatgccttgttaataaagaaaggagagaatctctttatgttttcttttctaaaacttctccttgttcttgaaaatactatttcagaaacaaagattcctaagtaatttatttaacttgatattctcataccaaagatttctgataattgactaaaagaaatgaacattgcattactttttagcatatagttttttttttgttttgtttttgttttgttttggtttttttttttttttttttttttttcagtttataacagtcattcttgtggggggtatgttttagggcatcattcagaagatagtggacagtcacaaagtaaagcatgtggcctgctatggattccgcctcagtcacctgcggtcagaggaggttcactggcttcacgtggatatgggcgtctccagtgtgagggagaagtatgagcttgctcacccaccagaggagtggaagtaagatacaaacctgctttggtgtgatgcacacttgatttcttttgctttttaaaaac

SEQ ID NO: 131965 - DNA, 2787 bp, Homo sapiens
gcatcatgcatgtagtaggcacttcagatgttcatgaataaatgaatgaacagtttatgaaagaatgaacatggaggaaagagtcacatgacctatttcgaacagtggtgaaggtcatttgtttgaaagtactgtctaaaaggtaagtggctaaatggaaccaagcaaaataataaaaactttcagaaatgaacaaaagtatagcctcatctcactagtgagtaatcagggaaattaaaccatcataacaacagtaaaatacctgtggaagtttttttggtcattaaattgatcatcataagattaattttattcattaatgtgagataaatgatactctgtaacattatgcatcaagtataattggtatagttttgttgatggccaggaagtttggttgtgcttatcaaaatgtttcagttaaaggaaattttgtctgtttctatgcagtggtcataaatacctttgatgacagctagaaggatgttcatagcagtatttttatttacaccttcctttctccctcagaacaaggaaatctttattcatcagtagtaaaatgaccttgcacatttaatgttatgttcctgataagatacaggcatgatgtgaacactggcttttattttaaccttgaaaagaattcttttaccatgaatgtctactatgagaatttaatcagaaaagttgtgtatttctgacacttgggttatgagagacaggtttcagagtagccaattattgttttgtatttcataggaccagatagatgtgtcttcaaagtcacgatgagaaatttaaatttaattctggtacctttagtggcatattaaaaacccatgtcctattatccttttagagacagtcatttttattctaaatgtacgtgtgtgtgatatgaaaatggggcacttccatatggcagcactgtagggttggttgagtttacattcctcactaaatacgtagttctcagaattatttgttgagttatccagaccagatatttagttctcaaaattacttaagttactgagtatatgcatttagcaccacatatttaagcactttgtatatttataatgtttgccactatccagagaaatttataagggtgctagagaatgagcagtaggacagagtacgatatggatgcgtaatgagaaagcaaaaaatgaaacagaaggtaatatctgtgtgtttattgcttttcactgtttcatggagagtgaaagttgaaagctggtttgctcatgaggtactactgtatgcaaaggctgtgtcactcagatccacactttgaagtcactctgagtctcttcaggcagcatgatcaagtgaatggaataagattctctctcttacgtgaaactccaagacagaaacctgcctttccctaacagataccacagttctgggctaagcctctttgagactggtttgctgcaggtctcctatatgtgtgctgtgagttcagcagagatgaagtgactttttcatggggtcactacagaaggcaactggagaagctgggctttttcttaggatgtgaatggtgacaattatgagaaatgatttgtgttccttactgccttatattcaacatcaggttatggaaggttagtagaccaagtgacctgaggcagatggctagagaccactgtagacactgatcgcagctctaacaagagagagccgcctcttgaattggtagtagcagtgagctgtggagcaaggagacttactgacctgtggtttaccaaggataactggtgttggtgcgtactgggtgttgatctggcagagctggacagggaaccaggagcttttgtgggaatttcacagaggtgctagcttccatcctttatagttcatggatttgtgtgttggcaagaagctgcagaagtcacttctgagagaattgttaaaaggtgctccttcctttaggcaagttccccaccccagagcacaaggtttaaagactagaacgtggactcttttcaccctcagctggatatccttgtgtaggtagggtactgtcatttacagtggccctgtcaggaattctgggcttggatcaaaaagccaggaaggacattttatgcctctgtcagttccacataggagtctgtaggctgcaaacatccttcctgtcctgatgagaattcatcatctttatgaacctgtctttgactcttccagcctggtcctctgttgatgctttctctcttgataccatgtttactcctttcctttgtccctctctctgccacttcctgtgcttggtaaacaactttgtacctgggattgagttgtctgaaagagagattgactctaccacttcattcactcagtgccctgggaggtctgccacatgccaggtaccagtatggggagcacagcacagcagcacacatcctcagtgtgcatatactgggttttggacagtttttgtatatggtacatgttacgatttatctttgcttatggagaaggctggggataatatcctttatcatgatcagcagcattgtgctgtaataaagcaatacttgatgagtgcaggaacttttttgtatgtcttaacaagttgtattatagcttcaattaattgctaattttaaaaagcagtgattattttctttcatagacatttttcattttaatatcagcatcatttaaaaaaaaacttgtcttatcacctaaaagattgagaaggtcacagttggttgtaatttgcataccctcgtgtaaaggacagcaaatggttctgtcatgttcccaaat

SEQ ID NO: 131966 - DNA, 2073 bp, Homo sapiens
taagctatcttttaatgctctgtcctatgtctcaatagttttatttttttcttttaagacatctgtattctgtaatatggaagtttttaaggaataaagaggaattttaacttaaacagggttgtaggaaataagagtaacatgtattttcttattttaaaaattagttttctttactcactgtaaagattgtatattcaatttgaaactcggtattattgtaaggtgggcttaggaataccatacataaacaattttcttctttaatgttgttagggtttttgttcacataaaaatgtaaatataaaataatagcattttcattgtaacattcaagacagtatttgggaaacatatttagaagttaaaaatgctatgtaattggtgcttgactaaaagcaaatcagctgttttgcttagagtagtagaaatatttaagttaggaaataaagttcttaatgaagaatataataaatattttttgttattatttctaatatatttaaatgtcatgttactcccttaggaaagatttttaaaaggaggaagctgcactgttgtaaaaggctgcagttttatgagtagaggtatagactgattgattttagttttcagggtaaaaattttagtaccactgggtactaaaccaagttagcaccaaactacagtttcaccattaaaatcgcttttatttagttgttgctgacatctattgattctttcctaggcttttaaacatttacaaaacgtgatattagaactattttagtattcattttgttcacttgattatgtaattagatactcagagtaaatattttgctgagttaaatttacactcttggattttaaagggctttgggaatgggaactttttaaaattttagtttctgagcatcagaaatgtatagtataagtgagtgtgactaatagtgttcagagccaaagaattctatacttcttgaaaattttggtcttttcctggatttgctggggttcgtttgcatattgccacctccattgtatgataacattgtgttagcactgatgattaacactaaggctctgatttccttcacaaagcctaagctgtattcaagatctacacatccagtaccaacagaatattaaattatcagctactggatttctttttattcagtgtgactttaaaaccgtgaactttggaagaaaagagattatagtgtttttgctcaccccaaagtgattgatggaaacaacttatttttcaattaagtttgctggctgtcagagcaaatgagtacaactatttttaactgaaatatgcattatgatagaggttagggttgggtgagagggaacagagctcacacgtataaaagatgggaaaaggtagggatagtgttaagggtcagaatcagtttcatatgtagggctgcagcaagccatctcctcatatacatggttttgctttccagttgttcagaggaggttctgacaaaacctgggagctgtcatcctgttccttcctggtgctgcacacactgcttccattgtgattgcccagtgtgtaactatcttagtaaacttcctctctctcccctcatgttactcttgtaccaggacagggaggcaggaaaccttgttgttatgctggttaatttttatctgtgtgataaggacaaagatgttggtgtataggaattggctgaattggttatattcaagtataaaagttacaacttgtagataaagacacagtgaaaagctcaaatccaaagaatatacaaatctctatctgcagttagacattctaaaccacacatttgattttatcagtcacattaacctcaaaaagcacagcagtgtcccaatttaagaagacacataaaataccaggacaagctaaaaataatagagcagactatatttatataccttgaactgaaacctttaaggtacccttaaagccttctggggtgtttgaaccaagctcactgtgcggttgaatttggtgtaaagaatccaccttaggtcccatccaaggaagattatattttaaagtattaaaaaggactttgttttaacatg

SEQ ID NO: 131967 - DNA, 1831 bp, Homo sapiens
aactagccagtacttgcctcattttgcagctctttgaccttgggcaagttgcttggcctctctgaacttcattttcatcttctatgaaaatagggaagtagctgcttcactgagattgtgttatgggttaaatgcagttattttatatacagctatagttgcttgataaaaggtataggttattattagcagtatcacctgtatcctcttcagctcttctctgtggcatgagttggttcctaacatttccatagctgctgtttcaatctggtctctacttagtcaccttggtctctggcctggagaatttatgctctttcatatcttaacatcttcctatactctcaagatcttgcacattaggagatgatatttggatattgaaataaattatgaagtagttgcaggggtaggagagaaagcccccatctactggtcactttaaagtcacagaaaccaggttcatccctctccctcattctctccatcacttttcttgtttgtcctctcatcctctctgtcactgcgactgcattagctccagtcaccaccaccctgtgcttacaccactctctctcctgctcacctggtcctgtggcaggtgttcagtctgactaaaaaatccttcctgtggtagggtggtgtgctgtggtgtgaagaccctggcatcgtagatgaccgagtgggcttggtaactcctgtacctcttcctagtctatgaccctgtctttagtcttagtgctctcatttttaaaagaattgtaataccaagtttgtttaaaagatgtgaaaattagttgtaatcagtacttagtgtgtagaatataattgtaggttactaatgaaggtagcttttattttgtaacttttgagagccgtaagttccaagatggactcagtgtgcttggattatttgtacagtccattagtcgatggctcagattaaactccagtccgttctcacaggagtgtgtcagatatgcttgctggtggatgtgctcttatccttcccatcatgacagtggtcctttacagtcttggtctcttagtataatggtggaggctggggatattttttcatgtattctagttgatctagttgcttgtttcctctgttcttttcctagcttgctcatgtttttctggagcccctttcttcccagtgttccctggggtcagagttcatgctggtgaatgatatgttttcagtggagcatagaagaggtcacttgaactctggctactattaggagcctgaaagtaaacctagagacaaagccatcatcaagagtagcatgttagaaatgaaacaactgtcctggggcatcactggacacaaataagcctcttgttctcctcagcctttgttaagctattgttttcagaagttagtgacttcataaacaaagcctcggtcattttcactgttaagtaaaatacttgatttttgattggtttatacaaatgtactactaacaaaattacccacatttaggaaagctagaactgtagagtctcagtgtgtcttatgtacattcggagaacaaaggcaccaggagcctagttactaattatcttactgctaaagtggaatgtgttcagacagctaaatttttgagatgaccttgactgtctcacagtttgaatggaaaaactaagtagctctgcattttaaaaagttgctagtacagattgtaagggtgttttctgtctgtcttctttagtatgagtttattactcacttatgttttgaaacgaagaaaggaaatcatgcctcttggatacctcaatattccctaagctaatgttaaagaatgtggctacctcaaat

SEQ ID NO: 131968 - DNA, 1027 bp, Homo sapiens
tttgccgtcttctcattacttagaggtgataggagggtggtggaatatggcctacacttcagtaaggccctggagacaatatgtacagaacagacagaatttccttctgtcacggagcttgcattgtagtgggggtagccaaacaataaactgaatgttgaagtaaatcatgaggtgttttagaaggtataagtgctgtgggaataaaatgaagcagggagagcagatgggccatgcagtttcagacagggtggtctggataggccttgttgagtaggcgacatttgagcatagatgtggcaggggaaagggagcaagccatgtggataacgcgggggcaagagtgtcccacatagagggacaggcagtgcagagtccctgacgtgggcagggagtggcaaggaggtcagtgtggttgtgccaaggaaactaggggatccttggcgatagaggggagccatatcacgcacggccttacagactgtgctaagtatgtaggtgctgaatctgggaaagttggagaactgttgatgagttttaagcagaggagtaaaattgtgtgattgatgttttggaaggatcagtgcacaactcagaagggttgtgaatagagtgtagggcggtgagagctggagcagagagaccaggtaggaggcctatggctgtaatccaggcagcctgggccggggtgaggccaggagatgtggtgagaaatacatgtattctggttatatctggaaggtaaagataagagtttacttttcaagtaggatttaccagaattgctttaaaatatgccagtactaaaagaggttggtgtaaaggtcacagaacttttaaataagtggttggcttttatattagtatgtagaattcataaataagggaatatagaggactgcttacgctttttcacttatgttgccattaactgtagtctgtttctgttcttttcaagatgtcactggattaggaatttaaaagcatagtttgtctttaatatttagcaggaagaaaataataaaac

SEQ ID NO: 131969 - DNA, 1034 bp, Homo sapiens
cctgctataatatgctctggggccctgggacatttcatgggtgtaaagtagcttttttccttctgtttggttctatcgtttatggacagtttgtctaatagatataaaataaacatttatatgttgttgaaaagttgttcctatctccccctttctttaatgctctcatagttctaattagctatacacatttaacaattgtgataatacttttaacctctgattgacaacttacttaagatcatgtgtcacttgttaatgttgtaattgcagtgctgattcaaacttcaaaatggagttttttatgtcctccttttctgcataaacacagtaacagtctaatctctctaactccattttgatatctctttcttttccctacagaaaagaaaacatcttgctagagagagatcaatagagagttgttttcagaagtgaactttatatgcagaaaataggaataagtctataacaacagatggtcagaaaatttcatcactgtcatagcagaggcttagcagaatataacttgataaacactacttgtttaaaacttttgaggccgtttagcaggaacattggggaggtgttatttctcatgggtggtttagatctcttagagcgttctgggccattgtgaggtcttgtgcatttgttctgagtcagatgggaagccactggaggatcttgagcagaggcgtgacgtaaattttaagaaacttgttgggatggttgtgttctaaagttaaggaatcaaggatgatgtcaaggtattttcattagcagctaggagaatggagttgctaatttcaaaaaaaaaatttatttttttattttttagagacaaagtctccttatgttgctcaggatgctagagtgcagtggctattcacaggtgtgatcatggtatgctgacagcctcagactcctgtccttaagctgtcctcctgcctcagcctcctgagtagctgggactacaggcgcatgacactgaccccagtgctatttactgatttggggaaatctgtttcagg

SEQ ID NO: 131970 - DNA, 1018 bp, Homo sapiens
gtacatgcttggtatagatgcagtcattcatttttttcctcaaatattttagatccatggttggttgaatctggatgtggaacccgctgacgtggatggctgactgtattgtatgttaaactttatcatttgtgacttctctgttttaaatgacctgttgattttctgatttgggatataaaggtttagcttatttatgttattccccatatctcttcctgcattacttattgttaaatagttgatatgtgtatttttcttttagaagtcttctgttgtaattttaccaatatctttcctttgcttgggttattgattcatgtcaatatcttgattccttttaagataaagatagtattgccctaaatattgacccttccccccagttccagcatgtctccctgttctgcctcatattttgtttttgttatttcttttatgttgggatttttacatttgtattttatctgcaactacaagtgttctggggactgctcatgggttgaactctaaaactagtttattatttttaattttaagttttcttgagctttcccagcttagctttctttcaaggccagtttttctctttgttttctccggtatttgtttctttttcatgaaggtggtattccctgtatgtctgatgatcctttattgtctgtaagtgtatagggaagcaggactagctacttttcggagttagatttagcccctggtaggaattcagaactgaagtactttgcttcagcatgcttttagtctgtgggcccctaaataacaaaataaaggagagttttactgtaaggttgttaacacctataccagaaacctttgctttattttctagagaaatagccccttgggatttttaaaaaattattattattattattttttgtccgagggtaaatgctgagttagcctgggcacaactagtcagttaaaccctgttttcacccctggctattaacatcagccctccccaatacctcatggccaggcccaaagcctcatc

SEQ ID NO: 131971 - DNA, 1418 bp, Homo sapiens
catagtatatatagcgccaagtactgtccctagtttcaggcatctactgggggggactaggagcatatcccctgcagataagtgggaatagctgtatcttattctcatgggttctagattcagatattggtttagctaggtattatatttcctaactccttaattttaatcaaattatttaacctattgaaagtcaattttttttaatctgacaaaggggattattatagaatctcccttatggggttattgcgaagatgctgtgagatatgcgtaaggtgttcactcaaaattgttagcaatgattatttggtgccatttttctcattttaattagcagaaaacggagccctagagagattatattacttgtaatttgtcagtttgtaacttgtagatcttggtgcatgtttcacagtttagaaatcgtacaattgagggtaatcctactttgtcttgtttccaaagattgctctttcttctaagtctggtggtaaatggaggacagataggttcatagagtatttataaatctcttttgtgggcattttgtttatgttgttacagtacatatctcataaacttggacttcatggagtcagaattcatgataatttatagctgtattgaatttgactttcgcaagtgtttttggagtatgggcctaggattattttttaatttccacatgagtgtcagttcacatctttctttgttctcttttctcccccaaatctatttctaggtgttagtgaagggaaattatgtcatacagtttccatttctttgcaaggcctagaagtctgggtcctgtgtccccctgtccttcataggctaagggagaggagcctattctgtcccttgtgctgtgccagatgtgattgttacagtgtgagaaggtcacagcccctctatttgtgttcccctatttccttcccccgtccatattgtacctttcttcctataacagtgcattctgtttatttgggtgtgagtctgtgtgtgagggcagttttgttatttcatctctgcttaacccgcagttaacttgcactaaatgctgaattaggactgtttaacgcctgtcacaaaataagttctcttttcttagtagatctgagcaaaagaaagaataccaactgtaacttttcagcaacattagctgtaaaaatatttcctcttggtatagcacaagacagttccatagcagaaatacaaaacttacattcttagtgtaatgtgctgggaaacgaaagtctaaagagaggtgagatgacaaaccagctatttgtgacccaagagccatctcattggctcattggaacttaaaaaaaaaaatttttttttttttaatttttctttgcagatagagtcttgctccatcacccaggctggagtgcagtggtatgatcatagct

SEQ ID NO: 131972 - DNA, 1031 bp, Homo sapiens
tacgggtttgaagacaggccttttccaaatttgttattcttcattcaaggtccagtacagtaagtatggtaagcagtgaagaagctaactgtaaggtggacagtacaataaagccttgaaaaaaactagtgaaataatggtggttatatatatatatagtctttcaggttctctctgactgcaatggaaagaggaaagagaaattagaagtatttttttaaattgtcatttgatttcttcagagttattgtgggcttctgaactgtgagtataattctcttgctatacttgtgtcttgagatttttggttttgttttttctttcacctgtcttagtgtctctttgatgtacaatagaaataaacaaaaggtagttgattttgcagagtgggtgagggaagaaatataaattgtttagtgcctattatgtgtagatactttatatatttttttctgagacaggtagtataataatggttaataacgtgcttagaatactgtctggtacattataaacactctgagttacaattactaattgaatcctcacaataactttataagcaaggtttactgttcttccctatttcacatttgcataaaccaaaatacagagaggttaaaggatactaagttacggccggacacagtggctcatgcttgtaatcccagcactttgggaggccgagacaggaggattgcttgagttcaggagtttgagaccaagtggctgggtgcggtggctcatgcctgtaatcacagcactttgtggggttgaggcaggcagatcacttgaggtcaggagttcgagaccagcctggccaacatggcaaaaccccatctctgctaaacagacaaaaattagccagacgtgatgttgcatccagctgttgtaatcccagctactcgggaggctgaggcaggagaattccttgaacctccacaggaggaggtggaggttacagtgagccgagatcgtgccactgcactccagcctgggtgacagagcaagaccctgtttcaaaaaaaaaa

SEQ ID NO: 131973 - DNA, 1049 bp, Homo sapiens
ctgatataaattttttacatcctagggcagcaagaacagatttagatggtaggaggatgactggactagaggcacaagatcagtaaggaaggtagtaatccacattagaaggggaaaagtcacccaacctttgtcattaaggaaatggctcacctgctgttatttagtaaagtgagagggataaagttcagaggtcgaatttagtaacatacagtctatttaataatagactgtatgttcttttaattatgttgtacatataaatgaaggacttaagggcacaactgaggaaatggagagtagggattgatgtgaagcctgtttctgagttcatctacaggcgtgactaagtaagtgaaatggcaaggctgagagagaaggaatccagcgtaattccaggatggcttccagattttttctttggtgatgagttcatgaagatctttttgctcttaattttttttttcctggaatatcttagtgattgctttgatgagggaacattgtctcttaggtccatgaacccctgaaattctaagcagaattgtgtgtgtatgtgagctgtttttccctggggagagaattctagagctttcatcacattatcagaaaggagtccaaccaaaaggaggaatcactttttgttagattgtacacatctggtgtactctaaaggtttgtgttggcaagggaaacatcatcccaatcacaggatttttactttaaatgtaatgcatctcaaactgccaagtaaaatgcaaacacatgcaactgttttctaagttgaactgtatcaaccagcaattggaatgtttttccctagtttctcctcctttccgaaagacagaataagacacatttttggtacataaaaagcgagctggagactgacgggcatggaatgcttcaacatgctatgaacattagagaaagctaaagtttgtagagtattaacgtatcttagtattcatgtggctatgagagatggtgtcacttttaggtaggatacaccagtaccataaatgagtgtagtttcctcagttggatta

SEQ ID NO: 131974 - DNA, 1526 bp, Homo sapiens
gagggaggctcgcgacggcccgacctccgtcccccgggcgcggcctcgcgggcagccaagggtgggctccgagcggcctgccggtgcccgagccccaagcccgccgtgtccccgaacgcaaaccctcaagtttggtagagccccgtgggcttcttggcgggagccctggagccctcactgaagtcctcactggagtcattgtgcttcccaagttttctcctcttccccgcccccagcccccgactctgccgcggtggcttaggcgcaactgtttgccgaatttctctctgggttccttgtgtagcggcatcctgttctttcttagaagaaggggtgtgtgtgtgtgtgtgtgtgtgtgtgtgtgtgtgtgtgaattggtttcatttaattgcagaattttgtagctaaattcagtgagggtaaagtttctttttttttttttttccgagtcatttcaacagtgtctcattcttgcatagttagcctgcagctgggtttttggcaatgagactaagataatagtaatattgtagtaattatgggaactggttatacattcaagctgaaagctgaaggcagtgcaagagtttggggatttgtatttaagacttaaccatcgctaggatttttacttagaatgtaaacgttttcatggctggaaaaacagaccagtactatttgaaatgaaataccagagcctcaaccttaatattttatttgggaaacgggtaatgaaaatgatgtcttcgagagttgagcactccgtcccatatttgaaaacttatgagcagtgcgatgcaagcacacggatgaactagttacaagacacataaaagtaaactagcattcaacgtatttttgttggggtacagtatagataatattttcatccagttatactagccaattaattagaaaagccctatgatattcaaacaaggaacattttaaggatgtttgtgtcccaatatctttgtgttttgtatttgtggttatccttggtggggaaaaacaggctgaacctaccatcattttgaaccttcttgtttattaaactgcagaaacaacaagatcaatattacaaggttttcctttaaagaatttcaggtcactatcaaataatctagtttaataatgaacacaggcacagattatttaaaacacatgcttcctttataagggagccgacaatcacctaagacttcagtgtagacgctgattagaaggacccatacatcattcagtggtgatgcatcaagaagcaagtcattggttaaataaagacatggaaatcaaaactccatgtttacggtttggggcaaagaatactggggcaaactctgagaggagatgggacttaaaaagccttattatttgaggctggaagcccattgaaagtgaataatgttagattaggagtgaagttccatgaatccagcagtgaaattgtgaggaggcagtgaggatcattaaaacgttttatactaaaatgttttctgaaaagcaccatgcttcttgatggaaat

SEQ ID NO: 131975 - DNA, 1019 bp, Homo sapiens
cacagtagtgtcgagccggcagcagccacttctcataaccaccaggggtctgcgtcagcaccccattttacaggtgggaaaatgggggctccaagaagtgaagtgagcagcccgggctctggagccctcacagcctcacggccccgacccccacctccgtggctgactccccctgcacagggggcacccccaccccgccttccttcctgaatatgattgatcacccaggaacatgacagccatggaggaactgagaaaaggaaagaaagtcccagcccagccctcggcgccagtggttcctgggccacgtccacgtcgcagccgtgtgtggatgccacattggtcactgtgactgtgagggagtcacagggctgcttctggccaaaagccccttcatgtccctgtggctaccctcgctgtgtggttatttcaaaacattgaaataacttttttctcatattagaagttatatatactgtagttattacaaagccatttaaaaatcagaaaaaagaaaaagtcacccagaacctccctgccacctggcagcatgagtccttcccatcacaccttctcatttgcccatttccttattcgtttggcatgtatgtatcgggcacctgctgtgtgccaggcactggggggccctggggaacggcagtagcaaaacaaatccatacagagacggagggacctgggacctgaggtttcatctattcaccccattcaacaacgcgtcacagtgtggctgtctacactggtagtgtctgcgctcaacgcagtgtgcctccgggcacttcttccatgtgtcttatttgtccatgtgtctcatcaactctgtccaggcgcaaccccatatcctgtcaggagcagacacccagctgctagggcaagtctcaggcatggccacctgtgaggtcacagtccctctgtgggccccagtgccctatcctggggccttcccatctttgcctgtgcgaggagcaccgtttctcaagcccactcctgcctctgtggcc

SEQ ID NO: 131976 - DNA, 1048 bp, Homo sapiens
acaggtgtgagccatagcgcccagcctgaatggcctattcttttgatgtatttgtttgcataaagcgaataatttattaggaaaaaatgggatggtgtattacagacatgtgatattatctctgctcaaagaggcataattagtggggtcctaaatatgttgttttccttttgttctttgaagatgaaatatcttatgaacaatttttttttaatttcttaatattttacaaactcaatgagttgacagaaaagcagaatagtcccagccactccagaggctgaggtgggaggatcccttgagcctagaagtttgagaccagcctgggcaacatagcaagatcccggctctttaaaaaaaagaggcagaaaatatgattacatatgataaaactttatttcccctagatgaaataatttattctctccaagaaaacactgaacacattacgtactaagtatgccctgtaaggttattcattctatttatatattactttagatctgggagatcatgtgctaaaatcgcgagtttgtaacatgatctgaggaaaccgggtacaaagaggtgaagtgggccgggctcggtggctcacgcctgtaatcccagcactttgggaggccgaggtgggtggatcacctgagggccaacatggtgaaaccccatctctactaaaaatataaaaattagccaggcatggtggtgtgtacctgtagtcccagctactcgggaggctgaggcagaagaatcacttgaacctgggaggtggaggttgcagtgagccaagattgtgccactgcactccagcctgggccatagagcaagaccccgtctaaacaaacaaacagacaaacaaacacagaggtgaagtgacttgtccgggaaggctggcggccgagctggtcagcacttggagagtctggctgcccctctgggctccccaccctgaactcagtttcatgtgtgtggaccgcaactgacttttgtgtcttaatttgcataaggaactagtgggctggaggaaggtgagaacaggaacactgcctcc

SEQ ID NO: 131977 - DNA, 1033 bp, Homo sapiens
ctctacgcaggcaggggagaatccaggcactcactctcatgtttgtttttgtttttgtttttgagacggagtcttgctctgtcgcccaggctggagtgcagtggcgtgatctcggctcactgcaacctccacctcccgggttcaagcgattctcctgcctcagcctcctgagtagccgggattacaggcacataccaccacacccggctaatttttttatatttttagtagagacggggtttcaccatgttggccaggctggtctcgaactcctgacctcaggtgatccgcccgcctcagcctcccgaagtgctgagattacaggcgtgagccaccacgcctggccaactctgatgtttcgtacatttcagtccagttgtttatttaactttttgaacatgcacacgcttaaatttttcattcgagaacgtgactaatgagaattgctgcctatgttttgacggcatggtttgttttgttttttacctcggagcagttttgtgcaatgcctgcccctctctccctcttccgtaaacccagggcctgacacctaagctctgaaacagttccccattctctgccaagcccaaggccagcctggctccctgtggctttgtgctttcttcggataattcaccagttcttataagctttacgttagaatcgttgtggggttcacagagggtctttggtccttcatattctccagaatacgaatacgtcctcctcgtcaccgtgacccttgctagaccatgacagccgagcatgatttaactgcagccacaccggaagtgcactctacagacacacccgctgtgccctgggttgaaatgcccctcacggtaacctgacgctcatgatttataaatggggccgcctgtgtgtctcatgcatttaaattgcttcacctgcatgaagaaggggggtggcatttgagcagtcagtgccgttccctgctggtttcatatcacctggttttcagtactgctgctgctgtgggtcgggggcttcggagtgtgacaaccttggacaa

SEQ ID NO: 131978 - DNA, 1050 bp, Homo sapiens
gagttgtttggaatctaggagcagccagctaatgcccgtgtgtgtgaggtggcccttgatggcagtttcctaaagcaattcagcctgcaccatccttagcccaggcagtgtgctatcttcttcagaagttagtggtgacactgcctgcgatgctgctggcagacagtgctgctgcccctgggaggcccctcccttccccctgcccttgactcctgggcctaaggctggtctggggttgggacacgctgagggtctgtgagtcccatctagctctaagagtccagcctcctctgagcggcaggttgggagttgtctgccatcaggtgactttggtgtgcttatgatgctgagaccagattttggggtctcctgggagtccctgatgctctgggattctgctggctgccccccgggtcagccctgggggaggcaagcagtaaagggggctctgggaaccctggacagaagacgtgatggagcggaaggcccattgttcgttgagtgatgaattaacactttcctttatgatgatgattcaagtcctgtttctggtttctctttcatttccattatttgctcaagtgacagagatttcctgtccctcctcgaaacggtggtggtggaggtagcagcagccagcaacccaatgttggctcctcttggagaatccaaaaatcgaccatgttccaagtgtgtagccttacttatctcagcagataccagcatctcctttcttctggaaacgtgtgcagagttgacacatatgatgtgcttagaacagagcctgtaattgttagctgttattactgtcattatctttttctccacttgggttcgtagtcagcagccttggtggtaacttgtcgagggcctgcctcacacttactgtggaaaagtcactcagtggggcagtttgcacctcattcattgcaccccactctagcccagcctccacctccacaccgccccccccccccacccacgtcttcttgctgaatgcgcagggatgtcctcatttccaaactcagaggttttctgggccctggtgct

SEQ ID NO: 131979 - DNA, 1020 bp, Homo sapiens
ccttccccaggattcactttcgtatgagaaaatgtttttctagaaagtaggtttggttatttgcacagacgtacccagagtgagtggcagagagctgtgtgatcttgggtcgggccctcggggcacacggcttgctcgggggtcgggcggcggtccacagggccatctggtggccgtcccctgactctctggccgggttgttttcctcttttgcagatcatccagtcactcgatggggattaccagcggaccacctgtttgtatcaccttcccacctctctgtagcaagaaaaatcacttcagcacctcttcagtaataatgatgaaactggtattaactgaatggcaattatggatttttaactctaattcacagtaaaccagcaagccatatgtttaaaatccaaccaaaaatcgttctgtgttgctgcatgtctcataccgttgtgagaagttgtgagatagccacttgtgcaaagaggaatgtaagtgttacctgcccgaggaacacagcagaagcagaaagagaagacgtcttaatttatcattacagatatatgaaagcattatttatatagatagaatatatagataaatacatatatttttggtggtaatgaaaatggctccgcagaatgccgacccggaatctatgcaagttcaagagttatccgtgcccctgccggacccgcagaaagccggaggcgcagaggccgagaactgcgagaccatcagcgaggggtccatagaccgaatccccatgcgcctgtgggtgatgcacggggcggtgatgtttggcagggagttctgttacgccatggaaaccgctctggtcacaccaatactgttgcagattggtaagtctcctccccgtctgtgcgcagtgaacgctgagcggagtgctagcggactgggcgtggctctgatcctctggaggcagaggatggtgcgtcctggagagccccgggcactggagtctttgtctcctctcccttcagcctgccctgatggtggttttcg

SEQ ID NO: 131980 - DNA, 1019 bp, Homo sapiens
cacctcgaggtttctggtctcctctggggagaaagagaggaggagctaattaagaccacctttggttcggtggaaagtaatgagaaatatttttgttgaaaccagttgttggaaaaattctcagtaaggtattggcccatagacctaccttaatataaactgtgaacaccatttaggtgtgtttttaggggctctaacacttcagttgaaccgaaccccatgtctggagacctaactccagaagtcctgaacttggggtgttccacatccccgatcttatcttacctgaggagagattgacctcatttcctaaaacatttccaaggtggcatttccagttagcttattgctgctttattgtatgtgtttgcccaggtggggaatttgtcaccaagctgggtttgtcactggaggcagggtggtggaaagccgagggttggggtgatagggttccgtagaccctgggaaagctgcgtgtgggttgggagtctccgaacccctaggtactatagtcagagtttggcacatgcgtacatttttttctggagaaaaggtctataatttcattttattcccaagaggttttataacctaaaggccaataccacaggagtccaggtgcctttgggtagacttcgaactccccccggacagagaatcatgctatgctcattccacccagcctcctacttttcatttttcttttctttttgttttttttgtttgtttgtttttgtttttgttttttgagacagggtctcactctgttgcccaggctggagtgcagtggtgcgatctcagcttactgcaacttccacctcccgggttcaagtgattctcctgcctcaccctcctgagtagctggtattacaggcgcccgccaccatgcctggctaatttttgtatttttagtagagatgggctttcgccatgttgcccaagcaggtcttgaactcctaatctcaggtgatccacctgcttcagccccccaatgtgctgggattacagacttaagccac

SEQ ID NO: 131981 - DNA, 1024 bp, Homo sapiens
gcttcagtgtctggtcttgtcggtggactcggaatggaataatcaaggggtgaagcatttttaaagaaagccgttttcctatttagtaataaccctagaacagagtgtctccctctggtgctgttgacgttctgggccagggccttctctgctggaggctgttctgtgcactgtggtgagttgaaaggcatccctggcctccgcctataagatgccagtactgtcccctcctccccctgttgtcgcaagcagagatgtctcacgtcattgccaagtgtccctggagggtgcagagttgcccctggctgagaatcactaccttagaataattcatatattacttattacagacatttattgcctaactctcagctcttactggaacgactcttaggaacagagacggcttcacttcaggcacaagtctccgaggacactgtaatgggacaaagagccgattgagcaggcatgaagggtctgatgtttataattaagtcattaggatttcttagaaaactaattgcttttgttcctgcccaaaacccagctgatgttttcagtctttgcagacatgtctgggtgttacttcttctcacaaaaatgactcttcttacctggtggaagaaagcagttaaaatcattgaccctattctggtacaagattgacagactgaaaacagggaaaatcgtgaaattttctgttaggaatgattccgaaaaggtgggggcggaacaagaatagcagaatgttggtccttattaaacctgggtggtttcttacactattctgtttactttgcatatgttagaaatagttctggctgggtgtggtgccccacgcttgtaatcccagcactttgggaggccgaagcaggtggatcatgaggtcaggagatcaagaccatcctggccaacatggtgaaaccctgtgtctactaaaaatacaaaagttagctgggcgtggtggcatgtgcctgtaatcccagctactcaggaggctgaggcgggagaatcgcttgaagct

SEQ ID NO: 131982 - DNA, 1031 bp, Homo sapiens
caacaaaagaattagattataaactgaaaatataagaatgaatagccttaattagatgggaaggaacacaggggcctttccagcatgatagacgggttctgtcttgataggaatttgttgaaactgtctgggtagtaccttctcactgcatgtaaattatagctgacttcataaacaacacttaacagctgtcatgatctagccagttagaaaacataagggcagaggaaatcctatttgcagtgaccatgacaaaggttaattaggagaaaacaatgtggaagaccatggaaggactgcttttaagttctccccgaaggcgtcagggtggacttggacaggtgcaggagcgctgttgttcttggagagaacgactcagcagcctgaggatattggctccccccaggctagtttataacattaatggaatctcaataaaaataccaacaaagacttttttcccagagcgaatcaaaagttcacgtgctcataaagttcttggcaataaacatgagagaattattaggacagcactgatggggaataagcagcaacatcaggaccctcccctcccccagcagaggtcgagatgtcccggcagcctctctgcctcccgcggctaggtagacaggcacatgggtgggacagattgcagccttgagaaacggagacaagtgcacgccgacatttggtgtgtgataaaagagcagtctcagggctggcggtggactctcagatcaatcatactgcaacacccagagggccaccgggagatgcaaagtggctcctgactcacaccacactcgagcatatggatccaaggcctcacacggacccacatagttttccactgggagctgtcatctgggttgaacattcagtagcctgttacatggatttcctgaccgggacatgctcttgcgttcttaaacgtatcagaatttgctggtacctttcccatgggctgtggacccaggaacctgtccttcagccttggccctttaactgaagaaatactcagactggttctt

SEQ ID NO: 131983 - DNA, 1036 bp, Homo sapiens
gctgttagtgttcctctccgtggccatctggagaggcaggaagacacgtgccggccgtgactgggggaactgcattggtaaagattgaacggggccgtccgaggctgatggtggtggtgggtttgtctgactgtgggtgcccctactcatgcctgtttctgggtggtgggtgcagaaaacacacagccgttctcatgagccggccctcatcagcatgtgccgcccacaagcggtgtctgcagcccatggtgtcaggcccatgcgtgcgtgtacatgcgcttcgtgtgtaggggctgtgaaaggggcagcacacgtttgtggtcaccgtgcggacgcgtgttgtccggactcgctagaccgcttcccaggaagcatggctcacggaattctcctgtcgctgttgaacgctgggactgtgctgtagatctgaaagtttcacccaagcttgaggtgtgtgtcagcagcaactctccagttacctttttggtgaaatttaagtttacagccagcttttccactcagcaaattgtaggaagtcatgtgttttggcatcagttacccttaaattagaaacaggacaatagaggaagttgttgattggaacaattgtagtttcgcttgtctgagtgcatctgcgaatcataacaaaattgttgtcaccgaatgccccgacagtcgctggaacagattccaaagggaagcttgcttttccatgctggggaaaatctgcccgaaaagtttcactgttcttttgaatatgagatactagaacaggtcacagcttaacttttgagcttctccgcattttaagcagctgaggcgacagcagctctcaggggtacaggattgcctgtgctggggaaggaggagcgtgacctcccttaaatgggttcagtgtgacgtcatgcctcagtagggagttttcagctgtgtactagagaagaatcattttccttttttcagataatgctctcgtgcttatataaaatagtttccttacagaaaacaatttgcttgctctaagaaagtgacctca

SEQ ID NO: 131984 - DNA, 1009 bp, Homo sapiens
cctcgttgtgggtggggtgcagggagagtttatagtccgggctgggccctccttggctttgtgaccttccagaagccacccagtgctcggagcttctgcttccgtgtggtaaccagggtgtgtgaggggtttctgtctccagcactcagtaagcgcctgagaaggggtcacagcagcactcacgctgctagacagtgcggcatctgcatccgtgccgggcgcccagctgggacctctggagcagcgcctggtgggggcactggtgagggagaggagccaccggatacggccggcctagtgcagttgtgggccactgggtcgcactgctcatcagctccccccaccccccactgaaaagtgccgtttgtcttctgcgtggagaaatgcagcagtgccctccatgccttggattcgactttgaggcacctttgcggtcactccccatgccaggtagctgctgctggagggggctctgtggccagccctgctgttggcccacgcagcatgctagttcccacacccctcctccctggccaagagcttggaaggaaggactcctggctgccacaggtatgggcagctgtgcccagctggcactgccctctgggttggctccctggctcctgcggaggtcagggaggaggtgctgccgctccaatttgtttccttgtttctttcgggttggccacttggcttgctgggttgagcctttggtgcccaattttgccctcttgttgggcactgtcactaggctcagactgtgagctagcaggggactgggcctgctgtggtatgttccattctggagatggtccccaggtggctgctcagtgccaggctcaaggcaggtgcctgagaagacagccatctggccagggtgatggggcaggcctgggaaccccgaggagggcatctgacccatggctgggtgcggaaaacgtctgagcaggtagtccttgaaagaaacagaatgttcttcttaaaaacttcttactgtggttgttttgag

SEQ ID NO: 131985 - DNA, 1012 bp, Homo sapiens
tgtttgcccggagcccccacacactgtcgtctccagctgtgcctgtccctccccaccttccactctgtgtctcttccctgccccccttgtgccccagccccagccccccctgttctttcctgccacccaatcctgtgccccacgacaaggaggctgagcccagggatggccaggaaggaacccccggcaggctctcagggtgggagagaggttgtggggatcaggggctttgcagaagggacagggaggcagcccagagcaccccagcttcttggccagcagcaggtaacctggctggagggcggggcccccatgggccatccctgggccagctgcccagggctaccaggaaggcagcttgttttgtaggaggtcaggcagcgccctaaccccacctcttgtcttccctgatgtcacaccccagggtcagccccttgggccagaatgggggtgatggtgggaaccgggaagctgagagaacagggaggaggccgggtggggcacaccaggctgtggctgtggggatggggagattcctcgcctgggcaggccgggcagcagcggggcagtcctggggggtgtggtaaatgcttctgctctcttcccctgactacatgggagcctccgtcccacctcacctggaaaaggggcttggaactgggctgctcggccttgggcacaccaaacggggcccttggagccctgggcttcctggggtggctgggtccccaccctgcctctgatccatcctgagtctgcatttcttctccaggtgccccctgcccttggcctcccaccacggcctgggagtagatagtgggctggggcaggcccagcgctgtcctctgtgggaaaggaggactctgggcctggaaatagttgagtgtggacagaaataaccctgactggcctcaaaacagaacatggaaaattaaatagggaacattagcattcaccccgcgcttgccacagccactgtcccatttgggaggcgggcgcgcttatcctcatt

SEQ ID NO: 131986 - DNA, 1047 bp, Homo sapiens
gagggtcacggccacgtggtagaccacgaggctcgtgtggtgtggcatgtcgggccacagcgccacggccacttggcgggcgtggaagggcgtgaagcagacgagaaagatgatgagcaccgtgagcaggagctgcatggcccgcacgcggcgctggcgaccctggtggagcagacccggccgcgacagtgcacacatgatgcggccggtaaacacgctgatgaccagcaggggcagcaggaactccaggacagtcagcgcaaagacacggcagcagggccggctgcctgtcacgcccagcaccgacagggtgacggcaccggcggccagccacacgaaggcgcacacggccctggcacaggcaggctggcggcagcggcgggagccttcgggccgcacgatggccaggtagcggtccacgcagatgcaggtgaggaagaggatggagcagtgcatgttgaggaagtaaccgaggacgtgcgggaaggcacagcgcaggcagcccctggcgccgtagtacacagcgaagcgcgtgggcagggacagccctaccagtagatcggtcaccaccaggttgatggtgtagatgactgagggtgtcttggcccgggtgcggcagcagaagacgtacagcgccagcccgttgagcaccagccctgccaggaagatggctccgtgcaccgccatcagcgccagccacaggcctgggaaggtgccatgcagctcctcgtccagccgggcaaacaggtggaacaggggcacctccagcccgctggcattggtccgcactgttgtcactgcggtggcattggggactgccccggccgagggccccgctggagacacagagggcatgacggcagccagcacaccccaggcctggaagcaaggagaccaggtcaccccaggcgccagcctggccttaagccctgccctgaggcccagaactcagctggcccgtctgcccctgcacgcccagcatcccccttctccatgccctcgcctggctggggcctcaaatgcctgctcccttggctctacccagag

SEQ ID NO: 131987 - DNA, 1009 bp, Homo sapiens
tggatggggccctgtgtggaccagcccgctcacacgtggggagaggccagggccaacacgtgtgctcagtgcaggacttctcagagcctttgtgaaactcacggtcctgggaacttccaaggggtgggagcgagcatcgagcatggaagctatttgaccctgtcccctccctgggggttcctgctccatccatcccaatggccacaccactagtccatgcccagagcactgatgggggctgctgcctccctgccctcacccacagcttgttgaatttctgctgggcacccggccatggaaggccagacccctgggcttggggtgctggcacctgcccagaggcctccagcggggcaccagggtcatgccggcctccgtccttggccggtgggtggggagggctatgtcctctcttccctgggctcctctcaaacccaccccaccaacctgggagttctctcttggctgcccagcagcctgtctgcctctgtcctgccacatgtgagaccaggcagcagagtggccccggccccagggcagcagatggcccagggtggctgttgagcctgcctgggggtctggctcaggaccctgtgtgctgtctgtggacgtgtggaggacgggcccagccttttccccacagaggggctctgagcacctgctaagggcgctttgcatccacacagcaatcccaggttttacagatgaggaaccggaggcccagaggggtgagtggtgtcctcacggttacccagcatggagctggtggggctgggaatcagacccaggtccactggcaggacccggcacaggccggagtggagcagagtgcgggctggggagcagaggggctggattaggcatctctggaccgggagtttgtgcacaaggggattctccgggccctgaggccgcatgtgtgaccacgggtctgtgtgtgcttgagcctgcaccccagacggcgtggccctcatggccttccagggctaaaatagccatgattcgggga

SEQ ID NO: 131988 - DNA, 1052 bp, Homo sapiens
ctcttgctgagactgcggctctaacggaaacaccagtgtctctgggaggggcatagccagttggaggtcctgcatgtcacctgccagcccctccctgcctccccatcattgggttcattgctcacctctagctgggtgtctctgggaggggcatggccagttggaggtcctgcgtgtcacccaccagcccctcctttcctccccatcaccgagttcattgctcacctctagctgggatagccgtagctgcagcagctcctgaaacccctccccaacctcagcctctccaggagctgctgggacaggcattctgtcatgtgcacctgcctggcctcagcctggtccttccgcctgaagctcctcagcctggtcctctcagcctcttccctctgcatgtgctgttccttctgcccggaatgctgtttctctccctgtgccacctggtgaaggctccgggcacccacagtcattgttccacagagctctccctgagcccctctgatgccctagtgccctggatgcccctgccccagggggagagctatgatcccacaatctgaagggcacccgctgggctcatccttcccagggtcttattgacttccctcaagatgcccctgggtgggtgtttctggccccactgtgcctgtggggaaccaatacagaggggctaagtcatgtgtccgggctcacccagctggggtgcaggaggggctgagctctgcctcaatctgcctgctggcactttgtcccagtgcctgggatcagccttctgcggcacccagccctgtgtgtggagggaatcagaggccccaggccacacagccccgtgcagtttggaggtgtcagaccaggacttagaccccagcactgcgggcacaaatgggtcccaggcagacctggccccacctttccgagctgacagctcagggtagggtgggaggtggctggtcacggccgggatgggcctcaggacaatcagagggaagagcgctcccggcagcaggaagggcacagtgagcatgaagggccagaggtgggaaggagagtct

SEQ ID NO: 131989 - DNA, 1056 bp, Homo sapiens
ctcctgcctcagcctcctgagtagctggaattacaggtgcccgctactatgcctggctaatttttgtatttttagtagagatagggtttcaccatgtttgccaggctggtctcgaactcctgacctcatgatctgcctgcctcggcctcccaaagtgctgggattacaggcgtgagccaccgtgcccggccggtcacagcattttaaggactctgccatgattctgatgtgctgccagggtggctgtgcctgagccggcctttggctcttgcgcacacactgagatgccggttcgagtggatacagggggtcagcccacttgtttcccacggccagcctccagttgggctcacattgagtaactgtctgagcccagtcccaggtagacatcgtcagtttccacgtgttccttcattcactcaggaacaaatgggctttactttatccgaggccttgtagataattattttttccctctgtaaaccaagtcctgcttaaatcccatccaaatccctccagccagagcccatgctgcctgcgagcctgctccccatctccggctgagcaggtttgtttaaggctgggctgacacttcttctccccgcgccttggtgtgtttacactggggccatcagcagaaactgcaggtgcggcagggaggctggagacagggcagggaccatgggggtttcagggcgtcctttccacacagtgtctcaggtcgccctgttcccagcctcgtcctcgttctcgttcccacaggcgaggccttggaggtcactcaggacaggggaagtgctgaggcgaggcctcaggctgctaagtggagtgagcccaggaaggctttttgagtgggggacgcccgaattggttttctgtgaagaccagggagcaaacgtgcctgccatggagtgaacggcaggacccgcagggaaaacctcaggcagcggcttgaaataccatggccgtccatggagggggctggtcagatgctggcggtgtgggcagaggaggctctgggccactgcctgagtgtgagtcctgccaccaccacct

SEQ ID NO: 131990 - DNA, 1055 bp, Homo sapiens
gctgagctttgagccggggtcactggctgagtctcgcaccctctctgagcctcaggttccccatttgtcagatggggaaggccaagacccagggtagatggagcctgagtcagtgctggcagcactggcgttgtgggctggcaaggcgtggggcacctctgtgtgcatggggtggacctgtgtgtgcctagcagcctccctgccacaaaccaccctcctcctgtatgccagggtcacaggagctgaagacagtggccgagccccgctttttctgccccctcttgattgtttcagggacgaggtctggttctttgtcaacccaagtgcccagcacaaggcttggcatatggtggtggcctgtaaaagccagtgatgtgactatgaaaccaatccactcatagcactgcacgtgctttttgggagggagctggctcagagaggaaaggccatcagcactggtccccccagtaggatctaggcaccatggggaacctgcgggcccctccagcccctccaccatgtgtcctgggggtagccctatccccctgggcctcagtggcgccgtgtgcactggctctgggggtgccaggctgcgtctcaccatcgggccagcccagaaatagctgtgaccttccgcagccagcttggcagcgcttggggccaagaggcctacgtgcatgccggctgagtcccctcaccgtgcagggctggctattttggacgtggcctcccgaggccaggtcagagctctttcccgcggttcctcaggcccctctgacgtgcgtccactagagcctcggccagtggccctggctagctccatgatctcgatcccccttcctgtccccgaccccacgggccctgggtggcacagaggaagggatcccagggactgagcacagggtgaccgcgcctgctggggctgacatggagtgtagggcttggctgttttaagaagaaaatgcagagaaagtgcccaccctgggtaggccctgaatcctgtctcagcctctcagagctctcgctgactgcacagcctgagcctcggtttactc

SEQ ID NO: 131991 - DNA, 1601 bp, Homo sapiens
cacctgggctcagatgttcacagtggctgagaatcggaagaggagagggcagctgtcctggggtggagtttccgcagatcacagcaggtgggcaggggccaggctcaggcttcttaggaactcggcctctgtccccacagagggatctgtcatctgtgtgctggggttcatcatgtcctcgggggtgtgtgtgtccctgaaatccctgtcccctctgtcctccgtcatgccctgctggctgtgtggtggctaccctgtcgcctctgggccctgggtcagtcctggcaggagccgtgcttccttgtgctcccatataaggaaatagacccaaaagggtcattctctcagcatggtcaggaggagggctctgggagaggtgtcgcctgtgactgtgggctcatgacaggcatgaaccccttgtgggaggcggggccccctgtgatccctttctattcatttccttcgtctttccccacagatgctgtgtgctgtggacccacctggggttcatggagtgggccacggggcccagccctaagcactgctgcgcccagggtcgccgcgcctcctgctgaggggtccccgtgccactggctctcaccattgccctcgcctgccgatggcctctgctgcccagcctggggccagctctaccgcctgagccccctgccccactccaggactcaccgtaccccgatggggtaacgtgacacaggccccacacgtcagaggccgctgtccccacggccactgcccgtgacccctggcccaaggcagctggagttggttcagttcaagttcattcttcctctggcccttgggggcttggggcccacctctgagtgaagggggctgtctgcccatccaccaatgtggagagggcgcccccggtgtggggtccagctctggacactgcttggcggccgggttcactttgagtttttaagttttctttgctgagcttttttggttgttctttttattttttgcctctttatgactatccagctctgagagacgggagtttggagttgcccgctttactttggttgggttggggggggcggcgggctgttttgttccttttcttttttaagagttgggttttcttttttaattatccaaacagtgggcagcttcctcccccacacccaagtatttgcacaatatttgtgcggggtatgggggtgggtttttaaatctcgtttctcttggacaagcacagggatctcgttctcctcattttttgggggtgtgtggggacttctcaggtcgtgtccccagccttctctgcagtcccttctgccctgccgggcccgtcgggaggcgccatggctcggatgaaccgcccggccccggtggaggtgagctacaaacacatgcgcttcctcatcacccacaaccccaccaacgccacgctcagcaccttcattgaggtgagtggagacggaggtgtggcaggcaggtggcccaggtgtctgggaagcccggctgagctgccctcaggcctcgcaagaggggtccccagccccggctggccagacagggctcacagccttggaacaaagcccagtcgcctgttacaggatcctggaggaggg

SEQ ID NO: 131992 - DNA, 1082 bp, Homo sapiens
gggactgagcaagggtcagcgctgaccacaggagggagggaccactgtgccctggagaggcagcagagatacctgccgctggcaaccctggcagatgggacgagatgcgtttacagaagctttcttgggagtggagtctggagcgacctgcatggcctcctggaggagcctggcctctgcagaacgccctgctgtttgcaggcctggggccgtttgcagcgtctgcagttgtgtgcggggccgttgacagagcctctgactgtgccaggctgtgtgagaggctgcagctgtgtgcagggtcatttatggctgagtcctttcccctgtgacatgagataagccatcatggtcttgtcataatgaaacagatttgggcgtgagagggcattaagaactgtagagcagcaggaggcattgggcaccttgccatcagggagcctggaccctggacactgagccaggtgccctacagaagatggctgtccctctcgcagctgagacccctgagataacagcagcatctacagaaagattggcgagaacagcacggtgagtggccagggtgaggcctcagaatatgactgggatcagggttaagtctgtaaccaaggtcaggtctcagtgtgtgaccaaggttggggctcactgtttgaccaggatcagggctctgtgtgaccagggtcagggttcggtgtgtgtctgggatcagggctcaatgtgtgaccagggttgaggctcagtgtgtgtccaggatcagggctcagtatgtgaccaaggttgggactcagtgtgtgtccaggattagcgctcagtatgtgaccaaggttggggctcagtgtttgaccaggatcagggcttagtgtgtgaccagggccagggtttggtgtgtgtctgggatcagggctcagtatgtgaccagggtcgaagctcagtgtgtgtccaagatcagggttcagtgtgtgaccaggattgaggcttagtaggtgagcagggttagggagggctcatcctgtgaccagggttaacgcttagtgtctgaccaggatcagggctcagtgtgtgacccagatcaaggctcggta

SEQ ID NO: 131993 - DNA, 1003 bp, Homo sapiens
ttcggtaaatcgtgtgtatgttttttttttcttttttctctgtgatttctatggagctaatctcactaattctcaagtctcccggtctctgagtctgtggagggcatgctctgttcctgttgccatgcttttttgtttccccaagacagaatctctctctggtctcccaggatggagtgcaatggcgcaatcttggctcactgcaactctgcctcccgggttcaagcgattctcctgcatcaacctcctgagtagcggggatcacaagtgcccaccaccatgcccagctaattttttgtatttttagtagaccctgtctagtctcaaactcctgacctcaggtgatccaccctcctcggcctcctgaagtgctgggattacaggtgtgagccagcaagcccggccaccatgttttcaatctctggtgtttcctattgttttgttcttacagtttccatctcttggcttacactagtcatctgctctttcatgtggtctactttttccattggaaactttaacatattcattatagttattttaaattccccatctgataattctaacgtctgtgtcatatctgagtctggttctaatgactgtcacttcagtttgtatttttttcagtgctttgtcatgttttgtgggaagccttgcctagcgtattagataacaggaacagaggtaaacaggatttacactgatctggctaaggagctgggctaagtttcgtgtttgctgtaactacaggggccagaggctgggtggatattgctttcttttcttagtcttttctcctgtcagaccttataagaaaaagtattcagtcagcaaacatccactcactgtggccaggaagtgctcagtgcctggggactctgtggtgatgaccaagccatgtcctgtcaccatgcaccagggagaccctgggaggtgcattgggggctggaagtaaaaatgggtggagtggagtggaggaggtggcacaggttttacagtgcag

SEQ ID NO: 131994 - DNA, 1041 bp, Homo sapiens
cctgggtggaaaatggggtccccctgaaagcatggtcccctgttaatgacttgaactcaagcaaggcagcagggtggggttctgaagagcacagcaattggatgcccctttctcttgctccatctttgccagggctgctgcaagctgactgcccattggaaagcagggctcaccagtcacagaggagacctctgagtccttgtgatggcaggaggcctctgcctgactggcacctgcatcactgcacagcacatttagccctcgatgtgcaagccatgcttctgaggttagggtctcagggtggcactgctggccttctgggcagagcagtccttctgtgtgagggagtgtctagcacaccacgggaacacagcatgtcccatgtctattgctgtgtgacaaatgaccacacattcagcagcttaaagcaacacatgcctattataacagtttctggggctcaggaaggagtccatgtgcagcctagtgggggcctctgctcagggtctcacaaggttgcggccaagctactggctgggctatgttctcattcagaggctggactggggaaggatgcacttccgggcttgttcaggatgtgggcaggatttattcctgcacagtttctcctaaagctcagctgtaattttagaagatgcagatagctccttgccatgtgagctttcccacaaggctgcccacttcctcaggcccgggaggggtgggcaagttgagtgtcatagagggtaacatgagtgcagatgtgctatcatcacctttgctacatggtatgggagaagcaaatctccatttctgcctcacactcctggagagggcagtgtccccagggggagcaccatggcgcagggatcacagggtcttcttgaaacctgctccctcaaatgctggcagtgtccttagctactggaacacctgggagatgccctcagttgagagccacttgcccacaagcctgtctaaggcttgtccttcctctattccatcatcaccagagtccatctacgagcctcctcaactgga

SEQ ID NO: 131995 - DNA, 1043 bp, Homo sapiens
aaagcagtattcacatgtctgagagggctttgtgggatcatggagcaagtatgcttttggtcgtcactgaagccagaaatgggactggagggtgaggttcccaggagatggacctgctcactgtgaagaagcggcctctgggagtcagaggtgtttcacggtgaaatggctgctttgcaaggaagtgagctccccaaaccctgggaatgttcaatccagactcagtggggtccagagaactcaagaactggccagagactgccctgaatgcccgctaatgtccttttccatctgagactcacttctgtagacatgaagccgagcttaaggaggtgggtagatcagatggcatctcaaagtgccttccagctctaagtgcccagggccccaggctgcccttcagcattcctgtcttgctgttggctggtattttgacttaggaaatgggtggttaatgaaaaagagacacaggagcttcttgagacgtgactgagattactgtctgcccaaggaagacaactgctaattaccagctccagctggcagcccagggggaccatgctgaaggcagagagacagacggaggagaggacccggggaagggaggtgcttccagaaggcagcctgccctggagccttccagactctagccctggccatggggaggccctgagtgacggatggggaaccgaggccaccctccctgctgtgctgttcttgagcaggcctgggcgaggctatcaatagagctgttgggtccatctgatcaccagctccatgctgtccatacccttcagctgatcttggctgtcacctttgaccagcacatgtgtcgtccccacaccggggcttctgtccacttgcccagtcacccatctctgactcccatctgcatcaggaccttattcctgttgagctcttgtcaccatccctgcagacaggcagcagacggccaccatgattccatatccagtccctgccgggggccagtgccttgcgaggcaggccatgaaggctgtcccacttatgcttaggatagcaca

SEQ ID NO: 131996 - DNA, 1022 bp, Homo sapiens
tctctaggacccaggagccccaggaggctctgtctccggttcacccaaacctcagggtgccctagtcccctggggctcaccctgccctctttctgccctgaagctgccacacccacctgggaagcaacagggtgggagggatgggggcactcaggggacaaaactgtgtccagcacagcctgtgcaaggcagacgtctccctggctcaaagctggagctgagaacagtcccaggcaccagccctgcccagctccctccctctgtcctcctcctcctcccaagctgcaggtggcgcagtcagagctgggtggtgttggggctggaggcgggaggggcagctccccatgtggcctcaggcacctgcccaggttctctctgcttgggcttccggtcttcaagctctgctttcgcccagtgagcctgggctttggatgtctgtctgctcgtgctcatttcctctccttcctctccctctgtccctcccttcttccttcttctctcaaagctgtctgagtgtgtgtcaagcaccaggctgggatggtcagtgggaggagatgatggaatgtctagggcatggtggggacaggcccctagaccagtggcgtggccagggcagatggagtgcatgcaggctgcagctccaggaaggccgagctccccgcctcctctctgccgctctccctccatggctcccccagctcttccttcctccctctcttctcattcctccctgcagccctccctggggcactgccttggagctgggaggacagaccagatagctatagcctgtggaattcttgagcacggctggaggatcagcaagcagggatttgaatcctgtgtctggcaagactgcccgggagacctcctggctcacctcctgttgcccccagtttctgcagctgtgaaatgggaataatgactgtgctcatctcagggagctgctggggccccagcaatgacagcgatagtaacaacagcatgataacaaagccctgcagccctcagcccccggcccg

SEQ ID NO: 131997 - DNA, 1053 bp, Homo sapiens
tttctgggctctggctgtcccctcccccatctctgcctctgtccttgacccgggcgtcttccgtctgtgtgtttgtgtcgtctctgtctcatcatgacgcccgtcattggattcaaggccatcctgaattcaggataatctccagatccttctcttaactacatctgaaaagaccctttttctcaagaaggtcacattgacaggttccagggcttaggacatggccttgtcctttcggggacaccacgccagccactgcagtaaggagggagtgggtgaatagaagtgggcctggtgtgaaggtcatgagcatctgtgcctaccgaggcctggcatgagcctggggtcctctagataagaacacagtggaatgccgatggcgcctaaagctggcctccgtggatgggctccgtgggctcacagggccgagtgaggagatggcctccttctcctaaggggcttacgactggaacactgtgcccaagaccacccaaccagcaagagacccccaggccaggtgggcaggactcctaaccatgagggtttcccagtcacagctggtgcctctgtgcgttaataaaacccaggccccaatggggaggccccttcgtcggtggggtgtgtgggggctgagcatgcatgtgtatgtctgtgtgcgtgggtgtgtgtgcatggacaacacattagaattctaagaaaccaaagaagtcccagcctgagaaacagagtcccctggcagtgagctcagagaggccgagggtggctctgagtccccatgggcatcacggctcccagggtggctggggccctggcctctgggcagcacctgctagctgcctgccctttccttgctgctctcatcttcatcctcccaccccttctcatccatgtttctttgttctcctttatgtatcttcataagctgccttaaatcctttttgaacaaggcagggagtaaatagataaataaataaaaatccccttgctgcagatcgtaaaccatctttccgaggccctccgcttactccagaagacactgctcatcactcctct

SEQ ID NO: 131998 - DNA, 1069 bp, Homo sapiens
ccatggttaccactaccccttcaccatggtcagctcttcaccatggctaccagcaccaccatcaccatggttaccatcactttggttacctcttcatcaccattgttaccatcactccactactgctgtcaccgccatcaccatggttaccaccacccactgctgctctcaccacacccccccttggttcccaccaccacagttacagtagccatccccacccctgggtggggtcatgtccaactggtgctcaagacctactctccccaaccctgggtcttggaaggtggccttcccggcatgtgtcagtgagctaattccttggtggattctgcccataggaggcacctacaggagatgagggtgaaaggaaagtgggggtgggtatttgcccccagttccctctctgacacgctcagctgtgtccctctgtggaggccacagctcccatcagaaagccctctctatgcggccaccatctctaggcttcggtaggctctcccagccccagcccctcagcaggtgtctcccagctgctgctagcctcaggacacttcagcatctcttactgagcctccctacccagccctaccgctgtaaatagtctcccatggaaactctctgcgatgaccccgagaacctggatggggcacctgatgtcaccagtgagacattcccttcaccaggtgtccctgtcacccaagcaagcccatcagagtctcctgtgggactttctgctggagacttgaggggaggctgtctctcccaccggggctcccagttgaaggaggtgagtggccggcagccactccacactccgcaggaggacacgtgtgtaacataacacatgagagacaaggcacggtgaccactgcactctggatccagctgtgccccagcagccaatggcagggcgagacatggcctcttgctgtctgcaagtctgctttttcctgactggggcagtcattgcttaaggaagaagcgagaactggcaggatggatgccagaaagggcctgctttctctcccatggctttataggggtcctgctgctcgggcagagagtc

SEQ ID NO: 131999 - DNA, 1062 bp, Homo sapiens
ggagccggccactagcacacgtgaacacttcagttgacatggaaattaattcattttaaattcagtaacagaagagatggctgggaagctgggtttgtaccctggtgccatccttctcctcgtgagcctgctccggcccggggccttgtcttttgtcatttccttcaataccagctgcggccccgtgaggtgaggccttgtgtgagtcgccgctattgggctgtgtacacagtaacaccgcccgggcggcttacacagcagcaacatgcttctcagggccctggagccggcaagtccggcatcacggcactggcagggctggttcctcctggggcctctctccttggcgtgtggaccacgtcttctccctgaatcctcacacggtcgtctctgcatgtgtgtcctcatctcctgtccttatgaggaccgtggtcggattgggttaggcccctctgacccctgtatgacctcattttaacctaagtacctctgtaaagaccccagctccaaatgcagtcacattctgagggactggggaggaggctgcagccttggagtttgttgagcatggtgggcacagcctccccccagcagtcatgttgcccgttatgggtagagggtggtctcaggaagagaagtgaccagggctgctgagttaggaggcaggactggatgcaggtgcagtttccagtgaacgtgctgcctccctgaacccagaccccatgcttcaggcctcagtttccccacctacaacacaggtgcattattacctctttcacctgccagctttgggattcgatgaatgattcacccaatttctcaaaggtctttctccttcgctcccttgctcactcccttagtgtgcgtggagccgccctgatgtgcaggcatcgccctgggcacagggacccctggggcgagcagtgagggctcctgcccttttgggtttactgaccagcagacgcggcaaatgggccaacagtggctcaggagagtggacagtgccagacagcctcatcctcacagacacagggacacagcatgggtgagggcttcccagag

SEQ ID NO: 132000 - DNA, 1017 bp, Homo sapiens
ggtggacccagcatctgggcctctgcccctgccccccacccccggcgctccctccacgctctgacacatgggagacgcacagctccccaggcttccacatggattgatttggcggccccaggaatagatgtgtccatacattaggtgcatgtggaaacatggccccaataaccccagcccgcatgcctctgtctgaagcattctcgcaccatgggaattattttgctattttggggtatagatccttgcaggagctgagatgccatttccatcgtgggtgccacgatcatgaaaaggagaatcaatgacagggtgcgaggcgggatgagggaggggagccccagctgtgtctggtgccggagtcagcccccaggcttccagaaaggtccaggtgccgagggcacccagctggagtcagcccccaggcttctagaaggtccaggtgccaagggcacccagctgaagtcagccctgggcttccagaaaggtttggctgccaagggcacccagcctgcacctcctggcctctctgaatccgccagaggtgaggtcagcgaggatgtccagccacaggaaccaggagctcagatgaccttgtggactggaggggacaggagacctcccaaggccacgtggcagctggacacgggcagggtcttgcccaatcacttgagtttctgccccacaaatacaccaaccagagggagacagcgccccctgcacatgcagaccctgtagaccccgaaagctcctgtttgtggagtccccgcccctggccccgcccctgctgaccaccctggccccgcccctgctgaccaccctggagcagccccttgggcttcatctcagatgcacgagaggtcgtgggtctgggttctgactctggtttcaaatcaagcttggtggttcaaacttaggaaggtcgtttccttgacttcagactcctcatttatacaatgagccaataataccttcccccgaaggttctgagtagctggcattttgatatcttaggga

SEQ ID NO: 132001 - DNA, 1039 bp, Homo sapiens
ctgtgcctggaagccaggcccaagcagaggcgggctgggggagtgcagagggtgagtcctgggcctctgcggcccgagggcacctgggcagggtggggccagtttgggaaggtgcaccaggccctgaaccactgccctgttcctgagggccaaatttcctcgccacaacagccttcagggtttgctacgaggcatcccctaggtgcccccgggggaaggcgtgccaccaagtctccttccagaaccccttagttgcattcttagcaactcggtattctaatcctgagagctgggagcagccacgttgcaggcagggaagtagcagaacggtaggggaaggggcctgcgccggtgctggggtggcagccctgtaagaggctgcttgtgggggacgtgggcctgtgtccggggcgaaggaggctgccttttaattgggaggccaagcaggttaaataaacagcaattggattttgctgaggcctgagctgcctgcagtgtccgcgggtacagagaacactggagaatctcattttcgtgatcagattgttatagattcttcccccagtctgctgagaaatgtaaatgtgaattgtgtttccaggtgctgtaaaggacagcctgtaggggtatggggggcagggagggtgacccagtctgaactcggccctctcaggcctgggaccccagaaaccgtgccctttcctgtctacagaagctctggccgtgcccacttgaccagtccttctctgggagaatgctgaacagaaaaataaccctaggcaaagatttaaatcaatctgctgcgtctaataaataccaggctcacagctgagggaagggtagagacagcagtcacgggagttggggtgctgtcgcccttctgcccctcggccccgtcctcagacaacgtgcccatcctcctcacctcacctgggagtgtccttggtgactcaggagcaacttcagagtcagacagacctgggttcaaggtgggctgtgccacgcctcagctgcagcgtgactgtggctggatgtatct

SEQ ID NO: 132002 - DNA, 1031 bp, Homo sapiens
acaggggcctccttgagtatgcggggcaccactctctagggtgtctatgggggaacagaagcaccgggccgaggccacgcccagcctgaggtttaccggcgtggattctccatcagcaggtgcatgcgtcgcacgtgttattttagccagtcctgcccagcggtgtggatgggcattttgttgcagttttcatttgtatttcctgttggcagatattccattggccaaggaaatggagagggacagggacaaaggttgggaaagggcctggtggggcctgtagaccccgaggcccataggcactgggagtggcagcgggacgctgaggcagtgtaggaggggcctggtctggtgcaagtccaggtgcaggggccatgttagaagcatcagtcagggcagctgcaatggccggtgggacagatggccacactgaggcctggggcttttctccatccccctgcctccagccccaagcgccctgggacttcctgatgttggaatcccccttcttacaagcctcatttctgaacccctagagcacctctctcagccaggtgaactctgagtaaatgaatgactgaagggatggatggatggatggatggatggatggatagatggatggatagatgggtagatggatgaatggatggatggatggatggatggatagatgggtggatggatggatggatagatagatggatggatagatggatggatagatgggtggatggatgaatggatggatagatggatggatggatagatgggtggatggatggatggatggatggatggatgatagatgggtggatggatgaatggatggatggatagatgtataaatggatagatgggtggatggatggatggatgcatggatggatggatggatggatgaacagaccagtcatgaaaagcttctcttaggaggcaggcagttagctgttttggggatgaggtctcaggatgaccagggcacacagggatgggcttttgactccctgtcctctcagctctccttgtcc

SEQ ID NO: 132003 - DNA, 1067 bp, Homo sapiens
ggtctgaacctccgctccttcccctctgcgtgtgtagacaggcacacatcgcggggcgggggtgccgtgtgcacccgtgtgcacctcacggtgtgctcgtgctgacccatgtcctcgtgagcccacaatgggacacaggttttcgggccgtggcaccctggtgttccgtgtttcttgcctttgtggggacacgcgtgcctgctctgggtgtctgcctgcacctcacaccggggtgtgtgttggttttgggtggcgtcggggctggctgccgcccgcccactgtgatgaatgtggcctgcgtcttgtgcagtgcagctgtgggcgtggcagcggcactcaacaggctgtgcactcagcctcctgacgcgccctatgacctggcggcccatggggcgccccatctctttggcatccccatcaggccaagccaccaaccctgttcgagaccctcctatggctcctgacagcagctcccagaacatgggccaagaccttcagggctcaggtctggtccggacccctctgcagcccctgtcctgcctcccaccttcctctccagctctggtctatttctcacacccgcacaatgccctgccccagggcctttgcactgccggctcttccttctgcccggacctctgaccccttcatcacccacccacctgcccttccgtgggacacctcctgggtaagccccacttctaggcctctgtaggttgccttcttgcactccccagagcctccttggcagagctggtcaggggctttttcctgcatattcccgcagccttagtgcttggggtgggggattgcacaggaccacgccctcccccttgccccctgccccctgccctgctcccagttcgagggtgttcacatgggcacccacgcgtctagtgagtgccacttcctctgtgtgcacgccggctgtctacagggggatcccaggcctgtgcgtgtttacccagaagtcacagctctgccgatggcgcagctgcagccagggaggccggaggcttccagaggacaaagggagggcgtgggctcgcgggcccggaggggttaac

SEQ ID NO: 132004 - DNA, 1025 bp, Homo sapiens
atcccctcaggcccctcatctttaaaacaggaagggtaaaaatatcttgtttcttagattgccctgatgaatgagaactggggtgaagtgtttctaagcagaagcgatgttgacgatgaaatatcaatatgctcgcgtattcttaggcagggagactctagagggctcagggagcagagacagactggaggcagggatattcgagcagcttgaggtgtgcacggagattctgagaaagggaatgtttggaggtggtgctcagaaagaggtgggaggatgtgtgttcacgcatgcattcatgcaagtgtgttgtgtgtgcgtgttcatgcatgtgcgtgtgcaagtgtggcatgtgcacgtttgcatgcatggcatacatgtgtgcatatgtgctcatgcatatatgtggtgtgggtgcccccatgtaagtgtgggtgcgtgtgtgtgtgtgtgtgcgtgtgcagtacattactcatgtgcgtgtgtgtgtgacatgcatgcacggtgtgaatgtatgtatccaggctgggctctgtgcagcgatttttgacagaacacaggtaaaggctgtggggcaggggccgttggtcttgtggaaagacggctagagggcatattgactcggctgctggcaacatgaagcagggagcttgtcatcttgtgcaggatggggtggaatgtcgtctcctaggcccagagacagttcggaccctagtgcccacgctctgtgcccagaaggccctgatgcttccaggaccacagcagcaaaagtgatctcagtagtaatagtcatttattgagtgtttactttgtgccagaggcacctgcacgggagataggctcctgtggaggcacgctctgcctcagggccttcacacagctgttccctctgccaggaagtcttccctagagacccgcagggctcccgccttccagtcctcacgcacatgtgacctttcattgcaggctaccctgaccgtcctgttgaaaatggcagcagctctgggcccactctctgacccttt

SEQ ID NO: 132005 - DNA, 1050 bp, Homo sapiens
agcaggtgaccaaggtcagggttcagtgggtgaccagtgtcagggttctgagtgtaaccaggatcagggctcagtgtgaccagggtcagggctcagtgtgtgaccagaatcagggctcagtgtgtgaccaggatctgggctcagtgtgaccagggtcagggctcagtgtatgatcaggatcagggctcagtttgtgacaagggtcaggactcagagtgtgaccaggatcaggacatggtgtgtgaccagggttggggctcagtgcgtgaccaggattagggctcagcatgtgaccagggtcagggctcagcgtgtgaccagagctcagcgtgtgaccaggatcagggctcagcttatgaccagagctcagcgtgtgaccagggtcagggctcagcctatgatcagggctcagtgtgtgaccagggccagggttcactgtgtgaccaggatcgaggctcagcgtgtgaccaggatcaggactcagcatgtgacgagggtcagggttcagcatgtgacgagggtcagggctcagtgtgtgaccaggatcagggctcagcatgaccaggatcagggctcagtgtgtgaccaggatcagggctcagtgtgaccagggtcagggctcagcgtgtgaccaggatcagggttcagcatgtgaccaaggtcagggttcagcaggtgaccaaggtcagggttcagtgggtgaccagtgtcagggttctgagtgtaaccagaatcagggctcagtgtgaccagggtcagggctcagtgtgtgaccaggatcagggctcagaatgtgaccaggatcagggctcagtgtgaccaggatcagggctcagtgtgtgatcaggatcaaggctcagtgtgaccagggtcagggctcagtgtgtgaccaggatcagggctcagtgtgtgaccaggatcagggctcagtgtgaccagggtcagggctcagtgtatgatcaggatcagggctcagtttgtgacaagggtcaggactcagagtgtgaccaggatcaggacatggtgtgtgaccagggttggggctcagca

SEQ ID NO: 132006 - DNA, 1031 bp, Homo sapiens
gaggagcacagtggtttgtggcgggaggggagtgagagccatcagtcaccatcagctgagaagtagtgaactcttagagctgtaatcattattcagaactgaactggtcacagatagagcccagatcccaaactcagactgagtttttaccctgttcacacactgagttctgatcctactcactcactgagccctgatcctggtcataggctgagccctgatcctagtcacatactaagccctgatcctggtcacaggctgagccctggcccagttcatacattgagcccagatcttagccacacatagtcctgaccttggtcatacactgggccctgatcctggtcacaggctgagtcctgctctggtgtcttagctggaatgacttgtgtgtgtcacatgcttgtagggccacctcctcttccagccacatacagcaactgaccatgtgacccactcagcctagaaagacttacaggcttccactgcaatgcaagtcacctgcctgcctcaccccggttgtgcagacacacttgcacccatgggctcaacactcaagcccatgatgtctgctcatgctctgtaaaccctgagccctaagagcacctggtgtccctgcaccccagcaactagatccgtaaccaaaccccaacctcccaggcccaaacaccctgggtcatccagtcctgaacgctggcctggcagcatggctcaggtgctcctgctcccccacacccctgcaccagcctggcttgtagtgctgagggcctggggaatggggatgctagggaggaaaatggggagcaaagcggggggtgggggttgcagagttctcatatgtttcaagccatagacactgcccctaccgtagcccatccctgtatagttccttgaccacaggtgtctctactggagtggggtggagggcggggacagtggcagttatgtcaaagtcatgtctgtatccctagaattgagccctgacccagtgagaatcaacagtggtttatgagcaaggcagtgattacgtg

SEQ ID NO: 132007 - DNA, 1038 bp, Homo sapiens
gaggagtcccaatggtggcggtcactggtggtctgcagaggggtgggcagtggctggacctgtcatggggccctatctaaggggaaaggcacagccctgccctgggattcctgtctgagggtcccaggtcgctctaggtccccactcctcttgggcaggaaggggacctgctgtagcaaggcccctgctcagctggtcctgggtggtgtcactgccccagctcctgctctcaccctggacacatgggggtggggagcaggtgtaactgacccagattcctcaggcctgggctcaggaggggacctcgctctgtgacccagatattccaagtttctgtagctgacgagaggtggcaaatggtctcccacgtgcgggagcagtcgctgtgtgcgaggagggaatgacttgcctgtttgcagagatgggaacaggtgccccctgcagcaggaaggatttcagtcagactttcgggggaacttccagatgttgtaagtcaggatctggtacaagaggatgcgtcccagagattttgttgaaagagggaggtctgaggctttgccaccttgcctaagtcgacatgcatccaagatgcacacaagggcctcagttcagggcccagccctccatctgtcctgctaaaggccagtccttgactgaggtctagtgcagcaagggaggctcgggtaactcccaggaaacctgcattggctgagtttatttcctggctcaggatgggtctcaggttgcccctgacggtcccttgcagacctgcatttcagtcaaggttcagatgttgcaggccctgggtgggagggggcaggcagccagacacataaaaactggattccaggcccactgctgtcttgctgtgtgaacttggacaatcgctgcttccctgagccttggtttctttatttacaaagctgacctaagggttcctgcagaaatcaaatgataaactgccagaaagcccttagcacagagtagaagccattatcgtggaggtgcagggaagggtgaggagaagggtccctgtcc

SEQ ID NO: 132008 - DNA, 1049 bp, Homo sapiens
agagctggcctggagccagggtgtcggcgcagatgcgggctgcgcagatgccggctctgcggctgcagcaggcctacgacggccggaaggttgagtaaccgctctgagtcacacctgtgaggcggatgatgccacctgtctcagagtggtggggactgaactaggtgatatatttatggcacttgacatagtctggcgtgtagtaaacagtctgaaaaggacagttgttgttggcatgacttctgtgatgtgcctcagactgtattggaaggttgtgaccagggtcacagttcatttgcaaccaggtttggggctcagtgtatgaccagggttaggttcaggggtgtgatcatggtcagggttcagcacgtgaccagaatcagggcccagtgtgtgcccaagatcaagactcacagcctgactgggatcaaggctcagaatatacttgggtcagggtttagtgtgtggctggattcaggggacagggtgtgatgggaattggggctcggggtataatctgggtcaggggtcagagtatgatgggggttcagggcttagtctatgactagagacagaaattagttttgtgggcatttgggagccatagacggtgttggggcagtggcaggacgaaggtggtactgtgggtagaaatgagtccttagggggcaaagggtggatatagggttcaggagaagattgggagtgggagttcatgtggtggaaactggcagagactcggtcaccagccaggagaagccattggtgggagggggccggctggttcagacctagtatgcagggagggcctccgagaattggtgacttctgtgctgggaggagagcccggcgcctgaaggtcagggaaggcgtgcagggcagggggcctggcatgtgcaagggcctgggccgcgctgtgcctggcttgagccagtctccggcaggggcccggcctggctctgcctcccctcggcgtgagttgaggccggtcttggtctacccctcctagtgaggcctgcccaggccaccgcccatcccttcttcatcgc

SEQ ID NO: 132009 - DNA, 1094 bp, Homo sapiens
ggggttggaggggcagtggggcgccatccttgggcagccccagacccctccccacagccctggctgtgggatcctaccttctttattccttcctccaggcgggaggcaggagaggcgtggggtacctggcggtaccccaggcacctggggatggaggttgtgggaaaggggacagagacaggagtcccaccctgtacacccctccccaggatgtgtcaggaaggcaggctgaccctggcggctgtgggacccgagccccagcagcccctcctgtccttggggccacgtggggcaggctgggcagagcctgctgcaggcagtggtccgtcactggtgtccatcctctcttctctgctccggccacatcagaaaagtaggctgcccaggaaagaggccaccacccatcaggctggccaaggctgtgatgtgggtgtctgggaactctgcatccattgtggaaagcaggccggctgtgtggtcatgagccctgagctggagggctacacggtctaccaccctggtcttctggacgtgaaatgcctggtcaggggtccatggagtcctggggtctcccagcctccagcttctggaacctgggcctgaggaagtcaggccttgcccctcggggtcctagcagcatctttctgcagagtggggatgcaggaggagggcctcagggagcctctggcagttggggagcagagagtatggcctgagactcctccttccccccagcagaggaggccaggagacagggggagaccccaggatgctcagggccagtggcttcccgggggtgctccaggaacagctcttgtattgactggtagcctggacagtggcaggcatgggagacttatgttagagcccaagaagagcctccctgggtgcaggcgcccagccagggcccttatggggtgggcagttaatctgatgggaataggggagggagatcaggaaggaagtctagagagaggaggtggcctgcccagagcagagagccaggaggagtgtgaccccagggagagccaggattggtgtcccttagacaggtttcagctgcaggctggcaggggcctccgggccctgtgggt

SEQ ID NO: 132010 - DNA, 1332 bp, Homo sapiens
aaatacacacgcatgtacgtgtacaaaacactcagatgcattctctcacatttacaaacacctgaatccacacgcaaacacagggacacaaattcacccacttatacacagacatatccacaaacacgcacgcatacactcacacacgcatccacccagagacacaaacgcccaccacacaggcaggtacatggggaggcatggtcgcccacgtggggcactgggctgtggacatggacaggggttcctcggggcagcaggagcaccgtggccctcccgagcggtctgtgcacgcgtgcacacacccccgctcccagaggcgctcaccctgccctgttgtctctgtcctacagaccgacttcgagaaggacgtggatctggcctgtagatcaggtgagcgcccgacaggtgagaggacagtgccagcccggccccctgcatggccccactccacgcctccgcctgtgcctcccccacatcacccatccctgtccactcctgctgcccccacccacacccagccacaccgtcaggcccacctggacccaggggacctgccctgggggcccagccttccacccccgtccacttcctgaggccgaaggagggtccatggggcatgatcagaagcttccagaacactgccctggcactcctgctgagcaggtgcctgtggagcgcctggctgcgtcccctgcccacctgacatctcttcctctgtcgtggccccagcgaggagcacagcctcaccctagtgccgctccccccccctgcctcctgcccaccgccctctagcacctgtgttctgtgccaccttcatttcctcattgccagtcccagcaggggcagaagtgagtggggctttcaggctagggggacaacggggagcaagaggaaggcggggagaaggacccaccatggagcccccggccggtgctgagcttcctggaaccaagtgcaaaaaacgaacgactgcccaataaaggaagctccgccgcccatccccaagcatcagactgcgagggtctgtttctgtccccaccactgttctgtgaaccaggtcctgaggcagtgacaggcagtggctttctgagctgtggagaggccaatggaccatgctccctctggtcatttagatatttgaagagcaccttctctagagacagccctggcagaggagctgggacagccccaggtggggagtgtgtgctggtgccagttgggccccaggagggcttcctggaggaagtgacttcggggctgggctgaatgggagctggacaaaaagcaccttctgcccccttggggtctcctgtgaaccagtcccacagc

SEQ ID NO: 132011 - DNA, 1003 bp, Homo sapiens
gaccaagttgctctcaccagggtccccatgaggtggccagggtcagtactgggtcatctgtggtcatctgggccagtattggagtgggtaaagacagactgccaacctgggcgggcagagcgatgcccacttagggctacacagaagggagaggaccctcgaggatggggctgagaaaggacaccttactgcccgctgcccaccaagggcccacagcacagcccaggcatgcacagacaggccgaggaggcaatcttgttcacgctggtaattttctgcctctcctgggcctcagtttccccactcataccaggagtgccactgcagccccaaggcccatcccagagagaggtggtggtcgagggagggccggggaacctgtcccgtggctgctacatctgggcaccccatagccggagctgggtgggatgctggcctcattcctggaagaaatggactatatcgtatgtcacctgctacctacaaaagtagggtgccagctgggatccctgcaaatgtgtgtatggggagtccccaggagtgctgggaggaagctacaccatcctgcccgtgtctgtaattaggggtgagggtcactgcgttgccagggccaggagacagtgactgattggaagcaggggccatgcgtggccaatgggagtctccatgggtggccagggctaggcatccatgagactgggaagcagattgcttctggataggataggaagcagattgcttctggataagataggaagcagattgcttctggataggagccctaccttcaccccaggtcaggcaaaggaacaaaggaaccaccttctctctgaccctcaacagaacagagccgtggcaaattcagtggcccccttcccatcgcccaaaaccaggaagaaacctttagacaaggaaccttgtctaaaaggaggtggcccagaagtagaataaacacagggcttggagtcggacacaggagggttcgacaatacccattcaaagt

SEQ ID NO: 132012 - DNA, 1052 bp, Homo sapiens
cgtcacccatggcgcagggcgctgagcagggctcttcacggtgaaagggccgcctccgccccactcttcccttgcatttcttttaaataacaaagccgctggaagaaccggagaggaaattggcaggaacaggaagctgggcaccacggtgctgcctgaaagcagtcatttgtcttggagtactacttctcacatgaaaagctggaagctgttgatgcttttcccttttagtaaaaagttactccctgtaattgtggaacaggccatcagaactcttcagttaactggaggtgcagctgtgtcactctgttcccaaggaaagaggccggaggctggaggggtgggtggtcgggggcagaggggcccagaccctgtgcagctgtctctcagcctgaagaacaggtcccagaacagggtgttccctgccatcggcccctctccacccctcactgctcctgcccatctagttatcacagaccactcagtctcaccccttcactgtagcgtggagaaactgaggcacagagacggtccttgcttgcctcagtttggggaaaagaattgagtctgggggtaggaacacccaggaagcccctagaggttcttcccgcagacccagtttggtgggaggcctctgagccagggagcccgggtcagatccccataggggcaagcgcctttccataaaatcccgccggtctcacggagctggtgtatgggggagagggcagacacctgggcccctctgttgccttcaaggctcaaccgagtttaagtctctcagtcccagcagggtcactgttgagggctggtggtgccactgggggttgcagggaaagtgatgggcttgggagagtgtatgagtcactataaagcaaggttgatataacagaggccctgcaaatgtggggggcagtctcctgtcagggaagcatgcagctggcggctgggtgcacctgttcattccagaccttctggatttcttgacactccaggctgctacccagaaggggcaagagacggccaggggcatgccacgattgtaaagctga

SEQ ID NO: 132013 - DNA, 1064 bp, Homo sapiens
tgcaggatcacgttgggcttggccacctgcccgccccgcggcccggggtaggcgtggagcccgccgctggtccggtggtccagctccatctgtgcgcaggtgctccggcaggcggcaaactcctcggggcggacagagggtggtccggcgctggggtccggcggcctgggtcccgtgcggagctgcggggagcgcctgtctgtcgctgcgggccggcggcggggccggcggagcacgcccggggaggcaggtccggctcggctgctgcggagggaggacgccgcgcccgagctctgcgctgagtcctggccgccggctctttatgcagccagcgaggcccgtgggcggccggctcgccgagcccggtttctcattggcccagccgcaggctccccgccagcgccccgcccgcgcccctgcaggccccgccctgcgcccactcggctcccgggcggcaagggacgggaggtcccaccccctgcacacatggcggggccaggatgactaatccctccgctccgtacctcccaccccggacggcggggctcattcagcctgcggggaccgagggactgagccgggcactgggcgcccctcccacgccccctcccgggcgctgggcgggctgtcatctgctgcctcccagggtcccaaggtggccttcctcctctccactcgcctctctctttgcggggctggagggggctggcgctggccactgctctcctgggtcctcactgcccctgaccccgcccacccagctctgcaggatgtgcagctgagcccgggaaggaccctcaccatcagcctctgtgcccaggggctcagcaagtctccatgtgagctcccagatgtggctttgagctcccactcactcctgcccgggtcctgagtccaggtcttgggctctgtgtgagggacgcacagccaggcagaggctcgctctgcctggccctggcgttggtgtgcatgggtgacaggggcccacgtggcagtgactggacagggctgccccatgcccccatacgcaggtctctggtgaggcccaatacttttctgtgttt

SEQ ID NO: 132014 - DNA, 1026 bp, Homo sapiens
ggggcagagagggacaggcagatggggagtggctttgctgggtttaagagctgtttagggggccagggctgagggggagctgggggtccccagtgtcaggttgccatcacggacctggggacgagcatgagggggacttgtaaggagccactggagtccggcctgggggggctggagcctggcgctcccccacactgggtccccagccaggccgtgtgcccaccccacacctccctggacgcccacctggcccagattgtgctgcaggaaccctgagggtggctgccccaaaatcaggacgaaggattcactgccagctggccaggccagacgcccccagagctgggggttcaggatgcccgtgccagggagggggtggcgtccaggactgtacgctgcccccaccctgatggctgcgctttcctgctgttctctgcatctccatttcaatctctccccagtgccagccaggctgccagcaaccccagctcacttccggagccataaaaggagagacgctgagaatagcgcggctgtgacgcgcccaggagctcctcacgcatgcagactctgcaccacccgcccgcccgcctgctctctgaggtgctggcctgaagggccccccgcccagccccagccctaccaggattggacaacctgggaccccggctgggaggtcaggagccaggggtcatgcagccctgccttggctcccgtatgacaccgcaggctgctgtgctcctgggatttggcatcaccatcccctgctcccaggccctgggcctcacgagggcacagcaccacgggaggggcaggcagcagagggcggcgggaggcacccctgtcccaagaggtcccggccctgcctagtggccctttaggctcccacaaattcccagggacccttcctgaggcagagggagttggctctgcactggacatggctcggggctcacagatggggacagtcattgcctactgagcgccagcaggtgctgggagttgggtcagcttctctccaaggtc

SEQ ID NO: 132015 - DNA, 1041 bp, Homo sapiens
aggggcgagaacagcagctgccccactcccaggctgctttgctgagcctcttgccaagttagggggacccagaaccacccagcctgaatctgagacttagccctggctgagctctacttccaggatggtgagggaacccaagagtccaggagcagtggtgggcagcagcagctcagcctctgaaacccacgcttgtcaagcttcccaaggacaacacttttttgcccttcttgtttctaattaaaaagaattagtcagcagagtggcatgcttatggacagtgccgagtgacattactgcatggctttattcatcaatgggaggggcagatgccgtcctactggagactggcacagaatcttgttctctgcgactatctgcttggaagcccaagccacctaccagctgaaccaatgactcattatacttttttctgactccttctccctctctctccttctctcccaccctcctttcttcaggtttggctggacccgccaagaaaaggcatcgtgcagaagcactgtacaggtattggaccccctcccccttacaggtgagcctgctgaggcagggaggggcccccagagaggagggggcagaagtgggcacagaatccaggagtgtgactcctcaattagggaagagcctgccacacaaggtgggcttgccccagacagagaggtccctgggaaagggaggtctcaggagcagggactcagctttgagctcaacctggtcactttccctctctggcctcagatttcttcaatggacactgggaacattaagccatgtcacctgcccagggtacaatctgaggacaagtggaacatccaggaatggggttgtcatctccactccatcctgactctggagaaaacaacactctctctcccacaaatgcctacaagaggccggagagacgaaaactgccttggcaatgggtcataccggccctcagccctggtctctctttctgggctgatagggaggggcctgagtccattccacagcctccatggaaggcagcctttcaga

SEQ ID NO: 132016 - DNA, 1051 bp, Homo sapiens
gtagggtctcactctgttgcccaggctggagtgcagtggtacattctcctcaccgcagcttcaacctcctgggctcaagggatcctcctgcctcaacccccagagtagctgggactacaagcatgcactgtctcacctatctttttaattttttgtggaaacgaggtctagctgtgttgcctaggctggtctcgagctcgtggactcaagcgatcccaaaatgctgggattccaggcacgagcccatgtgccagctcactcatccttaggtccgttgttacctgggctcccagcaccctcccaccctctggttcttctcttcctcaccctcccttgctggttccttactgaccaggccattctttggctctttttgttcaaccagtccccactccctgggtgatctcctccagtgtcatgccgttaaataccatccaacactggcaacgaccaaattcatgtctcctgccagggcccctccccagaaatccagactcctatgtgctagccaatgtctctgcttagctttgatcctccagcccagccttgctccatctgcattgcccccaccttcatgaacggcagctcaccttgctattcactcaggctcagcctcaacagtctccatccctcatatccagatcctctaccctcaaaatccagccagtgtttggcctcttctcactccctccaactgccctccccaatccacacctctgtggtcttgcctcctccccagtctctgtttctgcccttacccccatacagctatcaactgctgcatcaaaaaccgcccaaaacttagcagcttgaaaccaactgtttttattgcagatgattctgtggggcaggaatttggccatgctagagtcagatgtgtttcacagaggaggctgagtcacggagcataccaggcacatggcaggactggaacccaaggtccctggactggggctcccatggcagggtctcctgggacaacaaagtcctccctcccccggaaggctggctccatccctggtgcgactctgctgctgaagcagcatcattg

SEQ ID NO: 132017 - DNA, 1122 bp, Homo sapiens
aaagtcccgcggcttcggccgcggaggtgctggagcctttgcgctcagacgaagggccgaacggccagggccaggccgcgtcttcagagcctggcgagggtctcgcgctgctgggaaggcggagacgccggggcgcgcgtgcaccctcgcgcctgcagcgccgcgcacggccgccaggtgccgctgtggcgctcagcgcgccgcccgccccgccccagggaacgcgaaagtggcgcgggcctggacggcgggacggaccacgtagggcgctgagaaggtcgcgccacggtgggcggggctccgggcccctccccctcggccgccctcgcgctgtggttcgctccgggcgcgctgcgctcgtgagttcccaggaggcctggcgggcaccgtaaccagcgccgcggacaccggcaccggcgccacggactccgcaggaccccgcgcccgccgccgccgctatgctggggctgctggtggcgttgctggccctggggctcgctgtctttgcgctgctggacgtctggtacctggtgcgccttccgtgcgccgtgctgcgcgcgcgcctgctgcagccgcgcgtccgtgacctgctagctgagcagcgcttcccgggccgcgtgctgccctcggacttggacctgctgctgcacatgaacaacgcgcgctacctgcgcgaggccgactttgcgcgcgtcgcgcacctgacccgctgcggggtgctcggggcgctgagggagttgcgggcgcacacggtgctggcggcctcgtgcgcgcgccaccgccgctcgctgcgcctgctggagcccttcgaggtgcgcacccgcctgctgggctgggacgaccgcgcgttctacctggaggcgcgctttgtcagcctgcgggacggcttcgtgtgcgcgctgctgcgcttccggcagcacctgctgggcacctcacccgagcgcgtcgtgcagcacctgtgccagcgcagggtgagcggcccccgcccctggccccggagcacggcctttgtgggacctccgggggctcctcctagtccctggccccctcccctagggaaggcccgctgcctgcacctctttcggatactgctggagtcctgcctcttaccgctcccgcccc

SEQ ID NO: 132018 - DNA, 1327 bp, Homo sapiens
gggatcgtcctgtaggggtgtcctgtagggggtgccctgtagggagtgtcccgtagggggtttcctgtagggagtgtcctgtagaggtttcctgtaggagtgtcttgtaggggtttcctgtagggagtgtcctgtagggggtgtcctgtacagtgtcctataggggtgtccagtaggggtgtcctgtaggggtgtcctgtagggagtgtcctgtagggggtgtcctgtagggagtgtcctgtagggggttttctgtagggagtgtcctgtggaggtttcctgtaggagcgccttgtaggggtttcctgtaaggcaggtcctgtaggggtttcctgtagggagcctgtagggagtgtcctgtagaggtttcctgtaagagtgtcttgtagggagtgtcctgtagggagcgtcctgtagggggtgtcctgttcaggtgtcctatagggggtgtactgtaggggtgtcatataggggtgtcctgtaggggtttcctgtaggtggtgtcctgtagggggtgtcctgtaggaggtttcctgtagggagtgtcctgtagggagtgtcctgtagaggttttctgtaggagtatcttgtagggttttcttgtagggagtatcctgtagagaatgtcctgtagggagtgtcctgtagagggtttcctgtagggagtatcctgtagggagtatcctgtagggagtgtcctgtaggaagtttcctgtaggggttttctgtagggagtatcctgtagggagtgtcctgtaggaggtttcctgtaggggttttctgtagggagtgtcctgtagtggtgtcctgtagagagtgtcctgtagggagtatcctgtagggagtatcctgtaggaggtgttctgtagggacgccctgtagggagtatcctgtaggggggtcctataggaggtgttctgtaggggtgtcctgtaggaggtgttctgtaggggtgtcctgtaggaggtgttttctaggggtgtcctttaggggtttcccgtaaggggggtttgtgggggtttcctgtaaggggtgtcctgtagggagtgtcttcaagcagtgcccctgtacgggggtcctgtaggggtgtcctgaaggggtttcctgtagggggtgttctgtaggggcgtcctgtagagatgttctgtaggggtgtcctctaggggtgttctgcaggggtgtcctgtaggggtttcctgtaagggtgtcctgtagggagtgtcccgtagcagtgccctgtacaggggtcctgtaagggtgtactgcaggcggtgctctgtagggaatgtcctgtagatgtgtcttttatggggtattctgtagggga

SEQ ID NO: 132019 - DNA, 1030 bp, Homo sapiens
gtcctgtgtgaggaggagggagtcccgtgtgaggaggagggagtgccgtgtgaggaggaggagggagtcctgtgtgaggaggaaggagtcccatgtgaggaggaggagggagtcctgtgtgaggaggagggagtgctgtgtgaggaggagggagtcctgtgtgaggaggagggagtcctgtgtgagggggagggagtgccgtgtgagggggagggagtcccgtgtgaggaggagggagtgccgtgtgaggaggagggagtcccatgtgaggaggagggagtcctgtgtgaggaggagggagtgccgtgtgaggaggagggagtgccgtgtgagggggagggagtcccgtgtgaggaggagggagtcccgtgtgaggaggagggagtgctgtgtgaggaggaggagggagtcctgtgtgaggaggagggagtgccgtgtgaggaggagggagtcccgtgtgaggaggagggagtcctgtgtgaggaggagggagtcccgtgtgaggaggagggagtcccgtgtgaggaggagggagtcctgtgtgaggaggagggagtcccgtgtgaggaggaggagggagtcctgtgtgaggaggaaggagtcccatgtgaggaggaggagggagtcctgtgtgaggaggagggagtgctgtgtgaggaggagggagtcctgtgtgaggaggaaggagtcccatgtgaggaggaggagggagtcctgtgtgaggaggagggagtgccgtgtgaggaggaggagggagtcctgtgtgagggggagggagtcctgtgtgaggggggagggagtcctgtgtgaggaggaggagggagtgctgtgtgagaaggagtgctgctacgtaagaaggaggtagatgtgtggggggagagttggcattcggcccggtcaggactccatggcccttgttacagttgtgggtagaaatggaatctctgtgacatctcctgctcccctttcacctgccccaaggcaggtctccagtactccctctcctttctgatcatgggcccaaagaggc

SEQ ID NO: 132020 - DNA, 1699 bp, Homo sapiens
cccggctaatttttgtattttttgtagaaacaggaggtctcactgtgttgcccagggtggtctcaaacccctggcctcatatgatcctcctgccttggcctcacatagcatggagattacaggcgtgagcccctgtacccagccccagactagctaatattatgactgatcaccattccccattccccattcccccaccccaggaccactggcagaggccactcactctgccttcttttctgtggttctgagaaggctgctgagtttcctcctcttgcctgtgcagccccctcctgccaggtttcaggagggagatagcctagagcatgtctgcactgagtgaggagtgggtcaggagagaagcagggaagtccttgtgtgctggcaggtcccttcccctctgctgtctgtgtcctcatctgcaaagtgggggtgcatggtcttggggaggagtgaggcaccacccggccccctaaccagtgtgtctctccagagcaggacaggctgctttggtttgtgacctccaggcaggacggccatcctctccagaatgaagatcttcttgccagtgctgctggctgcccttctgggtgtggagcgaggtgaggtgcccttggggaccccagacctttgtccagctgtgccctgctccactccctctccacccctctcccctgagcagacgccccaggggtccttccaggccgctcccagcagagggctcacccggcctggccacactgtctcactgtgtgtttgagtgtcgcttgacctgctcgacggccagggtggggtgtcactgtctttgctctgccttcagcccagggcctggtatacagtaatttctcagtaaatgtccactggggtcaggcctgggagggacactggaggcttccctgagacaggtgtgtcctccttccgcagccagctcgctgatgtgcttctcctgcttgaaccagaagagcaatctgtactgcctgaagccgaccatctgctccgaccaggacaactactgcgtgactgtgtctgctagtgccggcattggtgagtgccaggcctcagaccgtgccttcctcccctggccatctccctagcccgggccggggctcagcagaggccattgctgtctgtctgcagccgtctgtctctcccctgacagcctcatttcccatgcagggaatctcgtgacatttggccacagcctgagcaagacctgttccccggcctgccccatcccagaaggcgtcaatgttggtgtggcttccatgggcatcagctgctgccagagctttctgtgcaatttcagtgcggccgatggcgggctgcgggcaagcgtcaccctgctgggtgccgggctgctgctgagcctgctgccggccctgctgcggtttggcccctgaccgcccagaccctgtcccccgatcccccagctcaggaaggaaagcccagccctttctggatcccacagtgtatgggagcccctgactcctcacgtgcctgatctgtgcccttggtcccaggtcaggcccaccccctgcacctccacctgccccagcccctgcctctgccccaagtggggccagctgccctcacttctggggtggatgatgtgaccttccttgggggaccgcggaagggacgagggttccctggagtcttacggtccaacatcaggaccaagtcccatggacatgctgac

SEQ ID NO: 132021 - DNA, 1050 bp, Homo sapiens
gtgaggctgggagggtggtgcccgctggtccgggtggccaagagaggctggaaggatggtgtctgctggtcagggcggcccaggaggtgctgtccaggcggagcccggggctggtgtgggtgcgccatgctcctgagaagtttctgggttgtggctttaatgttctcctgcaataagaacgctgacacttggctgaaaggtcctcacgtctcccccagtacacttctgagatgccaggaaggcattctgaacatcaggctgattcctgggactcccctccagggtgacctcaccggagtcaggagcccccgccccgcgcccactgccccactaggatggctctgcagtggcctgaggacagtgaacactggggtgtaaagttgcccactgtgatggttttgacctttgaagaaatttgggaaccaagtgaaagcccggcagctatttctaggcatttcagagggtgcttccctgcacgatttcagagggtgcttccctgcacgatttcagaaggtgcttccctgcacgacttcacagggtgcttccctgcacgatttcagagggtgcttccctgcacgatttcagagggtgcttccctgcacgacttcacagggtgcttccctgcacgatttcacagggtgcttccctgcacgatttcacagggtgcttccctgcacgatttcagaggctgcttccctgcacgcactctgccgcacaccacactccctgggccaggagcctgctgcacagaaggaggttccttttcttctctttccagcgcttttcttctccttttcttcatctctgctcctcctctaactgaggaatgtgcgaatcttttttgttagttttgaggctgcttcttatgcatatttcatctggaacttcttgctttgggggtgatctgctctaccagcctgaaaaggatgagaaatatcttctgaatacatgagaagtgcggtgattacccggttcctctgttggtaaagaccacactctgaaagcaagaagatggcttaaatttgggttgagtggaaacaggcacctgtg

SEQ ID NO: 132022 - DNA, 1028 bp, Homo sapiens
tgtgtctgcatgtgtctgtgtgtgcatctctgtgcgtgtgtctgtgtgcacgtgtctgcgtgcgtgtgcatgtctgcgtgtatgtgggtgtgtgtttgcctctatgtgtgcgtgtatgcacgtgtgtctgtgtgtgtctgtgtgtgcgcgtgtgtgtgtctgcacgtgtgtgcatatatgtgtgtgcgtgcgcatgtgtgtctgcatgtgtatgcacgcatgtgtttgtgtgtgtgtgtgcgcgcgcatgtgtgtgtctctgtgtgtgtgtgtttgcttttggggcggtttaggacggtggggggtggtgcacaggtgcaaggatgccccccaggacacaggcgcacgtgcacacccatgagggagggaggcaccctgtgccacagagccctaggagtggaccccgggctgccgtgggcagcagggtttggccttacagtctgaagtcgatgcttctggttacagcgaagctgtcactgtccccatgatccccctgggcctgaaggagaccaaggagctggactggtctacaccgctgaaggtaggtactggcctccaagctctgagatacacggccctgccctgggaccaagggggtcttggaggctttctggtccagctgtctggttgaacagatagggaaactgaggcccagagggagggaggcttaaaagggacgcaagggacctggcagaaatggccacagggacccagcctctgctgcgttcagggccccgctggtgcctgcgccccaggccggggctgatcccatagagtgggtgtgaacatgtgccctaccctcggatgggcaatgccctaggaggatggggcctggaagccccagccggagcacagggtacaggctcgcccatggagggcaccactggcttggggccacacacccagcactggctcacgagggtcctggggagagctagaacagactggcactgcctggcagggccccacgggagccactgactgtgttccgtgtccgagtcactgagtggcagatggcacctgcctcc

SEQ ID NO: 132023 - DNA, 1047 bp, Homo sapiens
catcaccctccctttgcccctggccccccacacgcctcaggtttctgcgttcttcaacgccccctttcctgccccaggtaccatgactagctcctgctcctgccccagccgggctcgctggccactcagctctggagctgcccttttgaaacttgagacgggctgagtggggacagtaggcagggcccctgagggtgaagggcagcagcaccactgaccctagctagggagcactgggctggacgcaaagcacaaagcgaggagtggggggggctccagcctgggggtgcgagggagcggaagccttgggtcctcgggtgggagtctgcggctgctgggccatctgggagagtgaggacgaggctgctctctggtgctcaagagtggggcaggtctggctatttggggctgggcggctttgggacatccctttttaaaccaggatggctttgtcaccacctcaggtccccagaatttctgagtgatgtcacctctgcctcttaactgcagtgtccatttcagcatttgccctgtaggaaattggatctggtctgggaaggatcatgcgcgtatttgaggaacccgggaaagccgccctcagcaggctggtcctgccctgcccaccccgtgatcctgggtgacctctgtctgtaaaaggcaggcagggctgtgtcaccggagcagaccctcctcctccagatggcaccccctccccgcctcatccccttggctctcaggcctggcagcactcggccatgtccagccccaaggtccatttccttcctgccaccaccgcactcccaggccgccctcccaggccgtggtgtgcggtttcagaaaggcgggggtggtgcttatgcttggggttttgaggagcatctgatgaggcacctctaaaatttagagtaacagacactagccaggatctgccagcgccagcccagggcttcagggacaggtgcccttcccccagacctccacagctgcagtgggcagctgggcagatgcctccgccaagcgggctttgcccccacaccttctctgctg

SEQ ID NO: 132024 - DNA, 1197 bp, Homo sapiens
tggcagctgggccaatggcccgtggtcacccagctggagtgtgtacccaccgcaagtgctgctccctgtcccccttgggaggccaggcctgggctcggcccctggcactgaccatcagagctgtagtctgtcctggggccaggtttgacgggcatttcctgtctctgcaggtccctggtgctgaaccgcctgcgtccagttgccagcgggggtgggaaagcccaaccgggctccccttggtggcggagcaaaggctaccgctgcatcggaggggtcctctacaaagtatctgccaacaagctctccaagacctccggccagcccagtgatgcgggcagcaggcccctcctgcgcacaggtgagaggtgagggcgggggcgctgggagatgacaccgaccggctagcgtgtggtgggcattgcaggccagaccccctaacctccaacatgctgtggctgctctgggccttggctcacgcccctgtcttggggaggaggtcaggggcctcatgctcccagggagccagtccaaacaagcacttcccaaatgggtcacgtcccatcctgggagttaatttcactcttccatacacccggcgccttcgtagccatccctagtgagaccaacagggcagccggagaatggagggtgccaggaggccttcctctgccatcccccaggaagggccctggagtggcgcccacctcgcgtggctgagcggcccctgattttctgtggggtgggggagagttgctcacaagcaccatgtttcgcttttggaaaaaggatgatgccaggtacggcaaacacgcccgggcgagcgcacacctggggccgcggcgcccgtaatcgcattggcgacgcctcgacaactgtgtctggaggcagccggcgccgccaccttgcgccctcccagcccagggaaacaggctcaggagaaggaaatgctttggattcacttatcctacaaattaactagaaaaatattttggtttcagtccaattttaccccctttcttgtccatcaaaaaaaaagagggagattgcaggtggtgttgggattgcagaggctgggccatgctggctccccgacccgcctgggacctagagagagaacaggttcagcccctggaggaggtagactccgacggcagggtctgcgggggtcagaggagaggcaggaagcgtacctccctg

SEQ ID NO: 132025 - DNA, 1001 bp, Homo sapiens
ttggcaaggcgcttgatttaacagcgtgggagcctccaccggaaaaatggcttgaataaatcaccgcctgacgccagaaaatagatataatctcagcattaactacattaatagtagcaggagccgaattaagaaagccataaagcataggcgggcgggcataaattatggcccagctcagtaccctcagtgctctggcttgcctggggcggtcctggggcgggacaggggcaaggcgcccccttgcctgcggaggctgcttccagccagctcctcccctggcccctctcccctggccagggcggtgggcggggccaggcggtggtgggcggggctccgtggcccagccgcggtgggagggcgcatccccccaaaggttggctgaggggccccagctccctcctttccattggctgcttgtcctccaggactcccccaccccaccctacccagcttcttggaaccaggccctggctgagcccttcccacctggggcgtcccctgcccagtgggtactagcagtcatggagagtggcagagcaaggataggattcagttagggcataggtaccagacccagctccaacctttctctggtgtctgcagcctggaaggctccctgcaggcaatgacatttggccaggtagacacaagctgatccccacccaggccccacctcactcctctcattgctggtcttaggcccttcccagagaagcgccttcatctggatgaacagtcctgggggtcagcgctgccactggcttgggggacagagggggcatgactgctggcccttccgggcctcgtcagcgtcagcagccacgggcagaaacatggacagcggatctgaggagggtgccatccaggcttaactttaattcttggtcaagttcaacatggtttgtgttccctattcgcttgtctccagctggcttgtttcttatggattcatggaactccaagtgttcagggggagtcgcctttttgtcattttcctc

SEQ ID NO: 132026 - DNA, 1124 bp, Homo sapiens
atttttataattttttattttatgaaacaggacagggagcttagtgacttattactattcatttcgtttcaatgcagtaaatattgattcagttgggggttttcaatttaaaccactcggcgattatataaaatattactggcctctgaaattatgcttaccgatcccttcggctgctcattaaggaaggagtgcaatttttagatcccttttgccttcatcattctaataaatgggctgagatacggttttgcacggaaggtgccacagaagctgctagcaggggcttgacagcatggatgcaactcttaatttggaagttgtttcaaagtgtgctgtggttatttatttatttctctgtttgtttgaggcaggcaggcctttcggctttgtgagtggagtccttggcagtgcccatggcagcagggctgagctggcatccccccgagcctgcataccttccaccttctccaggtgtggccgagggccagacccctcctgcagcctcggccttggtggtttggggtagggaagagggaggagaagccagtcttgccagggcctgagctagcccgcatccacaccgaggctgggatgtccctgagggacaccgctgatcctctgggactttttccggacaaagggagagggactttttcctggagatcttagaccccagcccttgctggcaggcagggcagatctgggccaggacacaggaccctgaggagggagcccctgggccaggacacgggaccctgaggagggagcccctgggccaggacacgggaccctgaggagggagcccctgggccaggacacgggagcctgaggagggagcccctgggccaggacacgggagcctgaggagtgagcccctgggccaggacacgggaccctgaggagggagcccctgggccaggacacgggagcctgaggagggagcccctgggccaggacacgggagcctgaggagggagcccctgggccaggacacgggagcctgaggagggagcccctgggccaggacacgggagcctgaggagggagcccctgggccaggacacgggagcctgaggagggagcccctgggccaggacacgggaccctgaggagggagcccc

SEQ ID NO: 132027 - DNA, 1004 bp, Homo sapiens
ctggctgttctgggaacccctgggagggaggagaatagttgtgtggctcctgggctctctcctctttcctctcctaactagcttcttgcgtttaattttttgggataactttttgttttgatatacttttacagaagttgcaaaaataccacccaggacttccttactgaaactcaccagttgtttatatgatattttatcgcatttgcagtattgctttctctccctttataaacgagcttttgcacagaagcggagccctggtgcccccggagcctggtgctttggggtgtctctgtgaccatgcacagttctccagtgcaggaagggctgggagtctggacaagagaggccagctattttgtgcactgtccttccactgggcttatctgatgtctttttgtgatgagatgcagattcgcaattttggcgggaaagccatggcagcactggtgtggcctcaggctgcctggtgcagcagtgttggcctgaccgctgggtttaggccatccggcagtttctctgcggagcaggttactttgggcaattgttggggaaaagtgtgaggactgagggagcatcctgtttcttaccggacttctgtccactcattctagatgttgggataactttcccacccctccttccatgctgtgagtggtggctttccctgtcgcctttgccctgcgtcgttgttgatttgctttaacggcgtggacccaggagtcttactccacttgataggctgtaatctgctctgttattctggttctcaggtggtcccagccttggctggtggaagccgcttgaggctggcctgcgtccctttgatgtgtcctctcattcctgggcacgtcatcacgttctgcacggcaggtgctccaggctcaccgtggagtcagctgtttctctgcagaaccccggctccttggggggcagtggctctcggccctccatggccaagaatcatgcagccacaggtgtcagtggtgctaaggtcttgg
